United States Patent Application Publication US 2015/0376612 A1 - sequence listing, part 46

SEQ ID NO: 109323 - DNA, 2509 bp, Homo sapiens
gtagatttattttttaacccatcattacccatctctttctgtccctatcatatctgcacctaggatagaattatatttaacagtaaactgttaatttaggtagagtaggataactactacaaaataatcaaaggatatgttttaaccttggtcttgatgtaagaagctaaaatagatttttggttattggtttctatttgcttacagttaaatgaagtagattcaagtcaggattttttgttttactctggagattctgttctcctactctttctccttgagtagatagtcagatgtcttttgaaaatgtgttttcggtgtggaatattaacccaatctttgataactcttccagaaccttcggctcgcgtgcttctgagctgctgtggatggcctcggctctctggactgtccttccgagtaggatgtcactgagatccctcaaatggagcctcctgctgctgtcactcctgagtttctttgtgatgtggtacctcagccttccccactacaatgtgatagaacgcgtgaactggatgtacttctatgagtatgagccgatttacagacaagactttcacttcacacttcgagagcattcaaactgctctcatcaaaatccatttctggtcattctggtgacctcccacccttcagatgtgaaagccaggcaggccattagagttacttggggtgaaaaaaagtcttggtggggatatgaggttcttacatttttcttattaggccaagaggctgaaaaggaagacaaaatgttggcattgtccttagaggatgaacaccttctttatggtgacataatccgacaagattttttagacacatataataacctgaccttgaaaaccattatggcattcaggtgggtaactgagttttgccccaatgccaagtacgtaatgaagacagacactgatgttttcatcaatactggcaatttagtgaagtatcttttaaacctaaaccactcagagaagtttttcacaggttatcctctaattgataattattcctatagaggattttaccaaaaaacccatatttcttaccaggagtatcctttcaaggtgttccctccatactgcagtgggttgggttatataatgtccagagatttggtgccaaggatctatgaaatgatgggtcacgtaaaacccatcaagtttgaagatgtttatgtcgggatctgtttgaatttattaaaagtgaacattcatattccagaagacacaaatcttttctttctatatagaatccatttggatgtctgtcaactgagacgtgtgattgcagcccatggcttttcttccaaggagatcatcactttttggcaggtcatgctaaggaacaccacatgccattattaacttcacattctacaaaaagcctagaaggacaggatactttgtggaaagtgttaaataaagtaggtactgtggaaaattcatggggaggtcagtgtgctggcttacactgaactgaaactcatgaaaaacccagactggagactggagggttacacttgtgatttattagtcaggcccttcaaagatgatatgtggaggaattaaatataaaggaattggaggtttttgctaaagaaattaataggaccaaacaatttggacatgtcattctgtagactagaatttcttaaaagggtgttactgagttataagctcactaggctgtaaaaacaaaacaatgtagagttttatttattgaacaatgtagtcacttgaaggttttgtgtatatcttatgtggattaccaatttaaaaatatatgtagttctgtgtcaaaaaacttcttcactgaagttatactgaacaaaattttacctgtttttggtcatttataaagtacttcaagatgttgcagtatttcacagttattattatttaaaattacttcaactttgtgtttttaaatgttttgacgatttcaatacaagataaaaaggatagtgaatcattctttacatgcaaacattttccagttacttaactgatcagtttattattgatacatcactccattaatgtaaagtcataggtcattattgcatatcagtaatctcttggactttgttaaatattttactgtggtaatatagagaagaattaaagcaagaaaatctgaagtattgtcttgtttttaaaaaatacagttcctagtgtttttagaagtcacttaatttgtctcatttttccacctggaaattaggaataatgtagaatgcaaggcagtaatttccttttggaaaggactctgaaggcagaaaagaagggagagaacctcatgggcagaatattataaaaagagtgtcatattccagcatttgaattggaaagagaagagtgaagatccaagttgcattattaatctgccctgtgttttttccttttaacaatcagtttgagctgctgctgttatgagtttctcatcaagatgaaagccctaatatgtaaagtcaaatccgatttaaatt

SEQ ID NO: 109324 - DNA, 1012 bp, Homo sapiens
atccttgtttcctgactgcccagttattcctttacttcaccaccttttatcatattggactcatactcagctaaactgtaaggtctgtttaggctgctgttaaaatggccccccatcctgcccttgtgcagctggtttttcgaactctgacataggacaataaatgtgttcccatcaaatttcatcttgctgtctttagctttttctcacctgttaaaaccttttggattgtaattacatcttttaatgaatttgtcattttttttcctgcctacaaaattgaataagcccacgttctttaattagaaatatgaaatgagaaaaggctaaagataggcctgtgatttttttccccagtttgacaaagatgctccagtcaaccttagaacatcagcaggaggacaagtctctggcacttttgtggaacactattcccagagtccagcacaagcccaagaaatgtttcttgaacaaatgactgcatgaaaaatacactggctatgatggatcagccaatttttaagccatctagctactattattactcacattttcccattttgttcagaaggactttaagtgtccagctctctttacagagaagcttgattcttaggtgttacctgcgagttaccttgatcttctattgaagaaccctattgaaaatggggcttaggatagtcaaacagagcattctcagtgaatctcttctagctcctgatggtcattgtgtttgtgtcataagtgttcactaatgtttacagagtctcagcaacttattcagggttatttggaatacagatgcattaacattagtcccttcaggaatttctccattgccaaaaagtgaacttgttggagaggacttgttgaaaactgggtgagcatgatttgcatggaaattggactaaacttccctttctttaaagttcctggtttagccactcgaatagctggcattacaggcatgcaccagtatgcctggctaatttttgtgtttttagtagagatg

SEQ ID NO: 109325 - DNA, 1849 bp, Homo sapiens
gcccctgtattacagggttattctttatctactgcatctttgaagattgctttgtttcttttttttgtttcttttttttgagacattgtcttggtctgtcacccaggctggagtgcagtggcgtgatctggctcactgcaacttccacctcctgggtttgatatgcatgcctcagcctcccaagtagctgggattacaggcgtgcgccaccatgcctggctaatttttgtatttttagtagagatggggtttcaccatgttggcgaggctggtcttgaactccttatctcaggtgatctacccgcctcagcctcccaaagtgctggaattacaggtgtgagccactggctggcccaggttgctttgtttctgttatttttttgaaaagggcaaagatgctgtggcctaacttgaaggcttttgtttgtttggcatctaaaaaaaaatttagtgtattttaaaaatctaatgtgaaaaatttatcctttatttattaaagcttgtgctgtgagtgtggtgttccgataagtccaaatcctgccaatatttgtgtggcctgtttgcgaagtaaagtggacatcagccaaggtattccgaaacaagtctcgatttcgttctgcaaacaatgtcaaaggtacagtgcggtacaattttgctctttttaaagttggaatttacatttagagaaccaccgagatatgctgagattacacgaaggtatatggagtaaagtgcatgcaattaaggtttaaattttctgttggtgtcgccaaagattttagaatttgcaattttatagtgtacttttctagtgtgtccttctaatctggtaaagatagtgtaaatgtatttgaatctgttcttctgttaaaggatctaatagatttgatgtatatagttaataggagttgatgtttgtaagggtgagagcagattattgaggacatattgttattatgaggtttttttttctttagttattagaagccatgtatgataaaaagcttatgtttggagtaatttagtaatatgttttaaaaactcataacattcacgtgtaattaaaataactattgttgatggaaaagaagctcaataaattatatctggaatggtctgaaataaagattggatttgaaggaagaagacttcttctgaatgttaatgtttcattcctcttgattttctttgtcagcataaacaacttacatctattaggccattgagtaacacaaaactgcctaatgagtgtaaaagtgtatgcctgttatttccaaaatggattaagacgctaactttttgagtgtgtatctctagaggggtggttcatggactcctttgagaatttgaaaactgtatctcttccccaaaatatttacatacatgtatatatatgtgtgtgtgtgtgtatatatgtaaaaatatatatgtgtgtgtgtgtatatatacatatatatacacaaacacatgaaactgtgtactgtttcagggagtttacagtgtataagcttagcaagtgtgaggcttaatcttttataaatatttgctattaaaagcctggtggagttagaaaagtactgataaagaactaaacagacttagtttgtcttggcttcctcacaaactagctgtttgaaactcttagctgtttatcatctctgggcctcaatttcctcatcagaatgaagggttttattaggtgatatgtgaagccctttctaactctaaacgtttactcataggccaggcttggtggctcacgcctgtaatccaagcacttgaggaggctgaggcgggtggatcacctgaggtcaggagttcgagaccagactggccaacatggtgaaac

SEQ ID NO: 109326 - DNA, 1058 bp, Homo sapiens
tgtctctactaaaaatacaaaaattagccaggcgtggtggggcacgcatgtaatcctagctactcgagaggcaggagaatcgcttgaacccgagaggcagaggttgcagtgagccgagatcatacactgcactccatcctgggggatggagcgagactctgtctcaaaagaaaaaaggaaaaaaaaatacgaaataaatatgtacttataaacaaagggagacctgtgtaatgtttttgattgaaccttgaaaagtgaaagtcaaaactttctgttatgtaacaagtatggcaaaaagacattcacataacatgtttggaagtattttatatttagcaagcatttattgaacacctactataagatgtatgtggcatagtgctaagtcctgggtaggcaggactaaaaaccttaaagcacatatgtaagagatttaagttttgttttagtctggttttacccaagattttaaatgttgttttacaatttacaatttgaaaaggacttgaaatgtagatgaatagactgaactattgctgatttatagtgttgtgaggtactaatgtaccttttttttgtgaaaaataagcagttctcaggcattttagaagtacataataaaccattttaatgccattttgagatgattctcacctgtttttcagagcatagctttaagagactcttggacattttagtggtgatttggtgattaaagtaataagatcactttagtaggttatttcagattgactttctcagtcagaattttacctttttaattaaagctgctagtctagttgaaagttttggaaccattaaaatatgtttgagttaagtgcttcatatcatccttgggttttattatgcctggttaataatttgggttatatctgtgtattcagatggaaatttctgtgtttcctgacagatgttggatttcagtatgttatcttctcttttaggtattttcaaccaccaggaacttggatacagtgtgctttagaatccagggaacttcttgctttgtgcttgaaaaaaatcaaagcccctctgag

SEQ ID NO: 109327 - DNA, 1881 bp, Homo sapiens
ttggaattgatagtttggagggtttgcagttactggtaatagaggcatatgagtgactgagataggaaggtggataatattttgggagaagaagaactcaaagaatggagtgagaggtcagggtattgtggggatcacctgtgtggatattgaaatcgctaggtattaatattgttggaaagtgtgatggtgagccagaagctaaaatcttttgagaaatgaaaacaagtgatacaaagatgaatagattactataaaaaagagagttgcgggtggtagagtctaatgactttagacttagagctgggtatatttgaggaggagacaaggagaatggtctgtaattagcaatgaagagcaaggacgatagctgtctggtgcctggtccagtgataggaagaatcagttatcactttatatagctgcaggggagagagaaatcaggagatctagaaggtgaagggaatgttcagcaaagttgaggatttaggagatttcattgttaatgaatgttgagctccggagggcacagtagaagggttttaggattcggggaggagtgttagatggggacagaatagggaatatgcataaccatatggaaattggagtatgggaaataggggtgactgaggtgtctgggactatggtaaagaaagaaagggactaataaagttgattagtcatggttgtctgaggacacatagtgcagtggttgtgttggggaatgccgagcaggatgtcaaggagactctccattcctgcaggtggaggttggagcttgaggggaagatcagtcttattcagtgcctttggggctttttttttttttttttttttaaccactgctgatggagattgaaggaataggaatctgcctatcaccctgtgtacctggcatcacttgttaactactaggctttgttttagggaggccagctatatgaggagggttttactctggtgtgttgaatctttgcatctacactaaaagtggccagtctactttttaccagacagtgcttgataaaagtataatctgctgctgatacctctcaaatctgttaactgcagcccaaatttttttatagatctccagaccaattgtatcttactgttcactgaaaagtcctcttgggtatctcacagatactgtcttaaactgaaatgtctgaaatcaaatgtaacatctttttctcattatatccattgtttatttcggtataggtagtcacaaaaagtgtactgcctagttgtctaagcaaatacttgagcatcattctggagtctgttctcttcctcttttccatatccagttaccattaaatcttacagattttttttctgcatcacttggactgtgcagataaatcttacagatttttatctcctaactagcccttgcatctgcttttgttatttccagtgcctctcagttcagatcatctacaatctggcccaggttattacagcagcctccattcttgttctcccacccaccccttctccccaaacacccattctggccattcttgagttatattcagatcttcacatatagcaaactgttttggcctatgcagatgctgcagatttagtagtgagttatagttgtggatttagtattcagtgcatgcaacttctctaatcaatgtcacttcttaaaaaaagtcacagaatatagagagaataatccaagtggaaacttttgttcatgaggttactaataaataatgaggtcacaaggtctttgctttcctccaaaaaatataatttccttttaaaggacaatgtactttttttttttttttaagggaaaagaatttttttcctatgcaaatactttaatttttgcttaaattatatcagttgcattaatat

SEQ ID NO: 109328 - DNA, 1074 bp, Homo sapiens
ctctactaaaaatacaaaagttagctggacgtggtggtgtgtgctacttgggaggctgaggtggagaatcacttgagcccaggaggcagaagttgcagtgaaccaagatcgtgccactgtactccaggctgggcaacaggcagagtgagaccctgtctcaaaaaaaattatatatatatatatatatgtaaaatatacacagaatattctcacaaccacttcagctaaaggaaaatttgaaatgctaatctaataaatcttaggaattaaatctgtataccgttcttgaaatagtataacttgtttttatgactttaaatttgaggacatttgattgatgtcctcaaagcattaatggaaaaagttttaaattaaatattaaaggttcttctttaaagaaaatatttgttattaaacaaaaccaaaagaatgaaggagtgtaattgttttatcaggtgatgaatggtgctatccttcaacaagtgtttgtggtggattatgttgttcagtcccaaatgtgtggagattgccatagagtagaagctaaggatttctggaaggctgtgattcaagtgaggcaaaaggtaatgagagaagatgatgagtgagtcctacatcttatatttcgtctttgttaattataacttttccttctttctaaatccagggatagtctgggtccctgaagcattcacctttggaaatagatcattattacattttagataatctttaaagattgttattgtttgaaaaatcagtatgctctatctgtagatagtatgtgtgtcctatacctataaatggcttttttgtggggcatttattgatcaaataatttatattttagactttgcataaaaaaactttctactatctggaacagttaattctgaaatatggaatgcatcagaatacacttcgtatcaaagagattcatggtgagttaaaactcaaaagcatttgaaattatgtcagatttttatttcaacatacctaagtaatcttatatttactgataatatctggattagtactgtccaaaagaactttctgttaggaaaaaaaaaaaaa

SEQ ID NO: 109329 - DNA, 1466 bp, Homo sapiens
ctacttttatctattatgttagttttttcaaaaaactatttttagttttaaacaatctttttattaattttgtttttaacactaattccctcaactctatttagttctgttttgttttaattaattgaaagcttagtttatttttaatttctaatacatatatttaagatcataaattttcttctgagtactataatgggtctgtagctggtacttatagctacctttttccactgcccattgcatattttatttgccctcagcaagcacctcagctgtttcattcttttgggtacatacttaggtgtggaattaccaagtcatatggtaaatttatgtttatatataaaaaactaccaaactgcttcaaagtggctgtaccattttacattcctgccgccaatatttctctgtatcctcctcaacacttgttcttatatttttgtttatagccattctagagggtggtatgaagtggtatctcattgtggttttaatttccattttgctaatgactaacgatgttgagcatattctggatacaagtctcttactgcatatatggtttgcacatattttctcctagtgtgtaggagaaaattcacactctatattcttaatggtgtcctttgaattgcaaaagttttaaattttgttgaagtccagtttatcaagttttttcttttaattgtggttttggggttatgcttaaaaactgtttgtctaatcaaggtcacaaagattttctcctatagtttctttcaagtgttttatagttttaggtcttatatatttaggtctaactcttgagttaatttttgtgcagagtgtgagataagtgtctaaattcatatttttctatgtggatattcttcatcccagtgaaaactctgtcctttcctcagtgaatgccttgggtcttctgtcaaagatctattgactgtaaatgtaatggtttatttctagaatctgaagtctgctcccattgatctatatatctatccttatattagtaccatgctatcttgcatacttactaaagttagtgagttttgacattaaatgtgtaatgttcattttcttcaaaattgttttggctattctgggtaattttagtattggctgttttggtaattatatttagttatttgcaagaatatctttaatatttctcagctaggtaggtttgcttttggctattcctttcttgatttctagtgctactgttttatgatgagataatgttgtctttagtaatttctactgtttaggatttattgaaattctttttctttttaaaatcttaatacatgatttttaaatgaatgttttatgaatgtttgataaaatatgtattctttcttagaactgtgttctataatctcagttaactcgaccttgatagttggttattcaagttctgtgaattgttactattttttgtcaatatgattattttggttttg

SEQ ID NO: 109330 - DNA, 1623 bp, Homo sapiens
ttttattttcatttgctgatttattttgtctgtctttttgccaaagaagtcttaagtgatatctctaatctgttgtgactacaatagagttttctaataatttgattttgtttaaaacagatgtaatttataatatagtcatgttagtagaggagaatcctattttgcataattattttcatagggctttttttttttttttaagatggtctggatttttattattcctcaaaacaacatgctcagaagatggtcgaatttcttcagtgtacagttccctgtaggtatgttctgaaccttgaatgtgactaaatctaaggacttgggaatggatgcggatcacatatattcttcaggctcagacaacttctctttatttaaaatcgtagtagaaatacttacacaatcaggaagcatatattgggttaaccacccactcacagaggtggtaggacttgtgctccaaagatcgggaaattttcatagctggagtttatattgaaaggtactattagtgtgaacaaagatttgcagtgggcgttagtatggcttttaataatgctatatagaaagtagattggtctgagccaacagcatgttctagaggtttggtggaaaaggttcaaaataggtagggcttagttagaatggtgaaggttttgacatgcaagtgcaggacagtaggttttaccagaggaggcatcatgaagccattttagaccttggacaatgatggtttgatttaatgaaaattgatattcctgagtccatacaggttaatgatctttgtctttatattactactaacttttttcttaatagatacaaagcatcacaaagactgatctctcaagatatccatagtaacacatacaattacaaaagcactttttctgtggaaattgttccaatatgcaaggtacttttctttttcatttaatccatatctgtaaaagagtacaagtaattaattggcttatatgtaatttgtagctcctggttttcctctagggttggttaaaaatttagaataagttccttaagtgacttctaacacattcagccatgttaaaagatatatatttttaaaaaagtcatgcttataattatgaattgacatgccttttattttggtgtattaaaatgaaaagacctggttatagttgataaaagtccgtattctttgaaatttgtgatcctatgagcctgtatcatatagttcagtgaaattgaataaaagaaatgacattaaaatcaatattagtgagccactttgtggaatatgtacaaacaaaattttggcaagaaatgaaagaatattgtgataatgtgaaaatgagatcatagaatcatttttatgattttaaaacataagctgaataaaacatttaaaatgtagattatttcatttaattgtactaagataaaactctgcttcagaaaaatatgaattaaaattcaataaatagttattgagtatctatagtatagaaggctgtgtactgaggattgtataactacaggtctctgccatgtaagaatttatatgtcagtattaaatcactaagaatgataactgccattattgtgaccattctacataaagttaatctagatacttta

SEQ ID NO: 109331 - DNA, 1011 bp, Homo sapiens
gacattctttacctatctggtagaactaggctttatttcccataaactaagcagctaaggtgacagatacgtttctaaaataaagtgccagcacgtgaaacagctgtaccactgattggctctgatcttacttaagaggcacttagccctgtggcattctggttatagtaactatttaagatatgtttgacatctgatatatttttcttgtgctttgagaagtttgggattggtttataggagtaattgatgaccctaaggagtgagttgacactagttctgttgacctgccacttcccagttggtatctaccagtttattcttagttaatacatttgataattgaaatatataatttttcttatgtttttgtgttctatccttatttttagtggcagatattgatgggagcactttctggagtcaccctttcaatagtttatgtcatcccaaacagctagaggagtttattgtgatggaatgcagcatagtccaagatataaaacgtgctgcaggtgctggaatgatatcaaaaaaggtaagctacatcctgcctgccagtgtatttttttttcccctcagttattattgtttcagtccctcttttaaaaaaaatttgttggtgtttccacagtatggaatccaaacttagcaccacattaggaaaaaaattctttttttttttgtctttttaatatgtggtcattgtggaaattgttagacttagactgttaagttaatttattctcttttgtgtaggaaaaatcttttaaatgtttattccattatatttaaaaaaggcatttctttgctttatttttatagaggaggacctttatttttgtagtggttatcttgacttttaaaaagtcatcaccaaatactaaatacttcagtgtgcatctctcacacacaggaatatttttctacataatgaaaatgttgttaccatacctataaaacatacagtctacacagtattctgctcttatccatggggatacattccaa

SEQ ID NO: 109332 - DNA, 1023 bp, Homo sapiens
tgtgtcaagcaagagtttgcttggaatacgttcttgctttaagattcccctaccttttcagttattttgttcactctgcctatgttggcccatcttcctgtgaaaacatttcttttgaaaattctacatatatatatttttagggacattattaatgttttataaaagtcttgaataaaatcttagaaaaagtcaatgatttatttttatgaattgtttgtgagtctttctatactcatgattcagtaatttgttaattttgacagtgtttcatacatcagaaaaatacaaaaaattttctgtctttaaaaattagaaaaccaaaaatcaatattgtatttaacttttctctgagatgcttttagagttatgtttagattattgaagagtacattttctttcctcttaagcataccctcggggaagtctgggtacagaagacatctgaaatgaatacagataaacagtatttttgtcgtactcatttgggacatcttctaaatcccggagacctggtgttagggtttgtattatttcatattttaaactgccaattaggattgcaaattttctttgggaaccagcaaaactacctaaaaatactaacattgtttattctaaaaagatcgaagggttcttaggagccttataactcattttattgttgataactaaattaaactgggttggacagaagcccatagttactccattttggttataatcttaaagagtaatttgttgtaagattttgttaattgagccttgaagttatatggttgtatccatatttagaactgcttttgcagattgggtcttttttattgtgcagttgctactgctcagataactcacttttaagatatgacaactatatatatacaaagggcttgtaaaggcatagatcagttctttctgaatcagagtttttcagtgagtgtgtgattaaaccctcaaatattgcttttgcttttaggatttcagtttcttttactacagaatgaggtgttttttttttgtttg

SEQ ID NO: 109333 - DNA, 1272 bp, Homo sapiens
taagtctaaataggtatttctaacaaggtcataagaggagatcatggcaatcttacaatattttgtattttgtaaaattattttcattctataatttattaaacaagcgttctaagatacattgttgtgaaagttatatatagttctgtaaatgcttattggtgggtataagagaaaaaaagtatctacttgtgatattcagaatgatttatatgaatggtagctgaaaactgaagtttgagttaaaagaaaactacagtttttgttattaagaaaaacagtattcagtcactgaaaaattttagcaaattttaacaattgtacaaataatgcttgaatccattctcataaaaagttaaatacatggagaaaaattttaaaagtcctcttgacactgtctctccatcccttctcctttctcctgaggtgtaaccagtgtcattagtttggtcattttttagctttattgaattttgtggcctcactgtatagttcccattctttgtaactttacaaatatttatcttgcaggtattaatcaagaagagctatgaccggaccaaacgtcagcgtcgtagaaactggaaattgaaagagcttgcaagagagagagaaaacatggatacagatgatgaaaggtctcgcttttctttaaatctcttatgttgtctcaaaggaaatatttatgataaatactttttatgttgtaaagaaataggcatcacacaattgatccttgcactcaattataatcttggattcttatcaaggtattaatggaatcagtataagatgatgtaaagacatttaacacagatttagtaattatttcctggtttatgacctaataattgtagtgttaatgtaaacaattcatttgaaaagttaaaatataatcatactttgcttaacaatgggcataccttctgagaaatgcatcattaggtgattttgttgtgtgagcatcatagaatatgtggcacatgactttataataaataattacattatgaatatcacaaatagcagatgagtacttatggcttgagataaaaaggaaacagctcattgatgccaagtgtgttattcctcaaataatttaagcagaaatgaagacagtgttctaaaacagtttattggatgattcaaaaagtggctttaatgatggtgaagacaccgatgtctaaaaaaactgagagtttatataaaattgtttcatgaaatgtgagttggaaacagcagtatgtctacatagtccttaaaatgaaagtc

SEQ ID NO: 109334 - DNA, 1966 bp, Homo sapiens
aagtcatttgttctgtatataagtatagttcctagtatgaatattttggtatcttaagctttgattctcataaatgtctttaattgttttttcaactactctagtcacacttctacaaaaaaacttgcaaaacaataaataaaacttaacaaaatactgttttgtatattacagttagtattatttgcattctagcttgatcccttaagttgctcactcctatagtggtggaagtatattcttacagttactcagttcatttgttcagtgaatgtaatttgaatgactgctgtaagagacaagagcttctgatacaatgtagttacataataataatgataaggtagatatttgtatattttcaaatatatttaatactttgtatacatataaatactttgtatttattttattctctttgtatttttttagattcagccatccctgtggaaagtgacaccgatgatgaaggagcacctcgaattagtctggctgagatgcttgaagaccttcatatttcccaagatgccactggtgaagaaggtgcatcaatgctgacataatgagatgttgtagactgtttccatacatgggcttaagaagttggacagagttaccttaagtgtctctactatctttgcctccagatttcaagaggagaaatttagttttaaacctgaataaacatgtttgttttcagtgctcactcaaaccactaaaacagatggatagctttgaggttttagataaggaaagattatggagaatgtagttgttattgatttttggcaattttacatttggaattttatcactgtgcttttttatatgaggcactgtagtattttcacatagtatagtactctggatgtaaaagctcaaaaattgtgattccttgaacgttcactaaatcttcaagcaaaaacacatttttacattatttttacgttgattattttagtgaaagaccatatgaagaagcatttttaatattaacttgttacatactttgatccactttacatcatttttatgttgttgaggtagggaaattagggttcagtttatcactggacattcaggaggcaagtcaatcttttttatttccttataaaattaactcttcaaaagccgttaaacagagagttatcttaatttttattgcagtaggaggaaatatatttaaaatatttgtagatttatagcaaatagagactcgttatttaaaggttaaataacaatttgttcttttgttgtttttgccagtttagggcagtagctgcttttgtcataaatatcttcctaccacatcaaaaatgctgcttttaaaatttttgtttataaattgagaaggaattttctctctataagtttctgtcattgaacagatcaccattaaaaagaatattagaatccagcatgaagataatggctaataaaaatgaggtacatactttataaaaccattaatcagatttgaatgaggaatgcttcccacatccttgaaagaaaaactgtggcttacgttttgaagtattctgagaatgaagtattaagatccaatttctataagcaagatcagacttgttaagtatgccgcaagtaagagctaattcattcattccatgtgtgccactaaataaagagattgagcaagtgccactgtgtggaacatttttcttttttttaatattggactttccaattttgaaattatggataaagtcctaaattttctatagtggcttcttttctgtctgcatattttgttaaaattgtggatctaaaagccatatcctgtctttggtggtggcctggtaggaatggcttgtcctagttcttcaaaggtaagattgaccaaagcaagttctcattggtggtctgtgtttacatcttccgtgtcaagatattttaaagcatgaaaataaagccattcttgccctttttcgtgtgtttgaaatggtcg

SEQ ID NO: 109335 - DNA, 1032 bp, Homo sapiens
tcctcaacatttaagagtaaaatgcagacatgatgcttctttatcctttaaatatttcagcattccccccccgctcaaaaaacaaggaattctcgaatcacagtgtagtgatcactatcagaaaattaacattgacacaaaactgttatctaattgataggccgtattaagatgtcagtaatctcaataaagtccttcataaaaatagtaaatctaagattctgtgttgtgttaggttttcatatctcttcagtcttctttaatctggactagttctgagtgtaatgttttatgtaattgacatttttgaagagtccaagccagttgttttgtagagtgacctcagtttgggtttgtctgatgttttctcaagattaattttaggttatgtccttttggcaggactatgccaggagtgatgccaaattctcaatgcatagtatcaggaagcgtgtgctgttgattagtccagatgttcccaaacttggttatttgttggttttctgttgtaaggaagagctatctcttttttcatatatttgcttattcagttgtttttcatgtcattgtggactcttgaatttttactttaatacagtgggatctagccctttgcaatagttatttttacttgattttttaaaaatttattttcagtgtacagtgaaatttctctttgatgtacagatctatgacttttaacacatagatcatgtaattaccacagtcgaattatagaacagttctatcacatccaccccaaaaaaattccatgttttttttttgttttgttttgttttcaaatcctcccatccctaacccctggcaacttctgatctgttttctaacttcatagtttgctttgtccaaaatatataaatgaaatcatgcagtatgtagccttttaagtctggtttctttcactcagcatggtgcacttgagattcatctaaggtgttgtgttcaaagtgggttcctttttgttactgagtaatgcattatcaatatcacagtttattcattcctatgttg

SEQ ID NO: 109336 - DNA, 1049 bp, Homo sapiens
aataaaacttgtgatttatttggaccaactgcattaggaattaacagtggtgatttaattccagtaatgcttgacctcttcttctgcattttgtctgtttcttcaagctgtgcccctgctataagtgactgataatcactaattctaaacttgcttaaagagtataaaaggggctgtgtgcagtggctcatgcctgtaatcccagcacttcaggaggctgagatgggtggatcgagaccagcctaaccaacgtagtgaaaccccgtctcttctaaaaatacaaaattagcctggtgaggtggcgcatgcctgtaatcccagctactttggaggctaaggcaggagaatcgcttgaacctgggaggcggaggttgcagtaccggagattgtgccattgcactccagcctgggcaacaagagtaaaactccatctcaaaaaaaaaagagtataaaagggtacatgtcacctgaaatctcaatagaattttatttgtcaccacataattttgtaagactttcaaaatatttcctgaattattaccacatgattgaaaagtccagacaactggctggctcattttttgactgactgacttacctttacaagtgttttgaggggaccttgcaattgtaaagtgatgagtttgttggtcaattaattaattattttaacacgtttattgagtatctattctgtcatgctctgttctagctgttgggaatagagcagtgtataatacggaaacctgccctcgtttaggggagacagataaatagaaaacaaaggaaagaaagtaactggtgatttgagcatgagaagtactgtggagaaaaatcagggaagggcatgtaggctgcttgtttgggaaagcaagtaggaaaaacatttcagttttgaatattgttgtatggaaaggcattgctgagaaaatgacattagagctgtcaacctaaataacagagaggctttctaagagaaaatggtatttatttgggaagagagcattgcaatgggaatataactgccatggtaaactatgtgtgcattc

SEQ ID NO: 109337 - DNA, 1027 bp, Homo sapiens
ggatagccttagtgacatctggtgattttgtaacctgaagtcaatttatcaagtcaagtagattttcctgggtaggaaatattattttctttttcattcacttgttgaacagagtcttcgagttatttggaatttctactaagttttgtggtttttttaaatagcaattttaaactctatagcttcccatagattgttccataatgctaaaatttataacttaatccactcaatatataacatttggccataagaaaatgatatgtaagttatgatacttagtgaaagtttttggaataaatagttctgggcacatctgtcctctctacaaagtaagagaaaacttgtttttcttctaacttgaacatatgctgtgtttttttttttatggtgaaaagatatatatatatatatattcagaattaggcagctggactcagtttagatgatcccaattttgttggcaacatccaaagcatcgtaatcaggagccagtcgaacatatgccttcttctctccatcaggccgaatcaggatgttgaccttggccacatcaatgtcatagagcttcttcacagcctgtttaatctggtgcttgttggctttaacatccacaatgaacacaagtgtgttgttgtcttctatcttcttcatggcagactcagtggtcagcggaaacttgatgatagcatagtggtcaagcttgtttctcctgggagcgctcttccgaggatatttgggctgtctccggagtcgcagtgtcttcggccgccggaaggtgggtgacgtgcggatcttcttctttttgtggctgtggacacctttcaacactgccttcttggcctttaaagccttcgctttggcttcagctttaggaggggcaggagcttccttcttcgctttcggcgccatgttgtgaaaagggtccatatgctgtgttttaaggtagatttttatttaaatgcaaaaccttgttattttaaatatcaaatgaaatcttatttgcttttatcttctcttatgcatt

SEQ ID NO: 109338 - DNA, 1046 bp, Homo sapiens
aatctctcagtaaatctgccttcttctttggtggccttgacccttgacctgtactctatcctctttaaggatctttaaacatttaaagatttaagacatctttaaggataatctctggatccatattagtaaatgtatgttctcctaagtctattgaagaatttattattcatttatttctccctacaaataaatatcacttgatgtatttcttctacaaagagcaaaatgaactgggtacaaaattaactttaactggtgttaaatatattgaattttcaaatttttcttggtatttaagaaagttgtatcctaatcatgagcactgtatttgtctacttgacaatatattaccctaatatttaagggttttattttttaagagactgaaaaaatatgatacttaaatgtattcacagtgtgtatctgtgactttcccaagatgattgaaccaatatttcaagtaaaaatatgaattaggtttatgaacatttaaagggacagtcttactattttattaagaccaataaagaaaataaaacttgattaacaacagtatgtagccataaaactttcaatttgttagttacaaagttacaatgaatagttcattcaaaaatcttaatgggatgtactattaaattggtcttcactataagttattactttgaggattaatatttagaataacctccttgaaaattttagtgactatgttaaaatttggttacatgatatatcattcaattaattaactccagagagataaagtttcttttattgtagaagtagtcccttttgaaagcaatgaaatttagtttataactaaattaaattcataccatatttgcttgaaatataaactcagcatactaatgacagacatgttgaagatacctgatgttaacaggtttaaatgtggcattgctatcatgttgatagatagtaaattctgtctgtacaatagctgatgatatctggcaattcacttatactaaaaattaggcatatttctctccagtaacgtgaaagtgcaaacatccttt

SEQ ID NO: 109339 - DNA, 1056 bp, Homo sapiens
aataacagacacttcaaaagagtgtttttatatgaatgaataagagaatacatggacagacaaatctgccattcattaagtcactgttttctctgacttgtttaaatctaccacacgctctaaatttgaacagagatagcctttgaataaagtacacagtttttaccccatcaaattctctgaaataatagcaatcttgcatctacaagaataaacaaccatcttcccctaaaaaaatatgctgaaaagaacagaaaagaaactataaagaaaataaaaccttctcagggctctaaatctttacctcattatccggtatgttccctttaactatcatatactatgaacccccacaacccacccccaatcccagccttacccatacctcaaccactatttgtcatttgaatcaacccattttactttcttttaagtactacacagtgtttaaaattattttgctactgttactatttatatatttattttgccttagtaatttgtctcccctccttacaactaaattacaagctccatcagagcatagattatgagatgcctatgaaaactttacctaaagtcctagaaaatattccagaatattggagataataagtgataaatgaattaagaaataaaggaaggaatcatcatgataaataaacatagcccccaaaaatatttaagtactttttacataacaggcataaatgagtgttaaataatatttaagaaagctttcatatattcttgctgttggagcactgcaaactcatttgcatttcaatgcaagttttctatagactcaatagaatttgcattgtaaatatgcagctattttttaggagaattacaaccatatttaataatgtctagatttgaaatacataggcacaatctatgaaataattgttcattaaataaagtcttactttgaatttgtaaaaatgctggtctaatgcaaataacaccaggtctccttaatgcctcccaatgccaaaccatcttcagagagtttcaccatcaatttaccagattacaactgtagatgaaata

SEQ ID NO: 109340 - DNA, 1040 bp, Homo sapiens
agtgacaaaatttttcgtaactttatttatatataccgaaagttgagtgaataaaataaatattttcttttttaactgagctagtttaatgattgatattaatcactctttctaattgagctattaacatatttaattatataagctcctaatatgaatccacctattttaacgcttgtggaataagttacttttcctgttgctactgcatgttggataaagtgtagacagtgtctaacgatttcaaataatttttgtagtaaccctttgatcatcctcaggtgatgtccttttactagttataatagctactatttagaggctctgtgagttccaggatcaaaataataatttatggtacagttccaagaaaaatattttctattacttaaatatattttcttctcctacttttatagttgttatcagaaatcctaattatattggaaaatgtaaaaaattaggttacatgcggaacgaaagcttgtctcacaataatagattgatcttccaagtctacatgctaattatatgttacctttaatattattgattgaattttttcagtaatttatttgtaactaaggcaagttgaacattgctatagctaagattgtttatgcaaaattgatctttttaatgtctttatagccttcccattattacttgaattatttcctgtaaggggatcacatatgctttttattttattattattattgcatcttacatttagattatatttttcagcctggaagaagattatagagattcaacttgtgttttatcctttgcacagcattatggccttaggaagattgcttagcttcttatttgtcgtgttaatcataaatagaagacaatttttcagaccaaaaatctttccaggttttcttagagacatacacttaggttttaaaaataatgaactggagtgctagtttaattaactgcaaaaagactgttaacatttatgagactcatataagattggaggaactcaatatattgaaatggcctatttcatcaatttatattaa

SEQ ID NO: 109341 - DNA, 1150 bp, Homo sapiens
atctgtattgttaactatactcatctggtaggattactataataaaaaaataaatgtggcaaggatgtagagaaattgaaactcttgtatactattggtgaaaatgtaggatgatacagccactgtaaaagacagtatctgagtttctttgaaaattaaaaatagacttgccatgtgatccagcaatcccactactgagtacatttctattataaaataattgaaatcagactctggaagagatatctgtatccccatgtttattgaagcagcattcacagtggcgataatatggaaacaaaccaaatgcccataaacagacggttaaagaaaatgtagtgtacatacacagtagaatgttgtttagactttagaaaagaaggaaaaatgctgcgatttgtgacaatatagatgaacctagaggatactgtgataagtgaaataagccaaaaacagtgatttaaatgcttttgtttttattgttagagactcacattgacaatctaaggcttgtaaagaagcaccataacattacaggtcagttaatttctatatttactttttgccatcatggctttgatctccagtgtgatctcatttttcagatggttgctgaagctctggcgatcttatctacatattgggtaggaactgaagaggaagggcaaaaagaacatactttccagctaaagcagccatctttaaagggtttttctaaagttctttacaaatgtatgtgaagtgtataaagaaaaattaaataaagtcacaatctttttgtgaccagaattgttatatttatggggtgcaagtatgtttttatattgttatcaaaacactgaaaatgaaaatatttggatgacatcaaaatgctctgccaaagactgatattgcaagaaaaaataaaaatgagcttaagaaacagactgacttgttttgagattaaatagtgacaaaaaatgtcagttttataaaaatatatttcaaaaattatattattttagatggcagagtgatttattgctttattttctttatctcacctatctcatcttaccagttgggacttccatttctgcactggagaatatgtttaaacatatgtatatataaaattgaatttaaatttaatggtatataaatttttata

SEQ ID NO: 109342 - DNA, 1043 bp, Homo sapiens
ctataaagaaatatgtaagactgggtaatttataaagaaaagaggtttaattggctcacagttccacaagctgtacaggaagaatgatggcttctggaaaggatgcagaaaattttcagtcatggtgcaaagtgaaggggaagcaggcacgtcctacatggatggagcaggaggaagagagaacaaggggcaagtgccacacatttttaaataaccagattttgtgtgaactcactcactatacagtaccaagggggatgttactaaatcagttacaagaacttcactcccatgatccagtcacctcccaccaggcctcacttccaacactggggattacaatttcacatgagatttgggtgggcacacagatccaaacaatattgaagagaataatttttaaaattaaggtaattaatttctggccaatacaaaactaaatttcatagataaattttaacataattttaattatgacatttatgaataatattctaataaatagaactttcctgacattgctgaagaggggtgaaaaactcgatacttagtacaatttcttgttgcagctgtagtcatactggattcaatattctctataatgtaaacagtgtgttttaaaatgagacgatcaagaaaaaaatagggtttattttttgactaaacatacttaatgtaaatgtaaatctgaagcactatttatcaacaccatcttggtgataccttcggactgtaaaagaataaagctaggacaccagttttataaatgtatacatgcatatgtacatgtatacttacataagtttatacatacaggagcctgctgatgtccaacataagattacagtgatgaaaatttcattttatttttaaggagccattcaataaatgtctccacaagtaggaaaaaagaaggatattttgaatcctaggaaaggacagtctgtggtgatcttatggaggtcatctaattaagtattaaaaagtaatataaaataatataaaatatttatatacatacataattttaaaattaaaatata

SEQ ID NO: 109343 - DNA, 2399 bp, Homo sapiens
atttagacaaatgccctcaggttcccgtagaactcatcaacacaatgccaagactgtgaactaaaactcacattcataaattagctttttaagtagcatggtgtttttaatggactccatgtggcttttgagagaacactgacttgtagcataactttgatttttagcttaaacaaaactcagtaggatatgcaatttaaaaatcttctgtgatgtcaagttgatttacacagtttttttttagtacattaagattctgttatacaattgtacttatctttgaattaaaggtacagttacggtttcatcattaattttgtatactcattcatttgataaataaatcaagagcttgtctgggaaagtttcaggtaatatatttcagtctcttaattgcttctttcttattttgtagaactccacaagagcaactttttaaaatgctaccagatacgttcccacatccacatgaaaccactggtgatgcacagtgttctcaaaatgaaaacgatgaagatagtgatggttagttcatacttgattagatatttttaaaatgtattgtctcaagttatatacactaagcattaatcagaatctgcttttggttttctttaatatattattctcagttgtaccatgtaatcttttctctttagatgaaaatcatgtacactcacttctttccctttccctagatatactttgccttgatttagatagtttcatttaaaaattgaatgctaataaatgtgtatttcacttgaactgggaaaattgacagtatttgtatttttgtgtagatacacatgagaacactcttcttttttggtggctatcttatttgaagaaattataaagtaagatatattctttgatgatattatttgtgaatcttatttcctaggtgaggagaccaaagtacaacacacagctcttttattgccagtagaaacattaaacatagagagacctgaaccatctctaaagatagtcgaactggatgatgtaagtgcataagtgcataatgaccattcatgatttttaacagggaattcataatgtatacttacatctgcatattattttcaataagatttctcaaataactaacatagtttaataggaaatttacaagtgtttgggtttaaatatgcttataagaataaaacaatattattctgaatgtaaacagtaaatttgtgagctaaactggtattgtcaatttttttggatgaatatattatgggaggtaagaagacatttcactattttaacttatagatatgtagtttgatattttattagtttagttctctatgttatcaagtttttaaacaaatatcagtctcgttacatggtacctattaaaatataagtgtaaatttagtttcttgaatgtcatttaatattattttccgtttaaatgtagaaatagtgtgtaagacttaagaagttcagtcaaataacttgaacataacttgaacatatgtagaagacaccaatagcatcaactagagccagaccctgtcagagctagagctctggactgaaggtttagggtgtgatacactcagtgcatttctgactttctagtaatatagtagctgaatgtgccacttgtcctagatatttctcttactgtggttgttaagaaaatgactagaatggagaacttacctcttttaaatactgctttcttcctttcttctttaggttgaaagcttctgctatttttgttatttgtgttttttggctaacaacatttttatttctcctctggataaatttgagagactggacaaaaacacacacactacatacatgtgggcatgccattcattacattgttgatacacagcgtaagtttatgatgagccagtcagagaactgacaacttcctagtcactaatctacttggcaggtagtagctacatacttaaatataagttattattgttggattggggtattataatagtgataaagtaattgacatatcaaccaatgtcagttgaatttgtttagttctcctagaacttatgtgttataaaatataattagagctctcataacatcatttgtaggaaaaatgtactccaaatatcacccataagtaagttggttaatgtgtaataaatttttatgaacttactaatattatataacattaatttaataagacttatgaagaggaatttgaagaagcagaaaatattgtgccttacaaagttaaattagctgatgcagacagtcaacgaaggtaaaacctttctaattaactttgtgtgcatattgagccccctcctgacacacacacaaaatcatctgtctttttaaatgtgaaatatgtggtgtgaaaaaacatgtgacattaatgtcagagtatattttactta

SEQ ID NO: 109344 - DNA, 1063 bp, Homo sapiens
atgctcaagtaaacaaagctcaagtgctttaaaaactgtacagctaaagtatgccttctttgtaatctctgttatgtttcaatgtgggagatcattagaggttttaacaaggaattcatcacttactagatccactgaatattttggggtattggtttgcttgcttttcttctttacatttgtggacatttagcttttaaaatttcataaagacctgtaaagtttcctacaaatcaataaagctatctttagtcattgtgaatatcaaggaaatagaattcttcatttgtgtttggacatttcattttattcatttctccacaaaggtcataaatatgataaagctacattttaaaattactgaggatattgtgacattattgatatttatttttcatgttttgcttgtttactgcatgttaacaactgaatttccattttctgaaacaggaacactgtatttcttttcattaaagggagaaatgtgtttagtgattacattttatcttgtttatatatattaaaggtcaagcgagtattactggaaatctggaaaagtgggcaaattggtcaatcaatcatatatgatgtcacaaaataaaggaaatgttgttaaggtaagaagatactatttgattcttatgcattttgctaagcaagaagatattcttttttaggtcttgcattttcttctatactcaggaatatactcttcttattttaacaactttgcatattattcacttgttgatttattttgcagggtaatatgcaactttcattattcaattatgtttttgtttttcagctacaaactgatttcaaaattttaccttgcagtgaattttcccacatcccaaactgaatttttccattcagtgtggatctggtttaaagtatataaaatagaactaaatacttctaaactaaggtgaaagctattgttatttaatataacaaatgagagactttattcctacttttatatcacattagtttaatgttttatattctgcttcaataataatttattattcatatactgttgattccatgtgtaaag

SEQ ID NO: 109345 - DNA, 1092 bp, Homo sapiens
ctagttacgtttacataattctcttaacagtcctatgatttagctatcttacaattgaggaaactgacagagcttagggtacacagctggtaactgctagggcctcagtttaaatttgtgtccagattccatgttctttccactgaactgtactccctctattactgaaaatacgtcttgtttgggatattagttcccaaacaccaatttgagaaacctctccctggtccacaggaaaatgagagaaattagagcaatgtgattgttttttcataaatctaactgtactcattttaaaggatcatggagattattgctgttttagatgtttaaaatactgtctttccacacttgtaaaaaatgtagagtcagtttttttaaaatgacttttaaaagcctaatcaggcaaaacaggttgagaacttgttattgagctgtcttaattgatttaaacgttttatatggaaataatttcaaatttacagaaaatttgcaagcataagaatagtgcaaagaacatctgtatgtcctttaaaattcaactattattcagattttaccctcttcattttattgtttgctttttcatttgtccttccttaagtctcctttactgtggatcatttccatggccaccttggtcgtttatagcattgaatcggatttaaggtatgcattcttggcgagaacactctgttgatggtactatgtcatcatggtatgatattgggggcacacaatgtctgtcttattggtgatgctaattttgatcacctgatcaaggtagtgttcagtttctccaatgtatagttactgtgttttacattgcgattaataagcaacctgtgggagactctcttaagtccatgctaacaacattttcatccaggatttagcatgcattgatgattcttgattattcagtcttcaacttcagcattctttccacatgtaccagttggcaattaatattttattgtaagcaggagccctcctttctcccctgatccatccattcattcatccatctatatccatctcatttttacatctgttattgttataaactcatgctttttaatgtttttttta

SEQ ID NO: 109346 - DNA, 1030 bp, Homo sapiens
ttaacttctatgaaaccacagctggagaccacatctgaatcctccttttggccagttaacttgttccacctataaatgaactgggttgttgaggcactatcattagcagtcctccaacattttattaccagtcagaaccaccagggggcagtaattactagatagtttaaaatgatgcaagactattatatcctaaattggaataaaagttttaataatactaacttgtcttttttttttttctaaaattgattccattgctactgttaatagtataaatcttaaaagggtgaattttttggatgaaattaatgcttattcttttctttttaaacagggcaataaatgtgttcgtaagtgccaaccgactaattcatcaaaccaacttaatacttcagaccttcaaaactgtggcctgaaagttgtatatgttaagagatgtacttctcagtggcagtattgaactgcctttatctgtaaattttaaagtttgactgtataaattatcagtccctcctgaagggatctaatccaggatgttgaatgggattattgccatcttacaccatatttttgtaaaatgtagcttaatcataatctcacactgaagattttgcatcacttttgctattatcattcttttaagaattataagccaaaagaatttacgccttaatgtgtcattatataacattccttaaaagaattgtaaatattggtgtttgtttctgacattttaacttgaaagcgatatgctgcaagataatgtatttaacaatatttggtggcaaatattcaataaatagtttacatctgttaaacatttctttacttgaaaaaatgcatatatatatgtgtgtatatatatatatatatatatatatatgaacagaagaccaagacaacttggtgtaatgtctaaaaaacttctaatgggagcttatcagcagtttatcaaataataaagcaagaatttctatttttgtccttaatcactttggacacagagtagtcaatggaaatatttttg

SEQ ID NO: 109347 - DNA, 1430 bp, Homo sapiens
atatattgatgaattggtagagttgtaatgcttccaagtctgcaatgaatctagtgaagtctcctttccaaaattggtgttctgtgatcccagcctgtgtgttggatttgtgctggtgtttttgtttttaagtgagatttcaaaaatgtgtagaagattttattagattatttggggttttaatatgatgaagcaatgtatattaaatataggggttttaaatttttaatctttccagttggcaagtagatattacctttgcactagttatgacactcattatttaatttaaggtttccttgggaaatgtaatgtcagagtacggttgaacttaagcctcccttttaaatctgttttttttttgtgtgttttttttttttaagatttcatgggatgtccttttgtcccaaattgaaaatatttattctttctttttgtgatactttacttgaagggagccctgctgttgttactggactaagtcaaacgctaatgaattctgctttgcaaccttgtctttcctaattatctggcctttcacctccctcacctgcctttgaccaacattggaaattcttagatgtgatgaatttggcagagagtcgcaggatgttttttattatgtatttattttatcagagtatatgattgaacgaccagagccagaattccaagacctaaacgaaaaggcacgagcacttaaacaaattctcagtaagatcccagatgagatcaatgacagagtgaggtttctgcagacaatcaagtaagcaattatttgttttgtttcttcttttcttaaaagtacttccgaggaactactcatctacattttttaattttggtatgactaacttgaaatgcttatttgaaataaaatctcaaatttttaaataccacattttattaactttatggcgtttggtttcagagtacagcattttttagaatgtttaattttaaaacaacaatgaaatgtgcataaactggaatgtagtttgaactacataaatgatgggaagatataaatgtcagataaatgaatagagaaactggatatatcctagagattggtagtaagatataccaaaataatttttatttcagaaatagcagcagtcattaaggtaagtaacgtactcttaggcatgagtagtgttttctaagactgaccaaatagcctctaaatccttgcctttgggggatataggttaaataagaccaagaatactcatggggccagaaggctggctggtgagcagcagcaagaagggtcatcctagagcagtagttctcagaccagggacactcttctggagtacagtgaagggtgagagggtaggggattgagtgaaaacataatccctacataagtatctttaaactagaaagtctgataattttcttcagcctcagtggataaaaaacaa

SEQ ID NO: 109348 - DNA, 1064 bp, Homo sapiens
acagtgggacgtgatcatgccgctgtgatccagcctgggtaacagagcaagaccctgtctcaaaataaagtaaaaatttaaaagtatttgtaaaagtgtaacttgaaaaggtattctttctattgtttaattatagaacatgagtctaaaaaacgtttttcagtgggaaagtaataccttcaaatatggtgaattaaatatactttgaggatatacagttaagttactcaaaataaatgttttccttgtctttagacttgagctgttcagtgggttatcactagccacatgttgcttttgagcatttaaaaataagactaggtcagatcaagatatgttccaagttaaaatacacacagattttgaagacttcatataagaaaaagaaagtaaactagcttagtaataaatattttataatgattacatgttgaaataatattttggatgtactattaaaataattttacctgtgtctttttacttttttttaaatgtggccgcttaatattacataggtagctcatagttgttgctgatattacatttctgttgtacagccctactctagagacttactgtacatgttgaatgcattctttaatataaaacttttatctggtcctccatcccaaatatatattatggtgcccaaaactttaatttttatttttgcattccttcccatcagtagctcaaataacctgtgttttaggtaaagtattttaatgtttaaatgtggaatacatttatattttaattggagttgaaactataagcccattctgcttgatttcttccatgtcacacaagtttattgataacactcttttctggtagcacaagtcatgtcactaggtatctcatattactttaataatctacattacgtatgttagaatagagcttttttgatttaatattctgtgattcaaggtgagtacatatatatttagtagcttcattaaattgcatcctgccaaatcattgggttaatgaagcaacaccataatcattttctttttttttattgttgttttcttctttgagtgtcagtttggctt

SEQ ID NO: 109349 - DNA, 1552 bp, Homo sapiens
aaaacttaccagctcactctcttagcccctgcagggatttctcaccccagtatataagtactccgctctttgaaggttaccgctttaacctcatcaagaaatcaaataattttttaaaagttactttccatactcagtagcacttaaaacttttggctaccttcttcttgaaacttgtttcgtgatgctggttttctccagttctcctgtagcgatatagcagcctgacttctcccttttgtgcgcaccacagttgtatgttttctgactttccttttataaaacacgtttaatggggtcagagactgtcttgtcttgttcactgctctatatttaataccgtgcctctttgtgaccattgaaatatttattaaataaataattttttttctgtcacacaatgagagctcttcaaggtctgttcttggttttgttttgccatttcttacttgatttttcattgatgataccatgccttctgctgctgtctatattctgcattcattctgtccttttcattttaactgataccactgccttttagccatcctccttttccccaggttttttttattatgaagttttcccaatttattttgaagtggaaaagcagattaccaagtgacttaagtagctaaataggaacagcagggccacaattggtatttatctacttctttttgcttattattttggtcttgtttatttctgacataggtatactgagtctgttaagttttccttgtcgttattcttcctccattctctccatcatgctgtgaccaaagccatctacttaactaagttacataatcaggtaatggtattctttttccccatagaatgaaattcaggaattcgccttttgctctttttgttctgtcaagtcatggagtaggtttcaggtgagaaacaggaaaactctttgatgtttagaactgtcagaaatgggactaaacagtttccgtaggtgttgagttccctttcactggtagcgatatggtggaatactaagcagctttccaatggaacaggttattggagctttttgaagcgtcactgcaggcctttgattgtatctttcagtcttgttaggtcttacacattctggcacagataaatttttaatgattaggaactgcacttcatacctagcagtgttaaacatactctgaacatgttgagtgaataataaattctgggtacttttcttgagtagatgaggtggggttctttatttccacttcaaatttggttttgttatgtgagagtataagatctgtattcagagtcctgggatcaagtcttgggtctctacctgtgtgatcttgggcaagttatttattatctctgagcctgctttacacttgtaaaattagaattgcagttttttaaagcaagttattataggactaaatgcatgtgcaaaatgttttatactatgaaaatgctttacaagtagtagaaattaatcaaaaaatggctttttgtttaatatatgtatgtcactactgttattcacttcatgattaggatcatttttttaaaccat

SEQ ID NO: 109350 - DNA, 1056 bp, Homo sapiens
aagctactctttgtgagagctcactgtggctctcagtctggtgtggggagtggcagatccacgtttcttatctgtctcattctgggacttttgcatagggaatggaattatcacatactgcagtagttatttttagtgaagttatttttttgtttgttttcttcaaacaaatgttcaccatgtctgttgaacttgcatagggtaggagtatcatgtgaagcaggtacgctccctggagtgttaatgccaagtggcagtgtgacatgtcactgtatttctttactgtctctcttccctgccaagactacataccttcaagggtatgtgctgtttgacttttcatcaccatatctccaactaacactgttgctgacttagactgactatgcagaatactgtgttggatactaggaaatagagaaatggatacaacttctctttagggagtttatacttcagtagatacaaggggaaagggttgaaagaccattgtatggacatttagtctttctaatatactaagtacttccatgtgcatcagttcattttacaattttaggttagagctgatagaaaaataaatgattgtttctctaactgccatctggtccctggcactgaaatgggtctccctgtcttattcagtcattctctcttacttcaagatagactggaattcaactgagattgaagttatggaatgacaaaaccctaagatgttacacaccggctgcctcctcagacttatataaggttactacaacagaagccagttgggaatgttaaatgagtcagacctggcctctagacagcaactgcaccctatacgagtttagattgttgctaggctttttttcatttaattccaaagcatttggaatcctttttttttttttattgagaactgcacatctttctctatgtctttatccatattaaaatcggtatttatgcagtactgtcaaaatttgagagatttccaaggttctaccttatttttggtatgctcccttaaaaaataaatcacacttttgcgaagtgaaggttacaggagga

SEQ ID NO: 109351 - DNA, 1019 bp, Homo sapiens
ttgggggtgactcgggttatgccctttgagggaagaggagcactggaagaaggaagagacaaatgttggggtctacggattcagttccagtttaatgatgtggccctctaaggagataattttgccttaaacagaaagacttgaccctcttaggtgtcatacctaaggtatgtttttactcctttactgctttcagagcgctttcattttgggatgctgatgaggaaaccgagggattatatgacgtgcccaaggtcacacacgtagggacagactttctgaatctagttcggttcgagtccagctttagagtagggacgttggttgtgctttttgaaaagggtggaggaagttacaaagtaaatgtattttatatagtatatctaagaagccattgtgagataaaaagttgtttcttgaaccggagtgaaattcctcaataaaggaaagatccttttggaaaaaataaaaatggccagtttcaacttttacagatttttcccctttttttaggggtgtattaaatgatagactctactctcacagttcatttttacgggtaggtaataggatgggagaacaacagttaaacaatatatcccatccttagaagaatattcttttctttttctaccttaggactgtttttactctcattttgtaaaactgataatagtgggattggaattctttcacaaaactacacttttttcaaataatgtagcgttaggagagtttagtgtgcccattactagaaaagaaggtattttgcatttcttggaggtaacatcgtcttttttgagactttacttttcccccattttcttgactctgggctgtatttgtgtgtgtgtctgcaaataataaaattgggctcttgcatatttttatttttcttagcatcaactgtgactttcaattcattcttactttacattgaagaatgaaaaaacagtacacgtatagttcatatcttgcagaaagtagtgcctttatgcaagtcttatcctctataatga

SEQ ID NO: 109352 - DNA, 1038 bp, Homo sapiens
tgtgtgggaggtaagcgtgggtccttcttcggggcgtctgcactgccctggagaaaacgtcttccaataggaattacatcaagacacagctaaaagagtccgcgttgggttaggaaaccggtgcaaaacctctcgggtgaaagatttacatttttcgactttaagggcaaaaaagcaaaaggaagcttgactctgggtataaagggcgtggttagtgtttttggtttgagttgcaccagtaaaactgttctgggagatctgaagattgagaaaaatcctgctaattgaggacgaggtggatgttatctggtggatgttataggtgcgtagcctataaaaagcaaaaattttgctattgatatagaataacttctgaactatttcactaggaaaataactttgcattcttcttcagtgtctaccctttacgttggtttatcagattgtcctgctaccgacctgttatccagggtggttattttgcagtttcctagaattgcaagaaatccgtattaaagaagcaagtgcaggcaggaatagtcaggataggatgggctctgacttaatctatcaaaagtataacttttgccagcaataatgtaaaaatgaattttaatgaatggatagttagctttcttcccagtggctctggaatattggaacaaagacctggattcagcctacaatggaaacatatggtgtacctcactgctgctcgttagtttctcatttgtgtccgataatatgtgtacattttaaaaacgagtacatggaaagctgtgtgggaatcttttctctgggtagagagtatgtgctgaaggactacccttaatatgtgttatgatagtgggttcagtttaaaacacatgtagtgtcataaaataatagtttattctcggtattaaactatatgtgcattcaaagcaacgttaattgtaatacctatggatggaaataagttgtaatgctgggtaaagatgaaagtctcacctacctttgtgtaattatgacaaaattacagccttttatttttagaga

SEQ ID NO: 109353 - DNA, 1054 bp, Homo sapiens
attggattcacactgtgtgcgctgcaaatacattacagatttgagtgccagcatttctaaattcatctcagagataggatatataggcgagggtaaaggagtctgcaactggtggcacttaaggtcttaatttcacagacagaaaaacccagggctcaaccaccatttaacctcaaggccctggagttatacctttgttgaagcttatctgtagaaaccatatttcattctataaaaactgaatttgctcttctgtttttctaattatttcttccaaaaaaaaaatagactgattttgtttaagcatgtgtggagttggtcattagttgttttttgcatttgacctagaaacaaattaatctgattggtgttagaattaagaatctaatgtaatttttacttcattatgataagacctatacaattctagttaattgtatatagttttttagtagtaaaattaattgtagcacatatttaactatcttctgtttacttttaccttcatgttgatttatataaattggcttgcttagaactgataattaacctgcctttttctttttttttttgccgcctttttttttttctgagacagggtctgactctgtcgcccaggctggaatgcagtgacctgatcatagttcactgtaaccttgaactcctgggctcaagcactcctcacaccgcagactccccagtagctaagactacaggcaagaaccaccatgctcagctaattttaactttttatagagataagggtctcactgtgttgcccaggttggtccaaactcctgacctcaaacaattctctcaccttggtctcccaaagaattgggattacaggtgtgaaccaccatgccttgctgatattattcttaatgattagcactgtgccttgtgtagagtaaacttagttcatactatctttctcaccagatacttagtatctttagagctaactctgagtttcattgacgtttgtattcattttgagaatccttttacatagttcatacttggtaagtagtaacaatttggataactattt

SEQ ID NO: 109354 - DNA, 1048 bp, Homo sapiens
agatcttcattctatttaactgtattttcgtacccactaactatcccaacataccccacctctatcactttcatgataggatagtattttccgaagtaaataagagcatagtagcctcaggcatcaagacagcttgaaatcttacatgtaatctggactttcttttgacaattaactatactgcagcaagtatatatcatcttataatgaggatctcaggggaatttagtagcccagtcataggatacctcgttgtatctctcactgttatattttccctttaatcactgccatcttgaccacttactagaaacctggtgacttcctatgtaaaaatacccgcttcagacaaaagaaataatgatttgaaaatatagagaaactctcttcagtttttgtttggggatttttttctttattctcccccttccttttactcaaaagtcattttagtaaagacacacatatttatgtgaggctgagaataaacatttcataacaagcagaataaattgtcctattatttttaatggagtagaaggaagaaattgtttgtttgttttgtttgtggtgtgtgtttgttttgtttcgttttgctttttaaaaagatcaagtagaaatgttaacacctttataatttttctccagttaagtctttaaaatcttgtttcctgtaaattgttgtctttgcattaggtggataggcatagatggttttgaggaattactcattagtctctgcacatccacagacatataattactttttatctgcactgtaggaatgattgcaattagtaggatggctgtgctgtatcctcaagttattgtcgaccatccatttttctttcttatcagaaacaggagaactggtaagtttattatgaaaacaaaattttatttaataggtcacaaagaacctcttttttaaatggagatttttttcctcagtactcatcatataatttcttttcacaattttatttatttattctctttccagagattgaccaactgaattatcagatagtttataatgttgaaatga

SEQ ID NO: 109355 - DNA, 1165 bp, Homo sapiens
attgactgatggccatacaaatgtagaaataatgtttaacaagtagtgatatggtaatgaagaatatcacaaactcataacaccaatactgaaacaacatcagttaacccaacctgtatatattacacatgaaaacaagagcacttttctataataacctatgaataaactataagtcttctgaaaatataagctgtaaaagattgtgctaagtactatgtccttgggcatccataaattcttttgtgaataatgcctataaatatcttcatatttttaaagaatatatttcaagtgctctaatatgcagaggaattacgcatttgtccatagcatgtaatagaaaaaaaaaaaactttagagtaaaactatttttccccattttggacaagtatattgcattttttcatgatactgtcaccccacacccccaaatccctccaaactctataaaaattatacagacattctattccatttataaaaatatcaaacatgcaaatattaagtagagttatgctaacaaagtgagaaacagcagtctgtggacaaacatgaaaggccttacttgggagtttgttagaaacacactccaggctattcagaccaccccctagacctactgaatgataaactgaatttttaataagatccccaggtgattccattacacaataaagtttgagaagcattgatttaatacacttgttgattgatctaagtttctataaattaaccatatctaaaaaactggttataagtgagtattccatatgtaccctttactttagcagtattcaagatttagcatgtaacagattcaccaagaaagcttgggggaaaaagtggattttcaagtttttgaatttagtacgtctaagatctggcctggttttcccaaactctcatgaactgaattaaagttaatgataattgataataacaattcttgtaaacaggtccaaatcagcacaatacctaatacataagaaagtaacatgcaaactgtttctgttaaattttgaaatgtgtcaaactttttctgaaactgttcatcatagaattacaaatttggcattaaacagaaatagttcatttcatgagatattatgaaatattttttttccaagaaatattaaaagataaagtaatttactggagatct

SEQ ID NO: 109356 - DNA, 1034 bp, Homo sapiens
attaaatcaatgcttctcaaactttattgtgtaatggaatcacctggggatcttattaaaaattcagtttatcattcagtaggtctagggggtggtctgaatagcctggagtgtgtttctaacaaactcccaagtaaggcctttcatgtttgtccacagactgctgtttctcactttgttagcataactctacttaatatttgcatgtttgatatttttataaatggaatagaatgtctgtataatttttatagagtttggagggatttgggggtgtggggtgacagtatcatgaaaaaatgcaatatacttgtccaaaatggggaaaaatagttttactctaaagttttttttttttctattacatgctatggacaaatgcgtaattcctctgcatattagagcacttgaaatatattctttaaaaatatgaagatatttataggcattattcacaaaagaatttatggatgcccaaggacatagtacttagcacaatcttttacagcttatattttcagaagacttatagtttattcataggttattatagaaaagtgctcttgttttcatgtgtaatatatacaggttgggttaactgatgttgtttcagtattggtgttatgagtttgtgatattcttcattaccatatcactacttgttaaacattatttctacatttgtatggccatcagtcaatgaaatgaattacctataaggaagagtaaatgtcattaggcaatcatgtggatttttttaattttttattttttgagacggagtttcactcttgttgcccaggctggagtgcaatggcgcgatattggctcactgcaaccaccgactcctgggttcaagcgattctcctgcctcagcctcctgagtggctggagttacaggcgcccgccaccacgcccagctggtttttgtattttttaatagagatggtgttttgccatgttggccaggctggtcccaaacccctgacctcaggcgatccacctgcctcggtcggcctcccaaagtgctggga

SEQ ID NO: 109357 - DNA, 1078 bp, Homo sapiens
ttactaaaatatgctagccattttatgccagaataaaataagaaaaataaggacaatgaatatggataaatctttcttcagtgacttgtgtcttgtgattacaaactccaacgatggttacacaatgaggggttgggttaatagaataacttggaagtctccctctaaagtatgagacatggttttatcttgcttatataatctccttaaagtaggacacaaggaaaataaagttcacataattacaagatctgataagaaagatccagttgattgggtttttattgtaccttcttgtgtagttttgcaagactaagcctaacaacctcaaggtaaaattaagttttaaagtagaagtgaaaattatctcatcatcttagtttacattagatttctttctggtttaaactagaactctttatggcattatcccagtaatgaccaggcatttattaataatagaaggtaattaaaactttagtaatacaagtaagtaggcagctaacacccttaccatctttctctctctgtctcttcctctccttcctcccctctctccctctctctctttcttctctctctctctctcaatgcatttcatttttttcagaatggacagaaaaatgaattgaagaatggttgtgtttcagctaagaaaattccaatcaatagacgactagtcggattgtctttgagtgtgaaatctgcttgtgggccccaaagtctggatccttttctcacattcttgtattactccagacaccacaccagggtacagtgataaagggcagtgtgctgggaggagcttgtgttaaaaacctctgggacattctcagaatcttagttctgtcacttctgttataaattccatatgggatttttcttcagtctgctcctttggagaaatctcagcaaaacaagatcatttctgatcatttagttttaaaaataaaacaaaacatagggtaccctccaggttaggttatataactcactcaaacttctccatctacaactgccttaatgtgcacatcattgaagtcaaaatggcaagaactgcaagtcctaggagtttgaa

SEQ ID NO: 109358 - DNA, 1077 bp, Homo sapiens
tttgtgaatcatgtctttttcttaatcctcttaaacagtacatgctggtagtgaaaaatgctcaagataatctgtttcctctctatcattttccctgtagtttaagctttttatatactaaatatttataatatttctgacaaattattataggattattatgctttgggaaacatctgcattttctccttaccttggaagtcctcacatcattgccttaaaatgttttcaaattaagtcaatagtagctttcatttatgataagcacttaatatgtaatttatcaaatattgcttactgttataatagaaccagaatgtaacttactgtctctctggcaccactaacacttagatgtgtatctttttctaaaaagtcagaaagaaagtgattacatacaacctccctcaatagcccgttgtgatatcttacagctcttacagtcaagaaattgttttccttatgtccgccatgtggcactttaagcttttttgttctcatatcagtaagactagagaatggcttgtcctcttctctatgtagtaaacccctttgtgcacttgaaggctgatggtaagttaccccgtatcatcattttctctaggcttagtacactccatatacttaaactttcctcttctatcttacttgttttaaaaagtgatttgttcttctctttttgtgctcatacaattctctttatctaaatattttttcaaaaagcagcaagtaaatgtctgagtatgaatgtgtgctgtttctgggctgtggcggtcatcatcattactgtgatgacatcagaaaacatgtgatgggctatatttgtttctgagctccacagatggggcagttcttccttgcatttcctgaaactatcaatttcttcttttggagcccagctacttcctctgatattatcaaacattagttgatttcttcagcagtgtccaatcaactgggctttcttttattgagagagttttgattgttgttgttttcttgcatatgggggaaaaattacagctcctgtgaaaaatatttattttagaagaaaagtgtctgacccatatcatctct

SEQ ID NO: 109359 - DNA, 1053 bp, Homo sapiens
agatattggttacttggaggttttattttccaggttatttactgtattcttcacagatgaagttttgcttatattatgtctattttataagtgagattacacagtaagaaacttaagtgactccattgcagccataaagccaggactatatatatttctagacaccttcttctgttgtagccccatgccccatagacatggaaatcaagaaattacatcattacttttgaaattggaagagtgtcattcccagtgatgtgcttggcctaggtgtctcgaaataatgatgtgtggcagaaccatgaagcagttcctggaagagcagaagacacaaaactctatgctcccacccataaggaggcagaatttcaggctcccccagagccaatccaacaagaagtggaacgcagagaacctgaggagcatcaggtggaagaggagcacagaaaggccctggaggaggaagaaatggagcaggtcgggcaagcagaacatcttgaggaggaacacgatccatcaccagaggagcaggatcgggagtggaaagagcagcatgagcaacgagaagcagccaacctcctggaagggcacgcgcgtgctgaggtatgaagtcacccgcttctggtatggtgtactgggatggaaaacctggctttatttttacatattaaggtaatatatcacaatctctaaaatagaaatgtgagtgattctactaaacattatatgctcatatttaagttttctcttgtaatgttaatagcatagctattcgcatacctcagaaagatgattggtgatgagagagcacagctgttgtatgtgtgcattcttctttttgtcagttgtacacagtcagagattcattctcacatcaccttaatagagtagaacaggtgagtacctgatggggcaccttcccagcttgtacccaagttttgtcttgagcatcttgaggcagagaaaaatctcattttctatgatcaggcgtcctcctctccctgttcatttattgtcagtatgttgccttttgtattcaccttcaaggtggtt

SEQ ID NO: 109360 - DNA, 1643 bp, Homo sapiens
tcttcttctctctatccattagggttttatgttcatttactttctcacagtggttttccttagacattttcttttatcttacacagattggaggctgtagaactattaaaatgcttccttcttgttactaatatttaataaatgtccttttacttaccacaggaacacaaattattatttaaagattctgcttccttggtccttgagtaaaactcattattctgtgtcaggaagaggatcattgtttctgtcaagctggaagagacgggcagcatgcagttatgcccttctcgcaggatgcagatcatgccggcatctccaccccaccgtgcctccccctcgctttctgtttgctattgtctttccctctgatatcagtagggcatgcactttttattgaaaccggaatcttttcttattatcaagagagcagtaaatgaattaaagcaaaccatgctttcacattaagcacttggagactgtagtgtttatctagatcatgattacattgtaggattataatcggaaataaggtaaataaaagtcaattctctaaacagttgattactattcccaaagggaaaagtctcatttactctctctcttttaaactgagttaccagaaaggctgaaataccaaagaaggaaaattaaatgcattgctgggaaaacatcagatcgaaagaggaaatccataatacccagggagggataattttgccattagctttaccttgtttccacagtaatatgtgtccctgggaattttcccacattttttccctttccatctctcatgctaacttcttaaaaattaaggggaaaattatttttggctgtgatcccaactgttcatttgaaatccaggggaaatggagggaagctgcacaaattaaagcaacttgagaaaaacaaagcctatttcttcatgtgtttgtgcttgcttgctttcatttgtttttgtttactgtgctgtcaagaaatagactctcatataattcagagaatgtatatttctactcaagttttcatctttgcagagccaacacgaggagctaaagaaacagcacagtgacttggaagaggaacatcgcaaacaaggggaagacttcagtagaacatttaatgaccataagcaaaaatacttgcagctccagcaagaaaaagaacaagaactttctaagctaaaaggtatttggaaatctgattagccagtttatctctaaataagtactgatattaatgtttcagtgcaactgtagactgttgttttgagtggtgatcgatttacatttatcatgtggtcctttaccagtcactttttctttgtaatgtttcacatgtatcttcatctatttgggttggtttagggaagcagaatagaatatgtcgtgtgttctgttgtatcgtagtgtattctcttgtatctcagtggggcacatggccctgttgggcaagacgattcttctcttaactgggttgcgagacagatagcatctctgatccttacctactaaatgctataatgcttctcagttattgccacaatcaaaaattgctccatatatttctaaaaatctccaagggagcagagacttgctgttgatcgccagtagtaactgaaaaaagctcaagttctatag

SEQ ID NO: 109361 - DNA, 1002 bp, Homo sapiens
taaatcacatcttctttacaaagttggtatacaaagtcaatgaatatgttaaaggctaggatgttacttggcagtctgtttccttccccagtcattcaccaggttgaattgacttcccaccccatcactgagtgaccagtgacaaatgccttggtgaacagcatccgtaatgaataccagtttcatagaaatgtcacagtatatctcctgcaatgtagggctggcccaagaccactcctgcaggcacttttgtttcctcagatcatcagtgcaatttggggcgtgatccacgttgagtttcaccacagagtggtaccagaatttggccctatgggaaatccagagtccaagactggccataaaattaaactttttctctaggtatccttccgagatttgacgcccagaagcagatttaagtgctatgttgtatttcactccctgcctggagttcacaacagggaaactccgtcacaggcgtttcagcctttgaaaagagtaagatgatgggagtttcatagggggatgtatcagttactgtggatacttaaagttaacaaaacattcagagtaaggaattttttaattaaagtaagttctacagcatccatgaattacctacatttttccactccctcacatactttctcaagttacccacccttgtgactcattcagtagcaaaatcagtgaagtcggcattctcttttagtcatcaagcaaaaatgggtcatctccctggcctactagattgtctggtttgccccagaaaatctcttttcagtttggccctctttctgttgccatgtttccttgcttttcctggaggtaggggggcgccggggaaagtgggggacagtttccacctatcatcaagaacttgccatgacagccagcttcttcactccaggttgctctcttcttaatgttatatttattgtattcattcatcattcctgcctagagagcagtgctaagattctgtccttgtcttcttttaaa

SEQ ID NO: 109362 - DNA, 1046 bp, Homo sapiens
gctgaggcgtcagagcacttggatttgattttctgctatcttattttgctagctgtgtggtcatgggcaagttatttaacctttctgtgactcaatctattcatatgtaataatcaggataatagtgcttacaaaaggttatcttgagaatcaatagtgttagctgatgtgcagtgcttagaagggtgtagcttgcattttggatgattgaggaaacatatacaacagagtggttcatagacctcagcaatttagaccacaagtgtgggcaatgtgtggtaggtgtactaattttcaagtgcagcgttagaacttaaaacatgaactagacattgtctattaaatggacatcttcactgaagtacaacttagagttaaatgaagagactatcatttttgcttgatcctgtaccatttagaatatggaacaaaaatactcttaagttcagtaatttttatttgtgtgtaaattccttccctgaataaaagataaaagcttccaaataccttttgaagctctaattcagtgaagcattcttttgaatatgtatgatttgcacataatctataatcgatttcacacgttgtgcccaccttagtcatccctctaatatgtaacatgccaactctaatgagagtactggtgtccaggtaaataattggttgctgtgtaagagaattacttgttatctgggagcctttagtttaagttccaagtagattggaagccttgccttgatttctttttattctttcttttcttaggaaggacagtttccaaaagggctggggtacaataccacattactgtggctgaaggaataagtgaattggagttggggaaatgaatactgactaaatatggtgtgaatcaaaaagcaaaggattggagagaaaccagaagagggcagggaaagaaaaggggacacatatcacctggtgacttttcaaagtactgaggaagagttttgttcacatctttatgtcctaaaagaaaagcagcaggaaatggtgactggagagctggttggggcatcagatgtggt

SEQ ID NO: 109363 - DNA, 1050 bp, Homo sapiens
tttccatattaagacaaagacctgtaattacccctcggattactcagataaataaaaagctacacaaaaggtcaaattgaccttgttttcttccttaattctctatttttttcttctggtcctctccatcttctcattcgaagaccacaatttgctatttatctctctgtttctctcaatatttcttctgtttatttcctcttctcctttacctttttcttcttttattttaatctcctgtattcccccatttcatcctgtttcttgctttttgaatcagggtaggagatatgctgacattaagtatattaatagttagagtcttggcattgtcaagaacttgctcaaaggaaaaaaggttgtcaggtattgagagagaattgcattccttaaaatagtgattatgtgattttcaattttttttattcggatcactcattttattacgggaatctaagtagatcccttcatttctcagcaattttttaattggtacaataaataagatagctataatggtatttgtgcaaagctttaaaaaataagttggtaactagaaaagaggacagagggaagcaaatgatagagcaaagtacaaattatatgagcactgcagattgctatacaagttagacagccccagtgtgcgtctaatttatgtagctgataacccaagttaacagagaccctggcactattatggaggtaatattttctcaaggatgtacagtcttaaacaacttcttcctgtattaggttcatacatgcttttctttaacataaagcaggtatgtctggtctcttgttccatttcattttcttggaaaaataaatttattgtaggccagctgaatggaaattctgcttactgtttacgacagaacttgctctccccctctcctgtattacccagggaattagtttaatatagagtcttattccacacccatttctttatttttcccctctccatcctactttttagggttctgttcagaaactatattgccacagagcagctggtagcatttagcaaccacctgcacaagt

SEQ ID NO: 109364 - DNA, 1074 bp, Homo sapiens
ttctatgtcaaatactaaactctctcactattttaaaaatggatatttagaactacaaattagagacaataatcgcagtacatactttagcaaataattgttgcactttcttgctatagagaaggatattgcaaatatattgattttcaagtaatggagtttctttggagcccatctctgtctgcccacacagcaaggtcggtcctctgtctgcattccatcatgcctgcctgccacatcttatcagtgcagagccctatgaagaaggttctatatattagccacaacatgacctatgtggacaagatcatccttagtaattactcactggtggagaagtgatttagaatgaataactcaacaatgccattatttaccatatatcatagccatggataaggttaaaaaaaatcttccttcaaattcgggttgatttatatatcaagaatattggcaactgagctttatctaacttttttttttttctgttttgctgctgcttaagaagatcttagttggtagagatcctgacagttccagttcctgactaatgtaactactcgaagcaacagttagccctgagcacagtccccagccaggatcttggcaagagtccatgggaataatctctttctcttggcagctgcctgaacagcagtttgtggaaaggactgctgtcagttggcaggatgagggtgggtctctacagcacattaattaatgcttactctttaggtagaaagcttcagaaacttgtataaaataaataaattaagacagtatagtatgtggtaatttggacagtgtatttgaagcggagatatgtctcatagttggaaggatgagagggtacaagagaaatggcccctgattatttatttcctaggtatgtcaacttctctgtatctgctttcttacctgattaacaagggtgttggattagaagaattctaaggctcccttccttctagcattctgtggctccatatggactagatagtctcagaaatgcaatatctgcacttgatacttcgcttttttttaattgatttataacactgctacttccacaaa

SEQ ID NO: 109365 - DNA, 1039 bp, Homo sapiens
atggataatgaattgaactagcccatgcaagtattgacaattgaggattagctcatttgatttatggattcaccacagataaaccacagaggccataatctctagcctctccctggcctgtaaataataaagattttaatgaaggcacatcgtaacaatggtctttcctgtttatccttcaaagaacaacataataaggtggctacccctgtggaattttgtctcttcaatatcagaaggaattcatgaagttcttatttattcacagataatgagtgtgtatatggcaactaccctgaaatacctttggaagaaatgccagatgcagatggagtagccagcactccctccctcaatattcaagagccatgctctcctgccacatccagtgaagcattcactccaaaggagggttctccttacaaagcccccatctacatccctgatgatatccccattcctgctgagtttgaacttcgagagtcaaatatgcctggggcaggactaggaatatggaccaaaaggaagatcgaagtaggtgaaaagtttgggccttatgtgggagagcagaggtcaaacctgaaagaccccagttatggatgggaggtaagaatgtattttgagttaacacatttatatattgcagctgtgtaaagaagagattgtttaagcatccacaaaataagcaaattatatttgttacaatatgttttcaacaggtttttaagaataaacttcctttacaatctcacttcttaatacaaacaatgtattgattaaaggtatagcgtgataggagggaacccaacctaatatatggttaaagaattgtactgatttgaaaaaatactaaaggaagaagatatgattttatagttaacgtttggaaacattggctatgaccatgtgtagcatgtggcattagcaaacaagcataatcatatgacatgtttattgcattttatcttttttggggtggggagttggaggattggaggaaaacatttgttttctctattttgtgactatgagttaattt

SEQ ID NO: 109366 - DNA, 1042 bp, Homo sapiens
tgcctaggctttcgcatcaagtgggacttggtgaggtggggatgtggatgcatattagttaaggtacaggctggcagcggcttagatagagggaggtaggcagttcagggaaagttggcccaggtttcagatccctctgtctgtggcttctccagctcctggagagttgtttctgcgttcaccagcaccaagtccctgttcctccttgagtgaaagagaaaggaaagaactggggacaacgacatttccctttcgggactaaatggagaggttgcccatgcaacttcctctcacagctgaaacttggtcacactccgaggtagcaggttcagagcacagattctggagtcagaccattggggttcacatcccagctcatcccagcacatcccacttgtacaagtggtctagcctttttgttcctcagtttcctcctctgtaaaatagggatggggagaatagcaccttgctcatgggatgaggattgcatgtgttagttggtagaggacctaagacagtggttggcaaatagtaagcactacgagtttgctcattatgtaaataattggccataccagactgcaggaaaaactggaaatgcagtttctacatgggtagccaagtgtcctgtcaaataaaagtcagtagggtttttttttaataaaaggaagaatggggggagtggatacaggacagtatgaccacataatttttatccaaaatgacacacttatgacagtgaaagatgccactaccactgattacactgggatactaagcgtaaacaggaactgtcctgggaaaatcagtatgtctgggtgctttatccagggggttattagctatctctaccagagcatatgtaattgaccaatttcccaaattttttatttaaaaatcttagtctgaaaagttgacttctatttttaggaatgagtagaaggacagatggaggggatgttaagtatttttcctatttgaattctaccacaaactacgtggcctcttggaaaagtatacagattaacaaaagaaaccttgg

SEQ ID NO: 109367 - DNA, 1344 bp, Homo sapiens
tgccagtcttcggagtgcctggtctttttcagtcccccagggtagagtttgttaaatgtatttctacccccgcagggcacaccttcccctgctggaaagacagatggcttagattgagaaagggagtcactgcttttagttgctccttttaaaaatcattttcttttctgcatgcagaaaacttattttgatggagccaatatttaaggcgaagctttcttatgggctgtgaaactgagggtctttaatgctttttatgtttgaaggttctattcgagaggtttttgtgaggacataaattacgggtagcaacaggtatatttttcccttagtacaaaggccaagtgtaagttttttactagttaagaagggtctgttcttttctttttgaccttgattttttagcgatattctgctttgcccctgcttcggttgtattattccctgacccatccaattaccatttctatcagcgcttcggaaagattatgctttttgggtgttctgtagatgtctttccagtggcttcacttgatgaatgtgacaagttttgtgttttctccctcccctcattgaattgaaaagttttttttttttttataaatacaggccaataagtgcccaaaggcagtgtttcaatggctgctaagtctttcaaggttaggacttaacctccgttctccctaattcaactccaaccttcagtctgaagccaatcaagaatatcagatgatacttaaacaatgaaggatttctgatattcaggtactgcctctgttcaataggattgcaaattctttgtgtgaagaaagtcggttttgctctaaagtaccgtcacaaaaagtgaaattaccatttgcttggaatgatgccattcatcattgtcagaatactaagcattgtaagtagctaggcctctccaaattaatgccttgttttgcatcggctaaatttcccaaatccttgaggatgggtcatacaaaactcatctcaccattttaatttatcaatccaatatgagttctgtgaaagggagcttccttcactcttagctcttttatttacagtctaattctaaaagaaaaggaaataagatatgaaaataagttggaaaataagataaatctctcggtgaaatcaccagatctcagtcctgtagcaaaacctccataattcatctgtaggtcagctcaagggattagccatgacgtatttggaaattcatttatttttattttattttgctgtttcttatgcataagggtaatgctgtccccaaggcttttcaggtagccctcaaatcttgacaacatttgctgtctctgaggcctaagccaaaattaa

SEQ ID NO: 109368 - DNA, 1032 bp, Homo sapiens
cttccacaaacttttatttttatagaattattttctctggagttttagagaaattaaatgctacacttatattgtatcatcatctcttcaatccttaaatcttcgattcagcactattcaattgcctgtcccattcccctgcattaaacttcagaggtaatgacatcaatctctgggataatagaaccatacatttggtaatgattcagtgtttggcctccaggcaggtaaagacacaaaccatttaagacagatggtcattgctcctattttaaaaagatttctaagacctctaatccataacctctattggtcatcttgtccaatatttaaaaatgttcttatatttattactgtcaagaagattttctttatgttctatccattttcccatttcatcttgcttgataatctgtggaaatgaaagacaactagtcagcatcattctcgtaagatcctttcgcacttgattcttgaacacttctagtgaaataactagaatttatattgtcttttccttttaggatctagttttcatcctcttagtactttttggtactgctcattttcagtgtcttcattctttaaaatgtgaatacagtgctgggcagcgtggaccactttatatatagtctttagcattattgattacagagaaaggatgatttctcagctgccaaatgtcatactcacttgttaagtcccactttctttagaaatacacagtagtttaccagtagtatactcaaattcaattggaaatgtactacaagtctaagtgtcctccttttgagccttcccagactttctctaactcattcttcattttcttctgtaatttttttttttttttttttgaggtggagtttcgctctttcgcccaggctggagtgcagcggcgccatctctgctcactgcaagctccacctcttgggttcacgccattctcctgcctcagcctcctgagtagctgggactacaggcgctcgccaccacgcccggctaattttttgtatttttagtagagacggg

SEQ ID NO: 109369 - DNA, 1087 bp, Homo sapiens
tcgatgaggtagtgttccatgtcattcttgtactgtgcctttccataggatcaagttggcatccttgtttctgatgacttgctagcagaaaactccccatctggcttaggaatttgctcaatttcactttgattagggaatctccatcaattctaaagcagattgctttctctaataggttctgcagaaggcctgctactagttgtccttgcttgcgttttgcattatgctgtgctggtagggacgctttctattttgctgtctttagtacagatagtaacttctagattagtatcttagctaaaactgatttcacatgatcacttccagtttaatacttgttaaatattttatctagctgcagcagcttaataatcttaatgtacaattatttcacatccaccatcaagtggcagtgcgtggactttaaaaatcccaaggttttcattatgtaatggggaaaaagtgagaatcacactgttgatttgttgagaaggttaaatgaaatatgcatatagaagtacctagcatggtgcctgacatacaacagagattttaaaaatacatcctcctttgtacctatgtgacaggcctgaattttcgagaaaaggattttattcttattctggttctccatttctagtcttaacaaattggcctctgacaaccatttagagaagaacattctgcactggccattcctctgtgggagcagattttgccaggtatgctcatgtatcggtgtgggcactctgattctaaggtagagcaaataacccaaaatatctcttgctgttgctattgttgctattatacctattttagcttccttagtcatcttattcatcttggtatttacctcatgcctataagagcaggcttcccaacttcatacttattcatcaaatcagtagatattttcccccagagatgtagcatgttagaaaaataaattggtaaaaactaatgcttacttagagtttgttttcccttcttgtttatagaaatccaaaacaaaaacaaactccacctgaacttgttgatgatctgttgttttcctgcctcttgtccagatgtggaacaaaat

SEQ ID NO: 109370 - DNA, 1044 bp, Homo sapiens
aactttatgaacttataaatggccccaaatcatcctaattacatatatgtgtatccagaaaatgtaaaccacaatcctccagataaaaatagttcaacaaatatttcagatgagattgggcatgttcaggatggtacggctgtagacagtggtatggccatagactcaacaaatatttcaaacattaatctatattttttataggatgagaatttgggttattactggctttttatttttatataaatcatagaactcctagaattgattaattgcttgttcagtgaaacttttgtagttttggaaaattatcattcttcgataatacttaatcatattattgtgaagtgttatcatttagtaagagagcacattgaactagaataaatgaataagagcaggttttgattgctgcaaccatgatacattttcagtattatttttgtcagtttgcacaaatcatcaatggtcattgggtttatatgcagattacgtaggttcaatgtagaatgagcaggtgttgagaatgcaaacagttaattaggatgacattgactgtaccatctgataatggagagtccaggtaaggggcttcacatctaatctgaattgtgacttgacaaatctcaatgatcccttctttgtgcgatttctctcctagttctgtgtcacagatgtatactaaagaagtgttctggcttacagaagttctgacttactcttttcatctgatcttcgtttcagtaaatctcaacctgaaagcagagctgagttgggaaaagattgtgaggtggaatttattttatttttttaatgaattacctgtctttcctccttctagcaaccatgacctgggcagtctgaccccagcgcctctgcacttaaccactatattatactatctgagagttctcaagagtatggcttcgtttcatgagagttttatcttatctttgaaactctggtgccaacacagtgccaggcacacaataaaagagaagttatttaatcagattaactcccactgatattagctaacttatg

SEQ ID NO: 109371 - DNA, 1078 bp, Homo sapiens
cagcagggttttgggaaggtcatagagggttgcttcactgtcagggcagatcagatttccaagcatctttggcttctggaggatcaagggtctaaaaccagagctaaggtatatctttctaaaatccactgtgatatatctgtgctatttcaagcttacaggattattccaggtcttatattatgccccatttctatttcttcctgctgcttggaacaggctgtagctgaaatcaatccatgtagcccaaactgggtaaggataagtaagttgtcagagtttcaggcctcaaggcttttttgttgttgttaagtgatttccttgtttgtgtgggacattattatcatactgccttatcctgtacatgtacctaaagccaactgatgctactagacccaccaaaacttttttgatgttctttaaaaaattacccacaataatttctagcttatgaattatgaagaccatttttatagaaaaatgtttttcactgggtaatcagactatgggaaaatttttataatggaaactatcttttacttttaactatagcataaaaaatatgacagtatagtgttacacactaaagcccatcagatgcaaaattccagtttttgattataagttataaaccaggatagagagacttctgaaaagtggttttctttggcaatgatgttgttgattaaatataaaaaattcagaaaaaattagttcagcccattcctttacacagaaggttacaaaaatggaataactgggttttggttctactggcaagaactattttgcttattaaaactcattggattatatcagattgcaaacatattggacattttagattggatttgaaaaggtaccattcaaggaattaaaattattcatataaatctttaagggattaatttactttgcaattttaattccttagagcacaatatttgtttcaaatgcgtacttttttggtgtggatgtttactggttgttccatgagggcattactctattaacatttttcaaagtatattttaagttagatcaatcaaattgaattaatgaatagttatcaagtacc

SEQ ID NO: 109372 - DNA, 1408 bp, Homo sapiens
aactcggacgcatcccactgagccgagacaagattctgctgtagtcagtgctgcctgggaatctattttcacaaagttctccaaaaaatgtgatgatcaaaactaggaattagtgttctgtgtcttaggccctaaaatcttcctgtgaattccatttttaaggtagtcgaggtgaaccgcgtctggtctgcagaggatagaaaaaaggccctctgatacctcaagttagtttcacctttaaagaaggtcggaagtaaagacgcaaagcctttcccggacgtgcggaagggcaacgtccttcctcatggccggaaatggaactttaatttcccgttccccccaaccagcccgcccgagagagtgactctcacgagagccgcgagagtcagcttggccaatccgtgcggtcggcggccgctccctttataagccgactcgcccggcagcgcaccgggttgcggagggtgggcctgggaggggtggtggccattttttgtctaaccctaactgagaagggcgtaggcgccgtgcttttgctccccgcgcgctgtttttctcgctgactttcagcgggcggaaaagcctcggcctgccgccttccaccgttcattctagagcaaacaaaaaatgtcagctgctggcccgttcgcccctcccggggacctgcggcgggtcgcctgcccagcccccgaaccccgcctggaggccgcggtcggcccggggcttctccggaggcacccactgccaccgcgaagagttgggctctgtcagccgcgggtctctcgggggcgagggcgaggttcaggcctttcaggccgcaggaagaggaacggagcgagtccccgcgcgcggcgcgattccctgagctgtgggacgtgcacccaggactcggctcacacatgcagttcgctttcctgttggtggggggaacgccgatcgtgcgcatccgtcacccctcgccggcaatgggggcttgtgaacccccaaacctgactgactgggccagtgtgctgcaaattggcaggagacgtgaaggcacctccaaagtcggccaaaatgaatgggcagtgagccggggttgcctggagccgttcctgcgtgggttctcccgtcttccgctttttgttgccttttatggttgtattacaacttagttcctgctctgcagattttgttgaggtttttgcttctcccaaggtagatctcgaccagtcccctcaacggggtgtgggagaacagtcatttttttttgagagatcatttaacatttaatgaatatttaattagaagatctaaatgaacattggaaattgtgttcctttaatggtcatcggtttatgccagaggttagaagtttcttttttgaaaaattagaccttggcgatgaccttgagcagtaggatataac

SEQ ID NO: 109373 - DNA, 1219 bp, Homo sapiens
aagatggaagattttgcttttattgctaatccttcttctacagagatatctagtattactggaaacattgaattgaatcaacagacttgtcttcttactctgcgagattataataatcgagagaaatcagaagtatctacagatttgattcaggcaaatcctaaacaaggcgcgttagcgaaaaagtcatctcaaacgaaaaagaagaagaaggctttcaactccccgaaaacagggcagaataaaacagtgcaatatcccagtgacatcttagagaatgcatctgttgaattattcctagatgcaaataaactgcccacacctgtagtagaacaagttgcacaaataaatgataattcagaactcgagttgacatcagttgtggaaaatacttttccagcacaagatattgtgcacactgttacagtgaaacggaaacgtggaaaatcacagccaaactgtgctctgaaagaacactctatgtctaatatagccagcgtcaagagtccttatgaggcggagaactccggggaagagctggatcagaggtattccaaggccaagccaatgtgtaacacatgtgggaaagtgttttcagaagccagcagtttgagaaggcacatgagaatacataaaggagtcaaaccttacgtctgccacttatgtggaaaggcatttacccaatgtaaccagctgaaaacgcatgtaagaactcatacaggtgagacgggtgtgtggggagatattatttttatactgtgactaatatagtgtatttttatagagagtacttagcacacactacttgtgaccagaatttggtatatttttctattcatcaaagtatttaacagtgttaaactgttgaaaatttatttgtaattgtaaccaagtatttaatggctgtttaagccctaatgcatcaactccttataccattttccctccaaataagtatgttgattctagcttaccaagtatttaacagagacaaagacattaaaactgataaagagaaaatgtaattacaattcaggccaattttcagatattgccaacacttctcattacatacttctagactctgttgacttctgaacatgttcattggaattacacatacagtgttccctaagcttctacagttacctttattttgcatgtcctctgcctggttgtaaagtatgagcacctattggtacgtttacattcgtacttt

SEQ ID NO: 109374 - DNA, 1543 bp, Homo sapiens
gcctgcagtattaggggcccactgacaaccatataaagatcatggaaaaactttttgaactgatctcagaactaatgttttgataataagaaatatttgtttttggcagtgtttacactgaaacaactactgattttaaatacatagtcttggcctgttaagatgacatgaaataaaatctataaaaaactttatgaattcttgctatatagactgacctccaaattgttttacttatttaactttatttactaacaggaagcatagtggagagaagccatatgtctgtgataggtgtggacagagatttgctcaagccagcacactgacctatcatgtccgtaggcatactggagaaaagccttatgtatgtgatacctgtgggaaggcatttgctgtctctagttctcttatcactcattctcgaaaacatacaggtaagtttgacagggagagactgcttaaaataaagttataaataaaagaaaaaggggacttgggccttttagcgaagtagatcggaaactttgtagttagatatctgtttatatttctataagctatgtttatgatttttgcacatatttgttaaatataaaagctgacttattttctagaataatacaaggtgggtgaaataaattatataacttacacattaaaatcagtgagataattttgatattatataaacttgcattgagatgcattttgtgactttataaaaaccttttcagcttcctaaagggtcatctcctatagttagggttggggagtgggtttgggttgaacatggatttttaaacttcttaggacctttcctacacagatattctgggattttcaaataaggtaattcagatgcaaaatagcagtttggaaacaaattgcttttttagggtacattttttaaaagacttccctacatacttttattctcctttattaatatagtagatagcaagaatagaaatgtgggtttatgaattgacatgttcttaatcatataaaaatcaaattccttgcccaaatcatctctattagaagggacattttgaggaataaagttttaatatatgaaaacttatgaacagtatacaataattactaatattcatttacttggatcactgaaaatacctctaaagtacaatatagagagattttaatttaaataatattccagaaaagcttactttagattatttgtaattgataaatattatattggtatagtacaccacttcgctatcttttattttccatctaggtgaaaaaccatacatatgtggtatttgtgggaaaagttttatttcctcaggagagctcaacaaacactttcggtcccatacaggtctgtgtttagggagaacgtattattttttgttctctcttaatttctttttatgtaaaccttgacttttaagccattatggactatatggtatttagtcatactgtacctatagcaatatcttaatgtataaatatcaacttatttgcttattttgttttttttttagttgtttggagtatgaattaa

SEQ ID NO: 109375 - DNA, 1086 bp, Homo sapiens
cctcaagcagcagtgtaggtcaggttacaggtttaccacctgcaccccactgtaagctcaaggtaagcctacttgcttctccttcagccatcttctgaatctccctttgggggaatatgggaacttgtgggtctcttctatagcacacaggaagagacagtagcctgggaaatcaaactctttccagaatctggtagacatcctactacccagcatgtgaggaatactacaaagcaatgaaaagtgaacagactactgctacatgaaacaacataaatgaatcatactaatataatgttgaacaaaagaagccagacacaaagagagtgtatactgtatgcttccatttatataaaggtcaagaacaggcaaaactactctgtggggttagaagtcaggatagtggttatgagaggagagtgggagagctggcagcactggcttgttgggaaaggggtatgtatatgtttatatatatttgcctgtatttatgaaattgttagtaacacctgtctgtaacacgtaaataggataggtagaatactttttcaacttctgaactttgaaaccctttgaaagtcactggtaattttctaccacaaacctttttattaatactacttaataactttcagttagatacctacaatgacctttacttgtacgctatttcactacttggttatattttcattataaaaagaaatttagtctagttccttggtctctttctccagggttagaattttagtctctatattgtaaaatttcttttaaaaaattaccctactcagtttttcacaatagacagttatacaaagtttaatacagtcattatcttttacacatttgaaaaaagtaacttgttttaatttataaaagaaaataggctatagaatattaatctctgtgaaacaataagacaagtgtatgaaaattattttacagctactttttcatggctgttgacctactggaacaagagcaaaacctgcattagatgagtggtcataagattctccataagttgatgtccaataataatgctttttaaggccattggagacttctgcaagatatacacgt

SEQ ID NO: 109376 - DNA, 1037 bp, Homo sapiens
gctaccttgatgtcagctggtaagtgataatttacacattaataattcaaagttaaataatgggaataatctatataaatattcatggtacttgggatacgttgttagacattatttccaatgattagaaactgcaaccaattgtcaatcctttgtcctaagctttaatatttaatactgctatcttttagtaacataaatgagcaatttagttgtgtaaacaagaatgaaagcaatattttatggtgaattttcattaactttcttggaaatcaagtggttaaaataaacctttactaaaacagaaagtactgtttaagttttcaagcatcttatcactatgaataaaaacactatttcatattttcaaatataactatttttcctttgccagcaacaaaataactcatgatggaatggtgtatttggctgatgtactgaaaagcaacactaccctggaagtaatagatctttcctttaacagaatagaaaatgcaggcgcaaactatctcagtgaaactcttacttcacacaacaggagtcttaaagcgttagtatggttttatatttaatcaaaataacagaaaagcaaatttttaaatactaacctcaatccccttaactcttaagattataatgaaatatgaaaactcagcttctaaactgacatagtattaagttacagtaaacatttacatttctatttttcaaatgtaatgtcttttacaattagactgattctattaacgattccttcaaattaatgagaaaatttgcattgcttatattacttatcctgaattctaatagaaaactcagaagcattcaatatgatcaagacttttaaaagtaagaatgaactaaagaataaaatacttggatgcatttatccagaaaaatatatctgctatccacccaaacatttactgaataatataaaacagaagactttcaaaatgtagttagctctactaagtaccttaaggatctaattagaaaactaagtttcttggattttaggaattaaatggtcagta

SEQ ID NO: 109377 - DNA, 1040 bp, Homo sapiens
gtgagaccctatctcaaaaaataaataaataaaaacaaaaatagtgttaaatattttgcatactgagatatggcaaaaatcacgagggaggtacatgaataataaaatagcaagtgtcacaggttttaagaactgagaagtcagaatggctgagcagacaaagttaagagtgccttgaagtaaaagtagagaagcttatggaggccagatatggcaaagttgtgtgggttgtgggtcacaggtaaggggaagaagtgggggttgtattataaatgaaaatcatggaaaaagcaaatcatggaaatctggaaaagctctgaggggtaatgatctgattggtggttttagatcactggtttctctgtgcagaagtaaagggtggcaagaagaagccatctgaccacttagtagtccaggtgagaggtgaggaggacttgggctggggtggtggccacagagatggacaggaacagactaatttgagacatcttttggaggcagcagaatctgtaagtcttagtgatcaactggatgggaaggtaagaggaatggcagagtgagaggaagcccatggtttccggcataccagctgggtgtacatggtggtgtccatcacggatatggggagactaggcccttccagtcagatagagcaagagaggcctatgggatctgtgaaaaatgtgattggtaaccttttcccaccgcacacacacttaaaagtactagtatgaatataaaagagtgcttgcacaatgatgtgtgttggataagtagtatgagctctagctgggatccacatagaagcttgaggggtgaggaaaaaaaacctagagggaaacacccaggaaatggacactgaaacattaagaaactccccatgccatgttttagatagattttagggccaggagagaagaatacagtaacaattcatttttgaatttgatcaacttacaattcaaagtccaaggaatgcttaaattttaaaaacaattttatcagaatgcagatagctgatcttgaaatatttatgtagc

SEQ ID NO: 109378 - DNA, 1026 bp, Homo sapiens
gctaatttttgtattttttagtagagacagggtttcaccatgttggccaggctggtctcgaacttctgacctcaggtgatcagcccgccttggcctcccaaagtgctgggattacaggcgtgaaccaccacgcctaacctgagctgggtgagtctaagcaaatcactgaagttttcagtgttatctataaagtggggatactgtttgtgtgagtgtgagtgtgtgtgagagagctaaatatatggaatcttttaaagcactttgcagtctgcagaatgttcagtagttttaagttacctggtataaatatactgtataagtctacttattatatgcttgcttccagtaaatgatatctgtgatatgactatttatacatgaaggaaacatacttttacttctttactgggtttctatttcaaaatcttttttttttttttttttttttgtattttaacaggctagcagcaggaatcacattaaacattgctggtaacaatcgcttagtgccagtagaaagagttacaggtgaagatttttggattctttccaaaattttaaagaattgtctgtatattaatggtatgtttccataagaatcaatacctcctgcttttcattgatctgattttaagtattctttataatgaatatccacttctattcatctgtgcttcaggtttggatgttggatataaccttctatgtgatgttggtgcatactatgctgcgaaactgcttcaggtattattttactacaaaatgtccttagttccatttacaatgaaaccaattagtctaatgacacacacataaaacactagttttacctgatgtcaagggtcctgactctgtgctagaacactcgaaatatactggaaacccattgtggatttggtctcaatggagccagtagctagagctcctaagttatcttttgcaaacttgtacaccatgattaaatatatacaccacacatctttcagattgatcaaaggtaaatatagttttttctttcatttatat

SEQ ID NO: 109379 - DNA, 1098 bp, Homo sapiens
tacaacattttttaaaagagaaaaagcgtgcacattgttttaacagttaggtcttgagaatattatgattaatgttgcgagacaggaagggagacacacactgacatgaacacctagagacagagtgcagctgttgtgtgcacgggtggctgagctctcaaattcactgtggaatcaaactgttggcaagtgaaagtgatggagttggagcatcctccttgatctgaaagccatgcgtgtgaggaaagactgaaagaccagggcatgttcagtcctacagggataaagtttaagggagacctggctgttgtccaacactgcagggctgccaggaggaagaaggagctgaatgttacagctgactgattggggcactgggtgaaagacaccagaagatagattggggccctgtgggagggcttcctcccgctaggagctgctccataatgctggggcaaacttgaaagaacagttcagccagaattgtggtggtcatgagtagagaggctgtgaaaaggatttctctctgattattgattaggaggttggataaggagacttccaagatcccttgcaacgctgagattctatacaacccacctgatctctgcaatccattcctgggtttggttgaaaagggaagcatgtcccattttccgtggttatctctcctgcctcctcttacagaagtctttatttcatcattaacttatttattttctgatcaaatagctcagattgtacattagtcatcatttttaagtgccattgtaggtagtactgatatgttctattcaaaaggaaaactgtcacatgtattggggtctctaaggtgaattggaaattatccaggtatgttctgcatatggaaaatgctcatttaaataattgctggatgaagaagtactgaatgaatgaaaatgaacaattaaagcagcaagatgattatttacaaatggtccttagttaaagccaatgagccatcactctttacatttaattagagaaaatctgtaggaagagctcggacttcagtggaacagagagcaggaacttgacaaaaaaaaattattgggttgagatttggaaaaagaaata

SEQ ID NO: 109380 - DNA, 1405 bp, Homo sapiens
atccatatccttttaggaaatgccttccactgtcatgtggttttagaattgccttcgctcattttaattagacctctcggcagatgttggtgagaagggaatctgcacagagggcttcaccccaggtctggtacctcccccacctccccacctggtgctttgcaggggccgcacccactgctctgtttgccaagaccgcttgggaacaagtagatacacacccaggagagccacatcctctgtcaccagggaacagctgctcagcctcagcacttgaagagacatggaaagctttagtgtttccagaagcagcttcaagttgccaccaacacacttgttccaagaaaggttgaatacttccagagcagagaggtgaacagaggcttcagctaaaagtgataacaatacgaacagcagtaatttaggatttcttacagatcataggctttggatttgaggaaactggtctaggacaacacatgaatataactggggttgagaaagttgtagagaccattttcttctgccttaaatttatggcctcaatttatgttgtctgttttttgttttttgttttgagacagagccttgctctgtcaccaggctggagtgcagtggcgcgatcttggctcactgcaacctccgcctcccgggttcaagtgattcccctgcctcagcctctcgagcagctggggctacatgtgcgtgccaccacacccagctaattatttttgtattttaatagagacgctgtttcaccatgttgcccaggatggtctcgatctcctgactcaggatccgccagccttggcctcccgaagtactgggattacaggcgtgaaccaccgcgcccagcctgttgtctgtttttatttggggaaatattggaaactttagcaatgcaaaacttgataaattggaattcactgtccaactggggtttctttccttcacttcacatgtaggaaggagaaagaggcaaagtgcttggacagctagtcaagatttccagaatgtgtcctggttggtacatatttcactgcacagtcactgctgagattcagatgggggcaagcctccctcagagtctgaaataccaaaacttatttgtatttacttcacgcaattactgcaggcaaggaaagtaactaatgtattttggaaagatttttaaagaaaagtaaaagattttctgcttaattctcagttgcccccaatgttaaaattaaccagaatatcttattcccaagttaattgcactttaatctattctgccttccttctagaaaataatgtgttcaaggggaaaatatatatccttttataatatctagtaagaaaatccttacagagatctacattaaggagaaatggaactttttcttctaaaagtgatgtagggaaa

SEQ ID NO: 109381 - DNA, 1029 bp, Homo sapiens
ggaagcgtgtgtgtgaaatcatggtcgggttcacagaaggccagatggtaggaagtctacacttattcctccttttgtcttttgtgaacacagtgtgttccctcaacctcccttactgcaccatggccccacccctgttccacaccttcttaccaccttgcgatatgtcagaatggtagcagagatggggtttcaccatcttggccaggctggtcttgaactcctgaccctgtgatccaccctctcagcctcccaaagtcctaggattacagatgggagtcatcacgcccagcccggtttttctttttttaagagatggatctcactatgctgcccaagctggactcgaactccggggctcaagcaatcctcctgccttggtctccctagcagctgggactataggtacaccactgtgtccagctaccagaatgggattctgactttctttgtagatgctgcttttaggtatttgggtgagctgaggaaattagatctttcctgcaataaggatctaggtggaggttttgaagactcgccggctcagttggtcatgctaaagcatctacaagtcctagatcttcaccagtgctcactaacagcagatgacgtgatgtcactgagtaagtatatattgcagagcaaaggaaagacttttggaatcttggcctatatttggaaacttggaaattttaatatgtacacttaaatttacttcttttgaagttattggaaagatcaattcataacagttctgtgagtgccccaatgtagtacttggcatgtattaaacgcccagtaaatgttagtgaatctcagttccacccatacatgtctgcaaatgatagatttggcacttagggaaaattttgaatttatgttgctgtttagaaataaatctcttagtgtcacaaagttgattacaaacaggttacatacctgtaaccaaacgtcaacacaaagggtatcgaggctttctgaataacaagtgaagtgaagccactcagatacaaatgaagttacagaaaa

SEQ ID NO: 109382 - DNA, 1035 bp, Homo sapiens
ttcccttcttcacctgtttggtttgaggaggcaagtatctctgcttcctccctagcagttgcatccaccaaagatatgcgtgcccttcaagtaagcaagcatctcaaaagccgggctgacaggtttacttctcacccaggaatgcagctctgtcttcatgctgagaagcccaggtcaggtcatgatagaaaagccactgcgttcctcaggctcctgaagcagtgtctgggcacctggcggcaggaacagtggttagttaagctttgtccctagtaaatggctctgcctctgagttgaggtttttataaaagagcaattcagagttatgcagtcttttcacttgtctgattgtggtcattatgcatctttaatacatccatcattaacagcaaattcttttttatgcttatcacacagctaagcctctcagttcagaaatggaatggagatccagtatggagaaaaatgagcatttcctgcagaagctgggcaaaaaggctgtcaacaagtgtctagatttgaataactgtggattaacaacagcggacatgaaagaaatgggtctgtatgcagcagactttgcatagaggaagatagggcctttccattgagataagcagataaaacatactcagctacccacctagtaaccccaagtctgctgagtggtcccagacaattgcagaaacagcatcgctttttttttttttttgagacggagtctcgctctgtcacccaggctggagtgcagtgacgcatctcagctcactgtaagctccgcctcccgggttcacgccattctcctgcctcagcctcccgagtaggttttttcttttttcttttttcttttttttttaagaaaaaggccaggcgcagtggctcacgcctgtaatcccagcactttgggaggccgaggcgggtgaatcacggggttaggagttgaagacgagcctggccaagatggtgaaaccccgtctctactaaaaatacaaaagttagccaggcgtggtggcgggtgcctgtaatcccagccac

SEQ ID NO: 109383 - DNA, 1047 bp, Homo sapiens
tgggtttggtggggctggaacttgaggatgattgtaggtcgagataaaaagcttaaaaacaaaagagagacagcaataagatgcaatgcagagaaattttttaaaatacaaaaataacacacacacacacacacacacacacactaggctttggaacaaactattctgggttcaaattcaggctctgcttcttcctaattaatcgtgtctctaagtttccaaatctatgaaatggtttgtgactcgtttagacaaaatgtcctgtacttgctggcacctaagaggcagtccctccctgtctcccatccacaattctgctctgccccacccaaaattagggttgccagagaaaatacatgcaacagttgaggcatacaataaaagaattccttgtcgatttaaaatttaaatttaactgggcaccctgttgttgtttttcctaaatctggcaactctacccaaaattaaatgccttgtgtccaatgtgccataaaaacggaaggcgagagtgaaaggttaaatggtggatgctgctgcctcctactggtgaaatgtggtaacaccaagcatcccaacaaggacgcgtatcctacgtgtggttttcttagaccaaacaggaagccacaagactgctgtggattacaggtgtagtttttattatcctgctaatcatttggtctaaatttattactactgcaaacctactatcttttaattttcacaggtaccaatgtatttcttcttagctatgttgtcttacacctttttgtcagggttaataaaatattactgctcattccagaacttattatttcctattggatttcaatatacataatctatatgtttaaaattgtatatttcacttacaaaatcactttaaaatcactgtcagtacatgtatattcatttttccttagaaaagtatgatgtgttttatgtatgtcttaaatgctggcacctggcctgccatggtgactcatgcctgtaatcccagcactttgggaggccgggtaggtggatcacctgaggtcaggagttcgagac

SEQ ID NO: 109384 - DNA, 1044 bp, Homo sapiens
tttctattctcctgttcctttcctctccttcacatcctcttctgttccttggttcttgtgtttcttggcttcctggctcccctgttccttagtgtactgatcttcacagagaactggctgggcctcagaagctgggtgtggtttcacctgggtaaattaccacatcctggagcaccctccagcactgttttcttaggacttggggagttggagtcagtgcatttggggggaggataaaaaagtgaaaccatttactgagctagctccccagagaatagccctgtctaaatctccaaatggtgaaattggctgaaaatgaccatggaggtgtcctgggtggggggccagaagagtagcaaattgagaaaggcctggggtgatggtggaatcagggtgaggcagccagggctgcaggtcatgtttagatttatgagttagcgcccctttccttcttcttttccacctaaccccctgagactctagtcagctgtgctgctgtgcatggagtaattgtttagttccactgctgtctgttgctgggtaaaccagggctgggccctgctctaatatgaaaggaagattttaaaagaaaaatggaatgtccaattgtgacttccaaagcagtgctccaagtgcatggaacattccagccctcacgagtggaggtgggctctgcaaggtccatttttaggattccctgtgtaaaatgtttcttggaccattctggaacataatgttacagaaagagctattttattagagaggagactatgaaaactgtaatttcaagaatacttctgctgggcatgatggttcacacctttaagcccagcactttgggaggtcgaggtgggcggatcacttgaggccagaaattcaagacgagcctggccaacatggtgaaaatccatctctatgtcaaaacaaaacaaaacacttctgtgtatccctttagtttaagtccttagccctcccataaaatataagcaaatttcaggagagataatagattgacctttacgaatcctttttagcttcaattca

SEQ ID NO: 109385 - DNA, 1585 bp, Homo sapiens
gctgcggaggcgcggctgtgggcctggagttcctgtggtcgcgctgtcccgggcctgagctggaaggtcagcctcccctggggcgcagacgctgacccttcccggggctcctcccctcccttcaccccatcctctggccttagctggcctgaaattaaggccacggtaataggggtagcaggaggcggcggactgacctaaagcagctggttctttgtgcgcatagaccgtaagggggaatgatctggacttggtcagctgcctcggggcctaggcagggatctgctcatccagatgttcagttgcgttgcccttctttcccttcaatattattaacttaatagtccacttgaagcttgccggcttttttccgggcgacgtggtgtaaacaaccacaacctcgttggtgctgcaacgagctggtggagcccagaaacctttcacatgccagtgtgtcatcctcgtagtaacgtacataacatctccccctaattccacatgcgtgtcatttgtgcatttcttccttgcgattttccctggttcttgttctttgccaagaggattaattatgtagaacatcttggactcaggatatttattagtcgtctcatcagctgatgtgctgagaaaccttcataagccctcaaattgatcacatgtagtaaattgttactataatcataaattgttacattcatcattgcctttctgttccttactatttcattgcttagaatgattttttctttcttccattttatcccttctttttttttttaagtttatcgatttattggcgtacaatacagatgttttgagctatgcaagttaaaattcttctgtaaactttttaagtgctgtgaaaaagacacacatgatcagtaaatttggaattttggaatttggcagaaataaagtagttccgaacagggtgcagaagggaattagaaagaggcagatttcgagttcagacagataagactaggtcttaagatcagtagaagtttctaattatactgttcttaatctttcaagagttagtgttattcctctgacgtgggtatacagtattttattagattgtatattgaaattgtctgtcagatttgtacttacagaactccttagatttacacttgacagtacaattttatgcccttcaatacacattgttttacaattccagttgctctttaatattgttgtaagggctatataattcaccttttgaatagctgctcttatttagttgtgatcttatattaaacagaggctgtggagtaatgtgacagtggcagagagctaaaacttgagccaaactgcctgtttgtaccccacctccaccaattattggctgagtaactttgagcaagttaatttttacctccctgtctgcatcggtaagaaaacatatttacctcaaaaaaaaaaaaagcaagaaaaaagaaaaactttaagattgctgtgaaaataataggtgagtcaacttatttattaaaagttattaaaagtgtttggcacgcagcccctcccttctattctactccttacccaggatgaaggatttagattggattgttatttt

SEQ ID NO: 109386 - DNA, 1018 bp, Homo sapiens
ctgtttactttctattatttgaggattgattattaaaatctactgggcatactgcaaaattaagtgacatttatttttctgtccttgaaattttctacatggctgtataaaatgtttgtgagagatcttagagtactactttcatgcagcctaacacacttatgaaaatatactagcctagaaagtacctcagttttatcattccagataatcagaaactataatacatcacttgtgataaaaagatcaaatgtaatgaaaagttcagagtttaacttacaaaaaagatcctgttgtagaatttttaggcaaaaggtctgtaataccaactgagtttctgtcatttgttgcttgatgttttatgtttagaaagatggttaatagattcagtgatctttaattatactttgcacattggggagaaatgtttgatacaaacaaataagttcagggttaaaaaaaaaagtagctaatttgctttttctttgtaattcagtataatttcagattctcgtgtcccatcgaagtttctagcaagaggactgttgtcacatttccttcttggactcattactggtcactgaaaaccagaagtgagctacatgtactcatacagtaactacatatagattaacaatgtgctgctgcatagtagaagttgatttacaatcctggtatcaagaaattttagagtttaaaaggatctagtagggtttgtttggaagcctttttcataaattcagtcttaacatgaaagcagagtggtgatcctacagctgactgatctcacccaacaccctcgtttttcagataaactgaggtccagtgaggttttgtgacttaatccaggatcgtcaatcaagatagtaaaaccagatttagaccaggtcttctgattcccaactgaatactctttctgtctcacaatagataaaaaataagttgctttgaaatactttaatcctgacttctttattattgaattatgcaacgtaaagacttaacatgacttgtcctt

SEQ ID NO: 109387 - DNA, 1036 bp, Homo sapiens
taagttattataagttaataaattgcaatactttaagaaagtatcagtaaacaagttaattctgtgtctagttgggagagattatccaagtccgtgttttctggtctcttcctttcattgcctcttgatagtgcctttacaaaggacagggtgcagttttagaagagtttggtgaacttgaaattaattgttagaatgagatttttaaattttgtgcatacatatcaggttccctattgcgtaatatgtaatcagcttctcaattttttatgtaccctaatatttaatcaggttttacatgtgatgcctctatcagcagtcagtagattagtatatttatgtctgtattcaggaatggtataactgagtgttagtatgagtatatttgtatcatgcctaaatttgatatggtcattctctacaattactttccttccacatttcctttctgttgataaagttggaaatctgacatctttacctagccattttatttatcctttatcattgagttctatgtgttctacatttgaaatgtttcagatatctaaatttctttcccatttatagtccagtatcacactacaatttacttgaatattacagtagtcttccatccatttccctgccttatgcatttttttccagttcatcctacacacagccaccaaaatcatgtctaaatcatttttctagttatgtcctattaagaaactactagtggtctttctgctgcttacagggtaaagtagaaatttccttgcctaccttgatgactattctgcttttacacacttaatctcccagtacttcctagcttgtctctactagagccaaattttgtgtcattctcagccacaatatttatggcttttcagtcagtttacccaaaacttgttcatctttcaaactttatcttcctcttccagtgttcccatccacattgataatctcactcctaatttgggtgctttcactttgttgccaaggctggagtgcagtggcatgatcttggttcactgcagcctcaacctac

SEQ ID NO: 109388 - DNA, 1683 bp, Homo sapiens
gggaataaagggaagatggggaatgagaaacaatgaagaaaataatagaaaatttgggaaaagatatagaagaaagaaagcagagaaggattaaaacggcctttccaaaacgactctttgtcagtgcacttccattaatcacctcttcaaatgagatagtaataactctttttgcatttttcatttttgcctcacccttactggagaagagaagatgagaaagacagtcccaggagtgtctggtatctgcagccacagggggaaaggaaagagaatacaaattgtcattgtgtcagtagttcttatggctaccacattgggggcagctgtcattgattaatttgagaactccttctgcgatctgttgtccattgttcaggatacatatctttggctgttattttaacatttatttatgacacttgtttctacttactttgacatttggatactcactattagcaacatcttatctttttaattactgttttgtggcttataaaaagagactataggccggtgacgatggctcacgcctgtaatcccagcactttgggaggcctaggctggcggatcacttgaggtcaggagttcaagaccaccctagccaacgtggcgaaaccctgtctctactaaaaatacaaaaattagctgggcatggtggcaggcacctgtaataccagctacttgggaggctgaggcaggagagtcacttgaactcaggaggcagaggttgcagtgagccgagatcgcaccactgcactctagcctaggcaacagagtgagactccatctcaaaaaaaaaaaaaaaaaagaccgtataagaatgaaagtgaactggtacaaagtagttaccattgtggaaaaaacaactcaaatgcctcatagttgaagccaagaagcagacaggctttgcctctatcaacttatatttgaaaaacgtagtttctttaaatctccatttttgtcttttgaatactttattaggtcgctccagagaaagcttgaaagcaaggcctgtactccacttgaaaagattcataaaatagatttgtaaattattattcagcgcatgaatttctcaagtatatgattatactaaattaatattcatatgttgcaggaagttggtgaaccatctaaagaagagaaggctgtggccaagtatcttcgattcaactgtccaacaaagtccaccaatatgatgggtcaccgggttgattattttattggtaggattatatcagtaaaatcgtattagtgtacatatgttatgaagttaacctacatttgggatatgtagaagttttaaaagtgctttccaaatgtgattgttctggtgatggacatatggcagttgattattctgttcttttcttttatgattgaaaatgtctataataaaaagataacatgttttctaataacaattgttggaaatttttttaaataggatttattttcagtgttttaaaatactaccttttgtttagatagtatgcgtacttggaactaagagcactggctttttttccccaaacaatgtcattataagctgatgtcatttataacaccagagcttataagtaggggttgagtttgcctttctcatcaattaaaagtgaattgcagctgggtgtcgtggctcacacctatagtaccaacactttgggaagccaaggc

SEQ ID NO: 109389 - DNA, 1201 bp, Homo sapiens
gatgataaaacaatcttttctaatgtgatctatacctttttatggcctatatcatgaatgaactcatacatactaggttaagtctccacaagactttgtatcactgacccccaatccagttatgtcgtcctcagtcttgtgcacatgccacactcattttttcttctagtctttttcctatcataacttgccactttccctaaacggttctgtttcctctgtcccacctgcctctcaaaatcacaaacaaatccctcaagtccttcctctaccgaatgtactcttccccaggccctccagccttcatcagcctttgtatctaaagttctactgagtttatcaagttagtacctcccagtttggcccttaactattttagaattgctacatatgtgtgagtttttttaaaatctcctgccagctaaatctgaaaacaattgtaagactgttttatactttattgtaactccatagcaattaccacagtgtgagcacttcataaaaactcacctttgccacattggtggaagtccccaacatgtctggcatttaataaatgtttgttaaatctgaaaaaaaaatggaagtgaaggaaaaaaatacagaagtaattttttaaatgttttagaagctgttttaaaaccacttactcaacaaatagtctaggctccaggaatacaataataactatgacttggtccctacatcaaaacatattctgatctgttagggaagatttataactaatcacaatgcagtgtgttgaataaggaagagagagatggtgaaactatgaagaatgacatcacacagaaaatgttttaagtaaattttgaaacataaataggtgattacccaacaaacaagagaagaaaggaaattcattccaagcaaagggcatagaacacaccgagataggaaagtatgagtagttgtgtaaaaatgtcagagagttttatgttagtaatgtgttctatgtcatgggtttaaagccaaacaaacggaggctctgatactatacaaatgttaaataatgtcagtctcatctttcaacctaattgtgaaattattttcaacacaatttgattgaaagttaataatctacttttctttcgtgggggtgggcagctgtgcaggaaaattgacagaagcagatgatcctgctggttctattgccttcagtatctactcatcagggaaa

SEQ ID NO: 109390 - DNA, 1017 bp, Homo sapiens
ataatttctcttatttagatttttaaaagtcagatttgactgtgagtgataggaaacctgaaataaaagcatcttaatacaaaatagatgcttatttcttttttatcagtgaaatctgtaggtaagctgtacagatacgtcagctccatggtggatcccagctcttcttttctcctctgtctgaggcttctagctaaggttaccttatggtccagaatgactgccaatcttatatctgcatcgaaaagaggaaaggagagtgaagaatatgtctcctctttaaggagaccagtttaaggacactgtccagaaagctggtaatttcatttctgcttgaattccattggccagaacatagtcacatggtcatgcatatgagaagtaaaatcttggaaatgcactttttatacaggatgattatttgcccagccgaaatgtagggtttccattattatcaaagaaaaaagagcagaataggagatagctacaagtctctatctcttacagaatgtaagtcagacacatcacttgaggggcttaaaatttttaacatttcttgatgctttatgcttatcatttgtaatggaagatttgtatggtggtagccttccataaagactgcttaattcagtcacttcaccagtacgtaaacatgagttatatactgggcattgaactgttgtgaatttcaggatatatcctttcctgttatacctatacaatagtaacatctataaagtcatggctcctagggttgtgtgtttgaaattcttacttgcatgagactatctagagtgggattgtgggggaggattatatatctataataaagtgtcctcaggtgactgatgtgaaccccttgttgagaaccactgtaatagaaatttttatttttataggcgttgggaatagcttgataagtaggataaaatctcttaatggtctagcaaagatacaggcacttaaacatgttaatatagtacagtgtggtaagcattaatggtgtgaaagcaccag

SEQ ID NO: 109391 - DNA, 1106 bp, Homo sapiens
agagattaacaaactgatagaaaaatggtcaaggtagttaacagataaagaaatacaatgaccaatcatcatgagtgatacttaatcacactcatatacaaattaaagctgtagtgattaagagtcttgcaaaccttaacattaaaggtcttagaaaaaaatcagctctctctaacagttgataggtatgtctattgttttaatttttgtaaagggcagtttgtcagtatctttgaaattttatgtgtctgcagtgacccagcaattctaggctgttcccatacagttgcacaaagtgtgtgcattgacacattatctgtttttttccaaatcccttagactatacttgagtataatctagcaaatatctttcaaattcaaaatgcttataccatttgatctaataaattccactttaaggaatttaccctatgccataatcacagttgcacaaacgtacatgtgcaaggatattatacctagaatagataaaaaaagaaaagaaagttacagacgagtaagaatagtataagctcatttacttatttagaaaaaaagtccctgtagctagttaattatatataggcagtctctgagaatacaggtaagcttaatagtacttaacctctgggaagtggaataagaattagatgaagacttaattttctctataccttttgatttgcttgtttgtgacagggtctcattcctgtcacccaggctggaatgcaatggcacaatcatggctcactgcagcccgacttgctggggtcaggtgatctcccacatcagcctactgagtagctggaactataggcacactccactacaccccgctaatttttgtatttttttgtagagatggggtttcgccatgttgcccaggctggtctcaaactcctgggcacttgcctcgttgtcccaaagtgctgggggtttgatttgtttttgatttgctttttaacgtgtgtattccaggaggttttatggggaaagaatgatttaacaaacagaaaaaaaaaaaataggtagcagttaaaataagcttggtcaatatggtatgataggatcccattcaaaataactctttaaggctgggctcagtg

SEQ ID NO: 109392 - DNA, 1027 bp, Homo sapiens
caacaacctttgaagaataggaagagacttattaaatataaggtaacttagcctcaaaagagttaagtaacttgcccagggttacatagcttataagtgatggagctagaattttaatcctggtcttattctaaagacctaataaccaggcttctaatttcttataattctttcttgtgtccccactttacttgcaaaaaaactggagacacttgtaaacagtttccctaagcaccaaaaaatacatctgtagcagaaatcacctggggaatctttcagtctgtggatgtcagagctccaccccagaagaagaatctccagagaggggtcttggaaatcattttttgttggctttgttgttctgttgtttcttttagctcccttacttagtaggcaaatatcttagtattttttaaataaagtagatatagcttgaaaaagggggcagttgataaattaaggaggcaacagttttgaatttctacatagcatttttttctaattatatgtaatttacactaataaaaactagtttaagaatagtataaaatgttaggttgaacaatatgaaattgctcataattgaccattttttacctataaaaatggcaattttatatttcactgtgtttatgtttctcagtttttcccccagggatatgtttctgttagtgcagccataccatttaagtttttattctaaaatttaacttttgtcatttcttgttccagtgattgcagtaatagcggccaccctcttccccctttggccagcagaaatgagagtaggtgtttattacctcagtgtgggtgcaggctgttttgtagccagtattcttctccttgctgttggtaagtattgttattataaaattgacctcaagaaggttggtattgagcagttggactgtaatttggagcttcagtaaagcttaagaaaaattaatggaggtaaatcaagaaatatatggtactactttctgagtcaaatctcaaaactcaggcttggtaagatgtgttctgtctg

SEQ ID NO: 109393 - DNA, 3343 bp, Homo sapiens
ctgattgctatgtgtattgaagcataatatcacaaagtacataaatcagaagtgtatatccatgtaagtgtacacccagatggaaaaaagaagtaatttttttcagtgacattattgcattgtgacctcaagttcagagcaacattctgtgcccctagaataccgtgatagctgctaaactagtcaggaattttttgttttcaggcatgcagtggtgtaattatagctcactgcagcctcgagctcctgggctcaagtgatcctcccaagtagcttggattagaggtttagccaccacgcccagcactaatcaggatttaaatattaatatttaaggtgtatgaaatgtgcagataataaaactgttttcccagctttttattaacaaatactcccttctgaggcagtgtttgaattactcaattagagaaatttttctccccacagctcgatgcattctatttctcatcatttggctcataactggaggaaggcaccacttttggttcttgccaaatctgactgctgatgtgggcttcattgactccttcaggcctctgtacacacatgaatacaaaggaccaaaagcagacttaaagaaagatgagaagtctgaaaccaaaaagcaacagaagtccgacagtgaggaaaagtcagacagtgagaaaaaggaagatgaggaggggaaagtaggaccaggaaatcatggaacagaaggctcggggggagaacggcattcagacacggacagtgacaggagggaagatgatcgatcccagcacagtagtggaaatggaaatgattttgaaatgataacaaaagaggaactggaacagcaaacagatggggattgtgaagaggatgaggaagaggaaaatgatggagaaacacctaaatcttcacatgaaaaatcataatctgactaattttgggactgaatgaataagtacaagaggttggattttctatgttggctgattaccatattgaacacatggcatttgtagcattctttaaatctatctactgaaatgtatttgacattcaagcagttatattcggtccttcattttatagaatattggcactattattggtacagtttaaagccattaatatgttttatccatttgataattttacagtaagtaggtctcattcattttgacagttatcaaagatgtactttccacagttaaatttacattaatggcaatttttgatagttttatggctttttactgttagactaatcaaaaataactttaaaaggaacaaagaaactccaacatttcacattatgcatagttatgtagccatttcacagtttctttaagatgtgtaaactcattgtccttgatagtttttatttttcattataaaattataccaggagatttcttttaagattctgagttagcagagttcaaaactattttgtggaaacaagccaactagtaacaatgcagcaacacttctggtttagctaaattatttttccaatgtaggaaatccacactgatttgtacgtctgactgagagaaagatggtcgtctccagcagagaaagtgaacagcatttgttggaaggtgatggctctccctcctccctccccatttcattggcgtaacgtaaagtgtattctgtacataatttacaaataaaacattttattttaattgttacttattatttagatatttctcaacacttaaattcataaaattaagaccatgtaagggtatgtttttagagaaatggaagtttgagtaacccacagaacatctgtgatctttctacagcagcttcagttttgtgccaacattccatgtattttgaatatgagcaaaaactgatcttaagagcagacttaaagtagctttgtacgccttaatgttcattttgatttattttaaatctttacattcagaaatgagatactgtattatcagaccaggaggcattgctgtgaaagataatttcctattctaaaatatcaaatttaaaataaagataatgaaagaaaacataagagaactattggactctaattgctttgaactagttttgcagtttgactttacgtcttatacatcttagttacaagtctttggaaactcttgtttacttatgagcataatcattccttggagttatactaactaataatgaatattaaatgatttttcttcagtcacagtgagagcatcttgctttgtggttgaaataggtagtgtatgtcagtctttgctttaggctgtttctcatctaagtgtttgaattaaagatgttaaatttttctaattgtgaaaaatatgttttctgtatcgacacattttattaaacttggcttgattgcttctttatagtagtccctgtaagtggacataaatgtggctatttgatgttaatgcaactatgtcaaggctgcaatcactttaatagtttctttttagcaaataaatgttcattgatgaagtgcctgggtattttcccgtcccatttgcagagctctactacttcatttccacagtaagcatatatataatgatcacttctgagtttatcaccagtaacattgatacctattttggggtataaacatggtgtttttcagaaataaaaattatttcattaacctttactattactgtgataatacccaggcactcaatattcatcctgaaattttttataatatatgtaatttgtctagtcttaaagacatttggagcatggccaacaggaaggtcagcttcttactgatgtgtgtggattcttacagaatgttagtacaaatttttataaatatttggtgatccctggggggaaatatcattcttactatggttagaaagtgaattagaaatttcagctcagtttctattttactattcaagttgtgtactttaaacaaatataaaaatcaaaaggctgcctctattacaatcctcagtggaatagatggctatctttcttggctaacattaaatattcttgtaccagagcatggaaaatcgtttataattgttaatagaatggcgatttttttttaagaacttcagatttgctatgctgctgtaagtagaaagcatgaagctttttgatcatgtagggcttattgtagagggtatcaattggcctaactaagcaggattgaatttaccagaggctaagttcagatagtaagaataatgcatatgtgattgttcttaaagtcaatgtattaaataaggtatttttccttttccctcttactggatttttcaattttcaaaccatatggcctaggtaactttaattgaaataatatagatttagttgaatactattcaggaagtaa

SEQ ID NO: 109394 - DNA, 1100 bp, Homo sapiens
gagtgtcctggccagagatcagaggatggtagggtgcctattctcggctcttctcctggggttggggggctgccttagcagccaaaggtcacttctcccaaactccttccctgctttccaggttgccagtccctgcactcttcctttctggccaaggatgatgtcagttctgctgctactagcctggagttgcagaagctactgtgcttcctctttgggtagcctatacctatacttatctcctcataatatcttcatgtaaagaaccatctgtttcttattggaatcaagaccaataccaaggagaaattcctagggaacaaaaattccaatgaggaattgacctctttgtcagatccttatcaccaaacattagaaaagatctcataactttatacagcatgttgtaagcattttgataactaaaatcctgttctagtgaatgtcatgcagataactacacaaggagattaatttaaatttgccttctttggcaagcccttaaaccaatggctaaagcagttagttgtgagtttctgagtaggtcccaatgcgtttatttcatttgtccaacctagcacagagatcctttgatactttaattgcatggcttttccaatcagacgaaatttcagtctgagagaggacatattttctgaggtttatagttttaggattgtccaaaaggcctatgatctcttcttagcatgacagaaagagggaaagataagttaaatttcaagggggtcatatcatcacactttggtcttatttcattttcaatgatttcctagatcactttaacttttttgtgtcatggactcctcagaataatgggttttttttgtttgtttgtttgtttgagatggagtctcactctgtcacccaggctggagtgcagtggcgaaatctcagctcactgcaacctccgcctcctgaggttcaagtgatcctcctgcctcagcctcccaagtagctgggattacaggcacatgccaccacacccagctaatttttgtattttttagtagagacagggtttcaccgtgttggcgagactgatcttgaactcctgacatcaggtgatccacctgcctcgg

SEQ ID NO: 109395 - DNA, 1058 bp, Homo sapiens
tgtgtaaacggacatggaataaacaagggctccaagtggaacagcttgttttggccaaaagaagtgagttcaggccgagcatggtggctcacacctgtaatcccagcactttgggaggccgaggtgggtggatagtgaggtcaggaaatcgagaccatcctggctaacacggtgaaaccctgtctctactaaaaatacaaaaaaaaaaaaaaaaaaaaaaaaaaaaaaaaaaaaaaaccaattagccaggggtggtggcactcgcctgtagtcccagctactcgggaggagactcgcttgaaccaggaggtggaggttgcagtgagccgagatcacgccactgcactctagcctgggcgacagagcaagattctgtctcaaaaaaaataaaaaataaaaaaagaaagaaaaaaaaagaagtgagttcagaggctgacatgttttgtgaatgccagaccagcggcttgatgggatcctttctggagaactctgcgattcaggtttgtggctgtgtgctccctcaggtgatgattaacccccttgtcaaggaagagtgggttaattggttattagccagagcaaacagggagaggccaagcagtcttgagtatggactcagccagatccctgggtttcatttctggttcttccaccacctgtgtgaccttgactcattttttaaaacctctttgtacctcagtttcccctatgtaagctagaagtaataataatacctacatcatagggcggtgaggattcagtggcacgtcaagtgcttgtaacagtgcctggcatggagtaggatggattgtgagttagctattattattgttgttgttagagccctgcttcctttactttcacttttactggggagaatttcccccacataatgttagaagaaagaccacagggaagaaatgcatctgagctctgacctctgttcgtggagtgagccatgggctgcccatctgggttcccacatggccttagggaaatgttctccatgacaaatgctaacagggtgtttggtgcagcagcagctttggaattgatga

SEQ ID NO: 109396 - DNA, 1039 bp, Homo sapiens
ggagtaggtacaaggacgtgtaggggaatttatcttaaataggcttgttcacttgtgttgtccagaaaccgacctttgatcatccgcatgcattactgctccctgaaaggggggacagtaatgttaattacccacagactgtgtttgctccaggctttcggcattatgtctgtactgaataaaagcaagcagctccagctgttcaaggctgctctcttcttcggccactagtgctgggcagccccctagctgctgttacactgcttatctgtgtctgagtactcctttcatccgttgctcgactagggtctgtgggacagacccggcatagatgaaaattcagctgtctgctattaagccagacactaaagcaagttgtgaaatgtgaaacaatgccactctgctcactaaattattgtttggtaaaatatagtaatttttaccatattatttaaataacattttaaaaatgttattgatgttaacatgcatcaagggtcaaagggtcctgaaaccaaacactttggaggacagctgctttatcctgtggctgaaaactataaagcaagattcctttaagtaaatgtggtgtatgcatcaatctctccatctttggtgtgctttcaatccaagtatcccctttcttccttttgcaagaaagaaactaagaatgtaagcagttacttcctggcttcagtcccacaaaaagctacaatttttctaagcagtgatctggaaccagtttaactggactcttgctattaagatagctcttaatgatgtttcattttgttttctatctttcacacagagcttactcacatagcatattggtatatcaaaatgaaatgcaaggaaccaaaaataacataattgaaggcagtaaaagtgaaattaaataggaagatcatcagtcaaggaagacccactggagagtaagtatgcaagttgttaataattaattgggttacaaagggaaaaacagagactgggtcagtgaaacgaaatcatggtttgtttccctgaggccctgctaata

SEQ ID NO: 109397 - DNA, 1031 bp, Homo sapiens
cttttttaagggttcattttatacttaataagcatccatttcttgggtcacctacagtctttgttctcctaaggattaaaatagaaaattcatacataacaagcaaatgatgacattttcctaaatgctccttattggttaaccactgaatatatgaacacatatgaatattgtcattcatgtacttaaattcatttagcaaactatttgaacacttacatgtgcagtgtttggtgaacatgacatgaggaactagtagtaagtaaaatcttccccccaaaattcattgtggcttaaataaatatgaacataatcattactacttaatatactgagagggaatcttaataaacttggaactgggagggaatatttgtatacattgggtaaagggttaggctagatgacatctaaggggtctgagtgaatcatatcataatttttataacacatttcacatactaaacatcagttggccccatacctgattaagttacaaaatttaggagacttaacattaaggacttacaggttgagacagcccgtatttcacaacattattttgacacttgactctattccagagttgttgctatacaaggcatgtggcagaacaaaaaaaaagctggtgttgatataagagctttttacccagtattgacagtgagcaactttctttctttttttttttttttcttttttttttttttgagatgggttcgctctgttgcccaggctggtgtgcagtggtgcgatctcagctcactgcaacctccacctcccgggttgaagcgattgtcttgcctcagccttccaagtagctggaattacaggtgcccgccgccacacctggctaatttttgtatttttagtagagacggggcttcaccatgttggccaggctagtctcgaactcttgacctcaagtgatccacctgccttggcctccctaagtgctgggattacaggcatgagccaccacacctgtccgacagtgtagcaactttctaaaactgaaaaatctcaaagga

SEQ ID NO: 109398 - DNA, 1051 bp, Homo sapiens
caaaaaaacaaaacaaaaaattatttgggaagatacgtcctcttttattagaagttcataaaatgtatcatatagttttgttcacagtagttatataagctttcttcaaataaatttaaaattagattaccttctttggaaaaagaatttcctaaatttttaagaattttcaaagttttacatattagtttttagaacctaatccgttttaaaattgtactatgagaaagcttttttttgaaagttgtaaagcattaatacaaataatacaaatataattattaccatcacattccagagaatatggctttttctaaactttcaatttagaaaacatacattaagggagaatctctgccctccttttcagctctgaagatcagcttttctactcagacacatgcacacaccccttccaagtgtcatgtttatgggaacatttgggaaatgttttccagatgttttattttttcccttttatagtttgttgacatttaattttacttaaagatgacaattttaatcggaaatgttagaggtacaacatagtgaggttctagctagctttatacttttgaaaaatatttttgtttctactgctttttacaagtactagtcctctcagtgatactggtggtgttcagtatgaatccatagaaagaaaacaaaatttgttgtttaaaaaaagcagagtaatgaatgaatttcagttttgaaaacaacataatttgaaaacactgttatactaacatggcaaggtgttaattaaatataagagtaaggtagtaagttcttttagagcacctgtttaaatttactccagtaatcatcttaaggattgatagtcaccatcacttattggcttaaaagttatatttcatggaatattatcagtgttaaatccaagctttgtggagctttaagtgatggtggtgaaaaagttggtgtttatgagagagtggtggggtgtctagtcattagtgaagttaaacatcaacctgttttagaaagaattttttagtcttgcctaaagtaaaccagaagtgtctag

SEQ ID NO: 109399 - DNA, 1106 bp, Homo sapiens
aaaccatgaaaacttctttcttggagagatctttgtctcagaatccttagagaggatttcgtatgggggctaactttaggaagggaggcagctggggcaggactttctgatacctgacagtcatgttccagagcaacctttgggcagtggaaactggcgcatctatgcaaaatgattgctcaatctctatcttgtgtactacatatgtaactagctgggccctaaggaaggttttctagggggaaggatagggaagtagaggaggagacaagtaggaggaacaaagcattctagacccaagaggatagaagatatttaggatagatatggctttcatccatagttcaaaataatgcgttttgttagatgccagttatagcagtaaataggttatagtttttatatgtcaagatttacctgtaatcagactcattctttcactctctatacccactgtctccatgcttgggagcatggatattaatagttccagtgatgtagaagttagtgatttttgatttctgaaaaaggtgagaaccttttattacagttggagaatatttgtcaaaaattcaaaggttgttgtaattgagttgccagaattacagagtttccattttcagatatcacagttgaatcacctctgtagattgttataaagagaggcattttaagatagtattttatttgctaggttgtgtctcagtctaagaattgggaaaagaagagctataggtttctctttcctagtctggatttcagtaaacacaagcctacctctgcttctttggttcacagcagtgtggatcatgaaatgaactgtttacccacattcatcaatattggtattttacaaatctacttggagcatttaatttcatctcaaagattgtgatccactttagataagcacaaatacagtattaggaaaagtaaatatgcaatcttactaaaatttcaacttgttaagctgtatatcttaaaagaaattatttggggctgggcatggtggctcacacctgtaatcccagcactttgggaggctgaggtgggtagatcacctgaggtcaggagttcgagaccagcctgaccaatatggtgaaacc

SEQ ID NO: 109400 - DNA, 2724 bp, Homo sapiens
ttcagataacattaatattctgctgaataattttttctagtttaatcatactagaaaaagaaaaaaaatctacaaattgtcctataaaataaggacaaacatgcaaataatttaactctcagaaagtactaattcattctgattatctttcatacctctgtgctcctctgcactgacgaagacataatatgattatacctatgaactagtgcacagccttttctggcaagaaaatagtttgtagcagatacgtggttgctctttggatttttttctattgttgaacatgctgggactagctagaatgcacattcctacttcctttaccaaacgtttgcatgcttcctgcaaagcacttaccaagtgatttctcttgaaccatcggatataattttgtatgtacatgtttgaggaaaaaaatgtaaagcaaaaccttttactgaacagtgttctatagaattatgacactaaaacaaaattgtttgtggaagccctgaaagctttatagtcctggacatcaaaaattttatttgagatgatgaatgttttgttttcatcttttcttatattaccacaattgagatattttagtaattgaaggaacatacacagatatttggcagaagtcgagtaaggaggggaaaaaaagagtccgtgagtttcagtcattttcactgctcttttcaaaaagattgtgttgagctggtagaagactaaagatgtcactgaagacatcacagatactatatttatcttttggctttgtgtacattagagaatgttgattatttttatacaaaaatacagcgggtaatttttttaatctttagatgcctcttgtttgaatgtatgctttgtggaattctttgtgtagtaatgttttaaaaaaagatgtttactgatagttacatgtaggattagaatatgtaatataatataaggctcatgttccagacctacgatagcttgtagtctatgttacgtatttctttatatcacatttttaatcattggattaaagtatcaaggaaagctaggtactctataatgagttttcatttattagcagttaatcatcatgacagaattgtcatatgcttgacttttccctcttcttggaatttcagaacacaaatacaggctaagcattagtaagagatggcccacagtatgagagagagaggtgcaacggaaaatctcgcctggaattaaaacttttcatagattatccacggttaatacaaaatttattatatggggatagactgctccagcaataatgattacatcctataactgtattacctatggcctttaaggtatcaattttgaactgtgttgtaggctctccttttatttgttctctttcctaatagcagccattctgtacttattgaaagcccctgtgcctactgctgtcttaagtattcaggaggggcttacaagagggttttctattggagaataccgtataatcttaaatctagtccagatctctgttgtccccactcaaaacatacacaaaatatgcacttgcttttttcaagtgagtttttatttaaaaatggcttgtttgctatcacattggtgcagctgtttctttcaagatgagttaatcatcttaatttcaaagcttcagctatatataatggatatatagacaacactgagcatccacctctctcctgagctttaaagcagagtttcagtatgatataggtggggagagtaaattgttttcatatcctttcatactactactaatagttttaggattttgactggggagagataatgacaaacagaaagggaacatggaggttcttcctacttttgctacctaagtttgcattttctgacttccttgcagtgttgcactctttgtcccattgggataaaaagcataagtttgaaattttgctttaagccttgtgttcctggggaagttaaacaactaagagagctgatttgtaaaaattattttttatatgacattaatattcatcaagccttgtgtaggcatgtgtaagacacagctatgcagctttgagtagtcaatatagtatgagatagagtgttgtcccaaatcctcctgtcactttttaagtagcatattatttccctgatggtcctgttactttgctgttgaatgctctaaacagaactttttaaaaggtgtgttttaagagcagtcacctaggagtagacaaggtggaatgggaggagagaaatggtaatgcaaaagcttgagcatgggaagagtcagaggaggaggccatcatccttgttagcttagcctacttcaacactgagcacatttctgcacttttgaagtgaaattcatgttttacttagaagaaataattttctttcattagggatcccagttgatttttgtttcctggtgtatcaaaatacttagaactatgaaacaagtattattgtgatcatgcctttgaataatttttgacgtagcttatcttcatgtatcaagtataaaattataatgagacatctattcacaaatacaagtcttagattgaattgaaatgtgttatagtgccctgtctcccactgacttgttcagttaaatgtcttaaagtacattatgtacatcttcaggcttttggtaccacaatggcacaagtatggtagggaggcaatatagtcttaggctatatgcctatattaagtgtgtataaacaatttttgaaagaatacact

SEQ ID NO: 109401 - DNA, 1820 bp, Homo sapiens
cacacagctgtacacaggaaaaaatgtttgtattactcttacagatagctcttctatagcagattatatttttgtttattgtgtattcactaattcagtccttattgacaaatattatgtattcagtacctataatgctttgtgctttgtgctggggttgtaagacatcataatcttacataaacaagaggatgatacatttgcaagtagaaaggataattgaactagcaaaattgtggcatccaaaagtgtaatgtaactattttcatttttcattatctttttctttgtgttttcccttagaatgctgatttgaataaaatagaaaaacttaagctgtcagtttttatgtgtattcttaaattcatcttaaaattttactgtctctcaagaaagcttccatatttttatattctctcatctcagctacttaattgattacctttcctattggtttctttacccttaatgggtaagtttattgagtaatttggatgtgaaaatttggtagacagtaaaaacatttgagtttcaggtagatactagcattgttacctgctaaagcacctggtttagactgagagctaaaatattggttatatggcaggaaattcgccagcaagctcataatttcaatgagaattgttttcttaacaaaagtggagacaagcccagtgatagtcaagtcaagcagcgtaatacatttcagcagcattgcaatagattggtaatacagtcttgagaaatttgatatgtcccgagtgaacaataaaaatattttaaatgtacttttcaagtgaaggtcataaattaggataaggtacaaatgataatgaaagtggtacttacttgagaaaatatttctagattgttatttaaatgacaaaacatatttttgtttcctctttacctatatgtgaaggatatattatacagagataagtgcatgaggtataactagttaacccaaacctgttatgtggcatgctttgaggtaacaccatagtcctttttgtgaaggaagtattatatctagacttccctcttatgaattatttctataacattattttagagcaagaattccaagcaaattgctttacctggattttgaattcttattttcagaatgcaaatactctattcttcaagagtgaactcaagactaccataaataaatttcatttgtttctcagcctgtatttcagattctcagacccagtgagagcataactgtgactgttaggagtaatgtctaattgttgtatatttaattctaacttctgtcctctggtcaaattccaggctgccaggatatcgcagatgaattcagagcacaggagattgatggacaggcccttctcttgctgaaagaagaccatctcatgagtgcaatgaatatcaagctaggcccagccctgaagatctgtgcacgcatcaactctctgaaggaatcttaacaggaacatgaagccttgataaaacagcagttttacttttctcacaaaaacttgtaaggtaaaggcctaacttggtctagaatatgacacttattgtggtggatagccaagcacattgggatctccacatcaaatactgacatttcttctacaggtataataattcatcatgcattttcataattaataaacattggtaaaattaattttacaggttacatgaaacattgaaagacttgttacagagggccatgatatttttcaaagaaatgtgttatactagataatttttttaaaggtgatgtttatcattaatataaagaatccttttaaaagtaatttaatgatttacatttctcc

SEQ ID NO: 109402 - DNA, 1080 bp, Homo sapiens
tgagataggcttccttccctctttaaccagggcatttatatttactcctccagttttctcttctctttgtatatcgtcttgttaaccatcctgttcagactatgttagagcttgtatgcagtagaccagaatctcagagctgttaacagaatgaaaaattaccgccttctaattttctctgcattaaaaagttatctacaggaataattcttattttcaatttactgcgggttatcttctttaacctttccttgctatggtgaactgccttttgcagagatcagtttgtcctctgtttattgaagggtgaatccacagtagatttgatttttctgtaggcatataaactaggaatcattttttaaaacatgactatttactggtttttgtaatatcagtattgggacttgtttattctgtagtattgagtggcaggtgataccttttcaccaaccttactgtggtcaatttttgtgcagggtgttttattttgagtttagctggagaagtgatgccagacacttgaaagatcagttgggacccatgtgcagaggtccttgcctgtgctgagagctgcactacacttgcttctggtgaggtgaagctagctcagctgactggctgtgtcagttggtgtatgttttgtacacatccccgggatccaggcattttaccaaagtagatgttaatgtcagaaactcagaactttatctcagtataccttgagcacttaaaattgtttttaaaatatatttttctgtaatgagattctggaagcatacttgcttccaatttttctaagtcacttttttttaaatttctatactgatgtaactatactttttttgtggttagcttaagaaagttgtgatctaaaatgcattcctatttgatcgtgctaattcccaaaacactttttgttctatattattttgctaatacatttactgttcacctacaagaggatatttgaagaggaatctcacaatacagaggaacaggaatgtgctacatattttcctcatggagaactccttgtttctattcccaaatgtagctcttatagttctcattacttct

SEQ ID NO: 109403 - DNA, 1088 bp, Homo sapiens
ctctgtattttgcaggcagtttcccactgtcatgctgtaatcaggaaaaaatacaataccttgttatagatgtccagtattatattgagagatatattatggtatacacagagcctgttttttgacctttagcataagtaaatccattgaacagtgtagttactttatgaggtcttacattcattaatgatgtattgtggtacttactgattcacagttgcactttaaagtcacaattaaatactaaatggattgtcccatatatcattaaatattttttctttcttgaatttcttaggtacaatgttagctgttctaaaaaatttgcacttagtcgttggaatcgtaagcctgataatcaaagtcttgggcatcgtggccgtcgtccaagtggccctgatggggcagcgagagaacatatccttaggcaggtctgtataaaccttgcttcaatgtaaaatacccttttcagaaatgcaaggaaagtgcaatgctgtattttgcttgtactacattttccagcttccaattacttatccatctgcagaagaagacttggcttctcatgaagattctgtgccatctgctatgacaactcgtctgcgcaggcagagcgagcgggaaagagaacgtgagcttcgggatgtgagaattcggaaaatgcctgagaacagtgacttgctaccagttgcacaaacagagccatctatatggacagttgatgatgtctgggccttcatccattctttgcctggtatgtaattcatcactttggccttaatatttttcttgtgcattcacacacagcaatgttagatacatccacaccttttgcacaaaagggctagagaagtactgtgtatatgtataaataaaatgacatttgttattgaaatatgatctgtttcctcttgcttattccctcagcactactgggtattttctcataccccccaagtcgataaaaactgactagtcctgcttctgctgtgacacctcagccggtgaagatattaaaggtgctttcttctcttcagtctgatttctctcgagaggtcagtagagagattgaatcagacacttcttcc

SEQ ID NO: 109404 - DNA, 1652 bp, Homo sapiens
tttggatgccccaccaatgtcaaatattaattcacagtttgtttttttagtagttcttgctacttcacttaatttagcactttgccatctgcttccccagtaaaactgaggtaatgtgagtacctgagctcactgagtacatgccacccatgtctacatttctgagtccttgtatttatcttagtctttattaaatgagtaacatagaaagagcacacatatggagttcacagctaaaagctttagttagtaaaatgcttttcagtaaaatgcttttgttgctttttttaatatgacttggcagaggaattatgatgatgcaagaaaatggcaaaatgtggttgatttaagaatttaacaagttttaccaaagtatttcttgagcgctattacatgtcatactacccttttagttcttatgtggaaaataggaaatggaactatcacttttaatgcctactaccttttgggcacacatataattgccacttcaattctttgggaaatgtattataaaccccattttacagatgagaaaattgtgggtcatgaagatttagttgtttgcttatgggtgactcctgccgagtacccggggatttagcatggaagggtctttgcgctttgtgttactgcctgaagatagttacatatgtagggtggaagaaggacattctaacttagtagggagcacccattaagttaaagaaaagcatgatgaaaaaaagcatcagtggttgggaattatgaaactgatttttaagcctagtttttattttaatgcaatataactaaaaggaactgttttataattagatatatgcatctttttaaagaattttatgtatgtatatatatgtatgaatgagatggggtcttgctatgctgcccacactggtctcaaactccttgtctcaaacgattcttctgcctcagcctcctgatatatgcatctttatatattttatcatatactgcagatcttcgagagagttaattattttgcatgctcctgtaaaatcagacatatcacaatttcaccattttgaagccatctttattctctccagttagaattaagagttccctgctatgtatctccacagtgcaatttatcaaaattcatatcccaccctcagctttttgaaagtgttcctcctggaggataatgcctatgttattcatcttcatttctctcccagtgtttataaataatttttttttacattttagatggattgtaagcaagatgaaccttttaaaatgttatgcttatttatatagaaagaaactccttgtaatttttatgcagaagcaagagggaattagtagcagtggttgtgttttgaaggcttttgccctgccagagtggctgtggattgaaaagttaaagggccattggtttgctagcagtatccaaccaaagtatagacttaaagaaaatttgcataattaaatttttggaacctttttttcctttgtttccttcttttttagagacattagaagaaatggacagtgagttgctcaagtgtgaattctgtgggaaaatgggatatgctaatgaatttttgcggtcaaaacgattctgcactatgtcatgtgccaaaaggtatttctgtgctcttgaatttcccaaaggacagataaat

SEQ ID NO: 109405 - DNA, 1046 bp, Homo sapiens
tccacaaagaacttgagagagaattgcttaattgagtagactttttaaagttaaaaaaaaaacccaactcttaaatatactgacagttattgcctttgtttttcagtgttggactgagctaccaaaatatttgcagtgcaggataactggatgattagtattaattctgaagataaagaattgctgaatattaagacttttttttcaaaaactccttgcctaaactcagacaataggttccatttgacagagactttgaagcagctgtactgctggtgaccagaaataaaccattcatgtccactctgcctcatcttttcccaaggaataaggcacttactaaatggatctgatcagttgaactagtaaattatcacaaataggtttcattttaagagttttttaaaccaaagtatttctgaatgtctttttggagattgtttcattttattatttctccttttttaaaggtgagtcgttcctctttgctaatagaacagcctgtgaaaaaacggcctcttttggataatcaggtgataaattcagtgtgtgttcagccagagctacagaataatacaaaacatgcggataattcatctgacacagagatggaagacatgattgctgaaggtttgtgggtttcacttaagataccctttaatttaactttgacttttactgcttaaaacaggatgtggatttttattctgtacagaatttcactggaagtattcaacttttattttcatataatgcaccatttgactaaaataatgggaaagctaatcagactctcaatggtcacataactaaaatagcaagattagtgctaatttcttcaatgtcagtttgacttttgaaggagtgtgagtgggaaaagttccatcatatgtgagagaaggcaattcagaattttagtatcaaaacaatcaattttctttcttttttaaagcagacttaagtaacaaatgagtattttagtgagttagcttaaaattttagagcttctgggttgtttcgtttcagactttctgcatgctgatgtt

SEQ ID NO: 109406 - DNA, 1029 bp, Homo sapiens
cctgggctcaagtgattctcctgtctcagcctcccaagtagctgagatgacaggcgtgtgccaccatgctctgctaattttgttttttttttttttggttttttttttagtagagatggggtttcaccatgttggccaggatggtctcgaattctcctcaggtgatccacccaccttgacctcccaaagtgctggcattacaggcatgcgccattgtgcctggcccaatttgttaaaggtctgaataactttgagcaagctaccctcctctataaagtggaaataatagtcgcttctaccttagaagattattgtacagattaaatgaggtcttaaggttcttagaacagtttttgaaagtaccagatattaactgttgttattatttattccttaattctctttcatttgcttgggcaaaatgctaaaaaaatttttaaatgactttttggtttttttttcagagcaagtggaattacctgctgtggcatcagtcagtgcttcagtaattaaatctccatcagatccctcacatgtttctgttccaccacctccattgttacttccagctgccaccacaaggagtaacagtacatctatgcacagtagcattcccagtatagagaacaaacctccacaggctattgttaaaccacagatcctaacccatgttattgaaggctttgtgattcaggagggattggagccatttcctgtaagtagcaagcatatttgtgtgtgtgtttgtaatttatataacattattttaaaagttacatattactgttctctaataaaaagcttgtaattttatttcaagaaagttgtccattttaatctagcatttatctttctacttcctttatttccaaatgtttatgtagaattttatgccagctaagtttagatgcataaactaagggaaaaaatgaaaaaaatttcaggacatatttttataatttttagagaaaggtagttggaagtttattcagtgaaatcaacttttatattttttctttcttttttttt

SEQ ID NO: 109407 - DNA, 1692 bp, Homo sapiens
ttcatcagcatctccctttctataaacatgtgccaccagtttgcagaaaaggcatgatggggggctccctaccacttgactgtgctaattcttacatatatttattcctgttgagtggcttctttgtggagaaaacctcatactgtcacatcaattattgaagtttttttttggtgagggaaaagggttaacaaaatcccttatttaggtagcatgggcttctgattgtctcattctctgcaagcaaaactagtgttttcctagatttggaatggcccctaaatttgagttcttagttacagtgattaattaactgtgctacaggattcacacacgtcttttgcttaatcacattagattattatacaaaatattttctcttcctgggtcaaatgatatatataccctcatctcagctcaaaaatggaaactcatttgggaagctttataagtaattaccctattagttggaagcacgtttagatatggattagaaaggatgagatctttattttatgaattttaatatagtatttttatgattttgaagttatctttatatatgttatacttgttctatgatgatactcctcttttcctgcaaagaagaaattcaagtgtataaactttgctaaaagttaatgtagatattcaggtgacctataaaatataataagaacaaaccatgtatagattcagattattaagttttaggcagttttcttttagaacttatcacagtacagtgtattttatgatattttctagttttccaactataaattgtcattaaatattcaggccaggcgtgatggctcacgctagtaatcccagcactttgggaggctgagttgggaggatcacttcaggtcaggtttcaagaccagcctggccaacgtggtgaaaccccgtctctactaaaaatacagaagttagccgggtgtggtagcgggcacctgtaatcccagctactccggaggcagagacaggagaatcgcttgaaccagggaggtggaggttgcagtgagctgagatcatgccactgcaccccagcctgggtgacaagagcaagactctgtctcaaaaaaaaaaattttttttttttcaaattactcttgtttggaaaacttgtaatagaattctgatgattatgaccttctgataatgaacactttttcctttagagtgatttaaaaatttctgtatttttgaaatcagtactaattgtcatttttttctctcacagcttcatattctccaattcagcctcattctctaataaaacatcagcagattcctcttcattcaccaccttccaaagtttcccatcatcagctgatattacaacagcagcaacagcaaattcagccaatcacacttcagaattcaactcaagacccacccccatcccagcactgtataccactccagaaccatggccttcctccagctcccagtaatgcccagtcacagcattgttcaccgattcagagtcatccctctcctttaacagtgtctcctaatcagtcacagtcagcacagcagtctgtagtggtgtctcctccaccacctcattcaccaagtcagtctcctactataattattcatccacaagcacttattcagccacaccctcttgtgtcatcagctctccagccagggccaaatttgcagcagtccactgctaatcag

SEQ ID NO: 109408 - DNA, 1712 bp, Homo sapiens
tactaaaaatacaaaaattagcagggcatggtggtgcacacctgtagtcccagctacttgggaggctgaggtatgagagttacttgaacctaggaggcggaggttgcagtgagccaagattgcaccactgcactccagcctgggcgacagagcaagactctgtctcaaaaacaaacaaacaaacaaacaaacaaaaaacttcctttgttccagcaacctcatcgggtaagcatcttttttctgtccttttacaacgctgctttgctttttaaagacttgttttatacttaggtgtaagtgtaaaatattccacttaaacctatttcacttctcaagtttcctgtgttaatactgccagcattctctacatcactgaatctcaatactgtggcattgtctgattaccctagttagaaatttctcctccctctgaacttttatggtcccttctggttctctttcctttatagttacttatatactgatcttagcttgtctgctagatagtaagctccttgagggtaagataataatattgggcatttatgtatgtgtgaggcactgtgttagtactttacattaactctttaatccctttttggattcatcttttcatccttgtatcttgacagcactaagttgtatcttatacgtacttacgtatgttaggtaggaggtacatatttgttggattaatagttcatttttttttcccacttggattttgggaattattgcagtctttcttattggtactaattaggtatcactatacttagaattgttaaatctgaatcttatgtaagtaggctttgatataatgtataaattaataaatatattcaagctgggcgcggtagctcacatctataatcccagcactttgggaggctgaggagggcagatcacctcaggtcgggagttctagaccagcctgaccaacatggtgaaaccccgtctctactaaaaatacaaaaattagccgtgcgtagtggccggcacctgtagtcccagctacatgggaggctgaggcaggagaattacttgaaccggggaggtggaggttacagtgagccggaatcgccccattgcactccagcctgggtgacagagcaagactccgtctcaaaaatatatatatatatattcgtagtatagttagacacgaattcttattttttttttttaaacctctgtgtgctaggcgctgctctctgtatggcataaaagctgggtttttacactactgtacagagtattctcagcctcaaaccagcgtctggctagttttgacagtgtggagcaatggtgacccatggtccttaggatgactgctcagggacaatttctagtgattcctgcagttttgataaattataatgaaaggtagattgatttctttctaaagagaacgttactttcagagaaagccgggaactctttcagggttagttcaagcaaggaaatctagttttggatttttcagtcccccttaactctcaatatctggttctgaattgcagcttattctcccctctttcattaatagtgtgataatatgcttatagtttgcattcctctgatggtcaatatcttgtgtaagtatggaggaaaccagtaagccaaaaccaccagagtctcaggtcagttttaagtccaaattcagatcttacatatactccaattttccttgatgttgttgattataaaca

SEQ ID NO: 109409 - DNA, 1244 bp, Homo sapiens
taactaatagtgaagggagaaaagcaaccacttaaagaatttacaggccgggcgaggtagctcacacctgtaatcctagttctttgggaggcagaggctggtggattgcttgagctcaggagttcgagaccaacctggtcaacatggcaaaaccccatctatacaaaaaatttgcagggcgtggtggtgcgggcctgtagtcccagctacctggggggctgaggtgggaggattgcttgagcccaggaggtcgaggctgcagtgagccaagatcgagccactgcattccagactgggtagcaaagtgagaccctgtctcaaaaacaaaacaaaacaaaaaaagaatttatagtttccaaggtgaaacaaacaaaccagctgcttaggaaaacacagctgattttaacatgttctgaggagcacaatttttcttgctggtactcatgaagaaaacatcttacttcatatttaaaggtatttttaatgtgaatagagtcaaaataatttataaaagtggtctttggggtccagattgatgtgttctaattatgagcctctgtgatcggacttaattcaaagatagatttttgaggggctagaggaatggattgaactttaggaatttctctatggatattgtttctcttctctgtgcttttgaaatggcagtgagtgagtctggcattggtaggtgatgctcacacttatgcattccagtgataactttcgtcaagttcaagactgttttggaaaatttctgcataactttgttgagttttagaattatatttgcagttaaaatttttattttaattgtgaaataccaaatctgaagttgtattttaatattctttaagctatagaagtcagtacaacagttaatttttccttagtattaaacattcttataccatagtgtaaaaatgagaaatttggaatatctcacttttatttactatgttaaatgctccattccttctccccaccaggcacacccacataaaaaaagatttttggaaagatgttatagggcagagtgtgttaagagatgagccgggcataatggctcatgcctgtaatcccagcactttgggaggccaaggcaggcagatcacttgaggtcaggagtttgagagtagcctggccaacatggtgaaatcccgtctctactaaaaatacaaaaattagctaggtgtggtggtgggtatctgtaaacagcctggctaacttgcaaggctgaggca

SEQ ID NO: 109410 - DNA, 1034 bp, Homo sapiens
ttctcctgcctcaacctcccgagtagctgggattacaggcacgcactactacgcctggctaattttttttcttttttctttttttttttttttttaagtagaaacagggtttcaccatgttagccaggctggtcttgaatctcaggtgatctgcccgcctcagcctcccaaagtgctgggattgcaggcgtgagccaccacgcccggcctcgatatattcttacagtggaatactgctcagaaatactgatgaatcttaaaaaacatgatgtttagcaaaagaaccttggtataaggttcttggtataagggatacatactctatgattccattatatgaaattctagaacaggaaaaactatagtgaaaaacaatcagattagtggtatctggggtagaaagtaggaggagattgattgggaaggggcatgagtgaacttccatgattaaggtgatgttctgtatattggttggggtagtaattatatggtatatagatatgtcaaaactcattgttttgttttattgtatgtaagttacacctcaataaatttgacaagaatgaattagagtgagtacattttaaatgaaaacaattgagttagagtgttactttgcatgatattgctgtattctggtattcttcataatgaatattttagactgcatatggcagaaatgggtattttagggtcatctttggcttcttatttgtaatataatagttctcaatcttctggtaaaaaataaaaaatgaggtagtaataatattccttggtatttttgataaaacctctatatattatttcatttacaagtaaaggctaattttcatgtattaatttataaagatgatggtcggttaaatccagctttcttctaacttgccctggcattctctacagttaactttattggactttttttcccccgtatttataaaatgagaactttatctctgttaactttaagatttttcagctctaaactttttatgtctctgtggaatgaatatgttgaagtaatgatcatc

SEQ ID NO: 109411 - DNA, 1042 bp, Homo sapiens
ttttttgatgtgaagatttttttgcaggctcttttgttgttgaacttttacatgtgtggcatttacttttagaatgaatctttctttcttttctttttttttttttgagatggagtcttgctctgtcatccaggctggagttcagtggcatgatctcagctgactgcaacctccacctcctgggttcaagtgattctcctgcctcagcctctcgagtagctgggattacaggcatgagccaccacacccggctaatttttgtattattagtagagatggggtttcaccgtgttggccaggctggtcttgaactcctgacctccagtgatccacctgccttggccttccaaagtgctaggattacaggcatgagccaccacgcctggccatagaatgaatatttctttacaaatagttttaaaatgaaagggcaacctggatttgtcctttagatcctttgtagctaagtgaaatattggagtgtagtatgtggcatagttatccttatgataaagaggactgaaaagacttttttggtgtttctttttgtttctcactgaaatttaatttgtgtcccaaaatagtgactagttgtttacttcccattttaggaatcctgccacagtagttctgagctaggaaaaatttaactataatagcttatttgagacacaatttggtctgagaatttcatatcaccaaaatatattttcttttttgagtactgcttttttttgcactcatcagaatcatgagctgtttcaaaaatgtttatgattttttttgagttctctattatcagaaacttctctttgtcatgtagaaccttttgctgaggagataatcctaaactgcattgtctttctgtcacaaatttcagtctctcttgcctgctacacattgtgtgtgggacatgttcttttgtcttagggtatttttttggttttctgtctgtacagctgattttcacacccgctaccactgtggctgctgtacagtctgacattcctgttgtctcgtcgtcatcgtcatcttcctgtca

SEQ ID NO: 109412 - DNA, 1121 bp, Homo sapiens
tctctagatctaataacatttaatttttttctaatttttattttattttattttatttatttatttttttggagatggagtctcgctctgtcacctgggctggagtgcagtggcgtgatctcggctcattgcaacctccgcctcccaggttcaagggattctcctgcggctgcctcccgagtaggtgggactacaggcgcccaccaccacgcccagctaatttttgtattttagtagagacgggttttcaccatgttggccaggttggtctcccaacttctgacctcaagtgatccacccacctcggtctcccaaagtgttgggattacaggaatgagccatcttgcccagccaatttacatctagtttttaagcaagagattaatagcactgaaaattcaattttattggacaccacatcttacttagatgcctttctcatggcctgcacccgtcttttcctagcaaggaagcttttcagtgaggggccttcagttattacctagtgctagtagtttggaggaagagaaacaggtttcattaattagtgataaactgtcaatgtatgtgcttatccttatataaaattacttgctattatgggatagactttaacaaggcaacatctggactgctcatttctttacattatatatgtatggaaatttttgcagaaagcttgtgaaagttctttttaaaccgctgctgtcaagtagtaataacaatacagaggattccttctgtgcacatctagaaataaaagattaactctttgcatatttggaatagctgcttcagtgaagaagtatgtaggatttttcttactgtgaacaagtcttggcaagacttgtttttgaaagaaatgcaagattattttagcaatatactttagtaatggttctgaggaaatacaagtggtatcttgagggttggggggatgttagctaattggtcttagagcttcagccatggcacctaatcctagggcagctgatccatagcttggccaaagagagaaaaaaatagagcatgctagcctggtgccaaaaaacccaaaccaaacacaaaaaaccctcagaaatttgaatgagaaaatatggagataaaattggtcagcactg

SEQ ID NO: 109413 - DNA, 1016 bp, Homo sapiens
ggcgtgagccaccgcgcccggcctaaactttcaattctgtattaagctatcctgagatttctaattgagagcattgcaactggtctttagtatcttaattttaaatagtaaacccattgctatatttgctttaaaatatgactttgggaacctgttgtaatctttctatggtattaactattactgttattaccattactgtgggatgttattattaatgactaatagacaatatataaaataatgatggacttaaaaatatgaaggtggactagatttgatcgtttggaacctctttctctaactatatttgagaaacatattaatataaagaccactggatgaaaagttgttggggaaaaagatatgcttctggtacaaaatatcactttacagattagttacaaagactgaaatgtacctttacaatgaagagatctagcagtcactacctttaatggttattgaacatcagtagtgggagttgataatccgacatttgtgtacctcatgaaaagtaatgagataagaaatacacaacactacctatgtgttatttttgccaaaggtatttaatactgcctctaatcgtaagtaaacagacaaatccagaatgtgggatataatatgaaacaactaaccagactctttaaaaaaaaaaaaaagtcaacataatgaaaaggaagtaacaacaaataaggcagagtgaatgttttaaaatgttaaggagaccaaaaaaagcatgatcaaatgcagtccctgaatcttgattgcatcctggatagaaaaagtgagctttgaaagtcactttggggcctggcatggtggcccatgcctgtaatcccagcgctttgggaggctgaggcagacagatcacctgaggtcagtagtttgagaccagcctggccaacgtggcaaaaccccatctttactaaaaatacaaaaattagccgggtgtggtggtgtgtacctgcaatcccagctactcgggtggccgaggcaggagaattgcttaa

SEQ ID NO: 109414 - DNA, 1048 bp, Homo sapiens
tgtgctctcactagcttacattctatgtatcaagcttccagcagactctttcatcttgatgtctcattataacttctgaatttatcatgaaaaacccaatcgttctctccagtaactttgtcaatcttatcctagccacacacttgacgttccctgtcagtggtacccccaatctcttggtcaccaaggttaatgtgtttttttaattcctgcatctctattgcctctgtacccaaaagttatcgtatcctttttaagacatccttcgatgtttttgtgatttcaactccctccccattcttattaccatccctcttatctcaaaattcatccatataatctggatagttagattatttggtttggaatgacatttgaaaaatattaagaacttaaaatatttttatgttaggaaaatatctttaaatcgttataggtacaactaggtgttagaaatataatgtactacgcaaagcatttcccattataactctgatacaaatgttctcaacaggcaatgaacaccagggaaagtggcaaagcttcatccagtctaggtcttcaggattttgatttgctccgggtaataggaagaggaagttatgccaaagtactgttggttcgattaaaaaaaacagatcgtatttatgcaatgaaagttgtgaaaaaagagcttgttaatgatgatgaggtaagcactgcatattttattgcttctaaactgcttgagaatactattcttttttttttttgaaacggagtttcgctcttgtcacccagcctggagtgctagtggtgcaatcttggctcactgcaacctctgcctcccaggttcaagtgattctcctgcctcagcctcccaagtagctgggattacaggcatgcaccactatgcccagctaatttttgtatttttagtagagatggggtttcaccatgttggccaggctgctcttgaactcctgacctcaagtgatccacccgcctcagcctcccaaagttgctaggaatataggcgtgagccaccgcacccagccaagagtactat

SEQ ID NO: 109415 - DNA, 1035 bp, Homo sapiens
gcttgtagtattctttctattctcgaccccattagtggttcttagccttctcggaggatcacgggtcccttagagaagtgatgaaagctttgaggactctgtagatactgtgcatgtacatacgggcatacacctttgcccccagttgtagaagtatggactgcctgaagttcacccaaggacccagattgagaacccctgtttgagactatcaaattaatagctttatgaaaaatgtgagtttaagttagacaggaacttttacaattgtgtcttgggctcagatgttttaaagtggtacttcagttcatttttcaaatttgttcctaaaatcactgggagaaaaaaatatgttttaatatgaatttttgtgtttccagttgtaaatgtagaacttaaatatggttgaatcaaatgacttattttttatttaattttagattttactctgcagaaatcagtctagcattaaattatcttcatgagcgagggataatttatagagatttgaaactggacaatgtattactggactctgaaggccacattaaactcactgactacggcatgtgtaaggtgaggaaaattttctagttattttaaaaggtcttcagcagctagtagtctttgtaaaataacttcatgtttaaagatgaggaaatgattactaattttgctaatttacttaagctttgtggaattctagcacaaagacaaatgtactttttttctaaccatttgcaaaatttgtatcttctgtgttatgtgtactacaataagagctaatttctttttattatacataactttttatcttgaaagttgaaatacaattgaagacaatttggaaataaaaattgtctgcaattccactacttaacacaaccatttgcatatgaccttccaatttttgccatttagtagtgaatcttatataatgcattcaggattttcctcagaagtcaaacattttttatatttaaattttaaacatctgacataaagcataataggataaaacaagaatttcagtta

SEQ ID NO: 109416 - DNA, 1011 bp, Homo sapiens
aggctggagtacaatggcacaatctcggctcactgcaacctccacctcccaggttcaagcaattctcctgcctcagcctcctgagtagctgggattacaggcacctgccaccatgcccggctaatttttttgtatttttagtagagacggggtttcaccatgttggccaggctggtcgcgaactcctgacctcaggtgatccacccgcctcagcctcccaaagtgctgggattacagatgtgagccaccatgcccggcccttacgtatttatattatacaagttttcaatcataaacaattagaaagcttagcgagtggaacccctatgtacctatcacttatatttgtggtacctttttgatctctgtgtcattttttttcctaagggatttttttctcatttcagaaaaaagtgacagtgatagaggagtcttatccccaagaataaatgaaactgaacaaaaaacatggagagtattacccttcatacgaagtgcacaaattaaaacaatgaggcttttttttttttttttttttttgcctgtgagatacgggttttaaagttagaatagcctgtatgtacaagagtttaaagaaatgggcatatgtcactggtgtgtatataaattgttacaaaccttttgagaagcagtttgatgggggaattatcaggaatcctaaagatggccatgttctttgatccggtaattctgcccttggatattctgagtaaatattttggtttatgaggagagatttctgaccaaaacttttattgtagtttatgatcaatattataaagtcatttaagaagatctttatttttattttatttttactttcttttttttttttttaaatagagacgaggtctcgctgtgttgcccaggctcgtctcaaacccaagagttcataatgttagcatttagataatctccaggctctggaggcactttcctcaggtgaatggggaatgcagttcatacatttacatatttgtcatgttacta

SEQ ID NO: 109417 - DNA, 2060 bp, Homo sapiens
cctaataattttgtccttttttactctttgtattttgaggccatgttgttgagtgtatgcaagtgtatatttgttacaatttcttggtgattgtcccattaattattgggtagttcctttactctgcctgttagtgtgttttgccttattttttttccatcctacagctattaaaatacaggcccggcatggtggcttatgcctgtaatcccagcactttgggaggccgaggtgggcagatcatctggtcaggagtttgagaccagcctgagcaacatggagaaaccccattttctactaaaaatacaaaattagttgggtgtggtggcacacgcctataatctcagctactctggaggctgaggcaggagaattgcttgaatccgggaggcggaggttgcagtgagctgacattgtgccattgcactccagcctgggcaacaaagtgaaactctgtctccaaaaaaaaaaaagtgttcttaggaaaaataaacagaaggaaaatattgtagtcttatcaatggttgtattaggaggtgagatttaaagtgcttcttttcttcatgaaatatgccttattctactaatattaaaattttgttattaaattttaacttgtatgtaaattattttaaattcaagtcgtaccttaattgaatcaactctagcaacatctaatgaggacaggttttcttcaagctatttagtggtgatctgtgattttaataataaaggcagttgccaggcatgatggctcatgcctgtaatcccagcactttgggaggccgaggcaggtggatcacttgaggccaggagatcgagaccagcctggccaacatggtgaaaccctgtctctactaaaaatacaaaaattagctgggtgtgttggtgcatgcctgtaattccagctactcaggaggctgagacacaagaattgcttgaacccaggaggtggaggttgtagtgagctgagatcgtgccactgcatgccagcctgggcgacagagcaagaccctgtcaaaaataataataataataaaggcaattgttctagtgatgttaagtgagcttaatgtatcactgcagatgctgaacttatatgataggtgaaatagaaagggtgaatttaaaacagaactttttatctcattctttctttctgttctttttaataaaaggaaggattacggccaggagatacaaccagcactttctgtggtactcctaattacattgctcctgaaattttaagaggagaagattatggtaataaataaattggtggtattattttagctattgctagatgggtggtaaaatgtggtaccaattgcattacagtacactaatgcattttgacgtgatcttattaatataaggattcttgatcctgttaaaaactacatggagagtcccagactttgaaatcgagacagtgggaccttggcagtatttgggggtaccaagctgaataatattttattagtggcaaacactaaacagtagcaggcactattctaagcagtttacatatattaactaagttaatcctcttaacaaccctgtgaggtaagtactattaattctccttttacagttgaagaaactgacatacggaaagtttaaataactcgcctaaggtcaaggattcagaacagcacccatgtgactccagagtcatgaacccctggaaaatttttcagatttcctgggatatttgccccaggaatctgaaagatggtggaaagattaactgtatctcaggcacccgaagatacacttatcttgagaaaacatttgactttttgggttttggccctctgccttcagcagatataaaggacaatgtggtacttgtgagagctgctcaaagtctgaatccactgtccttcactggtctttatcagctagcaaaagatcaagtttaagaccaaggaggcaggagaatggcgtgaacccgggaggcggagcttgcagtgaaccgagattgtgccactgcactccagcctgggcgacagagtgaaactctgtctcaaaaaaaaaaaaaaagcccctgtcca

SEQ ID NO: 109418 - DNA, 1105 bp, Homo sapiens
ttagccgggcgtgttcacaggtgcctgtagtctcagctactcgggaggccgaggcaggagaatggcgtgaacccgggaggtggagcttgcagtgagccgagattgcaccactgcactccagcctgggcgacagagtgagaccccatctcaaaaaaaaaaaaaaaaagaccaaggagattactctgaaatacaatttaattatatcctcaacacacaatattagatattgggcatgagtctgaaagtagaaatacatggagaaagaaagtttttttttctcataattttatttttaaaattatcttttaggtacctacccttgttgataaatgaagcatttctataatcttcagtgcctaccatgatagttggaatgcatttagagtttactttttcattgtttctttttcctttatgtgataaaatttccagttactaactttcaagaatgcaaagtgtataatttattgctttaaaatttctttctgaaggtttcagtgttgactggtgggctcttggagtgctcatgtttgagatgatggcaggaaggtctccatttgatattgttgggagctccgataaccctgaccagaacacagaggattatctcttccaaggtaatttggagtattttacagagattctctgagaaaaacctattctagagtacaaatgagagtgattcaggttactactttgagtaagaaaaatgagcataatctggaaaatataatcctgactggtggtattaggttttgttgttgtttttgtttgtttttgagacaaggtctcactcttttgcccaggctggagtgcaggggcgcaatctcggctccatgcaacctccacctccctggttcaagcaattcttctgcctcagcctcccgagtaactgggattacaggcacactcccgagtaactgggattacaggcacacaccactatgcccggctaaattttgtatttttagtagagacagggtctcaccatgttggccaggctggtcttgaactcctgacttcaagtgatctgcccacctcagcctccccagcatgctgagattacaggcatgagccactgcacctggcctctgtgtattaggtt

SEQ ID NO: 109419 - DNA, 1612 bp, Homo sapiens
agttattttggaaaaacaaattcgcataccacgttctctgtctgtaaaagctgcaagtgttctgaagagttttcttaataaggtataaattgtgtataagaatattttgtgatttgtctctttctatatatatcaaactggtcagtagcggtttgggaaatgtaaaattccaaaacagtagagaatgtaactttttcagtttgacccagaatttgtctcttacccaaagagtaattgacagcattagatcctgagataagttagttgtcctttccattttggcaataaaatttactccccagctatatattacataatttttgtgtatgtgtaaataatatataccatattctcacataggggaagagttaatctttgggtttagccataattgtactttgaactctgtttccattttctctgtatcattatccatagaatctatttattaccatgtactttttgagcacgtgggccgcagtgctccctacaaattctcatgtcaaaaatgctataattaggtaagattcggaagaaatgaaatgctatctttggctcttaaaaatgtgaacatcattcaattgtttgttgctgttggtaggctagaggagttttaggatctaggagtgtggtcttggcaattataaattctactttaaataaatggtatgatagaaaagttgatgtacatttaccttctaaggtaaatagataagataatgagttttaataaaataagaaattgaagccttttaaaaaatgaacaatttatgtgaggaaagatttaaacttgaaacctaatttttcacatagtgaaaaatgaaggcaagaggtgttgatatgcaaaataaaataccttttatcagaaagaaaaatgggaacatattctcattcatagtgatgaataagccaagactttttataagttgcaggctcctcagtccagtgattcagataatggttgtatcattgtcttacacaggtggtggtttgttgctataattgggcatggggattttaaattaagctaaaaacaaacttctcatgaagtttggaggtttgcatgttttgactctcacactaggtcatgcaaagaaatggctgggtgctgtcaaatgattctgctgttctctttttcctcctgtttttctttagcaaggaattggtgatgattctctgttttaattacatgatgggtggagaaagtgccttgaggaatcacaagtttcaaataactcaatttgttctggagttgtactttctagaaataaaaggtagaccattccaacttcagaaataagagtatcatgtgagggcacacaacacagatcacaaagatgatttattttaaagcatgacattcacccaattcttgaaacatttctttcaccataggaccctaaggaacgattgggttgtcatcctcaaacaggatttgctgatattcagggacacccgttcttccgaaatgttgattgggatatggtatgtaaattttgattactcaactattaggtttcattattatcttgggccaattttttgttgttgttctgtttgtttttagacagagtcttgctctgtcaccgaggctggagtacaatggcacgat

SEQ ID NO: 109420 - DNA, 1051 bp, Homo sapiens
ccaaatctgactgactaaggcctgtgctctttctaccacgctgcactgtttcccatttgacaaggactgtctttgagttcctgagtattgccttaagatagattcctagaaagagaattaggtcagagggtattaacattttaaagctcttgtattgccaaattgctttttttaagaaattacattgagttattaaatccagccatcagtgatctggtatattttttgtgcttatacttcatcttttaaacatgtagtttggaataattgggagatattttgattatttacctgttgttacagattcattctctctaatctcagggaggcccttattgtttggcagtcatttcacttctatctcatttcttaccacatttctcccagcacctgctccaaacagtctcttcatttcagaagccttcagttctactcctttttccatcactgttaatggattaaccttgtcttaatttgatgcaaggactgataacctctctgacgtgaccttgcctcctttgcagctgtccccagaccaccttgcatctcagaattgctttctaactcttttcatcattttcttattccctactcttggaagactctcctttacaaggggtgtccctgctattttcctagacctgtttccttagttttctccaagatttcattttgtcagttatctttttattagaccttctttatttttttctagcttgtttccctctgtgtaagcatgctcagatactctgatttttccccctaactcatggcccctctttgaacaaccacgtttttcctcattttcatttcatcttaaagcctcaaaaaaaaaaaagttaatagatgttcatggtcaaagaaaaataaatacacagcacctctaatcaaacttcttcagactagtcaacattgattgtcttgaattttttttttttttttttttactgtcaacacttcaaccccttacaatcgaacctgtcctccagcttttgaaggttgaatcaatttcttaatttctaaattgtaaagcattttggggtcagtcctc

SEQ ID NO: 109421 - DNA, 1014 bp, Homo sapiens
aaatggcaaatggttattgagcaaaaggtgttatggtaaatactagacattcaaagacaatcaagacagtctgatctccccaaaagcgtgctgtctactagaggagaaagatgtgtaccaagtcattatttctgacagcattgtgtattagaaggaacactggatttaatcaaaagataggagtttgaatcccgatgccacctcttaccaactgggtaaccttggataggaattgcataacttctctgagcctgttctcaaattgcctacctcataaggttgctgtgaagaataaatgcatgatggtttctgaagcacttatcccctgccgttagatctcctgagctgcatttctgtttaacacggcccccagtttgtcagccaagcagctcaaatatatgaagtctaaaatgaaagtaatgaccctttatgatctctttctattgttctcaatcagttcctttttttttagttacctaattctgctcacggtgtgtccctgttgttcagattccagatgtcagtgattgtggactcctcctttttcttaacagattacataatacctgcagctgccaagtctttgtctgtgttttcattatttcatcatttacatcagatctttcttttctcttcccgttgacacaccctagttcaggcctcattcaagtcatacccagagtattgtatcagcctcctaattgatctttactccttcactttgcaacctattctgtatgccttgtgaagtaccactccaattcttgaacccctttaattagaaaccttcagtaactccttcattgcctatcaggtaacatctatcctcttggctagcatttaaggcctccccacatctgctccagcctgactttctagcgatacctctcaccataatacaaacagtgttctgatcagtcttagctactcaccattccctagtagtattattgtctctgcttctgcctgttcattcctgtgtatcccgccttcatttttacctattgaaatttt

SEQ ID NO: 109422 - DNA, 2667 bp, Homo sapiens
gcagtgactcaatgcctgtgatcccagtactttgggaggttgaggcgggcagatcacttgaggtcaggagtttgagattggcctggtcaacatggtgaaatcctgtctctactaaaaatacaaaaattagctgggcatggtggcacatacctgtaatcccagctactcgggaggctgaaacaggagaatcgcttgaacccaggagatggagttggcagtgagccaagattagcctgggcaacagtgagtgagactcggtctcaaacaaaaaccaaattgggaaattcttcttgagttaaaaaagacactttttattatgaatcagattccaaatcattaactatttttgcaaaactggcacaagtggtttttctttttaagtatattaacagggtagctcctgagcctttccctttattggaaactttaactgcagtgttaatatatacactgcaaaagaccaaggatgcagttgaatggaaaattactcagtgtatagaaaggaaaaaaaccagaaatttaaaatagatacagaaaagtacactggtaatatttttatttcctattggagagtgaatccccacagttgctttttgtgacttgattcaaatgaggcactcattattgttaccaaacttgtaaaagcattccatgtattcagtggaggcagaatgtataatattttttccttataatttagcatacaggaaaagtatttattttttaagtagggtatcttaattatgctcatttcttcccctaaaccacattatctatatgattggaccctttagtgaaatcagaaaaataaagtaggcatgaataaatgttcaggacacacacatacactcacacacatcacagtatcagctctttcagtgagtttttattaactagataacacatgtaatacatagtagaatacatttcagaggcagagttcctcggattattttttatggatattagtgttcagcagcttattatttaaaggggtgccaaatatagcatccttctgttgtttattttaaatatatttttaatgaaaagggacttaaaaagtaaacatgattatctaaattacttaaaattttttaatcttagtaaaaattttaggaaagttatctagtttaaatttcaaatgttttaaaatttgtaggcatttaataaattatctttttttggaggggtggatgctgcatttcattggaaatgtcatttttccaaagtttctagctatatactctctttccttcaaataacataagtctgaaagcaatgaaaacgtcaaaggaaaatgtttatatacatccacatgtttatttaatatgtttctcttaacacctgaaacttgttttaaaacaaaaagcagtattcacttcaaatcataaacttagaattctgtatctcatgtcagaaatatgtttatggccttgcttttaagtggtgctgtttcccatagggcattagttctcagattttggaatgtgaaataatcacctaggaagttggtttaaaatgcacactagtgagcccaccttagacttcttttggggccttcgacctcactttgagaaataccttcttcaggttattctttatgtttgtcctgtggttaaatattagagtattcatgataaaacattttgagaaggggtaagcagtgagttattacccacaatttaaagcaaattttgaatgaatctttaagttaggtatctaccttcccaccagccccccaaaaaacctctcagtagtttctttcagtgtacaaaatgatgagcatttttctatgatgaggttttaaccattattcagggtggtcttttgtttttaaatctttttttaactaataagatttacggtgtgtattttatacagaaatgcattataaatgtttttaattgtgttctgttttttgcagtctttaagtgccatgccaattgttcttatattctatagaagttcgctcaaaatactcaacaggggaataggcagcggacagtcagaatggttggaattttggctttctaagaaaaactttattttgcataagcatgtggtcagatcattttgtgcatatgcagcctggattggatgttaagtaaatgcttgttcagtgccggtacatttacttaaatctgtttttatttttgtcatgtagaatactactgtggtcatcataatgtaatctatttctgtaccttttttttttttttttactttgaagtctttaaataaaatgtataatacccattgagagtggatcatttttcatatgtagtatgtcagaaatttgtataagaacaaagatgcatcaaaatttgttcaagaaaaagtgaaaatttcagagtttggaattttgctgtacttaaagcaccattctggtagaactgatgctgtcgtatttacatttaataatgttacatttagctggacatagtggctcacacagcactttgggagactgaggtgggaggatcacttgaccctaggagtttgagttcagcctgggcaatatagtgagaccccatctctacatacagaaaaataagaaattagccaggcatgccggcaaagtgcctatagtcccaggaggctgaggtgggaagactgcttgagcccaggaggttgtggctgcagtgaactatgatcatgccactgcac

SEQ ID NO: 109423 - DNA, 1017 bp, Homo sapiens
ataaacagtgtgagtgcctttcttttttcttttctgtctttttttttttttttttttttttggtagaggcaggatctcactgttgtccaagctggccttgaactcctccatctttctgcctgagcctctcaaagcactgggattacaggcttgagccaccatgccccatctctacttcttttcttgattacaggcatgagccaccgcaccccgccttcccagataggataagtattttatcctaatttcaactcttgcttaaaatgaagttctaggcagtattaagaaagtactttccaggctattccctgtatcacatcataaatttggtggttttctgtgagtgagtaaatcctaaaacagactccacagaggaacttgaagctttagggaaatttttcattaaggcattccatcactgggataaccagtttctccccgaaaggtacaaccaatctccagtccttgaaattcaacagcttgctttgtggacaatggctaacaatgagtcatttggtctatctgaaggtctcctttcctagatttgctcttgtttactctaggacttaaggatcacttaagaaccagatggctgggtgcagtggatgacgcctgtaatcccagcactttgggaggccaaagcgggtggattgcttgagaccaggagttcgagaccagcctgggcaacatagtgaaacaaccgtctctacaatttgctgggcgtggtggcatattcctgtcatcccagctgctcgggaggctgaggtgggaggattgcgtcagccctggagggtgaggctgcagtgagccctcgagtctgggtgacaaagcaagacacttgtctcaaaaaataaaaatctgaatagtttatatccctagcttattccagaatatactggaatttactgtgcacgatgctaaataaggctaataaaaacaacctctgcccttgatgttaaacgtagaaaacagacatactgagatgttcatctccacaatgaatagtccagtgacaaa

SEQ ID NO: 109424 - DNA, 1300 bp, Homo sapiens
gcggggaccccggagacccggacgcccgtcaccgcccccctcccccagtccagcagcgctccgcggggatgccctggtctcgacccggtccgtcagcccccggcggcgcagggatccgcgcccggcgcctaaactgccctggtgtcctcttcgttctggcccggggctggcgcggggaggtgcagcattaggggcgctgaggtgacacccgagaacttcccagggagagggtgcgcgggggggtggatttccacagtccttcccgcggcccccgcgggggggcggtgttgggagggcacttggggttatcccaggctcgccggtgggggtggggggactcctccctttacttccctccacccccttgcacacccacccccaggcttcccgtgtcccttgttctccctctctccgggttagagataggtgggtggctttgagtgggcggaggacttcagggttttaggggctcccccattctaggtcatgcctcttgctctcttccttggcctgtgttgagtaaggtgtgttcctgtggtggacgaaagtctgtacgatggttggtggcattggtccttaatcctttgggtctgttttaaggtaaagtgctgagagtttgggaagcaaaaatttctatttattggatttcttttggcttttctctcaagaaggaagtggaaaaagagtcttttctttttccctcttcctccatttgcattctttgtgaggtttgtctgccttgtgctttttgtcccggattagtcttgttgaaggatggagattcccaggcgtggagtctatagcttttggcttccattaagtaaaatcgctaacctttttttaagagaaagttaatttttgcctgcagtcattccagaaaaatagtgtacacggactagctgaattaatccacttaaaattgtaacttagttacatatggtagatatgttaactcctatctgatttttttggatgaaactgttgttttgtttttaaataggagatgaagtaatggatttttttccctcccttaaaatggcatagctgagaaagccccggtactactaattgagatgatctgcttaagagtcttcatattctgaactcgaaaggccttttatgttatattattgctcgctttacgcaactccaaattgctttcctatttaaatgaatgttcttctagtaaactggtgttagatttaaagaaatcactcaagcttcaccttggtaaactgaactcagtttaagattaagaaactgatttcggccgggtgcggtggctcacgcctgtaattcc

SEQ ID NO: 109425 - DNA, 2237 bp, Homo sapiens
actaatatggtgaaaccccgtttctactaaaaatacaaaaaaattagccgggtgtcgtggcttgtgcctgtagtcccagctactccggagtctgagacaggaaaattgcttgaacccgggaggcggaggttgcagtatgccgagatcgctgcacttcagcctgggcgacagagcgagactccgtaaaaaaaagaaaaaaaaaaaaataaaagaaactggtttcaaattggccctttggcctctggagcaaattcaaatgtaactcttccccaaccccccttctcttcttccagattaattaaaagaagaatgaactataatccttgaagataactgggcaattttttaagtcggaggctgttcttactggtgtgaggatttacacacgtcttcagtttttcagcacagaccagcagaccatcatttttagaggaaatactccctctgccctcctttttggtttccttggtggtaaagattaaatttggttgcatcattttgacttgtgtttgagtctagattttatggcacaaggaatggcataaacttttcatgtgttttggttaaaacaaaccagaccattgcattgaccctggacatctttaattgagaaattggtaactttattttaatatgtatatctgaagaattcaagaaaacaaaggcatcctcagaggtgtgcctcttttctttattattagaggcaaaacgaacaattttataggatttgtagtgaaattataccagattataaggagaaccaaaactaagtcgcaaaatttattaatttaaggggctctcgctttgaaagtttgagagtaagttacgataggcatttgtatccattcattactttcctcttttcaaataagcaactaaatagaaatgctaatctcagacttaattatttaacagaagagtgtaccatggaaaacctccagacaaatttctccttggttcagggctcaactaaaaaactgaatgggatgggagatgatggcagccccccagcgaaaaaaatgataacggacattcatgcaaatggaaaaacgataaacaaggtgccaacagttaagaaggaacacttggatgactatggagaagcaccagtggaaactgatggagagcatgttaagcgaacctgtacttctgttcctgaaactttgcatttaaatcccagtttgaaacacacattggcacaattccatttaagtagtcagagctcgctgggtggaccagcagcattttctgctcggcattcccaagaaagcatgtcgcctactgtatttctgcctcttccatcacctcaggttcttcctggcccattgctcatcccttcagatagctccacagaactcactcagactgtgttggaaggggaatctatttcttgttttcaagttggaggagaaaagagactctgtttgccccaagtcttaaattctgttctccgagaatttacactccagcaaataaatacagtgtgtgatgaactgtacatatattgttcaaggtgtacttcagaccagcttcatatcttaaaggtactgggcatacttccattcaatgccccatcctgtgggctgattacattaactgatgcacaaagattatgtaatgctttattgcggccacgaacttttcctcaaaatggtagcgtacttcctgctaaaagctcattggcccagttaaaggaaactggcagtgcctttgaagtggagcatgaatgcctaggcaaatgtcagggtttatttgcaccccagttttatgttcagcctgatgctccgtgtattcaatgtctggagtgttgtggaatgtttgcaccccagacgtttgtgatgcattctcacagatcacctgacaaaagaacttgccactggggctttgaatcagctaaatggcattgctatcttcatgtgaaccaaaaatacttaggaacacctgaagaaaagaaactgaagataattttagaagaaatgaaggagaagtttagcatgagaagtggaaagagaaatcaatccaaggcaagttttttatatcaatttttaataatggtaatggtttactttgaaatgaaaattctatgtttagtgtgtaacttaacctgtatgttgaacattgctcatgcaacaacaacaaaataccgattgatatatttgtattgcagtttttaggccataaagtgctttgcagtatgtttcctcatttgactttccaaacatcctgtgagagaagta

SEQ ID NO: 109426 - DNA, 1048 bp, Homo sapiens
tgggccaatagtcctgactactctggaggctgaggcacgaggatcccttgagcccaggagttggaggatgcagtgagctataattataccactgttccccagagcaagaccctgtctcaagggaaaaaaaaaatgtctaagaattttaaagggttttttttggtacaaattcgaatacttgtatgaataatgctgagcaggtggaatagcttttgtatttagaaaggagtgacaagaagttttttgtaaatgaaatcaagctctctaaattatttttcattatgagactgattagcatcgtatcactaaaatagagtggttcttcattaggaaatctgattatcaaagggtcacgtatacagaataagcataggaaggtgcagaaatttagagaaactttcataaaatgtttcttagtttttacttattttatatttttttactgtatattttggaattgtttaaattgtacattcatagacatttggagttttatgacctaagaggaaagaacctttggaatgaaatttttgtgtctgaaattttgcttatgtgtttgaaatgaggatgctatctgttcattttggggtaaataatgatggggaaattgggtgataagagcattttgaaatgttaaggctctaacttaagctactaaatgatccacttctttggcaagttatataatgtattgtattttaaaatttaaatacacataaaaataaatgattcctatgttgaaaggtaagataccaggcagtagatactcataatttggtatctaatttttattcctgattagtagcattactgctgaaccatttaattatattgttctttttttgaaaacctaatttgtatgttgacacaaatgcagaatagatgagaaaatctggcatgcctctgaatgttttgttgtatcataaacattgtgcttttcttaattgtttttaacatacagttaggataatttgttataaatgtgtttatggcttaccacagcatattaggtaaaattagcttgcaacattttatcatggttagtgtt

SEQ ID NO: 109427 - DNA, 1029 bp, Homo sapiens
gttggccaggctggtcttgctcctgacctcaggtgatccacccttctcgtaccaccacgcccagctaatttttgtatttttagtagagactgggtttcgctatgttggccaggctggtcttgctcctgacctcaggtgatccacccttctcggcctcccaaaatgctaggattacaggcatgagccactgcgcctggccatggaacctcttaaaggtagggtttagagaaatatccagctctcttttttgttttttcccttgtttaactcgttcctaatcgcattctccctcagtttcctgggtttgtctgttaacttcctatttttgttggtcaccttaaccatgccacatttcagctctcctttccttctttcccctttcccttaccagtgagtcttgcccccccttttaagtatccttttcccacaaaagcaaggtaatttcgtataataggaaatatgtaggggatgaagggaggacaaagtgtaaataaagtaaaccaaaataagggagaagttagtaaccacagatcatttattctttttttctcttcaatttctttttttgttttgttttgttttttgagacgattcttgctctgttgcccaggctggagtgcagtggcatgatcttggctcactgcaccctccatctcctgggttcaagtgattctcctgtctcagcctcccgagtagctgggattacaggagcgcaccaccatgcctcgttaagttttgcgtttttaatagagatggggttttgccacgttggccatgctggtctcgaactcctgacctcaggtgatccacccacctcggcctcccacagtgctggaattacaggtgtgagccactgaaccgagcccctcttcaatttctgaacgtcagttgttttctcatctgtaaaatggtaatgatacctatttaatgggggatatttgttagaattaagaatgatgtataaagttctcagcccgtagatgttcattaagttaccagttacctttctccttatttttctttattttt

SEQ ID NO: 109428 - DNA, 1038 bp, Homo sapiens
ttgtgacagagtctttatcgcctaggctgaagtgcagtggtgagattgcggtcactgcagcctcaacctttgggctcaagtgatcctcccacctcaccctccctagtagctgggaccagaggcgcacaccactgtgcctggctaattaaaaaaaaaaatttttttttttttttttgtagagatggtcttggtatgttgctcaagctggtctcgaactcctgggctcaagtgatcctcctgccttggcctctcaaagtgttgggattacagttgtgagccaccgcacccaacctttatttttctttctgatttgccatgaactgagacaccatttaataataagaagtattatgtaagtaagagtagttaggtatagaactcaaggaagcttagttatggaataaagcaaggattgaaagctctgggggccaggcatatagcataaatgtggaatattgactggtcatttaaaagaaaaatagctggttacttaccgtgccttttaaaatactgtggattaaatgagacatgtctgcagatattgcctgtgttaccatccatatagcagcacagctttgcttagtgattaggcagtgtgacagttactttagctgcattggaacagttggagggtcctctatttatttaagtttttatagagaattgagattcttgggggttttcttttctttctttctttcttttttttcttttttttttttgaggagtttcactcttgttgcccaggctggagtaaaatggtgagatctcagctcaccgcaacctccacctcccagattctcctgcctcagcctcctgagtagctgagattacaggcatgcaccaccacaccccgctaattttgtatttttagtagagacgggttttctccatgttggtcaggctggtcttgaactcctgacctcaggtgatccgcctgcctcggcctcccaaccaaagtgctgggattccaggcgtgagccaccacgcctggctgattcttgggtgggggttttctggtttttttgtttgtttgtt

SEQ ID NO: 109429 - DNA, 1064 bp, Homo sapiens
aacggtgaaaccccgtctctactaaaaaaaaaaaaaaatacaaaaaaattagccgggcgtagtggcgggcgcctgtagtcccagctacttgggaggctgaggcaggagaatggcgtgaacccgggaggcggagcttgcagtgagccgagatcccgccactgcactccagcctgggcgacagagcgagactccgtctcaaaaaaaaaaaaaaaaaaaaaaaagaataatgctgctataaatacttgtgtagaagtttaagtgtagaactatattttcagtttttttttggtatgtatttaggagtgaaattgctaggtcatgtggtaattatgtttaatgttttgaggaactgccaaacttttcaaaagcagttgcaccattttacattcctgtggtagcttgggagtttcaaattttgcatatctttgtcaacacttgttattgtttgtcttttgaatatagccatcctagtggttgtgaagtggtatttcatggttttaatttgcaatttctcagtgaatgatgatattgagtatcttttcatgtttttcttggacattgcatatctttggagaaatgtctattcaggtcttttggctattttaatgctaggttgttttactattgagttgtaagagttctttatatattctggatactggatccttatcagatatttgatttaccatactgttttctttttactttcttgttagtgttcttttttttttcctgagacaaagtctggctgtatcaccccagcttggctcactgcaacctctacctcctgggcttaatccatcctttcacctcagcctcccaagtagctgggactacagggatgtaccaccatgctcggctaatttttgtatttttggtggagttggggttttgccatgttgaggctggtctcaaactcgtgagcttaagcaatccacctgcctcagcctcccaaagtgttgggattactggtgtgagccaccgcgcttggccgtgttagtgttctttgaagcacaaaagttttaaatgtttattacatccaatttatctatttttttcttgtt

SEQ ID NO: 109430 - DNA, 1856 bp, Homo sapiens
tgggtttgttgcatttccatatggattttagaaactgcttttcaatttctgcaaaaaatccagtggggattttgatagggattgcactgataagtagatcaatttggagactattactgtcttaacaatattaagtcttccaatccatgaatttgggatgtctttccatgtatttaggtcttaaatttcttttagtgatgttttgtagttttcattgtacttgcactgcttttgttaaatttattcctattttatttgttttggtctaatttataaatgaaatgttttaaaaattacatttatggattgttctagtgatttttttaatggagtgatattcatactttgttacttgatttttttctctccaagatgcatcaatctcaaataattctacaagtaaaaggaaatctgagtctgccacttgcaacttagtcagagacataaacaaagtgggaattggccttgttgctgccgcttcatctccgcttcttgtgaaagatgtcatttgtgaggatgataagggaaaaatcatggaagaagtaatgagaacttatttaaaacaacaggaaaaactaaacttgattttgcaaaagaagcaacaacttcagatggtaaaattgttatctaaatgatagtccattatgaaaagatacttttgtatattgctctgtcgcccaggctggagtgcagtggcgcagtctcagctcactgaaacctccacctcacaggttcaagcaattcttctgccttagccttccgagtagctagcattacaggcacgtgccaccatgcctggctaaattttgtattcttagtagagatggggtttctccatgctggccaggctcgaacttttgaccttgtgatccaccagccttggcctcccaaagtgctgggattacaggtgtgagccactgcgcccagcccccctgtatattcttagtaagaaaagtcaaaacgagatgctacaaatgtacttaagattattgttttacactgaaaagcaattttaatatattttaaaattttttgagaaaatagttttttaaaataattacctctatatagaactgataatgatagctgaattttaggtattttctgtgctatgttttccagaactgaaaattttaacatggtgaaaataaagtaaaacttgtattgtgattctttacattacaggaagtaaaaatgttgagtagttcaaaatctatgaaggaactcactgaagaacagcagaatttacagaaagagcttgaatctttgcagaatgaacatgctcaaagaatggaagaattttatgttgaacagaaagacttagagaaaaaattggagcagataatgaagcaaaaatgtacctgtgactcaaatttagaaaaagacaaagaggctgaatatgcaggacaggtaagaattactgtttgtataatggtgccctttcagcatggaaatggaaactgttacttctctcttttttttttttgagacagagactgctctgtcgcccaggctggagtgcagtggcacaatctcagctccccacaacctctgcctcccgggttcaagcaattttcctgcctcagcctcctgattgtagctgggattacaggcgtgcgacactatgcccagctaaattttgtattttttagtagagacggggtttcaccatgttggtcagtctggtcttgaactcctgacctcatgatctgcccacctcagcctcccaaaatgctgggattacaagcatgagccactgcacccggccaccgttacttctctaataaaggaattactttttgtcaagctcagtttactaagctagatttcaaaatagataattctgttaaacatag

SEQ ID NO: 109431 - DNA, 5472 bp, Homo sapiens
tttagttacctaaattgctaatctctagccctctgaatattatatgttatattattttaatgtagtatatgagctttcaaatctacaaattaacaaacaggaactgttgcctgttatgttcaaaagcactggagcaaaaataagcaattctcttttgttaatagaatctcacaatttaaggaacatgaacaaataactaacatgagcaggctgtgatgagcggtatagtaaagtatagggcataatgaacatgaacatgctggatgtgttccttcctcttgttcctttgctttttcttaaatttagtgtcctgtcagatgtcagattaatagtattagatgcttaatggatttagtatacatgaaatagttcgttttgtaaaaagtaatttgaaaatagatattttctatgatatgaggattaaatggaaaaacaaaacaattaaaattgatagcgccttttaaatcacatagttggcagaactgaggcagagattggaccatgctgaggccgataggcaagaactccaagatgaactcagacaggaacgggaagcaagacagaagttagagatgatgataaaagagctaaagctgcaaattctgaaatcatcaaagactgctaaagaatagaaactgttaaagagattcatctgtgtattactgacaaggttttttttgtttgttgcttgctttggtaattgaattctgaagaatttatctgcatgacgataactaggcattctatccatttgtagatcagagaaagtgaagagattatatattagtacttaaatttttacattttccaaatgaatgaaaatgtatgtttctttgtacttttttaaaaaaatcagcttagtaacaatactatatggtttcaactagtaggtaatctgcttatatttctaatgcaaacttaacaattgtgtactttttaaaagctgcaatatgtgttggaaaatagctgtggtcaattttgttatccatatttcagactcaattttagatacaatggtggctttatattttaagtatatagagctactcaaggagttgaatctccccttttctcattaacacaatttttctaagttgatatggtgtactcattaacatacaccaaatttacttttactttgttcagattgtggaatgaatttccaccagttctcttctttttaatgtgtaccctaggaggaattttactgaggttatagcataccccatgagcacagtggggaagaagaatgtgttgttatgtgctgctgctaaacagaagcagcagttgtaatttgtttttcagtttaaatgtggttatagttagatttttttttaagcagcaacttttcaaaaataaaatgtgataatttctgaacttttgtttgtgttgttaatagtggtgtgaaaatattaacgttcttgagaaaaactgataccactgttgtgtatcagtttctatacaatccataatcctcctgtacagtttttacatgtagttatgagtcttactaaaatttatataatggacttgttttcctttaagttgtaaaatgttaaacaccttgaaggttattttggacttctgtatgtttaaatgttgtcttaccaaaatttgcacgaatggaccattttcatttactacttaatatcaaaatcaggaatttacagtcaactgatagtacatgataggtgcatataggacagtttagttacctgctactaaaagatttttagataagttttagaagataaaggaattccatagtttcaggagggacaacatcttctgcactttttttttgcacagaaaagtctgtcattctctaatggcaaatttcatatttgttaattcttggctcaaaatatattaggtaaaattcttagatctgtttttaaagggagtttcctgaaactatcattaattgacattattaccccatggattttatgggataataaatgtttttcatgttctcttataagatactatgtatgaaattacttcagagagctatatttattttaaaataaattagctagggttaaggttatattctatttccagcatagaaggtagataatctaatggtgtagaaagaatcactaggttgtcatttaaccagttattttcatattttgcttaatagtacatatccaaaaagaattttgtacttccccaaatgtaatttatttactaaattgagtataacctaaatgtgtgttttctattttccatttaaattttgctatattaagactaatttaattcgttgagtcttggaatcttctcaaggaggaacaaatattaaaatgacatgtagaaacaaatttttttttttttttttttttttttttttttgagacagagtctcgctgtctcccaggctggagttcagtggtgcaatctcggctcactgcaagctctgcctcctgggttcaagccattctcctgcctcagcctcccgagtagctgggactacaggcacccaccaccactcccggctaatttttagaaacaaatatttaaaatgacatattctcccaatacaatctatttagatctggagaaggaaaaatcagatatttatgatatagttttattttaattttgaattatttgtgtcacagctcagctttttggaagacaaactcaaacacctataatttcatttatatttctaattcacttggaacctttctgctttatgttacctagaaaatgataatttgtttaacccaaaacttctaaaataaattgcttaatccttgaaatatgttattggaaaattttaagcagtgcttaaacaccattaaattattatgaacttgtaattcagaattgagtaaagaaatattttttctagtccttcatatattgaaaacttgccacatgacattgtatcgtcttcattttccagaagatgcgttggtgtgccataggtttctaacttccttgaaaatagttttttaagtcaattgtaaatatacgtattattgttaaaagtaactttaaactgcaacacatagcttcaaaacaatatagagattttgtaataccttataagtggagttggctaaaataccttatccatataaaacttattctattctttgcatgcttattttgtgtgttggttgctagcttaaagtttgatttgttgttactctttgtgtgccaaattcactaggcaagcggatttttcctcagacttcaaaaaataattcttttaagaaaaaatgtaaaaatgtttattctaaaaagctgcattaaagggacaacctataaaaagttttgctagctcatctttagaaggaagaaagaatattagcttgggtgatgtttaatttgggtggcgatagtttctgtaggctaaactttatgagaaaagtgtacctactctataaaggtaataaatgtaaaacctcttgctgttattgaggaagctcttcaactaccctaaatttcacaaatgtaacttataacactatgaaaagatttgaccaacaatttacgtttgctgtgtgctttagtttttgtttaagcatattcttttgcttgaatttctgtgttcatgagagttagggtgttttatgcttcttgaactaattttataacatatttaatatattaccagttaagatataaaatcatttgtacatagcgaattgtaaagcagctattaaagtaggtgaaataaagtatatatttgccggttatccatatcttttagaagtcctgacagaacaaccagtttatttgcacataggtagcttctgtttgaaggaaggtaaagttataaggaaactcaaatactataagatgtgtcaaggtatttctccagaattaattgcaaagctagtgctgaaggattttaatcagcttctaaaattttcttctcaataaggcatatgttttgattacttagggaagattcctcatttttatttgccctttatgcatttaatccacatgataggacattaaaaattaatataaagaaaaatcgtgctcatactgtacatctgtttctgtgcttggaactacttgttaatagtttttatcgaagctgtcagcaataagggacataaaactgctgtattatacattgtggaattgaataaacagcctaattttttttttctagtatagggtacttaagcatttccacttttggaagaaaagtgtattagtattttatattgcatttcatttaaaaggacagttttttttttttttttgtaaatccattcattgaaatggtttctaaactgtataatgtaatttggagcctatttagtaatagaattaaatgtcctatgtagtgctacaatttttgaattagaaagtgatcaaatgtaagaaaaaaatttaaaaattcagcccagaaaacaaaatagtgtattaaattagtttaatgtaaaaggaatttataagatttttttcctcaatatagatacctcacttgaaaagaaagcacagcatacttaaagtagttctagtaaacatgtcctagaaaacagttgctaaatgtaggacatcttttgaggaattagtttatgagaaataaaattttacttgtttttactatcctgttagaagtatttgtttatcctgataattttaagccaacatagtagtcttaaattacttttgaatttctaatctgtgaaggcagtaaatgaaatatctgttctgcaactgttgaaacaaataattggctacattgaccataattaaagttaaaattttgccaatgatgtacagttttatggttaaagttgctgtggttggttgcattacatgacacagaaaactgtcctctacctcacgtgaaataaatattttatatggttttactaaaaataagactcatgtatctggtcacctagtttacaaattttgaattatatttattgaaacatgacatactgtgctctgagcttatacctcaattgtattttgtgctgttttccattttcatgccttgtaaataacttgtatagattgtggatcaaatactaaataaaaacttttaatgccaattaaatttgattcaagttatttcagtatcgtgtgtgagcttaactttctcattccctaagattgacattttcttctttgttcctttaaagtctattattcgtaggctgggcgcagtggctcatgcctgtaatcccagcactttgggaggccaaggcaggcagatcacctgaggtgaaggagtttgagatcagcctggccagcatggtgaaacgctgtctctactaaaaatacaaaattagccgggtgtggtgactcatgcttgtaatcccagctacttgggaggctgaggcaggagaatcgcttgaatccaggaagcagaggttgcagtgagccgggatcgtgccattgcacttcagcctgggtgacgagcgaaaactgtctcaaaaaaaaaaaaaaaaaaaaaagtacattattcgttacacacta

SEQ ID NO: 109432 - DNA, 1029 bp, Homo sapiens
tgatttttagacttcagctttaacatccttaccaaatccctggtataagttatctactgcataacaaattaccccacaatttatcaatgtcagaaatccaggagatggccaagcacactggctcttacctgtaatcccagtgctttgggagtctggggtgggaggatcgcttgaacccaggagtagcagtttcaggctgtggtgagctgttacataatcacaccactgtactccagcctgggtaagagtgagcggagtgagaccttgtctctaaaaataaaaaaccccaagctacttatacattatatcatggtgttatcaataagggcaattaaaaaaaaaatccaggaacatttagcttgctgttgcggctcaggagctcttgtaaggttgcacttaggatgttacccagggttgaagtctgaaagctgcattgaactgaaggatttgcctccgagctcacttacatggttgccgacaaggtgctcaattgctcactatgtggacctgtccatggagctgttcatgacatgactagtttaccccaaatgagtgatccagaagaaaacgtcatgccacaatttttttatgacccagactgtacgtcacacactcacttttgttttattacaggacaagtttacatagggtttgaataccgggaggcagggatcattagggactatcttagagtctatttatagtaccctctaagttgtaattaaatttttttttgtgatgagatgtacacaacaatttagtattttagccgtttttaagtgtacgattcaatgacatagtcacaatgttaggcaactatcaccattgttttcagcattttttcattatcccaaacagaagctctgtacctattaaacagtaactccctaatgcatatcttctcccccagcccctgataactttttttctattttccgtctctgaatttgcctattctagatatgtaagtggaataaaaatacttgtcctttatgtctaacttgtttcattgatcatgatgttttcaac

SEQ ID NO: 109433 - DNA, 1025 bp, Homo sapiens
cctattattaataggttgcctgttgagccggggtgggattgggagctagggggcttgatagtggtgaaggaggtgttaacgttttcacatatatatacacagataatatatttgaagagtgaaatcatattgcttaaataatttggctgtagcagtttgacaagagaatgctaccctaacaatcttgaacaatatatagtgtggcagtatgacaagaggatgctaccctaacagtcttacacaatacatcctgtgaatggaaggatgaaatattttggaggaagctaggtacagaaaagatgaatatgatgatgtatatttttcgtatagtaaacctttacatagtaggaattgtatttcttaatgaaatttatgtttttattttaaaaggtatttgaaataccttaccaagaaataccttaagaagaacaatcttcgtgattggcttcgagtggttgcatctgacaaggagacctacgaacttcgttacttccagattagtcaagatgaagatgaatcagagtcggaggactaggcaaaggctccccttacagggctttgcttattaataaaataaatgaagtatacatgagaaataccaagaaattggcttttagtttatcagtgaataaaaaatattatactcttgaacttttgtctcatttttttgagtatgctgtttatatgattttgatttccctctgataactatcaacagtatttaaatagcttatagctggtataattttttcccacgatttccaaaatcttttatgtactcaggtaaaagtagcgttatataggaaatcttttttttagacactctcgttctgtcacccaggctggagtgcagtgactcagcttcctaaatagctggaattacaggtgtgagccaccatgcccggctaattttttgtacttttagtagagtagggtttggccatgttggccaggctggtttcaaactcctgacctcaagtgatctacccacctcggcttcccaaagtgctgattatagctgtgaa

SEQ ID NO: 109434 - DNA, 1287 bp, Homo sapiens
tatttttattttttctttttcttttcttttctttttttttttttttaccaaagtccccttcccttgcctataataacgtaagaattgaattttctagacataggtgggtggaatcctagctctggcacttacctgagcttgggctaggcagtatactaacctattcccatctgcagtggggtggcagaaaagcacgataatttaaaattgatcattggtagtatagaaaacaatgaaagtccgtaactttttgacaacttgaacatattaggacttggttagaggttcaaatcaaccccggcgtgggtagtggtggtgtttttttatttattgttacatttctgtatatgtaacctaacagtacattgtacagattgcattggtacaaactttaaaattgtttatataaattgaataagttgttttatatagctacataattatttctcatttatgtagcagaaagacaggaagcccaagaggtcaacctggaggtttaatttggaccttactcatccagtagaagatggaatttttgattctggaaattttgtaagtatcattctactcggcttatttttgtaatcagagttattgataatggtttaaatatatagtatttgataataacctaagctctattcctagggtaccttccctagtgaatatctagggttctcttccctagttttgcattttttctgttttaaaataggagcaatttctacgggagaaggttaaagtcaatggcaaaactggaaatctcgggaatgttgttcacattgaacgcttcaagaataaaatcacagttgtttctgagaaacagttctctaaaaggttggtacttttgcaaattttaataaaactatagtagttttggaatatttcatagaatatgtagttattacatgtattctgtttatatgcaagaataaatatgaactttagactaaaggcctacataaatgggaaattcagtaaatgagtgccaattgctgagtctagttgtaagtgtcatttattgctagaatatgagccagttgtgtccacagtcccagtccagtaaattataggccctgtaaatccaaattgtatataacctttaatgctgagtactttagtatttgagtatgttgcaagaaacatgtctgatgtgtacataggagaattgtctcaagttatttattcagtagaggtagccagttaaagtcaaagtcttaacatcttgctgccagtttttatttgttgaatttattcaccaaatattaaatactacatgggcagcac

SEQ ID NO: 109435 - DNA, 1020 bp, Homo sapiens
aatacacagatacttacattatggatatatttatgaatgattgtaaataatctaatgatatattgttagatatggtttgctaaatatttatctgtgactatagtatgttgtatatatacacatatatatagaatatatatatatatattcatgaatgagactggggtataattttcctttctcaaaatgtccttgtcaggttttaatatcaaagttatgctggcctcattaaaaagttgatgaatgtctctaatatgcccagagagtttgtaaattggtttcttagcctattggctgcatgtagttgatttatttaggaagtgatctcaggtaacagaagaaaccaggaaaaatgaaacttggaaagaacaaaagcaaacagaaatgtgctggggacaaccgaggcttaattcttctggaatctctcatgtagtaatatagaatgcactaaaccgtccaatcaaaagaaagaaaggagcagcaaccagtttcatgcaggcgtaacttgacagcacctccccgcatatatttcaccttctaccccatggcttctctgacatgaagcatgggacacctgtgggaacctccctacagatacccacttatatatttacaacctgaaaatgcaagggagttaacaagccaaagacaaacatttatcagcaggggacaggaagctgtagataaattctcccctgccctgaattaaaaggtaaactggcagaatgtgagttttggcataaaattgttacaactggcattgtttcttcctcaattgtttggtagaattcactgctaaaacatgaacagtatataatctgcctatggtttttttgtgggaaggttttaattacaaatgcaatttatttaaaagatataggactattcagatattctatttcttcttgtgtacattctgataaactgtatttttctaggaatttgctcattttatctaatttgccatatattggcaagtggtagtttatactatcttattactattaattgaattataac

SEQ ID NO: 109436 - DNA, 2118 bp, Homo sapiens
tatctataataggagatactgcaataaaatgattaggctgtaaaatttggagacacaatttttcattacaatgcaatttgcatgtgcacatgtgcgcacataactttatatgttagttcttttttccaaactcccaactcttaaaagtattgtagtctgttggtgcctcaactgttggtaactttttttttttaaatttacaactttccacaacttgtttttgtactttaaggtttctcaattagaatatttctagttgagctgtaatttgaatgcattgttctcagggctatttgtgctaaaagctgaaatttcattattttaaagctaattgcctgaaaatatattggcagaattttcccaaattgtaataactgtgatacatgcatataaaaaaatccttaatgtcaacacacttaaactacatgctaaatagtcaagaaaaaaatggaaacagtagcatccatactggaatcttgccatatttttttcattttagaatagattttggcagtctcatcttagaatcctatccttaggatacatctgaaagcattcctttggcatggaccccagagatagttttggagccaggcattgatgtagaggttcaccaaacatatttagggataatagataaattcataatgcttttttgggtacactgaaatgtttacatactgaattctgtaatatgaactaggaacgcatttactatgagaaaatatggctcttaagcagtgtaagagtgaaaatataagcatatttccattaacagtatattgtactgatcagcagctctcattttaacatcagttaggcataatatttcatagttttcaagccttttttttctgctaacattcagacaagtaacaggcaacaaagatttaagaaaaatttatggtggaaaaccttaaaaattgagacaattcaatctatttaatctattaaattttttctctgaattgggtatatggcatcattatttgattttagcagggaacatttggatttagcttatgaaacacagatgttctatgggaacatggcttgaagccaatatgtaatttaatgtttttccattaaacaaacatctgaacaccaacttagctaccaagtgaggtcaagtgcctgaaaagtactgtatacatctaataagcatgttttccttatgtaaaagatgcactttatggcaatgcataccaggctttcacctgctagaaacatacttgttgccaactttgccatctaccactattctcctccttagaacaggtagaaacctattttacaaaaaaaaaaaaaaaaaaaaaaagacaggttattgtatttatatgaagtccctaaaactgtttcttggtattgatagacttaagtttatcttagttcaagattgcactttttaaaaaactctggactattttcagcaatgaccgaacagcttgtcacacatcatagttgtgatcttttttgaggagttatttattgtggttaatatctactataaataagcattcttgtgcttgttacaaagcataatgcaaattactagttctatactagtataatgaaaatgactagttctatactgttatgtacttttgtcttcctccccaaaaaggaaacagtttagcattgtctaaattcagtggcacttttttagtaatacatttttttttcttagatacaggagaactattgcttttacctgcagaaactcaaatgttttcgctaaaactttaaaattctaaaatacgtagtatgggtattactaattgtacattttacatttcaaaaatagttaaaattcaaatgttaagtctttgacttaaaaaacctttaaatatagataataccttaacaattataactttgtgatattattaaaatatatttgtctgttaacttcatcagttgtattaaataaaaatagttaacagcttgcactattcttgtacatatacatctttaaaacaatttcatacccaaaaattgtatgacttaagcgtatgtcactttaaaagaaaatctaacttgtttttattgagtacttttatattctaggtccttacgtagtgccctcgcattatgactgggactattaatttctaaatt

SEQ ID NO: 109437 - DNA, 2527 bp, Homo sapiens
gggtagtaagtgttcaaacatttatagttatttttcctgttccctggaagttgtcttacaaaccactctgagaaattctgctttagaaaactgtaaagaaagtagcttgttttggaatacccctttcagaagtccatatgtacaaaatatccacaaatatacaatatatgaggaactaattatatcttctatatgtattgtcttctgaataacgttttgcctgcttttttccttctaggtgtctgtcatgtgtgcaatgagtgaagaatatgctgtagccataaaaccctgcaaataaacggaaacatcaggcatgaacactgtttatgtctgaatcaactgcagatctaatttggttctaagttgtcaccaaagctatagccttcataagcaacctcatttctttttttaattgttttcagattgtgctgggttagttttgcaagcaattgataatttttaaaaaattatcaatatgtataattttttttgaattttgtagatatgtttcctataatattcctgtggttttcagtatgtcagtccaagaaacaaacaagatagcttcagcagatgtgatttgtctgagcaaatcattcctgtgttttagttagatgataaaccagggttttaaatcaaacaatgtagcataaagtggtattgaagtaccatatttaagttgaactgctctgcattaattacagatttaatataaaatgaactgattatatattggaattgttgcactttcagcctgtgtagggcaaacacaaatccttaaacaaaaatcatgttatcaaaaactgtcagttattttggtggccacatgcaaccatgtgattactttggtcatactatttaccaaattgttggcaaacttgatgtaaccttatatggtggttttagtcccttcttatggttggcagaagggcactgaactgttgggtgaaagttagttagcaagtaagattataaggaagacacaaaagacagtggcaaagagggttgattaaatctataagtttttatgtgaggactttgtaagtcagcataaaaatgaaaagttgtttctcagttgtttttgcttttaactttgcccccaacgtttaaagggagtgatctgctttacatgatactatgcaatgcttgttttccaactatgttgaataaatagtaatatttatcagtaaatactcctttccaacttccttttttttttttttttttttgagactgagtctcactccatcagccaggctggagtgcagtggtgcaatctcggctcactgcaacctctgcctcccgagttcaagcaattctcctgcctcagcctcccaagtagctgggactacaggtgcatgccaccacgcccagctacttttttgtgtattttagtagagatggggtttcaccatgttgtctaggctggtcttgaactcctgacctcaggtgatccacctgcctcagcctcccaaagtgctgggattacaggcatgagccaccacacccagcccctttccaaccatttctaagtagattttttgacattaatgtatttattaaacaaaaactgagaattccttaaattgatttggaatttttgttaattttatgtcctttttttcctaaagtgaattaaagtgaatcatggaagcagcattactttatatgaatattattatttaagttaagttattttaagtatatgcattttttctgattgttgtgtgacttaattcagttgctggtgtgaactataactagcaaataattctataaactgaattattttaaaaggtattttaggtgacaccactgcatttctatttcatcttttgagtcatatgtatattatttccagaattttagacattattacagggtttgtgaggacctttgactcagtgacaatcatcatattggagcaaaacatagaacaaaatcactatctcagaaataccttaattctctaagactggctcttagacctctcccatcatgccttgacctctaaaaagccctttgttcctatcttctaaaggaaagtatatcatatatgatgatgtaactgatctaatcagtgactggaaatagcattagtaacagaagatcccaagttttagttgcttaatttgtacacacttttaaatattgtcttagcctcggcaaaccaatttggggaagaagcaagatactttaagagaaatacaaaggaaatttctaaagcacaagaaatagtgaggtagtagttagtcgtctttcctacaacattttagcttttgcccatctaaagcacaattaaaattaggctacattctttccagtattctatttaagtacctactacatactgctctagtttcttagtactctgtaatgtgtatcttaattgctactggttggcattgtaactcataggaattccagaaaattattaatccgtgctgcttgcagttcattcatatggcccctcttaaccatgctggtgttatgattcagtattaactctcaattagcatgcccctgt

SEQ ID NO: 109438 - DNA, 1125 bp, Homo sapiens
acctctaaagcaatagggcccaatgttgcgaggactagaagcaaatatttgttacaggatcattaagggtaatcatgagaagagccactaactttagttcctagacctgtgtattctacctataggaaaaatagcatcatatattgaaatatattgtaacctgcaaaaaacagcactccaggccaacaaagtaccattcagcaggtgccatatttgagtcttcactaggctgatccacagaggcaagctgttttggaatgatagggtacgtgagccagcgaattatctgggtgttgcactgccttgttactttgcctgtaaaattagttttctagtcagaagtgatgcagtgtgagatactatgacaggaacgaggcattctgtaaattgagatgagattttagcagaagcactgcaggcaagaaaggcaaatccatatgcagagtaaaactattgcaataagaaaaaattgctgcctgtttcatgatggaaggggtacagtcaggtggccagctgttctgggaaacatattaagacttcttgttcttctgttctgtgttcttcttctgccatatcaagactgacctgtttctgtgaggttttcagtagtggctgtagtcagatcagtcttggtgagagaaagcccgtgtcattgatcccactgagcaaagatgagagaagctacaaaaagaagctgaggccgggcacagtggctcacacctgtaatcccagcactttgggaggccaaggcgggcagatcacgaggtcaagagatcgagaccatcctggccaacatggtgaaaccccgtctctaataaatacataaattagtcaggcgtggtggtgcatgcctgtaatcccagctactcaggaggctaaggcaggagaatcacttgaacctgggaggcggaggttgcagtgagctaagatcccgccattgcactccagcctgggcaacagagcaagactccatctcaaaaaaaaaaaaaaaaaaaggaaggcttctgtacatctctacaaaaaatacaaaaattagccgggtgtggtggcaggcacctgtaaccccagctacttgggaggctgaggcaggagaatcgattgaacctgggaggtggaagttgcagt

SEQ ID NO: 109439 - DNA, 1086 bp, Homo sapiens
gctgggaattgctcagactgcaatatcaataggcaattctcacctgctatgtaaactcctaaatgcctcatgctgtgaaggtgatcagttaagttcaaatcaaaatttgattggaccattttaaaatactgtttttaaaaatcaggtactttcatacttaacattgatgtatgtattctttctaaagcaaattaaaatttgatcaaacaattacattctgaataagattcaaattaagtcagaaatacccagtcaaacccaatgactaaatgattaatttcaaaaaataattctctgtcccatcccaaacctattttcttatgactcatttcttctcattggctgtgtcatcaaagaacaaagtaaagtgaaatttggcagttggccagttaattaaagacttggcccaagtatttgggccacaaaattactttgtaatcccaattttctgttttgactttttatgattcaaatgaatggaataattgccacattttcactttactgtgagttttatagacctagcagcattatctgcaggatggcaaatgtctgaactaaaagttagcatttaaagaaatccatttggatgttttcaggtttttacacattcggatctgaataggctcagttaagatgtgaacaagggatatctattatttcatgggattcttctgaaattgatcctcttaagagcattcatctcagaccccacagccccaaggccagatcatttaatacataatgaaggagagaaaaatgtgaacagcatgacattttctcaaactactcatgttttaccaaaagaaaaggtagaaaaggcattgtaaagttttccctatttctatgtgtggtaacatagagactaaatacttctttcagtctccagcagcaaaaatagcaacctattaagatcagcacccacactggttagctctggtgaggagaacttgtactaatgaggccctggtcagggatttaatgcccatgggatccaattagcttcacacaggatgagactctgagcccagtcaggatgtaggctcatcccagctgcttctgctaatgcccatgctctttttcaca

SEQ ID NO: 109440 - DNA, 1032 bp, Homo sapiens
accagaagagggggaaaagcatgaaacagttttcacctccttcattcagcctctacccagcaccttgtgatttgaacttgtctaccttgacttcactgttttccagttgctatttgtcctcatcactaaatttactggtctgtcctctctattcagaactagttcatagctcccaagctttcaggagacatggcattcctgggggcagatctttgcagatgtcatcaaggcacttttctagacctcttaattccctcatgcttcctggtcaggctcctagcagtaaaagaaacacagcatttgagcatgcaaacaacatgcctgagtcatcaagcactcctgatgtgaggtttcccagtcaccataagtctgggccatctctggtgggtgacatcttccaaggtccctggcttcctggcatctggtgtgcttcctttgggcttcacgcatttccacagatatatgggaacattctttggggatttcatatttagtcctctgctcctgggtgtggttaacataatccagcttccaactaaccgttgtctgttcatgaaacagttcccaagtcttagagtgggtgatcatattttagaagaaagatgaaacatttagttgatagaaggagagtgacagtgctaaatttaggactggagcaatcgatgtacaaataagaacaaataattgtctgccttggtttgagtcatcatttttaacacccacttcttagtaggaataaaaatcagtgcaaggatctttacattcttgatcttttaatgcttctcatcagcagtgtatgaactttttatgtaaagcattatttacagatgtcttttctcatattaggaaggcaggggctcaaagtgaccaagtagtaatacacgtttcaaaactttaaatatgaacatagcttatcagtatcttaactatcaagttataagaaaacctgggttaaaccctctggaagtaaaataaaaggatgccattttctttttttcaaatgcaccctctgtgcccatgccaccgtctcct

SEQ ID NO: 109441 - DNA, 1027 bp, Homo sapiens
tccagtctatcattgatgggcatttgggttggctccaagtctttgctattatgaacagtgccacaataaacatacatgtgcatgtgtctttacagtagaatgatttataatcctttgggtatatacccagtaatgggattgctgggtcaaatggtatttctagttctagatccttgaggaattgccacactgtcttccacaacggtcaaactaatttacactcccaccaacagtgtaaaagctttcttgtttctccacatcctctccagcatctattgtttcctgactttttaatgatcgtcatgctaactggcatgagatggtatctcattgtggttttgatttgcatttctctaatgaccagtgatgatgagcatttattcatatgtctgttggttgcataaatgtcttcttttgagaagtgtctgttcatatccttcacccacttttatttttccttcattaaaagttctttctcatttgaagcctactgactttaataagctttcaaggccagggacaggaactgtgcattatccatctttgcaccccatgcagagcttgctaaggttgaacctggcactggcactggcacctagtaggtgctgcattatgtgttatatatgtgtattatatgtatatcattatatatatatacacatcattatatataaaatgatatatatcattatatatatacacatcattatatatataaaatgatatatatcattatatataatatatattataattattactaaattatatattacatataattataataatatatataatttagtaatgggtttgctgggttgagtaaatgattattgaatgattatatgaatatgtattatatattttataatatatatttataattatatatttatataaaatatatatttataattatatatttatataaaatatatatttatatatttaatatattatattaaatataatttaatataattaatacactaatatagtaatattttatatattaatatgtaat

SEQ ID NO: 109442 - DNA, 1069 bp, Homo sapiens
ctgaaatttatgttttatgagataaagtggttcttaactatttttgttgccatgttcaatagctagttacttttaatgtttctataataagaaaacagtatgcaaagatacactttaacagaatttcataagctcctacactatgggtaataaccagagttctgaaaataaaaccgttactttcacttgcattttaagtcagattgatagctttctttcatttataacgtcgtcctagtctgaaagcaaaatcaccattttattatttcttattcaaaggctgaaagaaaaaggtaccaagtaaaatgattttgtatgacaaggtcaataagacttggcagcaaagacttggattgaaactttagccttgccattaaccagctgtgatgttgaataagtcatctagtccttgtctcacttgtaaaatggtataatattgatactatagttatattgctattacctggaatgacaccccactcttattattcacaacctggactttttatgacccaggtctgttttgcttttaaaatcttaaatgtacagcatcccaatcttagaccacagcctttgatgcttccagcctgtactccctcacaccctacacacctgttctttgatgttgactaagccctcgggtcttttgtcagtctctcagtccccatgaaactttaataacttgtctctccagccttgggcctcatgatttcttagtttaatcatttttagccaacatgtactatctcctttatcctttgttcttccataatatccaccttgcagaccccttccctaaggtcagtctagctgtttatttttctgcatttgggctgcacagctcaactcagcactgcttaataatcaactgtgtatgtacctgctcagttccttctcctgttttccctggaatagttgctcccaatctccaccactctcctctcctcccttccgctgcccctgccttcattgttctccacaggtgaccttcttctatgccttttagaaaaactggagccattggacaggtatcccttattgggtaaatatcccacaggtctccctctgc

SEQ ID NO: 109443 - DNA, 1023 bp, Homo sapiens
gggattgggacccagctgtttgtgggtaacaaaccctccaggtaattcccatgcacactaaagtttgacagctttaaaagctttatagtttcagatctagtcttcgtaatttatatgagtaacataaagaggccaaactcaatggatcttttggttatatttaaattattatatgttgttccacagcaaaacattaacaaagttactttaaaccaagatggttggttttcttcataataaaaatgtaaaacatcttgaaaatacatggatatgaaggaatattactttgggatggggtatagggcttgctgtacactgggtccatttttgcaaacttctagcaatagctctgccaacttcaggagatctctgttgggatcaaataagatggtggattcaacagtgcttggtgagctggaatgaacgtatggattatttttgagttaagcctctctcctattagactgtaactgccataaggataaagactaggctactaccactgcgtagaccagtgcctgatacagggtatgtgtttagtgaatgtttgtaaaatgatcacgttattttttgggcttttgtttccgcataatgccttgggctttctgccacatctgcacagcacttgtactattattctcttacttaaaaaacaaaaaacaaaaagctgagatgaaatttacatacagcaaaatatatggcttttttttttttttttttttttttttttttttttttttttttttttttgagacagagtctcgctctgtcggccaggctggagtgcagtggtgcaatcttggctcactacaacctctgcctcctgggttcaagcgattctcctgcctcagcctcccaaatagctacgattacagcctgtgccaccagacctggctaatttttgtatttttagtagagaaggggtttcaccatgttagccagtctggtctcgaactcctgacctaaagtgatccacctgcctcggcctcccaaagtgctgggattataggcatgagtcactgt

SEQ ID NO: 109444 - DNA, 1030 bp, Homo sapiens
cactgcctctgcttccctctgccatagactttctttattacattaacctgctttattgtttttatggtattgccactctctgaattatcttacttccttgtttatgtctgtatttagcaatttaaatacataagtcaagggaaaattaagtcagagacctagtctgtctaggccatcactatccctagtctggcacacagtaaatgttgacacttctggggcccagaattgagctatgttttccttgataattctttctatatttgttcccagttttaaattttttttagcattttcataaaatgttaatctttgtactttagaaaaatatatttgcacaaaagcaataaacaaaatcctctacctatttttttttttttataatgggatggggatgtggatcttatgtttaatgaattaccagtagtctgcagaagcaagactatgctagaaatttacaaaatgaggcaaagcaattttctggggtctggtctcctggcagaggtcctcaaactttagtatgtaaaatgaatatttgggaaaggatttaaaatgtagatttcccggctccaacttctgaaattttgattcagtgggtctggggtatcctctttgaacatttaataagtataaatgctcattctgttgttcaaggtcctgggaccgcacctccagaaactgcaaaaatgattgtatgttatcctgttataggtcacttgagtgaatgctaatcctatactttttgtaatcatttattttaggatttccatgctgactcaaacttacataaactgagaaaagcaaaaatcaaagatcttgccctgagatgtgatacccgcctgttttggcttattcaaagatttgactttcagtgtttttatttgatatgcttatgattacagtttaaagctgaataatttaactcaagacctgagaatcaatattgtcaaaactgaccttatatagcaaaatcttggcctgttgggtggagattttctcaaatctgtatatcacgatctcttcattaacc

SEQ ID NO: 109445 - DNA, 1018 bp, Homo sapiens
tcctcatgataatttctagggaaatatccatcattttccctagtggcagcgatatgggatggcatttccattacaaattatctcgtgttctatttttaaaaattcctcctgagccctaaacttctctcagttaattaaatttattatagaaatcattcaggttgtaatattttcaattctgcagaatgtcaaaagtattatttatagggtattctcgagattctaagtggatacacatttatatgtttatttacgagaggtttcctttggtgtccaggggaaaattctcccttgcaagaaacgattatttcctaaattgtacaccttttaccattagacagaatgtagtctacccaacctgctcacttgacgttgatcctgtctgacacagaaagaaatgtgtctcagcaaaggcttttaaatactttcaatgaagataattaggttggaagattgtgttactgcattttgagaaactggattgaacttgtgaagtaactaatgaattaagctctgacttaggtacaaaattacttctgatttgctgtcaatatgaaggagcaactctgtagcatgctgttggttttatggtgccatttcttagagcctttccgtttcattatgtttcccacccatagaatatacatttgggagacatttcacagcttggtacactaattcaagaggtgaaactctgcagtcttataagaggagataccaagagattcaattaaggatgagaatatttggaaaatccagaattatccataatttcttgttatttgaaaaaggcaaggaaacaaatggcaagaggtctcagatctttttagagagggaagatatttagcagctaggttgtcaacattattattctaaaggattccattctcttggtggttgatacagtactatggcaccttccaagtttaagggagattctgcaaagaatggtcatggtgaatgcagtgaactttgggacaggagatttgctctcttttaccagccccattgttttgta

SEQ ID NO: 109446 - DNA, 1048 bp, Homo sapiens
tatgagtgtaaggtcttggcagtgtagcttcagggggacaagggacagaattcagaggatgctgtgtttgagagaagagaagaaaaaggaggagacaatgaaagagaaagaggaggctatggaaggaatgatcacagccatcacatgtaaatcaggatgttagatctcccaccatggagagaatttgaggaaggaggtaataatgggcagtgccaaatgctgcagcacagaattgcagctactggcctggatgactagagtatgctggttgccctgcgggagtgctctttggaagcagagttatctgtagtggaatggggtgggggtgggggcggagcccttgagaaagtgaagaccctggattcagagcaattgttcaagaaatttagtgtcgagcattaagagagattaggacagcagaaagctaacatgctttcttttcttaaagtgaggaagacctttggtcggttgaccacagggggcaggaagcagtggtgggggagagataaagctatgaccctgcagtcttgcttatctcaatacagagctgctccatttttctggtttctgggggcctagtccttgggagtaactttgactcctctctttctctgcactgatcattagatccatcagaaaacctttttggtattttatcttcttgaaaaatatagccataatccaactacttctcacatctatgcaactatcaactttctcctgaattattgaaagtctccgaactcatctcccttctccttccttgaccttgagtctgttctcatccagtgtctaaagtgatcctaataaagcttaagttggataatgccactgcacaaaatccaccagggtccccctctcttttattattcactagagtaagtattgaattccttgcagtaacctacaaggccctgccaaacctgacctgctcccccagcccccagcaccaaacacacaccctcctcattcctcaagctcaagccctccaggagactgcagcgtcctctcacgtaggagtgctcttctccaaatacctgcttggtct

SEQ ID NO: 109447 - DNA, 1062 bp, Homo sapiens
gccataaatcccagaagcagttgcatgtattagcttagacataggtcttggaggcacagggtaaaagcctcccctgcctatgcttgcatttgtgtgtttcttcgtttcatttttagcttctaaatattgattagctttagtgagtgctcactggctcttgtggttatcctacagctatagggggataaggcccatgacagttaaatggcattcctggaacagagcaaagtggaaggggtggtcaggtctgcaaaatgcagttcagcagcaaatgctatcccgatgtctcccacgttctctactgtgtacctcctactaagcttgggtgcttttttcctttacaaatgcagactgttgcactttacagtaatcagctgatatgactgcaatgaactatgacttcactggatagaatctttgaaatcaaatgtattaaattgactcttcctttctcagataataatgagtagacattccagctataaagaaagaattaatagattccaagcttttataggctttgggggcagtaataaaaaaagagaggaactggcacagatgccgctgtgcttgatttcattctttttgaggggtgttaaggttcttgacagcctcgccaaatgatccaagggggcaaatgcactggctctgtgtgaggctggggatggggatgaaaggtagatacactgtctgtttgatgcagatttgtgctgcaatgttcaaatcttcaacctgttctcagtcttttgaaaatcaaggcatgtaaatgaatgatgatagcctctagtgtctggttaggattccccagatgacaccttggcagagcatttagccagaacgtttttggcacctcagagagtaacgtgtataaaaggtgaccatgaaataatttgggctcatttgtgagcttctggcttatctcatttgttttcaaagtcacaggaaggaaaatgacttacgattacatcaggggttggactctctggatttgaatcttggtgctatagcttactagctttgcagcttgtgacaagttatgtaaaatccctacacttttctaca

SEQ ID NO: 109448 - DNA, 1059 bp, Homo sapiens
acccggcggaccgacgcgcggaggatcgggatccggcgctgtggggctggggtgggcgggggaggctgggcccggggcctctggcgcgacacccgcatgaggacgcgagtgaaatagaccaaggtggaatttccaagggaaaagcttcggggtggttttggtccatttctccagcgaagaagtagacatggcgagcgactccccggctcgaagcctggatgaaatagatctctcggctctgagggtgagcaggacgttttctggtttctttccagtggtttgggttagggtgaatgggctcggtgcgtggactgggggctggggctggggcagggggacagcagcgggagaatgcgtcggggagggaacctggattcccgttttgattcggggttgctgaggtgctcctggctgagcccctacggcaggggctgtgcggtacgtgtcttcctctggccgtggcttaggctctcccgagggctcgtagagcttatgccagtttcatcttataccggtgtaagagcattaaaatgaaaggcgtgtgtgcgtgtgtgtgtgtgtgtgtgtgtgtgtgtacacgccccgggcagttgtctggtgccaaggcgcgagacccgactgtcccttctgcaaaaagaatgccagcgtgaataaaggcactggcccctcacgttttccagctacctgcaagatgacattgtgaggctggctgtccccgcgaagccgaacctgccgctccaagggggcagttattgctatgctggtcttgtagatggcaactgcctccccctcccccttttctacctcccgcgcccgggcgccctctcagcgctcccttaaatgccagtctgccactcacctttatttatggctttaactcagccctgcctgttctttctgactttgtggctgtaacgtttcagttttatggctgaacttaagcaggtgaaagggatgtgttttctgcttttcctcaatcagaccggaactccctggagtgtgtgcgagtgtgtgtgtgtgtgtgtctgtgtgtgttttccccgtgtctgtggccagtcc

SEQ ID NO: 109449 - DNA, 1022 bp, Homo sapiens
ttgctatgactttgctatgttttatatacatgccatatatatgctattactacgcatatatgctattgtgcaattattaattattaaatgatattaaattttaaggaacgacttgtccacctgattgtagctgcctgatgattttagagagaaatattaagacattttagtcgttgattacttgtttgtgcttgatgggtacagataaaggtctttaaaagcttacatgaaactcatttgtatcttgtggatctcagtttctgtgttcccaagtgcttcatagcttttcatctagagatggtaacaaagcaaagaccacagattcgaaacaaaaataatgtggcaaaggattagataagagggaaactccctaaaaaccagattttagggttttcccagagaatatacacgttaaaatgtttcctccaaacgtgggagaaaaaaaaggactgtacagtagagagttcaaaatctgtaaatttggggtaaagtgtctaagcaaaccttagattattcctgattctaggtttggaacacacattgcattcttgctctcattctgctggactggcttaattttgttatatctgggtcttttggctaataagagatgagcatttgtctcataacataccatctaattttaagttgagttttgtgctaattaatttttatccaacatgctttcttgttgatagtcaaagtgacttagatgtctcacacatctcagatggtttatggacctcgctgtgacccagaagggcgtgatgccaattttcttataaaatgaatctgagtttcaaagctggagagaaattcttaggcaaacttttttaacttgaattggctacgccccaaacgttgaggaagttgcatggcagtagaagatcaggactctgaggaaagaattgaagaactaggagtagtagtggtattagagatgaattttctgaccgtcgaaccttggtagattttcacctgatggaccagttccgttcttcacagcccagatcactccttgt

SEQ ID NO: 109450 - DNA, 1026 bp, Homo sapiens
tctgcctggagcacacttctcctaagtctttgcatggcttccttcttttttgtcatttggatcaatgacaaaatggtcaaatgttatctccttggaaaggttttttccctgaccattgaaagctgcctcacttcacagtccacattgcattgcttgctacctgatcctgttccagcctttcacctagggttattttcatgctaggattcaccactatctgaaattctttttcttttctctttttcttgcttactgggttttctacacaagaacttaagctttatgagagtagggactttcctgacatgtagtaggtgctcactaactacttgttgaatgactacctttccaagttgttatataaatatatgatgttagtgtgaaccctggttcccaagggattcatttgttttcctaattgttcttttctgacctcacagatgttgctgtttttatgacaatgattcattgctgagatattactgcaatttggaacaaagtgctgctctcaactgatgagaaataaaatctgtagctttctatgtgaatgcctcctgtcgttttcagagagcttgcaaaaacttgtttcagttgcatctgtcatgtgggtgtataatctgtgatagaatggatcgattaaacatgaaagtatcgtaacataaatgagactgatttggggaaactcctgtttcctaccttttttgagttctaccggggtggtttttggtagtgtcatggggactagggaaatgtgtatcactttgtaagaaaggcaggccataggctgggcacagtggctcatgcctgttatcccggcactttggaaggctgaggcaggtagatcacttgaggacaggagttcaagaccagcctgaccaacacggtgaaacctcatctctactaaaaatacaaaaattagctgcgtgtggtggtgagtgcctgtaatcctagctacttgggaggctgaggcaggagaattgcttgaacctaggaggtggaggttacagtgagctgagatcgtgccat

SEQ ID NO: 109451 - DNA, 1622 bp, Homo sapiens
cttttctcctcaacccagcattttatttaaacaaaatttagaatttggccgcaatgggccaacgctggggccaaaaatccacaggtttctctctccatccctgctggtttctagtcccccctccccctcttccctcccaggcttaatcatattttggaacgggtgaggtcttttgttgggtgggcaccccctgattgcttgtctgtttattttttaatgtgcaactaatttgatttgaatttccttcagtttccaggccttcctagggaaagctaagggagagggaatatgctttttaaaaatcgttttctttctttctttctttctttctttttctttctttctttctccttctctctccttccttccttccttccttccttccttccttccttccttctcttctcctcctcctccttcttgttcttgttcttcttcttttttttttttttaaataaatgtggcaggaggtggggcgttgggaatggggaggcacggtggttgtgggcaaagagtcagaaggagcagacagacccggaagaaaaggaatctgctctggaataacactttttttttgaggcctcaggccttgggcaaaattgcttcgctctgtaatgatttctgctgccggagttgctcctccacccctaagttaaagctatgaacctgggtgcccgggcaacgccccacagtggatagcagccgggagcgctggttttgtgccttttgtgggggcccttggttccccctcattggaggctgactctgaaatttactggatcagtaaatttcctggctccctgggagcagctgttaacgaggataaagtctctgggcatgtttctggccctgcaaaaggacctcacccatgaaggtacaattctcactttgtttagataccagaggggcacccacaggctggctgagaatgaggcatagttgattaaaaaaaaaatcagtcattacaaaattgtttttaaactcacacgtgcttttaaagtgttgtggtttaaattactttaagataaaaaaaattcatctgtaaggatagcgttcatttaaaagatgctaaaactgcaggatctcatcatgaaataggaggttgtagcttctaattacagtatatacaatttcagaaagatattccggtaatcttttaatacagactttataaatagctcacatcagacgatgggttatattggagagccagtcttctgcggtttcttgaagaatgcttgggatctgtgaggaagctctaggcccttggaggctaggtagcagttcactcagtaggagtttgtgctccttttgctcagtatttaacctggtagcatttgatggataagttcattaggagctaagtagaagaacttaccacacttgtcagtttggaaaatgaggcccgggaagggaaagtgacttgttgagggtcaccattatagacgaaagtttaatacaggattgtgttaatagctcctttctgggatatctgatgtgtactaagcactaattcctgtgcttttatacattatctcattaaaattctagtattttcgatttaggttgtgttatgcacactttacaaacaaggggattgagatttacagagagagagtaac

SEQ ID NO: 109452 - DNA, 1051 bp, Homo sapiens
atgtaatctctttttattaggatttttaagaggcaactgccaggttcagtataaatatatctgaatctattgtatcttccatagttatggtactgtcctgggataattgcagttcatagtcttaactctagacatatcctggaggacctatgtctgtaaattatctttgaattgttctatgttattttagtgttatgtgaattacattgcttccagctctttgaaaatcgttaattcaactgcaggtaaggcgtcagttactgagactgttcagataactgaaacatcctgttcatacccattcctgaccattgggaccactgtactattttcaaggataagataccactgtactattttcaggataagaaccatgttataaatagaattatagtgtcctagtgagtgtgacaaatataggaaacatgatttaacccatgacatatggtttgatttgtaggacatccccaagtgcttaatacaaatgagaaatgtactataatcttaaggcataaagatgtttaaatgatggacaaaaattgagggccacatctgagcatcagtttgaaatcagaatatctcctctgtcaaggagtgactttactttctagctgggtccttgataagcttttgaatctctctgagtctgggtttcctcattttaatataaggaggaaagatctaactcgtaccttttcaaatggtgtcacaagggattaatgagtcagtgtattgagaagtgtttggcaaagccttatacaaactccatagttcattatattccagagtttaaaactgagctggtgctatggtatttctctgcacattttcagagacctccaaattgtgcttggacagtttgaaaaatgatttatttttctctttgtgatcagtaaacaaggtccaagctttagatgttgtattttattttaccccactcctaatggaataggtgatttgtgacctctgcaaagttgtactatacataagttgtcccatatctgtgtttttgggaagctggtctgtagctgggctagtgttgctgaagtgg

SEQ ID NO: 109453 - DNA, 1037 bp, Homo sapiens
ataaggttttaggccttgtatgttaccttagcctattacttgagctttcagcaattacagctgagaatggaaaagaatcgtattttcagtgtaggggagtctttgcaacctacctgcctttccactttagaaatcacaattgccttttcttcttgttaacgaggttaatccattaagtgggatatttatatggtaagacattattttcaagtaaattaattctcactcttaaggctgttgagaattcacttaggtggttgaggagaagctttgtactttagtttactgagtgtctctctctctctctctctctctctctctatatatatatatacactttgccttaaaatatatattatggttatggcattatgtgttgtaaagagggagagaatgcttgaattattgtggctagataggggcaggtagacaagcacaggcccaactggaaggatgacttgatggtagttgagcactttgcaaggtacctccagtgagatgccagaccctagtaacaagctcacctggaggggagtttgtttgtggtgcaggtttaatgtcaaggaccagttcttggaaacagaaggtatgtggggtgccagttgaagatcaggggacagaaatgtttttaaaaccaccaagtataaatcacataagatcgatagacagtcgtgatcagccatctacatacagatgaggatgtttgtcagtttgaaaatggatcgattgttgaatttttctttgtttctccccagttaagatatgcaagtttagcattctgtaagtgttggatcagaatttctgatgcccttggcactcactactcagtgtcagtttagacattggctcctaattttttttctttttcttttttaagatacagtgtttcactgctgctggagtgcagtggctctatcatagcttactatggcttcgaactcctgggctcaagtgatccttgagtagggctatagctaggactataggttcacgccaccatgcctggctaatgtttttttttttatttttatagagac

SEQ ID NO: 109454 - DNA, 1382 bp, Homo sapiens
actacaaacagtttaccagcaatgggtagaactatattatttgcttgcaaaatacatcacaacaataaacacaatatctgcctcccccaccccactccactctaccaatagactccaactatgcctatttattggttttggagtttttctattgacatttgttttgctacttgttaacttcttttgtcatgtgtaagcatttgatggcagattggggacagcaggtgttaaaggtttaagagcatcattattgcttttagcttcatttcttctgcctttgtgtttgggcaagattgtggagagtcctgagtttagtatttagataaggtaattacatgtccttctcctctacttttactaaagcaagatcctcctgggcagcttagttccaggtactgtatgaacttgccagtaataagagtaagtttcttttaaaagatttctggatattttacgttttatactcagtcactcagatgcgaggttttctagtatgtgtctacttaggggtcagatttgaccagtttttaacagtacaagttgtacatataggatacttaatgtatttctaggatattatgcttcattttctcttagtattttaaaggttttaaaaaacccattctataccttctatatcttttattgtttaagtcattcaatgggaaagaaaataataaaagtctttagatgctgtttctgatttttcgatcatggtttttttaatctcaagaaaaataattctgattaagaaatagaggtaaacattattctgaagtagtgaattagagaatacttaaatatattgagctggaatccttgtgtattgcatgttgggaatgttaaatgataaagctactgtggaaaacagttctgtagttcataaatatttacacatagaattactatatgattcagcaattccattcctattcctatacgcaaaagaaagcagggactcaggtacttaaaagccagtgtttatagcagcattattgacaatacctaaaaggtagaaacaacccatgcccatcaacagatgaatggataaacaaaatatggtattatatattggaatattttggtacagtggaatattattcagccataaaaaagaaggcagttctaatacatgccataacatgaatgaatcttgaaaacattatgctaagtgaaataagccggacacaagaagataaatattgtatatatccacttgcatgagatgactaggataggtaaattcatagagacaaaaagtagaatagagattaccagggcttgggggaagggaagatggagagatagtgtttcatgggtttagaatttctgtttgggatgataaaaaatttctggaaatgaacagtggcgatggttgtaca

SEQ ID NO: 109455 - DNA, 1056 bp, Homo sapiens
gatcttggctcactgcaacctccgtctcctgggttcatgtgattctcctgcctcagcctccggagcagctgggattacaggcacgtgccaccatgcctggctaatttttgtgtttttagtagagatagggtttcaccatgttagccagactggtcttgaactcccaacctcaggtgatccacctgcctcagcctcccaaagtgctgggattacaggcatgagccaccacgcccagcctttgtgggtatattttcgtgtgtgtgtgtgtgtgtgtgtgtgtgtgtgtgtatagtgtgtatatatactatatatactctttatatagtgtgtgtgtatatatattgctgtatatataaatggcttgatacaaattccactcaatgagcttttcataccatagctgtcatttttgtggcctactaatttctctggcggtaggatcattacggatatcaaaaggtattgagagtcatggtctcctcatatccaggagtgatacgaagaattattacattgcatttagaatgctcttaaatgattttggcctattcaaaagaaaatgatctccccttttctttgcatatccttgttatgttccagagccatcattttagataacttatcattttctttcttcttttttttttttttttggagatggagtttcactcttgttgcccaggctggagtgcaatggcgcgatctcggctcaccgcaacctctgcctcccggtttcaagcaattcttctgcctcaacctcccaagtagctgggattacaggcatgcgccaccatacctggctaattttgtattttttttttttagtagagatggggtttctcctaacttaacattttcttaaatatcttctagcactttatctgtacttttcagaagacttgactttttcattgttgtctaatagtctccttgtctcccttatttgtgagtagggatgatttctgatttaacttggggtcttttaatcgtgggtacacagtaaatattcatttgatggctgggtagctggatccctagtttgaatgtgccatttaa

SEQ ID NO: 109456 - DNA, 2182 bp, Homo sapiens
cgcccaggctggagtgcagtggtgcgatctcggctcactgcaagctctgcctccagggttcactccattctcctgcctcagcctcctgagtagctgggactataggcgcccgccaccacgcccggctaattttttgtattttttagtagagacggggtttcaccatgttagccaggatggtctcagtctcctgacctcgtgatccgcccgcctcggcctcccaaagtgctgggattacaggcgtgagccactgcgcccggcctgttcctagtatgtttcatgtgggatggcaggttttccaaatcctagtttccactgagtcatcggtgagtccaatagagggaggattctagcctgatgtcagacgtcctgcttggcagactaatgaaggactttttttttttaaaaaatgtatttttaacacagattggtgtatttgtatatcttcagtaagtttcagttttagccaagaaataatctttcataacatttttcatgagaaagcatagaatgattttctagaaagtttaatggcaagttgtgttagatgaaaaggaaacatttttaaggacactatgcttcttgggtattcttgagcccttgtctatagataatagccggttacaatgtacagttttcatatttggaggggacatgggaaactactcacttaacttggagttaatattttggtgctctggaaacatctgagtttggaactgtgctgtgcacatctctaactggtttaattgcccagtctctcagtgtcttagcactctcagtgttttatgctcaatctctgtgtcttgttatgactatttggctcaacgtagtgttttgaactagtgattaggaagtggtagctgctgctgttttattattttattgctttactctgtgactacagacagatttaattgttggatgtatttcttaatgggataattatttaaaaacattcccagttactttaaaagcgtatgtgaatattagccatcagttttgtcttgaccttgcctttggctccttgagtgtctctgttcatgtgacagctttccagctcatccttaatgtcatactcgagctgtttatcttagtgaggtagtgtgggcctaaaatgaaataatatatatcaaaagcacctgtgggggaaagcacatctgaatgccaagcagtacttagttactgcaagtgctacttctaccaatatttttcttcctttctgcccctttaaagagaggttgtccctttttaatagatatatgacagctctgcttcctttcttaagtctaagatcaaagaaatgttgtaataaaggggagtcactccctcccattccttctctctttttgtggatgttgttctgttttttaagagcgatcaggtcttgacattagtggatgcagctgttgggctcccaagctctgcctttcatctctgggtcaccactgcagacagcatccttcatctctgtcatggtgtaaagacaccactgtgggggaacagtgcgttgcaggttaagtacatgaagtatttctagagatcctagccacctttgccgttcattgttgtttggatgcacttttctttgaaatgacatggaatgtttggcagagatgtcaatcaatagaagagtttctctgctttagaggtacctaaacctcaccaacttcttgtaaattggaagactagctccaaaaaagtaaaaggggttggggggaagaacaaaacttttactggcaggtttttttctagacataaacacagttgaatggaaaggataatagggatcgaagcctgtcttgctctatgagagtgaatgagctagtgttagactttaatgctggagaaaaataacatctacctttttttttttttttttaaatgaggcagtcagtgcagtctaactgatgaaaattaaaggtcagtttcttcagtgccccacctcagtgcatgccttgggccatgttaataatgacaatcccattatttccttgcagtaggcaggaaatgctgtctacacccattagatttgtttgagtggcccctggctggaaatgaagaaaatttaattttctaatttgcagggaggaaaaaaaaaaaagcatacagtgctacatagaggttgattcttgggctggaaggagtgtcatttttaaaaacttgaaattctgaatctcta

SEQ ID NO: 109457 - DNA, 1212 bp, Homo sapiens
cttccataatgtttattttccttatttatttgtcactattaatgcttacaggaagcagcaaagcatggaattctttacttttttaataagtgtagtactagtgtaacttatatgtgtgttttgtagaaatacattttgatgatagcacgtaacataatacatatttgggagcattttaaaaatattttctgaatttatatttcacttaaaaaaaaagagtgaggtttctagtggcatttttgatattaatagtaagaagtcctgtgatccatacaccttcccagtgggtttttggataagtctcagattagttctcctcaggactcctgacactaattgttctccatggcatgggggaatttgaagcttatatataaaggacttaaaaggctttgaaaaatttctcctgatactcggcatttgggagtcaaaagtttgcatctgaaaaattgttttcttgattgagaatttaggtttgaaagtgactttatggattattaactggccacctggcctctgttatagattgtctgacctatttatttgaaatttatctagtatacttaaatttggcaagaaatcagggcacaaatacaagttaggcgtattgtttatttttctaagtcaataacgcaattcattttgccatggaaaagtaatcatggaaaacattaatacctgatagactgtataaacttgcttaacttttagcataatgatacttttttccaggatgctgaccggatggttttatgtaaggatgtttatctatagtccagtgaattaaaacttttaggtaaatagagggcatgtattacttattcctagggcagttccttttgaatgatttcacttattgagaactgtcattttgaaatgtttcaaaccaattaggcatctttagatctaaatcttccagccttcagctttagggaatacatatttggatttgcaagaatgtgaagatttagccaggtagtcacttcctattagctgtgagaggtcttcggactcaattgactggtgcttgttaaatatctgtttttttggagaatttgtttccctcccgaagagagaaccctcatagtcagtggggcccattgacaattctcaaatactatcttttaggattctcgtgactcagttttgtagtgaacttttgaataaatataagtaatgaaagatggtagatttaatttaaaagtctagatt

SEQ ID NO: 109458 - DNA, 1092 bp, Homo sapiens
ctttttttttttttttttgagatggagtctcgctctgtcacccaggctagagtgcagtggcgtgatctcggttcactgcaagctccgcctcccgggttcgcaccattctcctgcctcagcctcccgagtagctgggattacaggtgcccgccaccaagcccggctatttttttttatgtttagtagagacagggtttcaccgtgttagccaggatggtctcgatctcctgacctcgtgatcctcccgcctcggcctcccaaagtgctgggattacaggcatgagccaccacacccagcctactttttaatagtaaattgaagttatgggtgttagatatattctttgcaagccgttttgaagcagattcttttcctaatgtgtcatgtacaatctgtgggggaagaaggttatataaagcaagaatgacttctattcaacaaaatagtgatattctatattttcctgtctcttttgtttctttctttaaaatgaactacagtgagacatggccagattgatttcttcccttaaattgtctcagaaactgtacccagtccactaattgctttgttcagcggacaggaaatggttatatttgcacaagttacacaatcttaactaagtcggggcaaagaaccaaagagatctctgatctttttttccagcattaacctttcagttccacaaactaatgcatgatgcataaaccaggttactaggggacacttatcaaaaaccataaacttatttatctgaatgactttctgtttagggatactaagaaaagaagttacgtgaggtaatcatgctggtgctgaggttaagtttgtgcagtttcacttcttccttaatagtttttttatacatgcaataaaggacatgtccggaagctgatcagtgccagcatgaccatgaagtgctcagtccccattccttctctccttacccctcagcccccttgcaggctatatacaaatttattcttttccttttctagggttgggaatttgcctcctttcttcctgcccctgtctgttattggtccctagtaccccaatttctgctacttttctcctccttcttttttttt

SEQ ID NO: 109459 - DNA, 1131 bp, Homo sapiens
aagaagcttaagggccaggtgtggtggtgcgaatctatagttccagctatatggaaggctgtggccgtgagaagattgcttgaggccaggagtttgaggctgcagtgagtgaataacccctgcactccagcctggacaacatagcaagactctctcttaaaatagatagatagattagatagacagcctaagggagcctgattgcccctccaccatgtgaggacacagcaagaaggcaccatctgtgaaccaggaaaggagccctcaccagacatctgatttgttggtgccttgattttggacttaccaaccccgagaactgtaagaaatgaatttctgttgtttgtaattacccaggctaaggtattttgttaaagcagaccagatggactaagtcagccccataatgacccgttttatatttttatttataatctatctgctgcttaattttgtgattagtggccagctactgtttactcatcttttattcatctgtaaaactctttttaacttgtctttgtaagaaacggttggctaacagatgaattttcaggttgttcagttttaaaatgttttacttaaaagggtaagacaactccccaatgcaaagtgtgacttcagagataactttcatttctttgaaatgtaggaagtccatagccattgctggctgacatctttctgctcaatatgctccaggggaagattatcaaattttagcttctgagctttcaaatggctcttattatcagtggcatattacatgaaactggttttgggctcttcaaatttatatttttggcaaaggtgttgggagatttgatttcattcgtcatcactgcagtacctggcgcatagtaggctctccatttggtgtgttggatgaatgaagaaagtgattctgctagtcagtggggtttaaaaacaagtgtccaccaacttaatgggtccccattgatcctgagttcacctctgttgccctgtatatatgtgaccccatgtttattgcaaccttatgggcatctcaggcactgcagagaacagcctcttaaaatttctggtagaggcctggtgcggtggctcacgcctgtaatcccagcactttgggagtctgaggcggacggatca

SEQ ID NO: 109460 - DNA, 1290 bp, Homo sapiens
ttgcagtgagctgagatcgtgccactgcactccagcctgggtgacagagctagactccgactcaaaagaaaaaaaatttttggtagactcctatgtgccatttctggagaactgaaatagtagtggacatacataggattcattttagtgtagatatgactttttagtgaaacttgaagtcctacttcctgtgtgtgaaatagggtaataggatcacacccgaagaaatgccgccttgttcaaaagtgacaggatcgctgttcagtttggaatattggaaagtgggcaggtttatttggaagcactttgtttttactatatgtgtaaaactccagggagcattgaataggatatgaggtgctccctttggctgtgcattagcaacgtggcagttactgatctgtcatttactttgaaaaggaattacaaagttttggcctcatgcctggagtagctccagatggtcagaaaagatttttgtactgaagtcagaaagtatattgcagtgatagaattgggcttgtcatgtttatattagaacactggcttcccactttattcctctgcaaagtttttctttctttcttttttcccagagagtgaggggaggaaattgttgctttagagttatgagtctaatatttggaatactgttgttcttggtgataatgatgtagaggtatgattatgtggttaatgtagttactttgtcaacctaaatacccctgattcttagtatttacaaaggatgcatgaaggcttggaatgtagagatacaccaagaccattgtagctgatgtagaaatgcaggtaagaagcttcatttgggttgcgtttgcttgtctgataacctggctgttagcccacaactgttatttagtagcttaccaaacttcatctgttctgtcttcccatgattctgtggttgctaggggtaatgatgacgtttgggtgttcaatatgggtgggaggtgggcctggggagatgagcagtgaggcgataatgatactaacaccaagttttgccattttaggcattagagcatcttaaattccacatatgatcttgtgtaccttcatatcaaccctggaaggggaacgatgtgattcctattttcctgatgagaaaactgagactttgggaggtaatatctgcccaaggcaatatctaggtaactcccttctgcagcctgtttacatatagttttggcgaaaatgactacaatttcctgtcctttcaggacagaggtggctacaggcttcaggaaataaagctcattttcctctggg

SEQ ID NO: 109461 - DNA, 1025 bp, Homo sapiens
aagcagtttacaaggtgatgccttatatttaaataccaccgtatttccaaatctgtttctattatatatatcgtttattgtagcattctcacagtgaccctgtggtgtgaacacagtgactattatcccagttttcagatgagaaaacctagtctgagagttgtgtgcctttccttacttagggcactgtggcaaataaagggagaagtcaagctactgcttccattccagtctctgaattccaggtcccctgctcccttttctttccagggcatgtatgatgtctcaaggttggctaacctctaattgaaaatctgtaggtgcttatcttctgcacttttgaaatgatatgaacgtgaaatattttcaacatgctaacatttttccaggccgttattaggggattaaatcatcctgttaccgtaactgcaattttagatgttctggtgctaaactgagatctgtcaatagagtgcaacctttcgaaagtcttaaaaaatagggtacatcttggactcaagaattatgatatcaaaataagacccttggctatttccggagtgtgttagccaatctaccctgtggttttctttctctggaattggtgaagaaagagataaacaagatccaaaaccaggtcgcatgaaaggatcaacactcccctggacatacagttgtttgggataatcgtaaatcctgctgtctgtagtggctgacgaggggagaagagcagaatcctagcactccggctactgactgtgaaactaatgtatctttgctatcacatatttagcatttaccttttactttaagccaaaaacaccttacacttttcttagatgagctttttaaaaacattgtaatttatgaaaaaaatttgaacatagacaaaagtagagaatagtagtggatccccctggacttattacccagccttgacaatcaatcagctcgtgccagtcttgtttcatctttacccgttttcattctctgctccttgctgtaatattctgaagcaaatctca

SEQ ID NO: 109462 - DNA, 1068 bp, Homo sapiens
tgctgtgaattccgtaactcagaaatgtgtgctcacaaacatcaaatcagcctgtacacagatacatagagcagccatgtatcaaggacttagaatgactgctgatccttgaactcttttttaaaaaggaaaaattagcacaaggttaaaacttaaagacatcagattagttctgtttaacagcaacctgttacttcgtgcttttgcatgtcagcagcttgtcctagagtcagcgagatttcttgcttgtgacttaaagaatcttgtcttttggctgtagagtatgatttcatggtggaggatgttgcagatatcttagtttgctattttatagcatgggttatactttaagggctgaaaaaaataaggtaatttaagcctgttttgagacacacggaaaggaagctatttcataactatcagtcatgtgaaatttggcaggcccctagcccgttagtggccacagtcacatgattgattaccggttggggacccacagttagcttattgcagaactgcatctggcataattggtgttgtcatccagtgtcaaactatccaccctgttctgccaacttccttccaataacaaaactttcttgccttgcacgagtgaaagcctgtgtgattgtatgtgtttagaattacagagttttaaacatgatccaatcacaactatttgaacttcttgattttagtacatttgtacctatgttgccaaaaacatttttttccttgtctttgtgtcttctaaaacattgaaggaagaggtctttgatgcttccttaatacttttatcatgtttgaagtcctgagctctataaataatatagtccttattatctttttatcttgataatttataaaactgactgtccaaagatatgtacgatacttgtagttttatatcaaagaattttaaatgccaagaaccagggaagccatctaattctccattcgagctagtgccgagacctactggacaacatcttgacacttggtcattggcctgtgctggaggcatgatattctagtcctggttctgcctctgcccgccagtttggtttt

SEQ ID NO: 109463 - DNA, 1029 bp, Homo sapiens
cagcctcccaagtagctacggctgtaagtatgtattaccatgcctggctaatttaaatttttttttttttctagagatgaagggtcttgctatatttcccaggctggtcttgaactcctggtctcaggcagtcttcctgcctcagcctcccaaagtgttgggattacaggtgtgaggcactgtactaggcctgaatcgttgaatttttgactctagtcttgaagggatggaacctgcccttctagtgttgtttcactttgggataaagcccaaaggctcagagctcacctgtaatctggtggtggtagactgatgtgtgtccatcatgggttcaaagttgatatttacttagtaaaaacctgccaggcctcagatgggagttagatggtgaatctcctctctgtgtctgttaagggcacctcatgtgtttcatgtaaaatccttgtagagtagattctctgaatccaactgttagattgtttcaagtgttggactcattttccttatagtaacttacttaggaattcatgtaagttaaggacttcagctgcttacgttgtttcccattgtttggaaatagttaatgcactcttaaaaattgattaactgaccatcagtgtgtcatgctagtctaagattttactttaacaattgatatatagagattgaaagttgtgatgtagtaactctattttccctaagattcatctattcggttgacttttttatcccagtactctcttcaggattgatcataggtattgattggcactagtggtttacagatgtaagaactgagagttagattaccttttggattctcccacttagcaactacagaaatttgcttctgtcttactttacttctgtaatcatcactgttttctccattaatcagaaatgtaaccttggtgtcggtggcatttcttttgtctcagtagctctctgatttttgttctcttttttttctttacagagcacaaaacttattgacatgagcctggaattttgaagtaagggcagtcatgc

SEQ ID NO: 109464 - DNA, 2290 bp, Homo sapiens
ttatttaaaggaactatgtaagtgaaatgctaataacatttcttattttcatataatctttataaaattgggatttcacataatctcattaggagaattgaaaagaattaagttgttagatcagagttatccaaaaggcattctctagtgaacattagatcttaaaaagtttgtgtgttcaaaaacgttcggccttggggagattctcagtgtatattaaaagttctttgaagtgtagtgttaaagaacttctagctcttcaactcagagtttctcaagcttgatggaagttttctacagaagatgtattagcatgtagcagagtatttttcctgtgtcacataccttagaaattttcacctggatagatttattaaagaacagacaccacaggtggtgagttcctggcttcacatggtttcttgcttttcctcacttttaccagagtttatagttccatttcttccaagccactcccggagatggaaggaagtggcatgctcaaaacagtgtagaatccaaacggaatgagaaggataattttgagtcatctttcttttgtttagaaaataaatataccttttttgaaaagaattgatttcctatttttaggtaatgtacttctagttaaggcgcataacttaccttgcctatattataaactatcagcttgaccgaagccatctttttcttctgctgttggtcttttagagacttgctgttattcacatagataatacttgttttctctgtgagccgtactacttgccaggtttgggacttctcacatagaggctgatgtaatagggaaagacagtgggataattaacattttggaatttgataagtaagaatgagtgcatatgtgtgtgggcgttaaaagagcttataacttggttagatttcctttgtaaacttaggtggaaaatatgcttagaaatttgaagtgatttgagaagcaagagaccttatcctgccattaatcagtggtgtgacctctgaaaaataagggatggaatagataatctcagaggtgctgctgattaaaaaaaatttttttttcaaatttcattgcaaattttaaatcctgatgttgcatttttaaaacttgtataggttgtaacatgctggaaatgaaatcaaaccctcactggggaaaaattaatgctgatgtacaaatatgatttggaatctttggtatttgccaggggctataagaattcaatgcttctccatttgtgatctttctgtagcacgtgaaggctgattgagaatttgagagccctagctctagatctccaaataattggagatctctaaatagttagaaatatgcaagagaagatagtccacattagcaagagatgagaatgtagtatataccactttggttcatgtatcttgaagcttttatcattcgtcacctcagccattcgtttttttcagagtaagtcatatgcttagaaccaggaaattgcctgccacatcttgttcctggaaaagctgacagcctaaaaatgcttatcattcaaggtgtgacctaaatgagtgttgtacagctattgtaatttttctataaagttatgtggctaaacaaggtactttctagggaaaatttcttccaagtaggcctttatttacaacttgaatcctaaattagcaaaaccgctgtactggtaccacagaagttcatattagaagggaatttgcaggtagtctagtccaacctttttatgttgcaaataaatgtagactgagaaacctaactcctgcagctagcatacataacagaactgaaacccaaatctccagatggccaccacggtcatctttcctcagtatcatgtgggtttcagtcagtgtctctcgtgctagaatgaatcccatgtaaagtatgttttaaattaaatgtaatgcccatacatcaaatcacacaagtctgtaccttcgtaattatattttgaaatgcaattgatttgctgaatataaatgtttgaaatgttttgtacatagctattacatttctttaaactgtattttataagatgtatatttcaatgacaatacttatcctacaaaagagaatggtttcataaattgatttaaaagtaggtgccagtgttacacttataaataaaaagataaattttacatagtgaaatctaaaaaagaaatgcaattgatcatttaaaaaccacattttaaataaattctacaaaaggtagccattatgattttatgattacttgtgttgacagtattctcctgtggaatgtgtgatgcttaaaat

SEQ ID NO: 109465 - DNA, 1191 bp, Homo sapiens
tcccaggtcggccatctcaactttttacaacgttaatgacaaatatgatttcgacatatataattcatttgtatcagtgttttgggtgtgatatctgtcagttgtgatggctgttatatgagttgaacagttgtgtttaatcctgatatgtaaattgttagatactgctttaaaatttttaaaattagtctattccgaatttccagatattaatattatctctgaaatgttgagtgaattagaagtggaagccagagactttgtctttttctctacaactcgtccaacttcaaacgtgcctccttttttctgctactgttgttactgagaaaacttgagcaggcaggtccttggtgcttttttctaaccagtggatggcaaatatgtgatgcacatctcctagctccttaatcccatgaccttgacagccatctctaattatcactgagcgggggcagtgaatctttctcaactctgcactctaggcaggtaccaaagtcaattggagtgggcatgtgagaggaaacctagggctgtgaccaaaaataaacaaacaaacaaacaaacaaacaaacagggagctggagaaggacttgtgcttaggaacacagaaatagttcttggtgagaacagaataatccaagtttcctgcttctccagagcagtattcttaatcactttccttgctcatggagtgggatagggttgtgaaaatgaactgaaatggcaccctttcagttttttcctgttacttaggatccagctcacaaaactaaattattctttaccttgtgtgatccgggtactgaagataatacagattgagtatctgcaatttgaaaatccaaaatgctccaaaatctgaaactttttgagtgccaacaggatgccacagtggaaaattccacacccaaccttgtgtgactggttgcagccaaaactttgtttcatgtataatattatttaaaatattgtataaaattatcttcaggttatgtgtataagggtgtatgtgaaacagaaatttcatgtttagacttgggtcccatccccaagatacctgtatatgatactttgtattatgtatatgcagatattccaaaatctgaaaattcagatctgaaatctgaaacacctagggtcccaagcatttcaggtgaggaatactgaacctatataactacttttcat

SEQ ID NO: 109466 - DNA, 1011 bp, Homo sapiens
caaccccagccccaagcaaccaccagtctactttctgtctacatttgcctattctggacatttcatataaagggaatcgtacattatgtggccttctctaactggccttttctactttgcataatattttcagggctcatctatgctgtagcatgtatcagtattttattcctttttaaggaatgtatccataaaatggatacatttaagctatgcgtccataaaatggatacatttttgtgtgtccattcttctgttggatggtttctcctttttgagttatttaagtaatgctgctgtgaatatctgtgaggaatctgcgtttttaaacaagcaccccgcttaattctgttgctgatagttcctgcacatatctggagaaactctaacctgaatggttagtgttgtagaatgactcccctcacagtgctaagtcctctgttccccatctcttatgggtgcttctgcttgaagaatcactggtctgtgagcgggtgtgtagtggcttagtggaagtgaggttccagaactaaattacatggtctgcatgtgcagggtagagtggacagaagggacatgacagggacagtaggcagagtaaatgggtcctgtactttttcagaatctagtagtgacttgactagttcctgaactagggtgttgctgctggtggtggtaatggaaaggaagagtcagaggtaacagacttcatcaaaggaatactctcttcagtaatggtgattttaaaatactcggcaatttttgtttttcattgactcagacacagttctgtctaattctgaccttatctattcctatcatcctgttgttcaaagtaaatgtatttttaccaactgtttgagagaggaaatcctgggataattagctgaaggatatagtgtaataaaaaaataccaagttttgatattttgaagcctctgatctactagggatgtttagatacagtacaagcctgagtcagagctgaacttctcaaagttctttttcaga

SEQ ID NO: 109467 - DNA, 1001 bp, Homo sapiens
ttagggctggttttgtaaatgttaccaaatctattacttaaccacagatgttcttccattgttgtgtcccacagccagagtagaatggtgacgattagttctgtgagacttggataaaacctgtattctttaggtctctttgtatgtggtggtttgaaagtatttcctcacaaaaatttaaacaatcacatggtgcaaagtaaattgaattatgttttcttaaaaaagttaacttatatcattatacaaattatagatgctcattgtagaatattttaaaaaatatagcaagttcaaaagaaaaatacaacttattcgttattctattatccataagttaagcattaacattttggttctatttcatttcagtcttttaaaaaattgtgtatacatatataatctgactgtgtaaattgcactaagcattctattgtgaacacttcctcatagtctggtttactttttctatgttgtaaaagcaacttcctgacactagtaaatggtattatttatgatgggcatggatacacatatcttttattttacagcagctgccttaagtagacttccagtaaatccttgagatgtatgtattacttgtgatattctttattattatacccaaattgatagattagtagaactggcaggggcattggtcatggaattcagtcctttaatttgagaaataatcctttgagctggagctgcaagaaatttttttttttttttaagaaatgagaaaaataagccagaagagttgccctttgcccaatattattaacttatttaatggccgtaagataacactgttggaagcagctgcctcttttcttgtacaggttgggaagttggggtattgagaatttaatcaacacatttttttaaagaaccaggttgtacttccttacatgctcaagtatggaggaaaaagccaaaccctgaggctagtagtttagtattgaattgccaaaatctatttattaatttcatttttc

SEQ ID NO: 109468 - DNA, 1072 bp, Homo sapiens
tcaagtagcacttgggggaaacaatttagacagtaagtgaaactttaacaaattattagggattgaactattatctctaacattaattaaaaatttttattgcaacagttgggcttgcacagttttacaactagatattttatctttgtacatccttcagaagcataaaagcgaatttttattttgtgaaaagtagaattgggagcaattgcttggaaaatacccaaaatatactaataattcaaataagttaatcatttatttgatgtcagtacatgccccctgctctaatctatcatacagtatatccaacctctgtctatcgtagtatattctttgcatatacttggttggagctgaccttgctgcttaataatttatattattttctcctgcattgtactatcaacctcttaagaacaaaaaatatataataggtgctcagtaaatgtttgttagttgaatgcatttcatgtcttctcaccactgatgcagataactcccttcctgattcctcagtctcttcctctgctggattacttccaccaacatacagtagtatcttttatcttaaaaacgtaaacacctgcacctctccccacccaataaaacaaaacctcctcagttgattccacatccccttccagttgctaccttctgtccctttttccctctttggcagtatttctccacttcctctccttccttaccgcccactttacagtcttcactctgtgttctcatcttcctcttcagtctttagcatgttctgttggctttatctcaggagtgtgtgctgaatccatactctgccgtatccacttcacttccactaccactgctggaccccgtgccgtcatctcactagggtaggacaggacaacccttctcgctggtctctctgctttcccttttgccccaccagaaagcagtctccacatagatcctgaggggtcttttccaaataaaaactttctgatgtcattggcctacctcaggccacgttcttacacctggagtgaaatccagtcatgctgcctggctgccagccttccgtgttagtgctggcctc

SEQ ID NO: 109469 - DNA, 1942 bp, Homo sapiens
gagtaaatgatttgtcatactattcttcttctctcttgcctcttttaattcttctattcttctagaatattgctgagtgtttttaatgcttcttcttcagaaagtagaactccttaaacatatacagaaaactcgcttctcctgctagctcaggataatttatcatctacttgccctggaaggcagaaggcaattgcctcaatcatgtccaattctcttgactttgcctattcctgttgatcagcacttagcatgtcatttcatggagagagtttttttccctcttttgtttcttcttttgaaagcccttgtttcctctaggcagaatatgtaaccagagttttttcctggagtgttcttttgaatacacatttccagacagtatgttcaacatattaaagctttccaccctcagatggtgctcatcatcagcatgtcttttccatcaaatgtgcccctcctcctaatccagtgaccttttctgttctggttgatatcttcttaataactttcttcttgatggcttccgtcttgcattcagtagttcaaatcctgtcacctcacaggtttactccttaaatatactgatagccacggtgtcgggggacccgtgaagagttttgcttacataacagagtttgtctactcctcagaaatcccaacagaaaggaagttttgtaatcagtatattgtagaaaaatgaataaacaactcttgagacgattacccaggagaaagaaggatattcagatgagaatgggagtgacagttaaaaaagagactgcagctattattgctaaataacattatagaagagctccttttgtggcagaatcctgttatgggctgggacttgagctagaaagtagaaagaggctggtcatatgttgggtatggaaaaccaagtatggggaagctcggtcttggatcacattcttcagcatcaagatgcgtgagaaatgcacaacctgtgcaaatacttaaatgaaattattattgctgactgccgttcatgcttcctctaccactcaaatttataaagccctctggagtcaagataccgtcagcctctctcctttgaaatttggggtggaaaagaatgagaggataggctggcatgttggctcatgcctgtaatcccagcactttgggaggctgaggcgggcggatcacgaggtcaggagatcaagaccatcctgactaacatggtgaaaccccgtctctactaaaaatacaaaaaaaattagccaggcgtggtggtgggcgcctgtagtcccagctacttgggaggctgagacaggagaatggcgtgaacctgggaggcggagcttgcagtgagccgacattgaaccactgcactccagcctgggtgacacagtgagactctgccttaaaaaaaaaaaaaaaaaaaaaaagaatgagaggataggatttatgactaaatttaggagtgactgaataatagatttgttcattttaataagtatttatcaaatgtcttatatgctggcagtgtattaggtgctggtgacagaaagatgaataaggcactgttcttgccctaaaggaatgagcagtctagttgaggagcaaaatgtggcctaccaaaaaaaaaaaaaaaggctgtatttacacatacgtgaaatcacaggagagtgcttggattgcagagtgtcacagtgcttaggagttcagaggaggaattgaggattgggataagtgggcaggaaaacagaccaggctaggaaaagtatctgtggggaggctgagcctgggtcagatcagatctaagatgaagtgaaggctagaactatccagactttgtacatcaagtaatccgtttctgttttattaaaggagaatacattatagggattacatatgcagtggagagctattaggggcactacaaacaaaccttatctgcatagtcggtgatctc

SEQ ID NO: 109470 - DNA, 1006 bp, Homo sapiens
cctccccagtagctgggattacaggcctgcaccaccacgcctggctaattttgtatttttagtagagatggggtttctccatgttgaagctggtctcgaactcctgacctcaggtgatccgtccgtctcggcctcccaaagtgctgggattacaggcgtgagccactgcgccgggccaaatatttgttttcttgaaaaggagcttttaaagtcatttctttaacatgaaaatcatttatttttacataaatatacaatataaaaactacaatggaagaaaatcacacttcaatacagacaattatccatgtctttttaaaggtccttagaccaattctagcatcactgtaataaagcaaaaaccatttgctttgtgtttaaagctctagggatagaactgtaatatatgcccatggaattaattagctgggggaggggggaaccaatggatgccaagactctatgtcctagattttctctgacaatcccaaattcatatactctcttctaccacgctcataattgtcagacaatgtgccctgaataccggttcagaaaatacaattcaccagtattacggaaagtcccaggcaagaaaacggatttctgaattgggacatgtccggactgtcgtcacattatctgcttatcatattgcacaaaaagtgtctgtaacagttcctcagtggtcactgacaccaggccaaacttcaaagaacgacgcagaggcatccagcctctaaggtccacttataccttccccccctgcttactgagttcaattcctgacccccatcccacttcttcagggagaaagatgataggtaacgggcttttaagcatccgacgaaaatacctcccttcaaatgtttagttcatgtaattttcactgctgctgagtagccatagcaaccagattataatctaccaagttacctcagaaaccaggcaagtctcctgtgtcccaatatcaatttttctcagtagagcagaagtcattatttaa

SEQ ID NO: 109471 - DNA, 3237 bp, Homo sapiens
atactgtaattttttatttaagactattagatataaattgtgaggctaaagaaaataggtgagtgtgatggtgataaaaaatactgattaaagtaaaattcttaggaagcaccattatgttagtaaacagtaatatttaaagatacttaattgctaatagtttttgtccaaaataatttaggaatcttttaccatagcagttaatctgctgacttgtgttaagtgaatagagacctcaaaatgactaaatgacaacagaatgcgtgcagaggggaattctaagagggcactactatgagatggctgtagctttgaagctattcgaatgtgaaactttttccgctcttgcttgttctccataagacttcttcagctctgtgtctaattctccccctgcctcagtgagtgtgggaactgtatcgttgatgaacatcatgctctgcccagtggctctgtgaatgacaccattgagagctgttcaccatttctgaatttcctcatttgtctcccatcccccgcccctccatgtatgagtcagcatccagaatgtcacagggaccttaatgttacttgtttttccttatgtgatacttttgggaccttaacgttgcttttttttccttatatgatactttaagtgcatttattagacttgtttggcacactaaaacactgacctgtcattctttctaagaattttatgacaggtcctagggaatttgggttgtctcttgctttgtttagtgtgaaatgacaagaatggtgtcatagcttggttttgcaaactgaggtagactaaaacttcaaaagcaaagcatgcatatggtctctccctttaatacatactttgcatataaatgagaaattcctgttttactagcttaaaacccaggaagaggacctgttgcaaatgaagcttgctttcaaagattgtagtgaatctctgtcttggctgaaatttgcaaccagttttttgattaaaaatatttgggtgatttgaaagtaaaattattgtaacatgaatgcattaaattctgaatctttgccaacttttattatattggatgaattgttatttgactatttgtaaaatgtctgtattataaatggaaatgtttcttcctattacaagattaggattttaggagcttgttttctacataagaaactgccttgaaaaccatttctttttttttttgttttttgagacagggtatcctgtctcaaaaacaaagacctggctctgagacagacttgctctgtcacccaggctgaagtgtagtggcacgatcagatcatagctcgttgcagccttgacctcctgagctcaagtgatcttcccaccttggcctcccaaattgctgggattacaggcatgagccagtgtgcctgtccgaaacccatttctttagtatttggtggatttgtgagggattgctaacaagctgaaatgttattgtgaacacttaggcctcacttggaaaatcttctagaattgaaaatagcaagtcatttgccaaggctagccctagtgtcatggccatctttctttctgattgatccaaagctgtatatggtgagagttaatcctcccaggaggctctaagccaagatagtctgaatttctaggaaaatctgaattactctaccaactctccagcttaccttatgatacttaaatgttagcttcaagaccaatcagtcttttacctgtgtgtgtctgtactacaaatatatatttacgtgtgtgtatatatatttgcttcattagacgatttttccattttccatgattggatttacatgaaatttggagaaagattgaagaaaaattactttcagctttgtggagtactcttgatctctgaaatgtttgggggctctattttgcacatgacagttagcaattcctctcaacatggactgatgcacagctatttgttacaagtagacattccatacgctgacctgagaaacccttttacagacagcagcttgctgctgagtaactggaagtttaccagcaggtggtttccaccagggccggaaaatactgacgggcccagagcagaaagtccaggttatggaaggaatgagagcaaaggctgtgattgtacgtgcaactgtcatcttgctgggattgtgtaatgtcatgaggctgggttacgtcaataccaaactatgttgctttcctaggaggttttaagtccctctcaagggaggtactcagggtatatgctgcttcctgcctttctccttcttcctgtctcagttatcttgatttttatgtttattcttatatttacataagaacggaatgttaaacccttagataaaactgtcacccaatgttgtgtcatcagacttaagatgaattggtgttgagttctcagagtacagctctgtagtgtgaatccctggtcatttcgtagctaatgcttaacctgttagccccaatttcctctcttaaaatgggaacaatgatagtacctatctgataggattgtgaggataatccattgtaagtgtcattattcttatcatcattatctagttgtatacacagctttactgatttttcccccccctaaatagatggcatgattgtgggcaatgacttcattttcctacttgtagaaatcagttgaaattctagtctccctttcattgcttatttatgatagacttgctttcatagggttgctggtgatggcaccagttcaaacattttagatgaaggtttataagaatgtgtatactgttcagatatggggttatagctaaaacaatgggtccagtgttccatgaatttaaagtaaattttgttgtagatttttagttgttggttttcttttgaataacagccgttcactcttgcaccacgcctgagcagctatattcagagaaggctgtatcctcttattttatccaacaaagcagtttttctaatgtgcctccttttacattttcattgaattccatacttctggctgggcatagtggctcacgcctgtaatcccgacactttgggaggccaaggtggggcagatcacctgaggtcaggagtttaagtccagcctggccaacatggtgaaaccccatctctatttccccctaaataccaaaatacaaaaattagctgggcttggtggttggcacctgtaatcccagctactcaggaggcttgagacaggaggatcacttgaacctgggagatggaggttgcagtgagctgag

SEQ ID NO: 109472 - DNA, 1029 bp, Homo sapiens
ttgtaaagtactatacaaaaatgggaaaattttaaagcatgaaactggtgagaaaggaagtgactcagaattcaaaatagataggactccacaccagtaatgatctggaactgaggaacattgcctacagaagagagaagccatgagagacagttgaggtgagtgaattggctccatagtaacatggaaaatggaattacacatttcttttttttctcacgtggacagagactattgtagcaatttagaacttcgggccctgtttaaaaaaatctatttcaagcgtcaaattattgattgccagactgagtattattagtaattacagttacagcactgaggagttttctcatagtgtctgagttctgctcctgttcagtggttgagttcattgatcatttttctactcctcattgcacctgtcatgctggtatcagcaattaacattcctcagaagcgaatagaatgccaggctccatctcagatgtaactcaagaacaacaggtgcattctacctattcttggctatagacagagtagttagaaggcaagtaattaaccatagagcagactttgaagaaaatgagattctttagaatttgagacaaagtgctgaaaagtagctctggataatgtatttaggagacataggaaatggctcaacaggaagggtgaaatagccttaccagtctggcctctttaaatttgtttcaagcctgtttcccttcactgatacaaatcttactaactctgcaccttccacagaccctttgttatgtgcagctgtttttgtttgtttttatgaaattcacttgaaaagtcattggacttgaatttatacagtaaaaaatcaattaactagattcttaaattttctcttccactttaaatgaagacacctaacggtttgaaaccttctggctctgagaagaggaagagggtccccagatacaggtttcaattccttaccatttagtctggttccattgatcaggggttcagttttctcaccttaaaataagaggatta

SEQ ID NO: 109473 - DNA, 1086 bp, Homo sapiens
ccttcccctgatagcagaggggaacgtgctcaacttacaaagtttctgaaaaaaatcacacttcttcttttcacgggacccctgtttgaaatttgcaacaaattaaatgcttaggaatccaggtgcctaggagccctgctatttcagctctttccccttaatcatgttggtttacatgaggattgattttggactcactgggccagctacgtgaaatgtggtattgtcattgtctctttgcacagaacaattcatttgctgcttgtcgtgaatccatcctgtgaggtattatgatgacatctggcatggcttctttgtttactgtgtttaccgtatgtgtttagaaggaaaaaggcctgtagtgaccacttttctgtgtcggcccctgggtcaggttttccatcctgactcatgggtgtcgggaccgctgagattggttgatggggtgtgcagaatttcctctgtcgggcttgggagccagaaagccacgatgaagtttgatttggcttgtggcagccttttccaaatgtgaatttggatacagtacagtaagccctctaagaaaaggagaagaagagaaaataataactctagagctgggaatatctggggaacattgaaaaacggggaaagtctcaaagatagtattctgtgtctcccctgagctggtgttgctgtagtgctcagaggccagcctttttttccaagccgagtgctccctgcacttgggagaaaccacagaggcggcctctgtcctgcatgtgctgcacgctgccttgctccagactgtcttgaatgtgacctggcagccagtgctgtttcctgctgacgtggcctcccacaactgagcagaacagagccacctcagtgtactgaggaaggagcaggctgggggcatgaatcaccagcgggatacggaacaaattcagaggggaaagcgcctaactattcaggtttcctggtagatatacttaaaagacacctttcttataggaaggaaggaggaggaagaaaaacaggagtgaagaatgcctcaagagtcaaacagtgatttgtttggccctaggaaggatttcttatcagcag

SEQ ID NO: 109474 - DNA, 1004 bp, Homo sapiens
tgatgctcgataagcgcttgtttcagccactactgaatattttttgagtttgcttatttgaaggcatccaggacagctccttgttactgtcttctaataggccccccaaaagtcatagtatcacagaattttagagtgagatgggactttaattgtaatctgatcgagaccgttaatggtttctttttttttgagacagagtcttgctctgtcaccaggctggagtgcaatgttgcaatcttggtgcactgcaacctccaccttctgggttcaagccattctcctgcctcagcctcccgagtagctgggactacaggtgcgtgccaccatgcccagctaatttttgtatttttagtagagacggggtttcaccatgttggccaggatggtcctgacctcgtgatccgccgtcctccgcctcccaaagtgctgggattacagtcatgagccaccgtgcccaggctatggtttcttctaagaagtgatcgtagaactttgtcttcagttactcccacctgaaagcccactgtacaaaacgtgcaggtggagctgactgagggcagagaggccggagcccagctgctcatctttcttttagtagtggccctggaaactcttcccctgaccattccacactcccgcatacttaattgagaaaccactgatgaaatctacaaccttaattttataggtgagggaattttacctttggtagggtcacggtgttaggtcattatgataactttcaaggtgcctgggaataaaagttttataactttaatctgtctcctgcttttgagccttcgtgatctctccaggagctgctgtaatggcttcccaccctgcgtgggaacaagtggggtgctggtgggacaagtcgggggctggtgatgtactctatgtgtttgtaggtcagagctggaaaccacagagaacagcccaggtggtttcattagtctaggtgtgaggtcactggggggcggcagtaggattggagatggagg

SEQ ID NO: 109475 - DNA, 1027 bp, Homo sapiens
tcgtgtactgtgttagaaagaaaaggtaacaaattactgtgtttatttccagttcctgaatgtagatgaatttaagtttgttatagggggaaatattttctgtctcattgcaagtgttctattatggctttcagttagcaacacgtgctcaccttactcttaagtattatatatttttcaagatatcttaggaatagttatggttttatttgtttgtttggacatagaggttttactctgtggcccaggctggagtgcagtggcacgatcatggctcactgcagtttcaacctcctgggctcaagtaatcctcctgcctcaggctccggagtagctgggactacaggcatgcgccaccatggctgagttttgtatcttttttagagatgggatttcaccatgttgcccaggctggtctcaaacttctgacctcaagcaatcctcccacctcagcctcccaaagtgctaggattacaggtgtgagccaccacatctagccaggaatatttatgttctacctgctgtaagaaaagcctacccaaaagtcaattctgtatgtcaattaatttttttgttgatggagagggagtagtttcaaggaaaagtgaattcagcagattctttactgacactgggaatctaaatgggactgctgaatagctttccatttttttgttttggttgtgtgattgaatatgttttataccaaaatatagtttattgttccatgaatatatttaataattgcaatatcttataatctcactctagattgaattttcatactgtagattgaactttcatactgtactatacagagtagaagtgagttttcatttttaactacatgaaatctcagttctaaggtcaataaatttttcttctgtttcccacaagtaagatcccattatataaaccatctcagaagatgtccacattagagaataatgtttacaagtagttaccaaaatgagaaactgccaggcattatttacttacatgacacgaatgttcactctcttgaatt

SEQ ID NO: 109476 - DNA, 1059 bp, Homo sapiens
gaagggctcagatgaaacatgttttgtaaatgtaactttcaggtaatgaaacagtaccttcccattattgagctctttttttaaatagctagttttgagttgaaaccaagacaatagatattcattatgcaaacctttgagccacctttatggtattactgtcttagtattgctctaatgttaaatgtcttctctgtttactgtaagataaaacctttgtgttcagtcagaaaataaagggactccttggaggactttgccaggggctgcatgaagatatgtggctgagacctatatacaaaggccttctgtgcagggtctatgtggctctacaaaagtggtaagctgagctgagaggagaagcctacagaaatggaaagtggaggttcctgtgtccattatttcaaactgaagttgctcctttatttagaaaacaaagcaacatgccagacaagtacataaacatttcatgtaattatattaagataggcttggaaagtgctgatggagactttaaaaacacctggttcaaaagcatgtatttatcttctctgaaattaactggtgttttatgtcatttacagtctagtgtgcacacttcttatttagcaaaaaataccacttcattttcattttttccttgttgtagatgtggcacatattactactggaaacttcgatgcccagtatttttttctctattctttttattaaagaatggggtatctttttaaaactctctttgcacactggcatgaacagggaacacagtattggtggagatggggttgggggaggtttagagggaggaattgcattcttttggcattcctgagaggaaaacagctgtattaacttttttttttttttttttggaaagtgcagaggcatctcccctgactctcagaattccagttctttacagctgagcaaaaacagcatggcatattatttatgcctggagtcagcatgcatgaatgttgctgttctgattattagccaagagaaaacagctgtatacattactaataaaaggactttgaaatgaaaaaaaaaaaa

SEQ ID NO: 109477 - DNA, 1061 bp, Homo sapiens
cccccccccccccaatacaatttgctgtccatccggtcccatgtcctagtttcctctctggccatgctttctcacaggggttcccagttgctctcctcatttccatctttgctccctgaccaggcccctgctgcttttgctttctcgctgcttttgctttctctgctgcattccctggatttgtctgacagtccagggttcttgtctccttgccgttgtctctctcagtcatctcagagtggtaatagagaagctagttgatggccagggaaaagctacagagagctaatgtctgctgctccttgcttctcttcctgtcacctttgggcctttgttgaatgaacaagtggagagtaagtagagaaaggggtttcctgaaacatttccagcctgttcttttaagtgctttttttcctcaggattttatagtcctatacgtggtaggtaggcggatgggcgggtggtgggggaggtattacagcaaaatgcttacatattcttttcacctcttgttttcttttttgttctcaactgggacctactattctcctccccattgctgaaaggcaaattcttagaaaggggccatttagagtatgtgtagctgaagaacctcaaatagttcttcatttagcaaatatttaatttcttgagttctttttatgttttgaatattcttagagatacgaaaatgaatttgatgtagattctgcccttaaaggggtttaagtaaaatctagaagcagaatttacacagacaaccacacagaaaaccctaaatctaaagccgatatgtaaacacatgattaccatagtaagtgagaaccttgtaccgcgttggagaagtgtgaagggtctccccagaagacattgtttttcctggggaggggatcacagtagtacagatgtgaaaaatctgccctaatattttttgtttgcactatgtggatggaaatgaaaacttacctgtaacaaacagttttatctatagaatgttttataagcctatttttgttccttttctattatatgtctacacagaatataaatttaccccatca

SEQ ID NO: 109478 - DNA, 1048 bp, Homo sapiens
ttgggaagcctaggtgggcatatcacgaggtcacaagattgagacctgcctgaccaacatggtgaaaccccatctctactaaaaatacaaaaattagctaggtgtggtggcacacacctgtagtgccagctacttgggaggctgaggctggagaattgcttgaacccaggaagcagaggttgcagtgagccgagatcacgccactgcactccagcctggtgacagagcaagactccatctcaaaaaaaaaaaaaaaaaaaaaaaagattttcagtgggagcacagactgctgctcactcactgagtggatttcattatgtagtctcagtgtttcccagactgcttgacaaatgaaggatgtacgttattgctttttccttactttggcctgagaatgatgcaaagcaggcctgttgcattaccaagcatcttgggatgctgcactgagtaataggcttttagtatgtgttaccttgtcaacagcagtgactgctatgcccaggacatcagcattgagttgtttttgcacttgtgggggtgacttcctattgtcctaccagaatcagcaaggtaagttgggagaaatcctttgtcagcaggatgagaagcagcaagtgaaggctgggctcagtggaggagaacaattctaggagctggcgtggtcacaggaaggatagagaacacggaggtcaggaggaagcatgagtcaggctggtggctgtccggggtcttctcacattagcagctggagagccagggctgaaggttgagtcgtaagtggccagccttgtgaatgtggtatgctagacaccaacagaacttcctggagctgggagtttcctggggtcttcctgatgtgtaagaactgatgatcaggaccttacaggttatgtgtctattttggttgtccgctctgacagggcagtggtgttgtggtagatacacttttgctggaggcatttgctaggtgagtgggcaagatgtgatttgtattgggtgtaatactcaatccagcagtgcttctctgctgcagtcaagtccagactgc

SEQ ID NO: 109479 - DNA, 1094 bp, Homo sapiens
aatttaaagatttatggtaggacacatccataggtgacttcatagaagaccaccatgggactcagtgagtacccctccagtctgggaaaagcttgacaaactacataaacctgagctgagggagaaaatacacatgccatttccccaaattcctggtttctagtgtcttggcactatggtatttttactcttattttataaatcctataccagcattttaaaaaatgaagaaaatggcaagaaaatcatggaaaatttgagtcctcatttagtacctccctatcttgattttttgtcttttaacagatgaagtggtgaagagagcctgcgattgaagattttttcatctcagctttttcccccttaccttgttctctctcatgtttcatgatctgtgtcatagatatttcttcattacgagcacttcgcggtgtggcttttcaatgtctgaagtggattaagtggcccacagtcagttctgtgacttgagtttcaaaagtaaaattaccatcaacaatgtgattcaattttattttctatactagctaaaagcaaggaactatattattaacaatcttggctttactgtagtttaaggcaggtgatgatgatgcttattagtccacctgaaagagtccttccaggtttttggaagctttattcctgcttattaccttgcccttgagaagtccttcatggaaagtggaaacactgggttgacttcttttccccatatcctagttgaaagggacagcttatatgtatgttagactgtccaaaagtgtttgtagaacctcattttaaaaaatcaactgtattgtactttttaaaaaatgggatcttaaactctttattaaaaataataaatggaaatgtgttaagcaaaaacattacttgacctcttcttattcattgtgtaataataacgtataaaataattgctttatttacatctgtattgaccatggctgaacttcttgccagtaggggtgtcgtgagtcctgttcatctctctgccccttggtgggatgcctagcacttggccacttggtaaatactggaggaatgattgaatgtgtgaatcctggattagt

SEQ ID NO: 109480 - DNA, 1069 bp, Homo sapiens
gagaacggcgtgaacccggggggcggagcctgcagtgagccgagatcacgccactgcactccagcctgggcaacagagcaagactccatctcaaaaaaaaaagaaaaattatcttagtggttatactgttgtagagtagtattgattgatgcatttattcaaccagcagcccttatgtggttctgctgtttcgtactctagtagatactttgagagctacaaaaatgtaaacgtgtgattcttgtcgttgatggatgaccttacctgtcaagtgaaatgagacatgtttttgtttttggttatttgccatttaaatggattttaaaatccttcgtactcactccaaagttattgttttctgcgtctggattctaccttactgcttctataaagttgcatcttttcatcaaaattatatatggtactgctaaatgggttggtggaaatactcattgaaaagaatataattatgacatagatcatatacatagcttcacattaagaaaagggtattgagtatttgaaacacttgacattgtgtttataaatatctactcatctagtccagcactgaagagtcatataagtacttaatttcagaggtgaatcacaagtggcattaaaaatgtatttttcttgttacctggggcctatacatttaatgagtttaaattattcctttggcctcaactctggtgggtaacctaattctaataccatggtgaatggttactgtgactaccctgttgctaagaaacctgttatgttatcaggttgccttggcgaagtaacggcttcttaggactccttagcaccgctgggaggttgttaatcagagctgtggaggaccttacagaattagtttccaaggttataactaatttttctttaggaagagaaataaatctaagtctgtaaaaactgaaagaaaacaaagtctaaattattttcagttaaatcatgacctttagttattttaaaaaaagtttgatcttgagataaaaacctatttttactagtatttttactagttacaaggatctatgtcttgaatggtggcaccccaacc

SEQ ID NO: 109481 - DNA, 1011 bp, Homo sapiens
atttcccggtaccctttttttcctccctctctttaatgactctttatttgtaagttagaaatttgggctaagcattccctgcaaaaaggcgtctttcctttattcattgaaaaacacagaaatctttagtcttaagcaatacagactggtctgtatgaggttgtatttgtgcatgtagaaagaaaaagtaagaattttataaagccttctgccttgctttggctttttttcggccagtatttccttttgtgtattctacaagaagaccagagaactacacatgatagtagtaaagatccctcccgtcccctgttagatactttctgtcatatcctttgacacacttgattcaactaacacccccttgtaagggcaagtggttattcctaattttgtaagttagaaattctccaaacggaacagtgtattggtctctttcccaaaggatgcaagatttgtcttcttataaagtcttaagaatggtctcattaaccatctgttattgaatgagtagattcccgtgtagacccttctgttctcagggcggtcattccaccttcccctgagtctctggtccatgacccctggaagagattgcctgaaagcacattcataattttgctccacattcatgatttggcttaaacaaaattaagaattattacttgagcctttttaatagtttgctgcgggtgtggcacactttttctgtaaagggcaagatggtaaataacatgctttgcagacatacagtctctgatgcatactcttttacaaccctttaaaaatgtgacaaccatttttagcttgtgagctgtaccaaagccggccatgggctggcagtagttttcctgagtgtttgtccttaaaaacatattacatggggagttctgtggattctgaaatttacccattattttcgatatatatagaagtgggaatgaatacttagcaataaaaatatgtgacaagctgtgggcactctaacatcctggaggacattgtctctct

SEQ ID NO: 109482 - DNA, 1057 bp, Homo sapiens
ttttcacttacaaacaaaagagtaaaatcaacaggctggtctgtaagaactctcatttactttccggaccccttctgtgtggtttaggtaaggcagagactggaactatatacatcaaactaatcatctcacagcccattattaggtcccagctgccggacaacttagaggatttttattaacaatcaagacacttttgtaaagttaagttaatttttggagattgctggtcccttccagcctgacactgaagtgatgatgagtgagtgagcagccttctagattggcaagaaagtggcatcaggtagataagctatgactctgttttatggaatatttggttcatttttttttccattgagcagccttctagattggcaagaaagtggcatcaggtagataaactatgactctgtgtttatggaatatttggttcatttttttttccatttccataatcacttttgattttccttagtagttctagtccatacatcctggacatttctctcttgcctttggattttaagtgcatgagttaaaagaactaagctagtaaaccacgttaggatgttgtcaataaaatgcccttacagtgttgtcaaagactttgctttatggcaggcactcttgcaggggcaatggaagagccaaccctgagagtagttaaaagggatcttctgtggtttgctttgtaagcctcactaaagcaacaataattgaaatccctgaaatatattgagtaatgatatgttggtaaagcaatacatgattattacttgtcatacagctttcaggttggtgatgtttttcatgttctttcatttgtaacagatgaataatgtaaaacagagcttgtgaggagtacaatgacattttgttgtctggttaataatttcagcactatttgcaaaattgccctgccagagcatgacctaggaattgtaaagtggaacacaaataaaataggaaatgtgtatttgcccatgagttcttcatggacttgttataaaaacacttgtttgctgtcctgtcttttgctcacttctctgtcccc

SEQ ID NO: 109483 - DNA, 1035 bp, Homo sapiens
caaataaatgacttactttacacaagtctttgtaagtaagaatcactggagggagaaaggggtgtagaacaggctcttccagcagggacaccagatgatggatcacattcacatcagccgtcagttaacagaaaagaacaaggaatgtagaattccattatgtctcctgctcatgtattttgaggaagcatttcattccattgaatagagtacagttctcaccattgtgacgcaaaaataacacctccttttatgctaaaggtccatttaagaaataccagttaaaaattgaacatttctaacggagagaagcttcagtgtgctttttcttactagtattattgctgtgattacattaaatgcaaaaatatttattgcatgtactaggaaaagtggagaatttttgacttggatatagttcggattctggaaaacttctgtagaaaatccaaatagagtaaaagtagagctgtacactcgcttgtatgaaactgatgatggaagcatgttgatgctctttcccggctgacaggtatggcagaatatgctagacaatattggaagaatagttaaaatggaataatttgaattgaaaaagggaaagaagcagtctgtaaggcatgtgaatgactaacttcatttcaattgggctccttgaccagaagatgggtgcaaagttaaatgaccttccgtgatagtattatgtcttttatgacacgttacagtagagtatctgaaaaagattgttaatatgaagaaaatagaattgagaagccaacaggatgtgtacacaacatcttctttaacgctggcagtacacacacttcaatgaaatgaggaaggccgaaccaaatataaaatgtcttagttgtcttgttatcaccaagagataggagcaagatacattgttgtcatgcagttgtagaaagaaagaaacacacacacacacacacacacacacacacacacacacacacacacacacacaatctcctgcagcaggctggacatatgtgagaagtgctcagtactaat

SEQ ID NO: 109484 - DNA, 1052 bp, Homo sapiens
aatgtgacccttttagaaccttcatcacagaaatagttgttctgttttttcagcatctgtgattctttccctccctgtcatagaataaaatgtgtatttatagtcatcaccaagaactcatattgcctcatggggattgtatctcagcatctagaatactgcgtggcacaaagtaggtacttgctaaatgtttctaaatataaatgattgtccaagcttaagtaagtacaggagagattcatatatattcttaaatgatttgcatgtttaaagagaataatataatgctcaatagatggaaaataacaatgagactgatctatacctgcaaagaatgaaatgttctgaatgtgtatttaaaagagagaggaacaccaagacagttcactggagaaaagaataatcttttcaataaatggtgctggaaaagctggatatccacatgcaaaaagagtgaagttgaaccactacctcacatcatatgcaaaaattaactcaaaatggactataaacataaatctaggaactaaaactataaaacttgagatacaaaattttataaccttggattaggtaatggatttgtatatgtaacaccgaaagcatgagcaacaagagaaaaaaatagataaatttgactttaaacaaatgaaaaatttttgtgcctcaaaggacaccattaaaaagtggaaagaggcctgggaccgtggctcacgcctgtaatcccaacactttgggaggccgaggcaggtggatcatttgaggtctgaagttcgagaccagcctgaccaacatgatgaaaccttatctttactaaaaatacaaaaaaaaaaaaaaaattagccaagtgtggtggcacatgcccgtagtcccagctactcaggaggctgaggcaggggaatcacttgaacccaggaggcggaggttgcagtgaactgagatcgtgccactgcactccagcctgggtgacagagtgagactctgtctcaaaaaaaaaaaaagaacaacaacaacaaaaattaaaagaaaattcacaaaatgggagaaaatat

SEQ ID NO: 109485 - DNA, 1066 bp, Homo sapiens
aaaatcccctggctgttgatgtggccttcctgaacctgcttttagtttaagagtagccattagtgcagccgcaatttcactgattgttaggcaaatacttacctggatatgaaaagagcctcagagctaccaacattatatctttttaaagttttgaccctggtgttggtttagtctaaaggctttctctatcaaaatggatactaagaaaccagataattgagggtaaaattagactttagcctctaggactttgcaaagtgattttcttctgagtctgactatgaatggaagcattttactgcttcagacatttattatgttggtttagatacattgtagaagaaatgcctgttataccatagaatgtttgagcaagttatcacttttaagaattatatatatataattatataatttctatataattaattatttatttataattatatttttatatatataattattccctgttcatctcacattataacttattcacagaaaaaacttttttgagatgatattttaagtgaaatatatcgttgtaacttagggatagaatttgactgtatgtgtgttttgtttatttttttttgtagtcaaagaaatttgacatgattcaaattaatcaggtgctttcacaatgtcgtataaggggatgatagcaaaacatgaaatcaatactttgatttcatagcagcatcaataacttcctatcaatttgatcttttttccatgcgacacaccaagaaaacatcaagtattggggatatactatgaaaacatttggataaaaactgaaaaaatttagttagctgtaatttttttaatgtattcagtgctttgactcaacatgcattaaataattgagtgtttcttagagctttctggctgtatctgagctctgatgacatgaaaggccttggtgactgactcattgcttgctggtatatgtctgacttgccttattttagcagtctgttagtaggatgccacatggttactgttttgtaaatgctgtcctttgcaattttaggcaagacaacagtatgatttaaatcgt

SEQ ID NO: 109486 - DNA, 1054 bp, Homo sapiens
tttaccttagttcttagtgtgcatacctaaaagcaatttaaatattaattttctaaactataagagttttaaaagttttcaacatgtctgaaaagattattactgcccatagtgaatatgttaaatctcatgtgtaatacatcgtggtgtttagaacatttactatccttctggtatattttgacatagtttctttggatacacactctctgaataggattatatttgttttgacacgttctctagtgcaaactggttctctcatgaagatttgttttttaacaaaacaactcttgtttatgctttagctatgttaacagtaagaaacagtggagctttactgttgagtaattgagacagcagttttgttaaattatgcagggtaaccatacatttctgttgtgcctgtgacagtcctagtgtaggtctcttgccttgaagaaattattgatattccttccttttcgctctcagaagtgttcagatttggatggtaatttatattgtcactccatagaagaggtgacccttttttcttataaagatgtaaggacccaatctttatgttacgcattgtcatttttactgatacctaaaaataattttgaactgatttaaaaatttaaatttaacataaagttttccccttgagatcataagattgcttgcaggcttctattttcttttgagccactttaaaatgtgcatagtaaagtcaggtgacattctacatttgtcttgccttctattactccaaaagagaagtttgagaccacagcttattatgtttggcaccagatttcagagatggcttttctttatccttatacttcctccttgaacatttcccctgattctgtgagctttgattattttaaatggaaatatgtcatctcattatcttagttaaatttgttcaaatgttggctcttttgtatgccacagaaaactttgactgcaatatacttcccagtagaaatactattctgtctacagggatgagtagacttttaaagtagcttgattctaagtacatgtttaataggggtatttt

SEQ ID NO: 109487 - DNA, 1073 bp, Homo sapiens
ttggaggaaggtttatgtgtttaaatgaagttttggaggtagtttagagagaacctattttgatgccacataaggaaaaacagtggctatttctataggcatagggaagaatgacttaagtgaggcaaaaaaggtagcatttggataaggtaggtgagtttatagatataaatgactggaaaacaaagacttgaacaacttttaaacataagatcaattatttcaagtagattccctttttcattcacaatcacattctcacagacacagtcccagtttctacctgactgagatgcagtaaggaatctgattataacactcattgattataacactcattgaatttatggattccttactgcatctcattcaggtagaaaaagggactgtgtctgtgagaatgtgattgtgaatgaaaaagatggaatatgtgtatttttgagtgtctatggaagagcttctgacaagagagaggaagattaggtaaaatgaaatatcgccgtcggcatttccccctacgttatttgggtgagtgaatttcagcctgagagaggaatagtaagatacagtgaaatgtgaatagatcatgtgttcttttaatttgaattatgtattcttttctctattttccaaactctgcaattatcacgttattcttataactcttaaacaaaacataaatcaatatcatacaaaagaaagcaaagattcaagagacttttacacaactcttaagggaagatgctgggtctcatataaaataatttttagtcaaatgatactgtaatttctaagtttgaaattagtttattagcaatgttacaatttaaccatgactatacaagaactcatactaaaaaaaattatgaatagattttcctgaagagaatttttatccgaagaaaaacgagagagaatgtataaattgtccagagagcttacgaggtttgaagtactttgattacttgactcattctttaataattttcaccttgccttgcaccaaaactgatttaagggaaatgacttagacacaaagaagcagataaaataaatgtaagcattaaggagcc

SEQ ID NO: 109488 - DNA, 1023 bp, Homo sapiens
agaggcctctgagtgactctagttaggggccgagcgcacttgaacgccttgcaactgtctatgtgtgggatggagatagttctggggacagaagcctgtttcataaggagcatgctgctcattaacatgcgctttctgacttgggccttatcctgcaggcccaaggctggagaaatcaaactgtgaataactacttttctgtaagacccctttatgatgatttttttccctcttactgggatgttgattttactagtgcaaaggcaaatttacagctcaacaaagaggaaaccatggtggcccaaattgttaattagtagagtatataattgtctttattaagttacatcacttatcctatcttttgccttttgccctttccccctcgtatttttgttgcaatctggaatgttttaaagatgtttactacatgattctttcaacaggcaaaatgagatatttttgtcatgtcaagttaagaagtcttaacccattaaatcatacttgaagcttcacatttttcacttgcatataaagacaaaaagcatgcaaaaataattcgttgagttttcttttgaaatgaatgttcaccagaagtttgaggtcagaattttgattagtttttaccatatgtagtactgaactctgtaaacccatgttattttctctgcctttttgctttcttgggaactgatcatgacagcatttagatgacatcagaacccatgttggtaaaataaatgtcatcccaaagaaccctttaaacagcaggtataagtgatgatatggtttgtttctggtatatttgtaaccttcaattttattgatttgaaacttctatatgttatttctttcatttagctaagttgaattctgaatttaactgggttagagatcgtcatcacaaaagtgccatactcagaagcatatttaaaatatgtactagttgggaccttgcagatcttggtttagtctcaattcagccacttgggaactatgtgcccttgggcatgatagttcatc

SEQ ID NO: 109489 - DNA, 1782 bp, Homo sapiens
gttgcccaggctggtcttgaactcctgagctcaaagggtcctcctgcctcagtttcccaaagtgctgggattacaggtgtgagccaccatgcccagcctatgcacagtaaattaagctagtttaagcagttcataaagctgaatgctataacaactgtgctggaaatagaagtgagttgtgctgtggacgtgcatgtgtattcacatgtaaaatggcggctgtgtattttcagggcatatttaatagttaaatatcagaatctgtataattccttttaaatgatgaccggagctcatggcatttcccaagaagaagtgaaatgaacctatctgatttggaacatatattttctttaaaaagtaagtaagattgttttcagggagcatgagataagatttacaaagtttaaaagtaatctttaatgaatcttatgtcccgtaaatgttaaatagccctcagggaaattacataaagctggtactcattggatattacactaaatagctaatgttataatagattgattagaggtgtcttttctctgatggctgtcatgtaggcagagtctaataattaatttaattttgaagaagatttctgtggaccctgaggtgtcatatgccaagtgggtgacaaattctaaagccctgttatctgccttgtgtttttaataattattgcccattgtaataaacttgtatcttagatttcttttttcacccttcagtgggtgttttgcctaaattgaaaagacatagaagattttaactacatatgaagtactattttaagtcatttgagatttttctctcctccagaattttttaatcctgtcatacttggcggaaaataatgtatacatcaaagtcaagcatacttaattatatagtttaaacatcagtgcatcattagttaaatgaacaaattagttaaaactctgtatttgctgtgggtttcaaaaattacctggacagtaattagagttacaaagagttctaaaacaaaagttgatgagaataatgaagttgaactacaaagccctgattgtataaatagggcaagaagaaataataccaagaagtgggggaaaaagtgttttggccagacctgagaactcagctggatcatgtggtatcagccaagataatatgtgacagagaacggcagatacaaataccatgacactctgtacatgggaatagagaaatcagggataaaaaatacaagtcatgtagatcacagctctccgtgtagccaggctcaagttaaggtagttcagttgtataatcaactttcgtggtattgctaggaccttaatagaggagaggcaaagctgaggggagatcacattatgttacctctctggaatagtttctccaatctttccatgcatttaaaaaattggatctgtctaattcaagccatttagttctacccatgctcatgatcctttggttttagctacttatgtgatttttccatacaaatatcagtcacttgcagcatataccatgccctgccagttccttttggaatcaatttaaatgagaaaaataaaggactttgggaaaaactatttaagtgtgtctgttaaattgttttactatttgagaatagttctggagtctgaaatacattttccatttaatagtatttggcttttttttgtttgtttgagccatagcattcgtggaaatatgttgaaatcttaagtggagagaatatgacttactgcttttggtattacttgctgtctagaacgttacagtctccactatagt

SEQ ID NO: 109490 - DNA, 1126 bp, Homo sapiens
ataactacttgcttcttaaagaaatgcttgattccatcagtttcttcagctttttctgtgttcatttctactagaaattcctgtgtcatagaaaaaaagtcccctaaagccaccttcttcattggctctgttacctaatcacaggctccctgctccctgtatattccccgcacccatgactacttctctgttcattctatctgatcataatataggggccttatacatgcacagagcaactgtttgccccctcagaaacataagcctagaccacattttctgggtagattagtgttttctccacaaaggaaggtgtttgtgagactttcatccagtggctgctaggaaggtcaaattaggaacttttgtctacagatacaaagacattaacttacactttatgttagtggttgttactttatttaacaatggaattagtgtccactctacagtttagcacctctttatccttactgaaagactttagagaaatggctgctaaggtggagtttcttcaaatacagaaaaacatctggagccgtaaataagttgagcagcccggatacattctgtactagctggttgggaagaaaacaacacagggatatttcaggtggtgccgcacaacaaacagcggtagtttatggtctgagatagtctctgttcttttggaaccggtgtgtgcttcttctctaaagccacagtcagcagcaaaaaatactgtaacatgtcttttggaagcaattactgcatgatcctcagtgttctagcctcagaacatcctgagtgttccatttctatacgtgcgggagaagaggacatattaccgatgctttggcatgaagtaatctggagaattattataggatatggtctttcttgaccagcttttgaaatggctttcagtagcttctctttggatttccaaactgaccttctgtaattggatatggcctcttacagaagcagtagtataaacatgtttaaacttctaatgtaattattttatcctgaaccaagtagtctagcagtctcttccagcggatagatttgtttatcttaagtagagttgatctccccgccttacccttgttacctttggacacaggagatggcaggagaagag

SEQ ID NO: 109491 - DNA, 1040 bp, Homo sapiens
attttctccctctgtcttcacatcatcttccctgtgtgtgtctgcatccgaatttcctcctcttctaaggacacctgtcatattaaattagggcccaccctgatgagctctttttaacttaattacctctttaaaggccctatctccaaatatagtcaaattctgaggcactggggggccaatccagatttttttggtcatccattttttttcttttctgttgtcttatctattatattttcctcttgtgtgtttttatttctcacccagattagtccatgacctaaatggccgcttttgctcacaactgcctcttgggctcaataagctcactgttgtctagggtttatacacctcagctgttaggagttggagatcagatgaatgtggtttatcgtctgtagagtgaaatatggctactaagtggtgccattacagagccaatttggggtgtaaatctagtatttcagctcttggactttttaaactgcatctttaaatagaacactagtttcattctgagggggggaaatatacatgcagaagacattaaggcctatgatgaatgtcatgttttgaacaacaagggcagctcatttggacaacagaaatccatctgcagggcttaagagaatcctttattttatacagaaaccgaataagttccaaataatataaatgttattaaagacttagaatgagatagcaatagtgcatagctttggcctagagtaggtaggcttgaaaacaattcaggacttcttttacattgaccctggatttgtggatgtctgttctatcataatatgttttagagaataaaatggaaaagcttgtaataccagagagcttctattcctcagagtggttgcaattctggagaacaacctcttgcaagtagcattttccgtatagacatttcttgcctgctggcccaatcttaacttttcattttagttcatttctcagttcagtgcatttagaagacagtgcatttttcttttctggactagggcagatggtgctgtcacttttgatta

SEQ ID NO: 109492 - DNA, 1036 bp, Homo sapiens
cagcttttctatagattaaaaatgttttaaaatatgtattttttacaaatcgagcaatttcacataaaattttgcatttctagattctctagaaaagtgggagtgtctgccttacacccatgatacaccaagaataactgattggctgcatagcagctgcccccctcagatagggtgaggttttttccattttccatagtccttacccttcccttttgttttatatacccactttctttactcattgatattacctgcctagtggctataggcattttagtatgtacccacacatgtaacacttgctgatttcttggggtggtagtaggttgtgtcatggatggtaatgactttttcatatgctggaactcttgagccctctggatttgatacccatatcaggtgatgagcttcacttggctccttggccacaggctgagtatctagccttattcccaaataattcagtcatctgagacataattaagaaaatgtggatgtaaacactgttcaaaacttgctggataggagatatacatattaaaattatctttcagatgcaacatattagaaattgtactctggattctgcctgtcagttggcacagtcttgcaaaaagtattgtataagctgcttgaaaaaatgtaatatggtatgccaagtcctaatgaaaaaacattttgtggaaacgtttgtagactcccatgcaaaaagtagtgtatgaactttaattacctttgtaagttgttctatcctgtgtttaagtgactactttcctgttacatacccagggagggtaccagctcttgctggataatcatggtcttgagccttcccccaaaacacaagagcagtatctggcagaggttagggttcagctagcagtgaacagttcaaaaacacagggaagaagaggaaaggactggtgctagagttaatcttgtcaagcaaacatatctacctaatacttaatctgtttttgtgggtttgcatccctgtacaatttgatgttcttaaaaacactagcagcctttg

SEQ ID NO: 109493 - DNA, 1153 bp, Homo sapiens
taaatggagtctactctaaactcaaaattagattccatcaagcccactgtgaaaatcaagaagatcctctaacaagttgcagattcttaagttctatcacttatctttttttgtacacatccttcccccctcgtactctcttctccaagcactattctttcatttctaaaacctaattattgccccacccccaaaacatgcccatttccctcgtgttattaaaaggcaccgtcatccatccagttgagcaagccgaaaactaggaattagccttggtgtgtcacgtttcctcacccttacccatcacatccagtccttcaggacccacacctcctcaactagtcctgtctcactgtctctactctcagctctagcccaggccagctctagcctttcctttgcctgggccactgcagcaatccactgactggtctttctgttcccttgcttaccttccatatatccgttgttcacacagaagacaaacacatcttttcaagctcaaaagaagatcatatctgtcccttttcttagacaccccagtggctgcccgtcgaacgtaaacatgtgaacttaagtaaacaagtaaaaacaagtaaataaacaagtaaaaatacagctcaaagatttgagctcacagccctgaatggaataaccattgtctcttcaaccacatcttattactctcagtttccaggtacattggtccctccacttgcccttcttaggaccctttattctctgttgcctgttaaattattaaatgttaaatggaaccccgtgttaatctccttaacatcgcgaacacttaaaactatacagtgacaagtcagtgaaccatagtgaaactccattccccaatgacaccttcattcctgattttcctggtaacatttgtaatatcaaaaattcatgataacaggcaactgatttaatgataactccagttaaaaggccttggggaaggaacttgacaaccttactgccttctaatggtattgtttttccttttttctttttcgcaatgcagaatatgagttggaagtaaagagggtgcaagacattctttcgggaatagagaaaccacaggtatgtcttctggatttctcagcataaatgacactttttaaagtatttcaaatgtgcttttttt

SEQ ID NO: 109494 - DNA, 1069 bp, Homo sapiens
tagctgaattggaaaaccttgattctgcatgtgtttcaaatactgaggctttttaacagaagagtccaaacatgcctcagggtacatagttgaatttgacaacctaaaagcttgaggtgtgttgaaggacaggcataataaggcacttgtagaggagtggggtgttgccgttgggaggggtgcagggagtctgtacttactctggtgaggagcaggctgccactgggggtttttgagcaaagaagttatgtaatcagggctgcattttcagaatgatcaaacagttggtggatgagttggagtgagaagaagatagatgcagggaagagcagtgttagaatctgctactgtagtcctggtgaaaggctatgggagtcaaaattagggtggtgacatctgtgtggcaggcagcaggggacagatacaagagccattccagagatagaatacggcactataacctgttagaatagatatcaaatgtcaaggataactgggctttcgggtttggatgcctcctctcaggaattgcttcctctaagatgccttcctgattgctgtccatgcccatcaagtgggaggctctacccccagctttgctgtgcccttcatggacttctgctactgtatttaatatattgtactgcatctacttgtttctgtgtctttcccggtctgtggtttctctaggacaggttcacagctttgtcctttttgtatcttcagtgccattcttggacatgctgagtttgtttcactgtcagggactctggaaagatagatacagcgggcggtcgcaaatgtctggtaggccgatgctgaggagcgaggaggaacaagatacaagacagggagatcacatgcatagcaatgatacttcatgttgtaggattggatgatagctttgcagacgggggtgcagtataagggagagatcagaaaaggtgtgagggcagaattatggaaaaagcttatgtttgtagcatagtagaaagaagaaaaatctgtaaggaaaacagaggagtcagagagagagggcagagcagcgggttcactcatggccccaaat

SEQ ID NO: 109495 - DNA, 1655 bp, Homo sapiens
aaggtattcataggttccaaggactaggatgtggacctctttggggacctaccacactccccttctgatcctcataaatgttattgcctgagacagtccactgtttctttccagcccaattagttgtttatgcagtttctgtctttcctcttcgtaccacttttctctctgaagttcttgtttgtgattgtgtgttatttaacttttcgctcctaatacctagcactgtccttgggacatagtgaccccttaatagatctttgctgaataactgtgtggctgtagctgggttctggccgggggcacaaacgccggaagtctgaccagcctcaggatgtgcctccgccagcgtgtaaggcagcagccactagagggaaggcctgtgctttgcaatctggcactctgggttgggacttgcattggctgttacctgtctttgtgaccttgggtaagttacatcatttctttgtgcctcagtttcctcatctttgaaaggtaggataagaaatactacctgggactatatgagaagtaaattatatacttggaatgcagtatttatagtttgtagcgtatcactaagcaaaagtgaaacttctgtgctcttacatgggaaggaagaggtatcaggccatctgacagggaaagaagcagagccatgcaaagttgggagcacagttgtaaaaaggattatttaattttgtgttcctttcagccacaactggtagcacctctaaataaaaggcatatattttgctttgaggttttgcagatgattttatttaggtgcagaacttgtggattccagtcatctttctaggactttgggcaccctgaattgagcaagtcttttactcttcagagacccagctactgcaaaggtccaaatacttagtttcatttaaattttattaaaatggtatacaagtatactaggtatttatcttgggactggaacagttaggtgctatggggacttcactggtatagcctccaccatgacagagcaataagcctgatattattctgagtggcttaggaattagccagccatctcgagcctaatgtggtctgaccttctctggtggtggtgctagatgtagtctcccatagactggtgggctgtttattttcaggatataaataatgtaacctggaattgtggttctgcattgtttccatccgcgaatgtttagcttgttggaacaattgatttgtcggttccagaagcgagtaaactgacctgcgaggaacacttcccctgtaagaagcaatcccttgaaagataaacagtagtgcatctgggagcagataggcggctcttagcacttcaggaatcataaaaacagatgactgtgaaattcttagatttcagtatcctttttctttaaccttttcctttttcatttattttcctttgtggtggtgtttctcatgatgatcctttagaagtgaagccagtatttgtgtggtaatatttccttagtgtactctttaattagatcagtaggcctcccacatagttcaatccaaaggccagagcaaatttagaagctaccaatgtacaaggaaatatttttgaacatgaaagaaacaatttagtaactatgagaataaatggtgtttctgatccaagtactatcatttgcataata

SEQ ID NO: 109496 - DNA, 1030 bp, Homo sapiens
ccatatcagcctggtccttggttccagttttccacccattgggttctcctgggaatctgcaggacttcagcgggtattgttggaaaggtattagctttgaagaatgatttgacaccatgcaaggcttgaaaccagatcaaagtacctgtgggtatggcttcttccacataatgtagaaatcatacattcagctttttacttacgttaaaaaaaaattccctcgcatgacattattttactttatggaggacagaatgcaaattgcactggatttggatgaaagttggcattataaggacagatgttgcaagaaccatattttggataccaggactttgaaagagagcaccatataagatgtctttcattgtaattaaactagtttaccttggattaactgtgagccagttttatgccactactaataattctgaaaatgtaaaatggatttgaatacttttgtcccatgtttttcttcctcaggtttctaatattcaggcaagagcagttgtgttgtcctgggctccccctgttggactttcctgtggaccccacagtggtctttccttcccctacagttacgaggtggccttatcagacaaaggacgagatggaaaatacaagataatttacaggttgtgtatgtttctattgtttttctttgctgctaaactgtaaaattggagttgtgaaggaaaatggaaaacaaaggaaaaccttataggcttggcaaattttcctttagtttattttaagatttagtaataattataatgctaagaattcattgtgtccagagtaattcttatttggaaatgagtagcatagagctatttggtatgggtgtaatacatcacttggttatatttgctgtcagtagagtattaatgaaaactttctgttaatgtctgtcggcaaaaggcgattatgacttttagtttttgcatacattgggcgattataaggtgaccgcttatgttttagatccagacctttttgtagccctgttttttaaagttctacaatatgt

SEQ ID NO: 109497 - DNA, 1218 bp, Homo sapiens
gaatcactgatgcatactctgcttaaaacctggatgaatttcaggtctcaggcagaccagcaacttcaagaaagaattttcttattaggaggaaaacgtttcacattttctttctccctttcctcaattgtaaatcagaaacatactcttgttccattcagtcatgtacaaacttgaaagttctggatttagttcagttttcatttaaatgtccttagaacagattccctgatcaaagtgctccaggtgggggcacaaggacaggggaacattctctggctgccagtctgtccttgaatccacaaagacgctgaaagcactaaagatctgacatctttttgttcgtcagcaacagttattacttacacaggagataaggcaaaacaaaaacctaagtcagtgtacccaccctcaaggaattaagggactagtagtggggtaggatatcatcaaagaaactaccaaagaacagtttttttttgagttctcatcttagagatgggttctcatcttagagaactttgattttgtcagttgtttataactttaagtgcatcactatcctctcctccagattgagcctgcaagagcctaaaataacagtttaggacttagagcactcacctgagatccgagttttgggactcagagattgtgtgactctaaagagagaaggaagggaaggagagggagaagaatttcattattaatttaactaccatttactgggcccctgaggttttattactaaccataatagagcaataacaactgtttactgagtgcttcctataaaactgggtagtttagtaggtgatttacatattctcccaattatttatcatacctatctattcttggaacatgaaattagttgttgatattgatattaaacagctagcaccagaccacatgcgacaaacagccaaggtaggattcagatacatctcaggggaagctgagctgccttttgccaggggtaaggcactgtgctgtttgttaggctcttgctctttcctagggaagagtcggccctggcatgtttttgaagtgggagacacgatccgactcctcttcctggttgcttcccccaacttgtagttccactgtctctctagatctgtctaccctaatgctccaagagaccccactgcggcatcacctgtagctcttggaatcctgaaaagcattcttttctccagagttctttacttccct

SEQ ID NO: 109498 - DNA, 1028 bp, Homo sapiens
ccatgttggccaggatggtctccaactcctgacctcaggtgatcacccagctcagtttcccaaagtgctgggattacaggtgtgagccaccatgcccagccctgcttcttttcttgatgacatatcactatctagcagaggtgggagtttttctctagaagaagctatgggagaaggattgaggatatagagggctctaggttagggaagggcttttaggaaaaaaaaaactaggaacctctgggttgagtcattcataaatgtctgcccagtctgttttaatgttcctaaacagatcgtgatctggccttattcttgaaaacttgagtaaaggagtgaattttaatgggcaaataagaactttttattttagaaaaaattagttacataaagaaagtatttatgcaaagttggcttgttttaagttctgccttaagatattgttttaatttgaaccatacagaacactaactggtgctgctgcagctgtcagaacaaatacaggtcacctaagatcttgctatgaatatgtggcatggattcatattgatgatatatatcaatgatatgatgtttatctaaagaaacctgaattaatcgtctcagctttgtctctgtcttcatccattttgtgctgctgtaacagaatacctgagactggttactttataaagaacagagatgtatttcttacagttctgcaagctgggaagttcaaggtcaaggacttgtatctggcaagggccttcttgctgtgtcctcccataatagaagacaggagggcaagacagcgcaagcgtgagagagggaagggaaccaaactcgtctttttatcaggaacccactcctgtgataacaaactcactcctgtcaaaatggcaatgcatttgtgaggatagagcccttgtgacctaatcaccttttcaaggaaaaaaaaatgaccacctctcaacatgttgcattggggattaattttctttttctttttttcttttttttttttgagacagagtcttgctctgtcgccc

SEQ ID NO: 109499 - DNA, 1107 bp, Homo sapiens
ttgtttttgttttattctcaatgacttctaaaaattcatcaataagccttaattcttttaactgtcaaatatttgtattcttacctctacagactctacagacaatgcttccaaaactgaattccagggttttaacaactctggatctttctaggtgtccctaagtttatgcacatagtagtacatcctggaagttgttatgatagaaaattcggcatgctttgtctatatgggttgtagtttatatagcagttgttcctgattttaacaattggtcctgactccaagatttatgttttgtttgtttgtttttgagatggagtcttgttctgtcgcccaggctggagtgcactggcgccatttttacttctttcacaagtagaatttttttaaatgttagcaatataggaagatgtcttgaaggtcacacagttccccttctcctaattctttagtgagcgtgagtgctctggctctcttaaaagtcatttctccccttcgaaccctccccagtctttttctcgtttgagccacaaacagtctggtttctactgtattaaagcaaattaacctagtaagaaacactgactttttttttactggctacagttctaagcacaagaaaaggggaaaggagaccaaataaagaaataggaaaaatgaggcattaaaggggagccaacacggggtttggaagggatgagagcttccgccatggcaggatgggcctttcttgcactgcttactctgagttcagaaatagaggaggaaagaaggtagatcatgccacagcctgaaatggatacgacacataccagggctcccatagagtgtgatcggatgctgggtgtaattattcaagtgtatgcatttgaataaatcatcttcctcaacctcaacactcaaggttgaagtaagcatagtgtgtgacatgccagccacatagtgagttcactcaaggagcaactgagaaatgtcaggctttacttgctgcacacccccaactcggccaccaagttgcatctgaatgcaccttgaacccttgataaaatgaactttcaatcttaaagactgttagaactctcactcccttccattgggaaaggt

SEQ ID NO: 109500 - DNA, 1050 bp, Homo sapiens
ctcaggagttactgggaaaggctgtgtattttcagagccagtgacccctctgtggatgcagtagactcttggttgatcaggctgggcagtttgggccaatctaagtaaggaggaggatcttagaaattgtgatcgttaactggagcatcgtcttgtgcctgaaaggacctttttttattttattaaccaaaaaaaccacaggtacagtaaattacctgtctcaattacagaattttctgtagtgcctttatgttagagatgagatttcattgtagaatgctttatttgcaacatggacacttccctgtaagtttctattgtttttgttcattcaaactaggaaattaagcagttattcaagatgttcaagatgctccttcatttatttagggttatctgttgtttttttttttttaagtatatgcattgtttcattgtttacttttagggaaaaagaaatagtggtttcagacagtgcttcttcgggagccagaagcactgcaagttgacaaagctttgtccggcaatggggtacacattcaggctggccgctcgaaacgacattggtaccaggtatgacgtttccttgtcctcttgcccttcagcctttggatggtgatcctgagccttcttttacatagctggaaggcatgaggaagcctgctgcctccacactaaatcaactggaggttttccaagagggaatcctaatcagaggagagaaggcctcctttaagctggtgaatgtcactatggcctctgcagtcttgcaagctgtattgcgaaggccccactaggggtctctaagaaccaaggtgaaggtagcagtacagatcttgaaaggaattcctcttggagctttaattttttagatcacatgcctttttcttttatcactttagcaagctcttcattcacttgccttttttcaattatgtgagtgtttcctggtacaaagaaagagatgctgggccagccattgttgtcaagcccagggcagatacggaattggagaaaacctggactgtcttagaggcctctgcaggcctc

SEQ ID NO: 109501 - DNA, 1033 bp, Homo sapiens
aaagaaactatcttcagcttgggtttattcctgttgtattagaaattaaccatatatatcgctgtagtcaccttctgaggtccatttcagagagcttccccaactccccagcatctttgcatgttatgttgagaggtggttttttgtttcccccctccccgccgtcttttttctctcattttgacaaggacagtcatatattttgttagcctggcaagtttttactctgctccaaacctttgaagtatcaaatatgccaccattaaaatgggtggttcaggtggctgtgactctctcaaagtgtggtaagtctctagcaattcctggctctgagcagtgtggtcactgatggtaacatcaggattgccgtggatacccttgaataggtgaggtgatgggaacacactgagaaaacattacagaagcatttattttcaaaatggaaaataccggtaactagaagaaatacctagaatttgatcaccaacaattccaagtatatttttattcattaaaaattaaactgcagtgggcatctgacttagttttcttggatgtcctctgagaaatatgaaagcagattgccctgttttgtcaaaaatcagcatatttttatttcatgtcccaagaaagggaaaatattttgtcaaccaactaattattttacaattaaaaaaatgacagacatctactactcagggactgtatataggagaaaaacttacacacattgaattgaaagtgaaaatcattgggtaatatttgttaattagttgtgttgatgatgatgttagcctagcttttatttggttataagcttttgtatgcacacacattcacaaacacatacacgcatatatacatacgtgtgtgtgcgtgtgttttctttcagtatggtccctattctgatgtctcagaaattaccactgctgcagggcctcctggacaatgcaaagcaccttgtatttcttgtacacctgatggatgtgtcttagtgggttgggaggtaagtcaggcatattctgcatcaact

SEQ ID NO: 109502 - DNA, 1029 bp, Homo sapiens
gaatttagtttgcatttttctaatggctaatgatgtcaaacatgtttttgtgtccttatttgccatctgtattccctctttggtggagtgtctattctagtcttccgcccatttttaatggattatttccttaactgagttttgggaggtcattatacattctggttacaaatcatttgtcagatgtaatattggcacatacattcttccagtctctagttattttcattctcttagcagtgcaaaagtttcaaattttgatgaaatccagttttttatttttttcttttatgtaagatcatgcttttcatgtcatatccaaaaactctttacttaattctaggtagtagattttcttctgtgttttcttcttaaaagtttaatattctacatttagatctgtggtcccttttgagcaaagttttgtgtaaggtgtgaggttgaagctgaggtttattttcctcctattgatatccaattatttcaacaccatttgttgaaaagactgtcttttctccattggattgcttttgcacctttgtcaaaagtcaattggccccatttgtgtaggtctatttctggagtctctattctcttgtattgatctaggtgttcttctcttcactggtaccacactctcttgattactgtagctttatactaagtcctaaaatcaggtagtgtgattcttcaaactttattcttatttttaaattttgcattagctattttagttcctttgcctttccacatcactttatttttttaatgtataaagaaaagagatttgtttggcttataataaactgtaggctgtacaaaacctttggttctgtaggctgtacaaaaagtgtggtgccagcatatgcttctaatgagccctcaataaacctttaattattcagtcctcctaggcctctggaggagagggtccatgtctccaaggtttgtgaaatgccctttaagggcttttccccattatcctgaatattagtaccaggctcccttttaatcctgctaatctctcta

SEQ ID NO: 109503 - DNA, 1008 bp, Homo sapiens
ttttgccttaatttcccctactacaaaatgcaaataatgatagctgtcttcagtccttaattgttggggaaaaaaagattttagaaacattcttggccagatgcggtgactcatgcctgtaatcccaacactttggaaggccgaggcagatgcgtcacctgaggttaggagttcaagaccagcctggccaacatggcgaaaacccgtctctactaaaaatacaaaaattagcctggcatggtggcagatgcctatagtcccagctactcaggagcctgaggcaggaaaattgcttgaaactgggaggcagaggttgcagtgagccaagatcacgccactgtactccagcctgggcgacagagcaagactccatctcaaaaaaaagaaagtaacatttttgtttcttagaaaaggagcataacaatttagcctttgaaaccgagtagcttagtcaatcttaggctaaaatatccaggcacagacagaggtgagaggtggcaaatgaactatttgagatcttaattggaccagaaatagaaggcagattacagttttacctctcatttactaaaaacaaaaataacagaatggaattagatagcatttttttcaggttgaaacaaggccactaaaacattagtaggcaaatagaaatttggaaaactctgggaagagtatccttgaagatttcactgcatatacttgaaagcaaagtaggagagtgggagattgcaagcttttcaggtggtctttagaaattctagtcatcctttttttaaatataaataaatctccattttaatacattaatgtctaaagtataccgaaaaaaaagtttttttttgttttattcctttattctttgtaaagaatttccaccatcaataggtatagtgaaattttatctcttagaaaaggagcataaaaaaattccacccattaatgaaacagtattacaacctgatcactcacaagccaaaaaaggtccatatacagccagggacagag

SEQ ID NO: 109504 - DNA, 1750 bp, Homo sapiens
tcgtcgctgtttagacacctctcaggagctaagcggagccttcagcccctctgcggcttttgtattacaacgaagtgaggtcatgcttacaggggacatggggagcttagatgatcccaaaatgaagagcatgatgcctactgatgaacagtttgcagccatcattgtgcttggctttgcaactttgtccattttatttgcctttatattacagtacttcttaatgaagtaaacccaacaaaactagaggtatgaattaatgctacacattttaatacacacatttattcagatactcccctttttaaagcccttttgttttttgatttatatactctgttttacagatttagctagaaaaaaaatgtcagtgttttggtgcacctttttgaaatgcaaaactaggaaaaggttaaactggatttttttttttaaaaaaaagaaaaaaaaagaagaaaagtataccagataccaaaagctagctttcttatgttttcctttaaattttcagatttaccttcattctgttttcactgatgtcttttgcaagcctttgatttttttttttttgttacagtttagtaatttatattcaccagtcacttcatatgtcttgaacatctgtatctgtaaacatgaatcaccgtgtgtgtacttacagggctaggatttcagtgttgtcagagtattaccacacagcaacagcaacatacagaagatatgttcactcagataagactgccctaaacaaccattttgtcactcagttatttaactgtgtttagctcatttaaatcaaaatgtgtactttaatctaaaatgttttaataatctgtatttcttataattttaacactatgagctgcctgtataagaaatcaagtaaccagaatgcacctataaattatggagcattgtagattttaccacatcaattcatagcagtaactttaagagggcattgtgcaatagttagttgttttcttgttcagctattttaaaggctgctttaacttgtttgtttgtctttgtatataactacttctaatctaatcactagagttattatattctgttatgtttgaccagaattatatgacaagaactggtgacagtttagtgcctctgcccattgtccatgatttacactaattgtgagcagtcttcttatgtgtcagctcattatttttgaaacatttgcctttaggctgttctttgaggtatcaatgaagtgattgaatttcaataccttaattcagtgcacataatactaatgtaacagcagatgaaaattgataaaacccaaaagagagtcatctaaatttgtagttcctatttctgtgggtttgcctggccatggttggagagggaatggtgtttgatggtaaacacagggtgtttggggatcaaggagcctagattctctccctggatctgtcactaacttgctgcgtgacctgaacacgtcactttacctctctgtgcctcagttttcccatgcatgaaaaataaaataaaataaaacggggattctaatgtttgtaagtgctttgagatctttgaccaacaggtgctattggagtgcaaagtgttactcttacgtgtttattttgagtcatgagataatcaattttaacccaaagtcattggattatttatatgaagtccataatgttcgagtacctcagggacatttaagagttggaggtgcaaatatattccaaaagggtgcaacagacacagtgtatcc

SEQ ID NO: 109505 - DNA, 1131 bp, Homo sapiens
gctattttgtgcttgatctttattgtctaagatgcagtatcctgtactagcttataatattcccataccaaagtcatggggaaacaaacattattttgtttttggtttatttatactatattctgcatacagtactttaaatgccaattacagtgcaatctttatttattgtaaaattttttaagtgtacttatgtactaattttcccttgtagcatgttatatttttgtgttttatacttttgtaattttaggtcagtcttgttccttggcaacatctgtagtattattaatcttctgacattttcttatgtttttaaaaagataagagcatctagtgcattaaatgccaaaaaaaaaatacattatcagtgattgaaacgtttacatgtacccaaaaaccataatcatctcttggaagaaaatgctgagatcaatgaattattctgtgtgcctatattgacgtagtgagtactagagagttctgtattttattattgactataataattagtttaattagctttgcaaactgatggcatcaaggtaaatatatttttgccaaagttctggccttccaaaactcacccccttatttaaatgtgtgctatgacccactatgaccacagcatctgcattttctaaaaaattccatgcaggtgttttggggagaggtattttttaagcaatgaaaattcaactgagtacaaagccccctcttggggggttggggaagtctcttttttgaaacacttcagaactgctgctataaagaaattctctaattggttgaattttttttttaagtaaatagtactttaggccaaaatttatatgaatatttgatcttcttgagattttcatactatcatttaaccaccaggaagctgaagtgtgtgaagtacaaagctgacagcactttattttattgctctccattatttggtattcattatattccttcagtcagaaaattattactctctatggcactgttttttatcacaaatatgtatatgtgatattgatatataactatatatattgccatcacacacgaacaataaaataaagtgttctattaacctgatctctttgcccttttgctatgtgaggagtgaatgagtggcct

SEQ ID NO: 109506 - DNA, 1050 bp, Homo sapiens
aagatttcttgacctcagggctgtgagtctatcttgtgttggcatcaatgagactctggttcctgggccattccttttctatcttcaccatggcagccatcatgggaatcagcacggcagatggtggcgcacagattgaaatggggaaatggaagcattttcactttgttttctgggccttcatcaaccagcaagcgaatgttaagccctaaagccttaactggtttaaaactctctatcatgagcctgaaagatgtctgaatgccttgtttattcacggagtttgttttgtagtgagagatggttaagagcatccatcaggctagacggtggtgtgaaaatccatcctcagttctggttgcagaggagacaccatggcagttgccactacattggggatttctggctctttcctcatcaccttaaattcgggtgtcttttatgagtaatcaaaagcagcaaaagccaacgctatcaggcccagtattttaaaaccagaaaaagagatgaaaaagagaggtttgaccctactcagtttcaggactacgttattcaaggctgaactgaaactggtactgatttggaagcagtagctaagtttcttgatgcttttctggaacaaaacttgattaccgtcgatgtgcagaaacactctttgacattctggtgggtggtggaatgctggccccaggtggtacactggcagatgacatcatgcgtacagatgtctgcgtgtttgcagcccaagaagacctagagaccatgcaagcatttgctcaggtttttaacaagttaatcaggcactacaaataccttgagaaatgttgtgaagatgaagtaaaaaggctgctggtgttctgaaagggtttttcagactcggagaggaaaaaactggctatgttgactggtgttcttctggctaatggcatccattcttaatagcctttataatgagaatttggttaaagaaggggtttcaacagcttttgctggaaagctatttaaatcatgtataaatgaaaaagatatcaatgcagtaactgcaaggaa

SEQ ID NO: 109507 - DNA, 1067 bp, Homo sapiens
ttataataccaactgtcttgtcagactggcaaattatattggcctctccttatgtggtggtttttttggtaggtcatagttccttatacacagacacctgcatcatcgaaggtctttttttcctaaaaaaaaaaaatgggattttagttcttattctgtgataactatcctcctcatataatactattctttttgacaccatttgaaggaaccaatatttggaccttattttgaggttgtctgtctcgaagaaaaagaaaataaaatgtataggcagggttccttcaattggcattttccccagaattgtgagccaaagcctatagtaattgcagacagcaaatgattccggatctctaaaaggctctctcagatgaaaagggagtaaaggaaaaaagaggtcaaccactgtttctgataatgtacttgagtttcattgttcttttagtttgtattcttataaaaaatgtttacactctgcagattgattttttttttttagtactgtggctttcttttcctattttatgaaaaaaatgataatctttttgtaaaattgtctgtgaaatataaacattaatatataaagaaaaaccttgaagtgctgtatagtgaagtataaattaatgttttattgatttgtgaagaatttaagactattatataattatcttggtggatctattttatgcatgaccttttaacctttgactttgcttatttcccactacgaaggggaaggtagattttatgaatgattttaatagcaaatatattttataaagtgaaaatccagtgtggaggtagcaaagcatctatctattctgaatcatgtttggaaataaaattgctccatctgggaatgtgctttcattttcccgtctcattttctgtttcccatttgaaaacagtgttctcttctcttctttctgtatgccaaattgccagccacaattctttcccaatcttctgcccagtggagtactccagctgtctttcctttagagaggtggttcagtggcctccttgatgacatttgtttcatgtctggatacagtatgtgttgc

SEQ ID NO: 109508 - DNA, 1043 bp, Homo sapiens
agccaactatactgatacctacagctacagaaagcaggactaggaactggaaataactttgggtcctgccttcattaggacgttctttttagaagcagttcttccagctctggatcatagagtgacctttaataagttaaaaaaacgaggactccttaattctgctagagttaaccttgagttcagagcagtattaaatgcgtgcactttcaggtcagtactggggaccaagtaccctctggtcttttgtgaatggatggttttgtttcctatgggaattttggcaaaggttttctggaaagaacaagtttctcaaaggactttcttcctctagaatgttcattttatgagatcgctatctgtaagtccagttggattacaggaatacttgaaagttactttctaccactattagaaaatatgaagtcgcatgcactggatatctatatatcattaggtttttgttgtgtttttggttatgctgtcccccttctccttggggagatatttgggagcaaacttatttagatttagagtaaacttttcattatagagcaagtaaaaacagacaaatgaaacaacctagtgtttcacataaaaatacttctgacataaagtaccaagagcagtgtgaatatacttggcatagtcaaaaaagaaaatacatttaatattagttcaaaattgttaaaaatacctttagaaggtctagtctattattgaaaactcaattttttcacttatatggctttaaaatggagctattttgctacaatataatgtattgtttatttttttaagttatttaatgttaatatacatagctagacttaaggtttttcagaaagatgtccataataaatattaaaaacaatggtattttttaaaaaactgccttagggttttaaaaccttccctacagttataaccacgtgtaattttgtggaaatgatataacagctattaatactactataacataggcataaatattttcgtgtttatatgcatatacaagttaaaataattagaaactatgactg

SEQ ID NO: 109509 - DNA, 1607 bp, Homo sapiens
cggcactgatttaagcttaaaagatttggtatcgtttaaaaaaaaaaaaaagctgggtggggccgaggagaatccacccaaactttcctcaggaagtaggatgtttactgagtaaatatgcggtagtcacagaaacacctgctactcctttaagacctcaggagccaccaccgccacctcctggccacatccgggcacttctctgcaaactcctggcgtcccgacgcccgagtcgttgggcttatttgaaacacacgcacaaccaatcaagcggcgcctgccgggacttggagagcgtcgaccaatcaccgcccctctggagactcctgcctatgggaaagaggttgacatcacgcgccaatcggcatggctcttagagagagcagcttagtttttgaatcggttgtggcggccgccggcgaggaatggcggtatttgtgagaggagtcggcgtttgaagaggtggaactcctagggcttttttgagagtggtaaggactctgtgtgagtgagagaggtgcaagtgggcgagcggctccagagccaagggctcttttgcctgcggtcgacgtccccgcccctagtgaccgcgaattccggagcgccccagctcaggcttcccggatccgggaactccctcgccgcaccccacccccagcagccgggccctgacgcggagtgggagaccgaagcccccagtattgctgggcatcttcgccctcacctgttggctcttttggacagaagagtgtgggtgaagggagggagttgggaaagggattttggcaagccgcgcagccctgtggctttgggggccggcacttgcagcctttgggggcttatctcagagtgcgccgtggttttattctaggattcatcctggcttctttgcgggaagtttaatttttcgtttttgcaagataaatccaggccatccgcccctcgtcctccccagccacccggcacagatgtgtccggcttagtggttaaaggcgcagcctctggatttagccgggctttgaatacctcttttaccccttactaacagtttgacttaggggaagttgcttaacctctctgttcctacgtttcttcatccatacattgaaaataataatagtacctgcctcttaggattactgcagagattaaaaggtttaggacaatgtctgccacgtattaagcgttaagtaaatgtcagttgttaatagtaatgttattgttaataacaccaccattatatcttggattgcattttagtccttcaccttggaagatgattgcctaaaaagtatttaagtaaaaggaaacttgaatgtttgtttacatggcaaattttatctctgggataaaagggggcatgtgttatagtgtgtttagttagaagctccttgggtctgttcttgggtgagaagctgtgtaggtttatgaacactgatcctattgtgcttattttaaaggcttctggaatacagtaatttgaaaaaaagtgattaatatatttccatttctaatctgactgttggatgttagttatgtcatcaagttaccgtagtgcatctctttttctctatacattttgaagctgttttggcaataaattgatc

SEQ ID NO: 109510 - DNA, 1556 bp, Homo sapiens
attcgcccacctcagcctcttgagtagctactataggcacctgccacccacacctggctaatttttaaattttttgtagagatggggtcttgctatgttgcccagtctggtgttgaagtcctgccctcaagtgatcctcctgccttggcctcccaaagtgctgggatttcagatgtgagcccccaacccaccctgatgaaaacttgttaaaccttttattccctgtctagcttttaaactcttcttaagtcctggaaaacttaaaaaaggattttctttcatagtccagagttatattggcactcacccatgcataattgttttgtcaaaccttttaggggagaggtgtttttaaagaattatgaaaatactgacaagggaccagcccaattataccggagaggtttagagacatccacagaggatgagtcaagagtgttggattgggggttggaagacaagataggtggagagtcgagcactaaatgcaaatagatgtgatgtaaattatgatttgtgcctgaaaaatagctgagaaattcattgttgctgttgcatagattgtatagggactggggtagttacagatggtgagggtgaatagttaggcggggaccaaattgtgaacttggtggtgaatttggacttggacatataaggagtactcatggaagttgttaagcagggaagtgatatggtcacatttgtatttaggtgcatattcctgaaaaccatgtggagagtgatttctaaggaaactgatggtaaagttgtgtggagctggtttattagaccaagtgaccattgtgtcattgaacgtatagagaaggggggccagattccagagatacttgaggtgggattgataggaattttggggagggaaatgtgggagaggaaaaaattaggatagatctcagatttttggctaggatttttgtgggaggtgtgttatggtggtgttataattgaatataggaagagaaattggttgagggcaaaggtgtggagaagggaggtagaataatatttatgactacagttgagtgtttgttgtatgtctagtaatgttctatgtgcttttgatacattgttatttttattatattcctgtgagtcaggtattagtatgtttattttacagaaaaagaaactgaggctcagagaaggtcagtgactttctttggttcattaaaaaaatgggtaataatactttttataaattctaggtaaaaagagcctctaatacttacttttgcccaatgaccatgtttatgtatttttattcaaattttattttttcagctgatttagaagaatacaaatcatggctgaaaatagtgtattaacatccactactgggaggactagcttggcagactcttccatttttgattctaaagttactgagatttccaaggaaaacttacttattggatctacttcatatgtagaaggtaaacctgttacctgctttaaaacaatcaatttctattttaattctaaacttattagtgactttcttaagatttaattttaataccaactgtaatgct

SEQ ID NO: 109511 - DNA, 1158 bp, Homo sapiens
ctaaaatgattatgctgattttcctttctgtaagtattaagtgctatagtattattttcctatttttctgaagatagttaatttgtacaataagaactttatgtatggtatcattttcttggtcagtagtggatatctttctaatgcatcttgatatcaaaatgcatgtacttaaaaactttagcattctaattttatggaacttatgcatacttgatgatttatgactaataagtaataagtcagaattatgcctttataatactgatctttaaaatttaagaacttaatttgaatggagatatgtatatgtaaaaatgtaagtacgtaaagaaatatggttgttcattaagtgtaatgctgattattgtgtgatagaaacttattttctacaaatataaacatgttaaagttgatattgaattgattgttaagccttatttagagagacagatggattatttgatatataaataatttttatttctgctaactatatgatgaaaaggacattaaagtgggctttgtaaagatggagtcagtggaagaatttgaaggtttggattctccggaatttgaaaatgtatttgtagtcacggactttcaggattctgtctttaatgacctctacaaggctgattgtagagttattggaccaccagttgtattaaattgttcacaaaaaggagaggtaagcatatacatttattatgacttttcaagttaaaatttttattaatgaattttaattagcaaaaaatttatttggaaaaatctcattgattgctgagagcaaaatatttagaataggaataatagtggctattctaatgtggtcctttaattcctccattttaaacttagtggtgaaaagctaaggcctttgaaagttaaataatgataactgtacatatgcatatacacagacaaatacatagtcctttttttttttttttttttgagacggagtcttgctctgtgcccaggctggagtgcagtggcacgatctcagctcactgcaagctccgcctcctgggttcacgccattctcctgcctcagcctccccagtagctgggactacaggtgcccgccaccatgctcagctactttgttgtatttttagtagagatggcgtttcaccatgttagccaggatgg

SEQ ID NO: 109512 - DNA, 1860 bp, Homo sapiens
ccagtaaatctttggattgggaaagttgaatggcaagaggggaaatgaaatatatttagcttgagaaagttgtgttgtattttctactaaagagaaagctcacatttaaaattgttgtatccttcagcctttgccattttcatgtcgcccgttgtattgtacaagtatgatgaatctagtactatgctttactggatttaggaaaaaagaagaactagtaagtattacgaaacaaattcaaagcgtattttttacagcaaaataaattaaaattggcttttttttctttttagtattatggttttatttttaaaatattgaaggataacttattatggctataccagattttaaattttctgaagaaacaaatcctgaagagccttataaagagaccagtgttttgtctaggctggctgatgtgaattaatagaaagatttcatagcaattctgtttgactgtcttgttaccatattggctacgttggttatttaaagtttttgtttatacattgcaatttcttattatgcaagttcagcctgaaagtattctgttgccctatagaattcatagaaagttccttttttatttttattttattttttttgagacaagtcttgctctgtcacccaggctggagtgcagtggcgcaatctcggctcactgcaaactccgcttcccaggttcacaccattctcttgcctcagcctcccgaggagctgggactacaggcgcccgccaccacgcctggctaatttttttttgtatttttagtagagatggggtttcaccgtgttagccaggatggtcttgatctcctgacctcgtgatccgcttgcctcggcctcccaaagtgctgggattacatgcgtgagccaccgcgcccggccagaaagttctttctttggttcacaatactttgttgttggaactgatgggtattactctgattttgtgggaacagtcttgatgtgataaaacttggtatttttttaaaaaaaccaatatatttacacagtatggtattaaaaagcaatatatttaggccataggaaaggcggttgtttaacttacatttgtgtgaaatctttactaatcccacctctataattttgcctgtgttaataggcaaactaatcttttttatacttactttgacataaaatttaatagctttataaaaatcccgtatgtattttataaatagaaagtatttagcaaatgctaaatgtggggtaaacatagtttaaaattttgttcaaattaaccataaagtcagtgttgcttaatttttcttttgaggtcaggttggtgacattggtccatcacatgggtggagttattcgaaaagactttaattcaaaagttacacatttggtggcaaattgtacacaaggagaaaaattcagggtatgtaaacttgggtatttttgtgtatttcaatacagcattattttggcatgggtttaataatagcagtcttttatctatttctttcacaattaaagaagagaaactcaatttttgctatgaatatatttagtaaaaaattttaaatcataagagtggttaaattttctttcttttcttttcttttctttttttttaaatagagatggggtgttgctctgttacccaggctgctttcgaactcctgggcttaagtgatcctcctgccttggcctcccaaagtgttgagattacatacgtgagccaccaggcctggccgagtggttaagttttaagtaggcaatggaacttgagtgaggtgttgaaagatgactaggatcgtgggggttggtagatgaataacattgtaggaattgtgaaagtagggaatttactcttgtctaagtgcc

SEQ ID NO: 109513 - DNA, 1133 bp, Homo sapiens
atagagacagggtttcaccatattggccagggtggtctcaaactcccgacctcaggtgatctgcctgcctcggactcccaaagtggtgggattacaggcatgagccactgtgcctggctgtctaagtgcccttcataagaacagagctctgctcttataaagtggttctaagatttaacttgtgaatattataataggagaaaatactctcactaggattgaatcttagtttaagattatagttgaatgtcttagcaagagtttatcattttttcttagtctcccttagtgtatttgtgtagcaaatggtaattttagtgtactcttcaatttaccctaaatatttcaactcatatctaaggttttagtgacttagtcggatgtcttcttctgtagtgccatcttgagggtcatactttcaaggaagtaaacgtgaagaaaggagaaatagaaatttaataaagatgaacttcagagatatatttatttaaaataaggaaacagttcggacaccatggaacttgttttgaagttattttaccctaacttgtatgattggaagatagtttgtctgttaatttttaaattattttgttacaaagcagatagtgatctaaaactgcaaaaaattaagtatgttaactgtttagaacttccttgaatgcagttatttaaggagaaaattcactgtaatgtttatatttttaggttgctgtgagtctaggtactccaattatgaagccagaatggatttataaagcttgggaaaggcggaatgaacagtaagtgtttagaaactcagtagttcattatgtaaattaaacattctggtttaaagataaatccatgtgctgaaaaaagtaatttcatagatataaaaactgaattcagtctgagtagcttgaggaataaaatctagggagaacaagttataaaaaattataaaaaattaaaaattgaaagatatctttgatatctttggattttaccttgtgaagtaattttggctattataaacattctgaaattattagataatagctaaataattctgtgtatttggattttgttacatatttttaaaattttgtgttatctggttacattttaattggtgcttgaaatttattgcc

SEQ ID NO: 109514 - DNA, 1074 bp, Homo sapiens
aaagcttatctgtgatcacattttgtcagaagttacttttgggatgacaggacacatcatttttttaaactgaagtttttgtgagcatttcaggaccaaatattaaatagtttcaatagatagattatgccaagaccttgaaaattactgtaggtttgtaaattgatatacctaacacttgaatttaagttaaactggttttggaagagtgtattttgtttttagggatttctatgcagcagttgatgactttagaaatgaatttaaagttcctccatttcaagattgtattttaagtttcctgggattttcagatgaagagaaaaccaatatggaagaaatgactgaaatgcaaggtaaaatttagcataatgtaaaagttatatctattttagtccctaggcctgcttaatcacttcctggtcaatatacctcttaaaaaatttgagtttggaaataagtagcttggcttatttatgcttatgtgcattcctttttaggaggtaaatatttaccgcttggagatgaaagatgcactcaccttgtagttgaagagaatatagtaaaagatcttccctttgaaccttcaaagaaactttatgttgtcaagcaagaggcaagtaattctagaatgaggttggtttttaaaaacactattaatagcttctctgataaaataaatgtaaactgtttattaaaatgttttttctctcacctagtggttctggggaagcattcaaatggatgcccgagctggagaaactatgtatttatatgaaaaggtatgcttttaaccccttacttatttgttctgtgagcttgattgtttgaaaataacacttttctgtccagaaggtttagaagcatgtttaggaatttcagaatgattaaaacaattgggatatcaagttatcttagtctatgtagatttaagtggaactattcaatgtaatgtgtattattttaacctaatatatgttgttctgtgcgaattcttggtgataacattacgaacaagaacatctctatcttcagaaacttagacttttaatggaaagatagatttgtacgtag

SEQ ID NO: 109515 - DNA, 1060 bp, Homo sapiens
atattagatatgtctggaggcagcagattgcttgttgctttcatccttagtaacttgaatacaaaagtagaaattactcttgtatcatactaacaattttaatgattgattgcagaactgtgtgaagttttatttgcttctaatgacatttcatgacgagcatatgtatatacatatacacaggtatataaatggagtacataaaatagaatagaaaatatggggaaaatgtctcaaatttagggagagtattttttattattacttccttctctattaatatcttgtgtctcctttatcactgtctatcttttagctcttttctttttcccacaatctacttaaactagtcttttttctcatttagttatttcaagtaccattggaagaggaaggacaacgtggtggacctatccttgcaccagaggagattaagactatttttggtagcatcccagatatctttgatgtacacactaagataaaggtaaatttgtatatgttagattggtagtaatttttttcagattgtacatatttattatgatctttgaggtacttctggttagctaaataagttttgtacctaaaacttcttattcccttattagttcctttgaatcatttgtctctttgttccagtgcctcataatgtttgttgtttgcttttgttttgttttttgagacagtctcactctgtcacccaggttttagtgcattgatgtgatctgggctcacagtaacctctgccacctgggctcaagcaattctcccgctgcctaagtcctgagtagctgggaccccaggcatgtgccaccatcccagctaatttttgtattttttttgtagagatgggttttgtcatgctgcccaggctggtttcgaactcctgacctcaagtggtccacccgtctcggcctcccaaagtgtggggatcttaggtatgagacaccatgccctgcctttttttttcgagatggagaatactctctcacccaggctagcgtgcagtggcctgatcatgacttactgcaaccttgacctcctgggctcaagtgat

SEQ ID NO: 109516 - DNA, 1050 bp, Homo sapiens
ttccatagtgtatatgtaccacattttctttatcaagtctatcattgatgggcgcttaggttgactccatgtcttgctattgtgaatattgctgaattctaccagatgtacaaagtttttatttttctcccttcttagttgataacactttttgctgtcatgtctgtttctatttaaaggcttctaatgaactgcctcttactaggataagaaccacacaacttaagttttataaattcattttggcaaggttctgtgaatagaatttagaagtttctttgaatctctttaaataggatttgtaagtttcagtgccttgagtactggcatttatacttttattttttgaggtttctaacttctttccttacaaaataatctcttaggtgttttttcagtttggttgagaattaaaaatttacaaattattttctcatttttttgataaccttttaattttctcagtcagccaacattgttttccttttcttgtttgcatttttgggtaatttaactgatcttttaatggcggtttggatttttgaataaataccatgcttttggaatctacatagatcagctgtaattgatattttttaaagtcatagacattttctttgtcatgtttgtatcaatacaatcagctttaacatatcttttgttttttttctgagtcttcctgttttagactatgtataccaattgatgtattttgtttagcaattaactctttactgagaaatttataaaataagtttgttctcaaacatagaaatttactttaaacttttgcatccactatgtcagattgtgactactaattatttgactttaagttacattgtctctaagggtgacaaatgcataataaataatgtttttttcccttttcttcctagtcaaaagatttggtaaaaacctaccctccctttgtaaacttctttgaaatgagcaaggaaacaattattaaatgtgaaaaacagaaaccaagatttcatgcttttctcaaggtaatgtgtgtttctttcaaataaaaatttgagaattatt

SEQ ID NO: 109517 - DNA, 2607 bp, Homo sapiens
gtgaataatgtagacttaagaaaaatttaaggtgggatatataggagtgtgtagaggaactcactttttatgtaagatgttaaccactggctggccaagaggacatttcaggccctgaaaaattattcagccaagtaatcagccacggagaaattccacttcttctctattagtttgtatcacagacactaatgataaggtgtactccagtaaaagtagggcatataatcttttcagaaaaccttttttgaaattgttgaataaattgttttcagataaaccaagcaaaaccagaatgtggacggcagagccttgttgaacttcttatccgaccagtacagaggttacccagtgttgcattacttttaaatggtacttgtctgatctgtttcaaactacatcagatattttaatggaattgttttttccaaaaaagatgaatttcttctcatttttagagtttcttagatttcagcattaaagtttatatatgttttgctttatggattatcttaaaaaatagttactggtgctactaaaattcagcctggcctgaaatattttatttgttgattagtagtatatattttgtcttttcatttaaaatttttcttaatatttcatggtgtgtcactaattcaaaatcattttatatccaagtacatacaaaatttgcccacaaaatcacaaggagaagataatttgtatgtcccgacttttttgtagcccttttttgaattttagtaaagttctatatacttggctttatgcttactgtttttgaccttagattgttcagaatactcttgaaacatatctatttattctagaactgaactataggtatcaatagagttttacagcagataatttttatgaataaattttgcctgtggtaaaaaatgtgtatgtatattttgttacatttagctggctaaggacagtatcagtttttattttattcttaattaagtatgaaaacaaaattatagccggtaatcccagcactttggaagaccgagggtaagcccaggagttggagaccagcctgggcaacattcagggaccctgtctctaaaaataattaaaaaaaaaaaaagaaggataactaaattataaacaggaaaaagtctataataaaagatataattcctaagctaaatctacactaatatatacagcagacaaggaggcaaattttgtgactgtttaatctgttattttctgtaaaaatcttggttagtatatgaattatagtactaactaaaaatctgacaatttttttgttttttagagttatctaatacagttgagaattactggcttataaaatgatttgtccactatttaaaactgttctgttttgcaaattataaggagaatatatgaacaaactttaggtttccaaaacattgtggttttcttctgatttgcataccttcattattgtttaagtacttgtagaaattcgtaaatgttacaaataaaatgatttctaggctttattactattattccacatgagagattaggtggacagtggtactagattaaacctagatttgataagaatatgccaaggatggcatagggaacacaaataacctggattagaagagtcaacgtgttaagtataaatctctaaggtaacaaaatctgtgcttaaagataccagatgctctctgtgatgtagccatgggccccagtatgaaatacaaaatacattatgatttctgagcttattgaggatcatgtgttttcatttagcactatggagagactttgaggaatttaggagtccccaagcattacttgaagggattggaatagcagtgtaagaaaatcaggattacatattctgaaaatttagtcagtaaaaatggaaaccttaacagatgtgtaataagagagctttttagggaacagtgcttaaaactttttaaaaaataaggattgaatattatctttaaaaattagctgtatcaagatggacagcattttagtcttagatgagaaatcactgaattttttatgcatggaaaaaacattgtattattacagatcttaagaagcatacagctgatgaaaatccagacaaaagcactttagaaaaagctattggatcactgaaggaagtaatgacgtaagtgcattattttcaatttttgattgtgccttagatttcgaatggaattgatagaaaactagaatcataaataggaaaatatcaatagcaaatttttgtaaaatgtctagattatttttctaatagtgtagttacacattaaaatgaagtattgtaagaatacattcattaatcaaaacatttatttctaagctattaaactattgtgcacagagaataatagtttagaaacttgaaaatgttacaaattccctaataggcattttcttcatataactctagtcatagcttgtttctgtcttcatattaatgtgtattgcccaaatgtaacttgagaatgtgaccacagtgaaacgaaaaggtttataatactttttcactttaatttttaaactttttgttttctacctagagttctgtggaattaaattggcgggattggttggaaatgtattaaaagt

SEQ ID NO: 109518 - DNA, 1226 bp, Homo sapiens
tacaggtttagtgtattttagaaagtgcatagggagtatagtaaagaatatagaaaggaataatagtaaaacatacttttctgaaggagtctatggatgttttgtttttgtttttgtttttgtttttgttttttttgagatggagtttcactcttgttgcctagactggagtggaatggtgtgatcttgactcactgcaacctcctcctcctgggttcaagtgattctcctgcctcagccgccgagtagctgggattacaggtgcctgccaccatacccagctaatttttgtatttttagtagaaacagagtttcaccatgttggtcaggctggtctcgaactcctgacttcagtgatccacccaccttggcctcccaaagtgctgggattacaggcgcaagtcaccgcacctggccggaagttgcttgtttgttttcctcatcctgggctccataggcatggaaacctttttaatgtaatgggatacttttaaggaatattttaactgattcacttatcaaaataagacattcacatcaaacacaacttgtgacatgagttgtgtttgttgtagttttcatgttctattttaaaagttttaaaaataactatttttcaggcatattaatgaggataagagaaaaacagaagctcaaaagcaaatttttgatgttgtttatgaagtagatggatgcccagtaagtattcttctttaacaattattaatttattttcttcttgttaatgaggtttctgtggttttaatataaataatatcttggcactactttcttttaaattacaacttcttaaaaattacttgataccaagtgatctcttttgttatattttcaacctatacaggctaatcttttatcttctcaccgaagcttagtacagcgggttgaaacaatttctctaggtgagcacccctgtgacagaggagaacaagtaactctcttcctcttcaatgattgcctagaggtaaagatgtacttcacatagtataataacactactgatttttgtaagttccctgaatatttaaaaccaagctttaattgaagagtaatgtagaattttaaataaactcaagtaatctttttttaaaaaaatcgaggacaatttatgatttaatactgttaatagaatgcttttagaggaaggtctaataagaagtgtaagttttcatgacttcaaatctaagttaaaatgaaaatttatt

SEQ ID NO: 109519 - DNA, 2801 bp, Homo sapiens
tttcttttctttttcttttctttctctttctctgtttctgtttctgtttcttttcgtttttcttttttttttcgacagggtcttactctcattgcccagcttggagtgcagtggcaagatcacagctcactgcagccttgacttcctgggctctggtgattttcttatcccaacatcgcaagtagctgagactatagacactcgccaccacaccagtctaattatttttagtagagactggttttgcatgttgcgcaggctggtctcaaactcctggactcaaacaatttacccacctcagcctcccaaagtgttgagattaccattgggattacaggcgtgagccactgcacctgcctcctttttctttaaagtcttatatgctttccttttgtcctttcctacttctatcaaagtattgccttcttatatatcatatacattattatttatagtatagaatacaagggaatcttaaagagcggttcatgtgcagaacagttacaggtataataaaatctcaccagaaattcacttgtgttaaatgcagagttttgttgttatgaggctaaatgaaaaatacttttttttggtcaatcatgttgcaaaaagcacaaaagtaaagacagtcaaactactgtacacaattgactgtctcctgaagtgagaaagtcaaaaaatcatgagacagataattctcaactacctgtttccctcataaaaaggactttagcctgccctgattgagaacagatgctaggcagagtcaattttcaattatattttatctggattcgcatcatcatggggttttactgtatatagtttctctgtactttatttgtttgtttccattaaagcttttataggtttttcctgttggagtccctaggtcagcttgctccattcatctaataggttagattatctttatttctttgctaatccattctggtttttatcccttattcctgagagctatggcttactttaaatttttgatcttatatcccctccagattcctcgcagtcttctgtaattggttcattgacttgccattcactttaatttctggtattggtctcctgtagctcccaagtccctggcttctcattttccctaccttcttgaatctattgattttttttttgttctatcccttttagcctccctgtcttagaatcacttcaacaaaaactgctttatttataacattaaatttggacttcagaattcataataaatataaaataaaaacttataatcttaaataaacttattctttagcttgtttgtttaggaaaaataaacaaaactcttagtaaattggcaatggaaattatggtacattcttaacctgataaaaacctatagccatcatcctatttaataataaatggtagaaacattcaaaatgggtaaaatctatgttttcttaatgacagattatgttatactgaaactaatttgggatttaaggatatatttaacttttaaatgttttatctgtattttaagggttttttttaaactctgtactagcatttgtcatcaaattaacacttgttattgtttttcctttctaaaaattaagcttaaaatcatttaattgttttgcttagccaactgttcctcttctcctgaattctaggagtttcatttaagattctgtcattccttgatcctgtcgcttctcatcatgcttctagttctttcatacctctgggaccttttgcaaaatatcccttggccttttttcctgacttttgaactcttcttatataaacatgaacatttctgctatacaattacatgtttgacttttgttacatagtaactctgcttataacaactttgtaacgaataataactaaataagttatatatagatttatgtgattagtgctattttattttttaagtatttggtcctttttcttcattttattgactgatacttttttattttctataatcagatagcaagaaaacggcacaaggttattggcacttttaggagtcctcatggccaaacccgacccccagcttctcttaagcatattcacctaatgcctctttctcagattaagaaggtattggacataagagagacagaaggtatgccggtcggatacattcttggttatataaaaatagtttatattcattgtaggtttaatttactccattttggcttttttaaattggtaaattatctttaaatatagttggtcagactgctaaagtaattgttcttgcacctctatcccatctccatctctaggaacagaactgactttttgttttctcaaatgaaagtactatctcaacctataggataccctcatctgttaaaggtcaaagagcttttaaatggctatgtattaaaatagcaccctagcctagcctattgccacaccaaaatttatttttttggttccttcagaatacaaaataaccagtctgttacctgcacccctcatcttaacactttcactgttggccaacagttgcatttttagggctatgtttaaggtacgggtcaggaatagatgtgggtgcaataaataaactcagagtaactggtagacttgatatggagtcatatgtgtattaaggaatgttttactctaaactttggtagtgttacagagcaggttctctgaaggcctgaaattgctgaaaatttatacctacctacaacagtgtcatctgtttaattgacacccagtggtgtatgtgcatggccatattttggatgttaggcatatgtttttacaatatttagctctttccatta

SEQ ID NO: 109520 - DNA, 1916 bp, Homo sapiens
taatcgactttctccccatggatgtcatgtcccatattttgttatttcagaatctaaggattaaagtttaaatctattgaagatcttatgtctcagaatccttatgtatgtatttttggtctcttgccaacatgtaacctttaattgcatggtctgtactctaacattcatatattgcctaagataagctggtagctttgtggaggccattatgatttctgacctctaatgtcagaagtataattttattaataagtaaatttaagcaacgataacctttcccgaagtttggttagtttaaaagtaacttgataattaaatgccatgtgctacaatttagtacttttgccgctacctttatatttcttttgaaatttttcaaaacttttcaaaacttatcctacaatggttaaataaatcaccattggctacttaagagttgcaatcttcattctgagtttttaaacttgtaagtagaatttctaactgcatgagaaatagaccaacgattggacatatattaaaagtttgtgcttgtatgccaataatatttataatgaagttagtatgatttgtatttaaaactataattattcttccatttattaggcatacctagtaagttgttagtataaatgtctgttattgataccactttaatttggccaaatcagaagctctaagttatagagtttgaggaaaacactgaggcacaggctaaagggaggggacacgtgatagtagataggatctgggggtttgaagactagggtaagaggagagcttagggaaaggggagaagtgtctcataactcacgagtaaacaggttaattggcttaagatgtcaaatgctagaaaatttcctgggaattaacacccatgaataggatttcaaaatctatagctgaggctcagtttctcctgaaattaatattatatatctcagtgggaaagattgactactactttttaatcttgaactcagcaggtctgtcttcaggtacatgtgaatttggagttgattgaaaaactcctgcccttccaaagcttctttaatgcttgacatactttgaataagtcagaaaatgtttttggaattatagtaagtatctattaaaaatgtgtgttctcaagtccagcagaacttaaaagtaaataaaaataaaaatgagttttggctaatctatcaattttacttttattttattttattttttcgtccttgtcctggtacatattatattttagaaatttagggaaatagactaaaaagcagaaagttttttgtcttcgttgtttgtttttaaagagagaatgagaattattgagaaagaatgaataacaaataaacctaggactactgaagataagtttccccgactttgcacttttgcctgtgatttaccctatctaccttcctctgtgcggagagcactaaaggaagtacttcatatttgtatcttagcaaaaataatatattttattatattcttagccactagtgaactagcaatatgttcaccctttcagtcattctgaactcagaatcttctagaaaggtaaaaaatcttgtatctatctttccctcccctaagtcagaagcagtttgttagttcattgagagaaagcatgaagcccctggttccatttttagttcattgatggttattaatacttagtcatagttaagataacaatagaaaaaaatgagaagctcctttattagcatttgctaaggatttaaatttcaggggccttcattaaaagagcatttcagcaaaattaaacacacttggagtttagtttcattacatataaaaatggatacattttacatcaaagagtaacttaccaatgtttagtttaatagtcatgctatgatttttactgtctattaaattgaaggataatattt

SEQ ID NO: 109521 - DNA, 1034 bp, Homo sapiens
aaattttgcacccaatttctgttcattgtcaccctaccggctcttgatcacaggtttagaacctctgatttagaatccttacaaatgctgattgaggacaaaagggtaaagtaggagaaagtctaaatcttaatttgagtttatgtcaagaacagtgtttgtggtattggttttgtagccaactttatacttcagcattaagtttaagtctgctaaatttctaacttgtttcagagttgttagattttattttgaggtctatttccaattgctttggtatccatgacccttacaacaaattacacatttactgaatgcttatttttcactatccttaagtcagtacatttcagggtagaagttatatcaagcacatgaaaagtcttgagtagcttcatttataaatactcccatatataaatatgcttaaaagtttgatttttagaaacagttgtgtgtttttaagataacaaaaagtattatttttcaataggagaatcttatttatactgctgatccagaatcctttgaagtaaatacaaaagatatggacagtacattgagtagagcatcaagagcaataaaaaagacttcaaaaaaggtgagttttagtgaaagtattatttagcacatctctaacatattttccagactatattcaaataatattgctgcaaacaccagtataaagatagtttataaaacaaagctgttcttcggttctaggaaatgacccacagaaacaatagttttacttcagtgacttccttgccacagtaactataacttgttatccctcccgttactgtaataatgatgcttctgtgaactatcctgcagtagaaatgtactgttggtgttttagatttaaatatgtgtgcactcatcttaaatatatcgccacagttattttcagcaaagggcacacggtagtcaggggacctgactatctattcctgactctagaagtctattttagtcttctcgtgatgaagataacttacttaccttatcagagttgttgaggattacat

SEQ ID NO: 109522 - DNA, 1647 bp, Homo sapiens
ggggctttgtattttaataatttttgtatctcctatcatttaacatttatgatgtataagagaaaaacatgttagattattattcaagtgaattccttcactctttcaataaagaaatggaggttgaggggatttttggattagaaatctcacaactagactggctgaatcagagaagaacttaggtctcttctctcccaggctagatttcttttctcctcctccttccattggactgcagtgctctctaaatgaaagtttaaatagtctacaaatttcctcactgttttgtgccaaagagattctaatcctgccacatagtacagtagaaaaacttttgccatatatttggcttttttatgtttaaatattctcatcagctgtattgaatttgtctaggtttaactaattgtaacttaaactctaggttacaagagcattctctttctccaaaactccaaaaagagctcttcgaagggctcttatgacatcccacggctcagtggagggaagaagtccttccagcaatgataagcatgtaatgagtcgtctttctagcacatcatcattagcagtaagttattttgatttaatggggtaaatgacttatttatgaagttgttatggaatttgttaacttctaaaaattggaaatatttcttccattttaaaaaaattttaataattttatttaacccagtatgctaaaatattatcatttgaatgcgaatcaatgtaaaattatcagtgagatattttcattctttcttatgtactaagtcttaaaaatgtggggtgcaccttatacttacaaagctggctgcatttcagactggctgtgtttcaggggtttcatagccacaagtggctagtggctcctggaaggacagcacagctctgtacactagcactgaagaatcagcatggaaagcatgatgctaggggagaggagttctcccctagtgcactttaaaccttggcatcctatcatacgtcattttttaaatatttatatccaaacctctaacctctttattgggtaaaggcaactgagaaaaccctactatgaatgaactagagacatacttaatgtgtagtttatttgataggaaattttactgggattgaaatatgttctaaaatctctgagaaaagaaacgcgtttcaatctggcctgtcactttactaatgtaaatagctatgattctgtttatacagatcggttccaatgacatagcagagaccgagttttattccttttactatttttgtgatgagtagaatataatctctgaaactgtatttcagaggatgatacgagttctaaattcatgtatattgtatatatatgtatgtatatttaaagtgtttcctgaacaatccaaatttccaacagtttcagaattattattagatatttaatactactattactaagtatttgagtgaaatatctgttctttataaaattattaacctactgaagttaagaaaagcaagtgactgtcatttcttagctgtgtgtcctgtagcaagtttcttattctctcaactgcatttttgcagatgatgttatatactgaggggcaatttgggtggtgattaagagcatggactctggaaccctagtgttcaaatccttgctct

SEQ ID NO: 109523 - DNA, 1063 bp, Homo sapiens
atgcagataaacattaatttgtgaaaattagattatagctttctcgaagccacctgtagcaactattgtaaacattttcatctttcaaatgaaaataaatgaattttatagaaaattttagaaaattaatttatttatggttatgtcacttttaatagacagcatatgtaagaagcagctaaaataccttcaagacattaatgtcatcttctcaattgcttgtttctgttctaacagattacccattctgtttccacaagcaatgtaattggatttactaagcatgtttatgttcagcgcctaaactctactggtgggcgctctcagtactcctggtttcaatctgtacgtcattctgctttccgagctagtttttcagagatactagaaggaaatactgatttttcaaatttcaaaaaagttctttccaagtcatctttgacatttgtgaagaattaggagatttgccaaccactaatggaaacaagcctcatgaagtttaatgtgagcttattagctatttaaaatttgtatttgcgggaaaaaaaaaaggaacatattttttctccaaggaatcacttatttggtgggtgggaactttggaattcacaatgttatgactgctttgaattaataacaatttaggtttaatagagtttcttaagtccagaaaaaataagttccattagaaattttcttatttaggaaaattatcattttaaagaatagtaattgtcatgagtagtggatttatattccaaatctgattcttaatgttagatttatagcatttatagaaaattatgcttttaatatgccaaatcataaaagttccatgtgaggaaagtgtaaacttttatattatacattcatatcatcattttgttgatacttgaatggttatacttcatcaacccagctttttaaatgcttcattttacaaccttgttgatgagaacttaagccaattaccttactagctcttacagttagccatttatatatgttaaaacagtagccttataatttattttgatttacagttattcttgagtctttgcat

SEQ ID NO: 109524 - DNA, 2191 bp, Homo sapiens
cgaactcttggccttaagcaatcctcccacatcagcctcctgagtagctgagattacagtggaacaaaattatatatacatatatacactctgacactcacatatgtacatctgagttgtacatatattacaaacactctttgagagtgtatgacttaattttagaaaattatttcccatgaagtgatttcattccttttaattctgctttatgaactaagaagaaaccttgtttgccaatttataattttttcttttataacctgaaacactgaatcattaatatttcataaaacaaagttaggtatcactactagcaataggccaatatctgttcagttgagttaatatctagttaactagtctagctatttggctttgttctcagaatgctataatagttttcttttttctcccttttccattcccctaactttaaagagtttagaattgtcagatgtcttgtacttaattgttacagtaatttgtaaaatgtaaaaataataggcatgatactgaactgtattttacaatttttttaaaggaaaatttaaaatatgaaatgtttgttttgtcttaacagggtatcccttctccctcccttgtcagccttccttccttctttgaaaggagaagtcatacgttaagtagatctacaactcatttgatatgaagcgttaccaaaatcttaaattatagaaatgtatagacacctcatactcaaataagaaactgacttaaatggtacttgtaattagcacttggtgaaagctggaaggaagataaataacactaaactatgctatttgatttttcttcttgaaagagtaaggtttacctgttacattttcaagttaattcatgtaaaaaatgatagtgattttgatgtaatttatctcttgtttgaatctgtcattcaaaggccaataatttaagttgctatcagctgatattagtagctttgcaaccctgatagagtaaataaattttatgggcgggtgccaaatactgctgtgaatctatttgtatagtatccatgaatgaatttatggaaatagatatttgtgcagctcaatttatgcagagattaaatgacatcataatactggatgaaaacttgcatagaattctgattaaatagtgggtctgtttcacatgtgcagtttgaagtatttaaataaccactcctttcacagtttattttcttctcaagcgttttcaagatctagcatgtggattttaaaagatttgccctcattaacaagaataacatttaaaggagattgtttcaaaatatttttgcaaattgagataaggacagaaagattgagaaacattgtatattttgcaaaaacaagatgtttgtagctgtttcagagagagtacggtatatttatggtaattttatccactagcaaatcttgatttagtttgatagtgtgtggaattttattttgaaggataagaccatgggaaaattgtggtaaagactgtttgtacccttcatgaaataattctgaagttgccatcagttttactaatcttctgtgaaatgcatagatatgcgcatgttcaactttttattgtggtcttataattaaatgtaaaattgaaaattcatttgctgtttcaaagtgtgatatctttcacaatagcctttttatagtcagtaattcagaataatcaagttcatatggataaatgcatttttatttcctatttctttagggagtgctacaaatgtttgtcacttaaatttcaagtttctgttttaatagttaactgactatagattgttttctatgccatgtatgtgccacttctgagagtagtaaatgactctttgctacattttaaaagcaattgtattagtaagaactttgtaaataaatacctaaaacccaagtgtattttatgtctcatgtattaatttcttcaaggaaattttcataggcaaatatgaatgcttgcatcaacatatgctcttttgtgtacttgcttgcttacttgtttattccttcctccagtaatatttttgatcattttattttacgaggctatctgtaagttaggaatttttaatctggaatctactttgagaaatgtagatagtgaatcctataatgttttatgcaaaattttgtgtttatgtgcatatatgcatttttctggcagaaaatacacaattgtt

SEQ ID NO: 109525 - DNA, 1030 bp, Homo sapiens
cgcctcctgcctcggcctcccaaagtgctaggattacaggcgtgagctgctgtgcctggctattttgtttctgtatggctttctgtgaatggtatccctatccactccaccacctgagtcagatacctgagaattctcctaggcataggcttatctttcttccttattcctcatagccaaggtgttgatcccacgtccttgagatcttgtgaatgaataatccattcccttgtctccattttcattaccatgccttatttcatgtacacatgactttctcctggatttatctggtaatcttcattcttaaactaggttccataaaggcagaatctggaacaaagacttgtgttaggtttatttagaggttgtttatcatgaggagttgaagtgaagaaacagagaaggaaggaatgccaacacggttttgctatatcgggttagccactaccacaacccactgttgctgagtcctgtgggaacttttcatctggggtgtgaaagggagaagcattgatcactcagcttccagcccagttgctcaagaacggtccaataatagtaagtccctggcaattccagattgtacttgcatgaatgcccagaggtattgatactccaaagcctcagaaattcctgggacaggagtgagaagtggtggcacatcctccagcagtggctccagtaggaagaggtggggctgagagggtttaaagtggcccataagacatgtctggttcacctttcaactgatcttcctgtactccttctgctagccactttttatagccagaataatcttaaaacaaaatgactatattatttttctgcttgaagtgttttgatgtcccttttagagaccttcagaaaaatattctctccttagcacatcatagaagccctccctttattatctggccctcttctacctccctaaaagtatgacttctccatataaacccttcccagctctttatctgtgctgtaccctctacctagagttaccttcctctccttttgtgcttgccta

SEQ ID NO: 109526 - DNA, 1049 bp, Homo sapiens
ccttccctccctccctccttcctttccttccttccttccttccttccttccttccttccttccttccttcgttctttccttccttccctcctttctgaattctgggtccttgccttctcgtttggtttcatctttcaataggcttccatcttctttccatctcttagaaatgtgtttaaacctcttgcctactgatgtatcccccttctgtccacttctaccggattatttcttcacactttcttggaattattagataatcatttgtgcttaaactgcagtttgaattagaaaccctatttggtccacatcctaaatagtcaaagtgatatgtgtatgtatatacgtatgtgtgtgtgtatatatatataatgtatgtatgtgtgtatatatatatgtatataatcttaaatgtgtacaaatagcattgtcaggtataaacagcatttgcttctttaaaattaaatggcttacacatagatgaatatttacttagaaatacctaaacattaaagaaaatgatttcagaaccttattcgccacctcctacccaacccaggctaataacacagagaaaactttgttatcagatccaccattattaattggagtcctctatcaacttaatcacacttttagcacaataaaaatggatgttcatattgatgtctttaaggcaaagcaagaccccaaagcatcttcagaatcactagaacaaagttaaattatgttcaagattaattttagtgcaaattattttaagctaggtctataggcatttgtgataaatgtatttattgccctgccacagtacagaaagaatttgagatggcttacataaatacatactacacaaaaagataaataagaacaatgaagaaaagagtaggaatggtaggatgaagctgggattgagattgggacccaaagttacttcagagtgaccggtgcatttgttaggaatgtaccacacattttattccgagcatctaacggctgaccaaaaccatttccacagccagcaggtcaagttcattaatccacattgc

SEQ ID NO: 109527 - DNA, 1071 bp, Homo sapiens
ttaattaggtctgtgctaaatgatatacacagaacttatttttaagattaagtgaaaatggtagatttctcctcagccaaagaaaccgtgttatttcttggtatcagacacttattattaattaattagttctccgaagtggtatgctggtgtatttttaaatcggttaagcaaagacatactcccagtgtcctgataaggagaattatgaaaatttataattagttcatgataaacagcttttagtgtctatcaggtctcctgtagtaacttagtaaaattaagggcttttagatttggacagcaaaagttaaccaaagagaagtcgactcagacattactatagaaaaaaagtacatagatactttagcaaatggatatacttaggaagatatacttagccatcatatgttgctatcatttttgaaatgctaagagtgcaatatttaactttcatatctattatgtgttgaaaagtcttttgtggatataccattgtcatacgtctgtggcagccataagcatgttgtctctctgtggctacaatatgcagatgtatggtaacagctccatgtaacattttaatggtgccttttctagtctactgtgacaagtaattctactcagcttgtcagcgatgacagctgagactttttgcttagatgccttgacagtgcttgtattaaacagccagagccatacactccattaagtttccgtaaaatgaactgcctgcttcttgctgttttgctgatagtggcagcagttgtaagctaatcctctccagttgtggattgctcgactgagtgctttcactcatcaacaggtagtagatctcataggtttagtagagtggctataaggttgatagctatgataggcagacataatttatctcaacacatttttaaaatggctatttactctaaataggctgcaaatctgtccctaactaggagaaaactgaccttctagatggtgaattgatggttcttccctaacacataattattcataggctcttggtacaaaagacataaatatgggaagggtgtgtctcagaataactat

SEQ ID NO: 109528 - DNA, 1047 bp, Homo sapiens
tcctataatatattaggcacaacttttggagaaggcagttgatatattctgtagcaccttgcaagggccctacataactatttaaacacgtttcataatttctacagtgactcgtgccttattgtagtggataacttctgtttaatttcaaaatatattttccctttgcctaagcccctcagtcttctaacatatacaaaaccaaaaaaccattagaaaattcaaggtatttatattaaaatgttaacattctttatgatgtttcctttactttgagttttcattaggtgacccaaccatactttaaactgctgttagtctattaggcaataaaattgtttataatccttgctgttttataatctcttttaactgcttctcttttctttttcttcagggttttaaataaagacaaacaaaaggatgtgggatttacacctggctttttgtagccatgtgattctaccacctgcctttagttccctgcttcctctcctgctggacgccattgctattatttccctgcttcactgtctgccctgtgtgtgcccttatatctctcattccccatcctcacttctctgcttccagtgaagaaaagggaaaatctaaaatcagatttaacattgagagccagatgacagagtattttatcgtataatccaagcactaaaaaaaaaaatggcactaataattgacaaggcatgactaaattgccttgcctttccatgaaagaagaaaagagacctcctagaaattcaattgattattttaattctttttctgatcttatgattctctccctccttgatacctgtatttgactaagatcaacattcatgtgattatatgagaattctgtcaaatgggtaaacagacagtcttcttaatgctaaagcaactgtgaaataagtttcttttcagtttatggtaaataaaaaagcaagtttccctgaggactggcagctcagatgtgagtgtgtgaatttttccccttcaatgtttcttaaaagaagtaagtagagaagttcgctgtagtacgctaca

SEQ ID NO: 109529 - DNA, 1063 bp, Homo sapiens
acatagtctgaaaaataaccagctaacatcattatgactggatcaaatccacacatatcaacattaatcttaaatgtaaatgcgctacatgccccaattaaaagacacagagtggcatgctggataacgaaccaagaaccattggtatggtgtcttcaagagacccgtctcacatgcaaggacatacatatgctcaaaataaagggatggagaaaaatctaccaaaaaaatggaaaacagaaaaaagcaggggttaaaatcctagtttctgacaaaacagactttaaaccaacaaagatcaaaaaagacaatgaagtcttttcttatccatcctgtgaacacaatgctcatgctgtcttaatacctcagcatttagtctaccagtttccacttccctgctgccttcttcactgatatttctttaaggtgtattgtactctattacatctatgttttatttaccttatcaaaataccagacatctgagaacaaaggtctgtattatttttatttgtatctcacaccatataaatcactttgtcttgcagaaagtaggcacatagcaaatattttgttaagttcatcaatagatctatggtgatatggaatggaaatgcaaaacttggattacaatggttaaatattaaagaagtaaacttttctatgtgcagatctttcagaattttgatgtgttgagaatattaatattcatgttcatgtaagttggcatttaacagtttggttcaacttttattaagctaacaagccctggaatataaaataagttttaaaacatgggttgaagtttgttagcatctaaacagcatgataataaatatttaacattatagtaatgcaaggtgctttgcatgccagatacagtgcttttagcaggttatctcttattaaacaatcacagaaccaacaatattattcaagggggaaagtgtctgcaaacacaacaaacactgtggaataacttctaaaaaaaaaatacaatacaaaagccaaacacagaaactgtggaaatcattcattcctttacaagatggtaagtggtggt

SEQ ID NO: 109530 - DNA, 1071 bp, Homo sapiens
tgtgtgtgtgtgtgtgtgtctcgtttatagtggggtcacatagatagaaatatagatcttagagaaccaaaaatagctcattggtaatttatccttcattaccccatcttttcaaccccctccagggactccttcatctaattctctaggaactgtagctcattaaacctgtgaacttgttttacaaaaaaatcaatagagtattttgtaaactcacaaatatttgagttgccttgtgtatatatttttaatagcaacaaggctgttcttcataggcaaagtgaagtgaaggagcgagtttatgaatttaatgattatagatggccaatctgaatagttcaagcaaacattatctcttacacagtagaaaaattttctgcttgaattactctgacaattgcctcaggtctccactttacctgagtaggcagtcttcagctgtctctatataatcatagttaaattagacttgactgaaagacttagccctctcaggaattttatgggaaatttggaagattcaaagggttaggcagagccttgtagctgggccactaaagaacaaagtgacagcatttttgtagtttcaattaaggtgtatgttctcatgtcagaggttaagttttcttttttgttctgtctcttaaaaatgtatattttatcattgaaaatacaaacaggaatatcttttagcagggaacacaatattctgcctattcaatattcagatattttgatatctgacaacataaaaatgagttcaagtaaaaaatagtggttcattgccctctcctgtcccctgaacccagtaacatggtactgtgtacttatgaccttggatatcatttgacaatgagaaacacaacagggactgtaagaggaatccttcagagtcagcaataagaatgttgtgctacatgcacacgtatgtttattgtggcactattcacaatagcaaagacttggaaccaacccagatgtccatcagtgatagactggattaagaaaatgtggcacagatacaccatggaatactatgcagccataaaaaatgatgagttcatgtccttt

SEQ ID NO: 109531 - DNA, 1050 bp, Homo sapiens
gcttccattgtggaagtgtcactctccaggaccttgcaggactaggggagctgtgtgagtcatgtggtctatggaggtacccagactttggagtcagggagatttaatcctgagtcccagcccagccacttagtggatgtggggctttggacaaattccttgacctagaatggtcatgtaaagtatctgaaagaaaatacataatgatattgattgcaaaaacagcagcagttcttcattcctccttgtatacatacatgtccttagccacgtagttttatagctccccccagtacagaatttgtttcccaaaacttcaatctcattggccttatttgctctggccaatagaaagctatgaatatgacagtgtaccagtttgggatctagagacaaaagttgttcaatgtgtctgctttttctttcagaactctgccatctccacaggaacaaaccaatgttaacctgctggagcattagataccatggggaggaaaaccaaagcacctcagttgacagccagctcaccactagaagcagagctacctattcaactggcagccaaccacatatgcctgaaggagcctagctgggaccagaagaatggcccagctgagcccagccgaaatagctggccagctcagtcatgaactaataaattttggggtgtttgtttatgcagtaacagctaactaatatgtatacccagtgcagataggatgtcaagattgaatgacagactgattactgtttacctggtaaacagaaggcaccctgtaggtactgatattcttcccccttttttaaggttgtatctcttgtcagatgttgttgagttatacagaaatgcatgtagacatgtatgcatgggatgtgcttaacctcacatggtccccatgccacagaaagaaccacagtgtgaccattaggaccagggtcaaattacaaaataacaagtttgcctttaacctatttcctccccatctaaattccagaggtcaaggctgtggataaatctgaagacctgggctcccttctctggggccttat

SEQ ID NO: 109532 - DNA, 1064 bp, Homo sapiens
ctgttgtaaaagtgtaaaccagcccatgacaggtttttgtacatgttaaagaacttcattgttcagttttcatgattattgtgtaaggaagactgatgtagatgttctgtgctgtcctggaccatgttaattacacttacgacgtattttagttccacatcacaatgatttgtccccagtgacccttttatcctttctaggcacatttcttgttgttgttgttgttgcagttcccctttgcattgtattgctttgacaactgtaatttgaatcagatctgaaagaggtccagaataaaatatattttgatattatgttggctgtgtacatatataaaacctttgatgtctatgtagtttatatagactatttactagtcaggtaaagagagagggatggtatttcttgtttacagtttgtttacattttaattgcttttacttctccagtgttctattgtagaataaacctttttttccaagttagccttcataacctataacacattcattctctcccatactggtgttactgattaataactgccatcagaacccaaaccactgtttttcataaacgtattgtttcccaagatatatactttaagcccataataaaattacaaattttactatttttattacttcttgcaggagataagatttttttaaatgaaggggttatttactatttttattaaagtataatagagcatctaatcagctaagggattgtaatttttaattcttttgaaaaataaatattgtatttaaaagacgttatttcacagaagctgaaaaagagaccttagataacatttgtttggttagccacacggttgagcacaaaacaatgtgtagatgtgttgaagattagggcaggaggctcaacttctcggtgacctttttttgcttcacaacaagccaattatagttgaatcattttctctcttagctagttgttactacaaactttataagaaaaacaactagacaccttctagttttaattaataccaactcctttagagttagagactttttaaaaagaatcattgagcatat

SEQ ID NO: 109533 - DNA, 3198 bp, Homo sapiens
caatctcaaacaaaagacttgcttcaaggtgtttttaaatagcagtgattcagaattttttttaatgaaagtataattgcactaaccttcttcctgctgctctgattctgcatttgtggtacttgtgactacgttttttcaaatatagatagatttaagctgctaatttttttttttttagtaatcactactatatcatgtcttttactctgtttataatatcaagtattttcttaaagatatagatattaaaccttgtgctcatgcaacttagagtaacatatacagacaaatgattgcatgaggccatgtttatatgtgtgactaataaggcttgtcatgattaacataatccaggtatgtcatttctgaagagaatagtcatcaaatttatatctcgaagattttaattaaggaattgcttattgttgagcttagcaaattaataacactatttctgtcactaattattttgaggccttttagtactaaaattttaacctgtgttctaagtagaaactgatttaacccaagtaatgcagctttgattgatttcagcattcgttgctttgctatttttacaaaacagcattgattgaagcaagtcttggttttactaaggtagggtagcatttgctattggtaaagagaataaatacacttaatttcacaatacattgttatatgtaccccagttgttgttagtggggactatgatactgtaataatatttttaaaaatttacatcaagagaggcagtcattcacgatggttttgtgccagctctttttagggttttggatcacattagagatatttagaacatattaccctgtgacttacgtaggaaacctaatatgctgagtatctggcacttgaattcctgcttttattgctggaggtccacatctgtggttgacctctgttattgtttaaaaaaaataaataaaaattaaaaaaatctgtgcaataattttaaaatgtgctcccaggaatagacacaaatgttttgagtatcttttaagctgcattttcctttagtgatgcatttgtcaattgcactgaatttaaatctgaaagtcagaggtgattattgatagtacttttgtattttgatatggacagtttattcatttgcatacagttattgactttttcccagctgattaaaagatagtcaagaaattctgcaatatagctgccaaaatagacagctacatttttatgatattgtcatcttttctgttttttttttcttttttttctttagctattttacttaagcataatagccacaataggacatataaaagattataaatacagagctttattatcctgacgtcttgggtcttttaagtatatacttttctgaaaggtatccattttgtaggcttgggttcttcatgagcatacgattgtttatttttgctgctgttctcaacatcatcattgcctgctgatgtgccacgatgctgctccaatagacagcaataagattgtctctaatttgagcagtaacatgattgcaagagaccaagtttcacagcttgtaaagttctgtatttgggattcttgcttatttttccgcctgtgtttttctgagaacttattcctgatgatcaattgaatccagtagtttttctatgctatttgttgttgtataagctactgtaagaaacttatcataaggaaaaatagaaaggaaaacttgaatcaatactcattgattaaaatggaataaagaaagagcagctgccacttttaaacaacataaaggaatatctttttttgtctccgtgtaggaaatcccataagttcttatatttgttccagttcccatttcctgccattgaccagataacatcattgactttcaaatgacttttagaagtgataactcttaatttcctaatagatactagattgtattgaattctgttttaattattctctaggtaagtatgttttaggattaaataccttttacagatactgaaagtgcctccttttgtggtgtaaaaaacaaattatggtgcaaaaagtaatcactagattgaaatacatgaaggttttttgctttttgacatacgaaaatgtcaagagaaaggccaaagatttgtactttttcacttacaaagcactcctttttcccttaaacttctttctgtcaaattagatttaatgagagagtactatttttaaggagctatctgtttatgtagaatgattttgttaagagtaatgtaaactattattgagtagaggcctaaagaggactgtgcatttttgctatttaaaggaatcacaaatgatcatacttaagtgagcaaaaatgacaagttttactagctaagtagagaaataaatctcaaatgcagcgctacaattttcattatcttaagtacattgtacatttctacagaacctgtgattattctcgcatgataaggatggtacttgcatatggtgaattactactgttgacagtttccgcagaaatcctatttcagtggaccaacattgtggcatggcagcaaatgccaacattttgtggaatagcagcaaatctacaagagaccctggttggtttttcgttttgttttctttgttttttcccccttctcctgaatcagcagggatggaaggagggtagggaagttatgaattactccttccagtagtagctctgaagtgtcacatttaatatcagttttttttaaacatgattctagttaaatgtagaagagagaagaaagaggaagtgttcacttttttaatacactgatttagaaatttgatgtcttatatcagtagttctgaggtattgatagcttgctttatttctgcctttacgttgacagtgttgaagcagggtgaataactagggcatatattttttttttttttgtaagctgtttcatgatgttttctttggaatttccggataagttcaggaaaacattctgcatgttgtatctagtctgatgtacttatccatctcattacaaacaaaaacacacagactgcatttgtagctctgtaatccttgaatacggaagtaaattttcttctttcctgactttgacattgtagctatactgtttccatttttgtttttacaaatcctttgggtctaattctgtgagcctacctatagcactggattaaaatgtctgcatcatttctttagttatc

SEQ ID NO: 109534 - DNA, 1444 bp, Homo sapiens
ttagccaactctttacaacaatgcaaatatggcttccaaagctgtagaagcaccagaaggtgggaaaagggtagctatttactgatgctgtagctgaatataatctgtgatatctttcattagggtccaatagataggaaatggtctgttttgagcattttccccctcctttttaatcaacagagagtataaaaatcctagccgtggttcttcccccacagtttgagctcatggttgttctcttgatctgcttaaatgatctgtctgatttctgtcagttaagtgctcatttccatgattattatgctttaccaattttataaacttggaactaagaaacatttcaaattgtactatagaaaagttaaacataaaatgtacaataaaattctgaatacactggttgattattttaatttcttacaggtttgtgtattagaccttcggaaatagcgctactagttggaagccatggaccgactatgaatgtgtacatagccaaaatgactgtccctgacccatgtactgctatagtcccacttgaaccatggccagtccactacagccaaatctaaaagaaatatatacatacagtgtatataaacaaaattgcaccctgaagatgacagagttttgtcacagcttgtgaattctgttcaccaagtgctggaatctaatctgctgtgcccctaaaatagcatttagaagttttggatatgaaaaacagaagagagaaaaatatacattataaaagcagaacatacatgtaccagtttttggatactaaatgacagccttgtttctcccctttgaatcagcagacaccatggattatattctttttttcccttcagtagtgagcagtttgtatgtacagagaaaatggacttacaaaaacttgcagcagtagtttgttcttgctttaaaatttcgtttttggtttagattatggatgcatgaagtaagggagtgaatcagtttcttgtttatatttttttcaccttttaaacaaaaaattctttaaaatattttaatgcattcttttgaagaggtagatgtttggtacattttatggctcccagagcatatattcagttggtgcatgttgtggaagggggaattggaaattaaatgaaaacctatgactttggtcatgtcaatctgtaagacacatcagtaaaagggtattatgctctgttggttttgtttttttgttttgctttttttttttttttttcttttttgttttttggtgatgtggcttaaatgcaatagtttcttttttgggacatatttctgccaattaaagactagaagggcacaactttttttttaattaccatagagaagatacattaaaaaaaatcttctgatgttttgtagccataactaaattatggtaaaaatgtgcactattgtgaaaaggagcaacgtagttttgggt

SEQ ID NO: 109535 - DNA, 1156 bp, Homo sapiens
ttctatattgaaataatcaaatattgactgataccaaatactgattaaaatccaagcaattgaggcatagcaaaatcttcagtatctttagaaaaaaaaaagataaatggaaaaatgtggtcactttggtgttcaaaaccatgcgaaagagggattatttagacagagaggaatacagtaaatgagcacatttacgttttctactcctggacttgggagattcctttaagttgtttttttcgcttgtttagcttttaatttctagaacacttgctcttctttctaaatttcatttatttattattttcttgtcactgacttgaagatcacagaatattcttcctaacagtccagtcggtctgcttctcataaagaattttggctattagatttggctgaatatgggaggttgggtgggagcaaggctgggggagtatttccttacttataaattaactttctttccttcctttttcagtgcatcctttgattctactgttaggttatgggatgtagaccgagggatatgcatccataccttgacaaaacaccaagagcctgtgtacagtgtagctttcagtcctgatggcaggtatctggcaagtggttcttttgacaaatgtgtacacatctggaacacgcaggtatgtcttcattatttaaatggtcaagtgctcttaaatttaggtagaagcatttgcctatacactctgcctcaccatttggttgtcattcctcttgtggcattaattgaattattggttttaaaataagatagaaactaatggaagttatatctttatggagactggaattttgaaatggattttgatcatttgttttattatttattattgtattcttttgtttttttccaacggttttgcagatatcagatgtgaatgtttaagatgtatttatttagataaatgacagattttatttttcaaaatagttgtctccgaaggagctatatgtgagcagtaaaagtcaaaggaccagattttatggctgaatgcaataatttatgagaaagaaacttacaactacattaccttttcaggtagtatgtatggtgtttcagagattcttagaagtggagaaaacagtctgttgctttcaattttttaaatcttctcaatgttttagttttttg

SEQ ID NO: 109536 - DNA, 1091 bp, Homo sapiens
acagttaggcatatactttacacatgtatgttaaacttctttccatgagtttatttttcttttccttttaatctcagactacaattatttgggacgcacatactggtgaagccaagcaacagtttccttttcattcaggtaaatttcttataatttacgtgaaagctggagcttgcttctgtttttctaattaaacttttaacagcatataatttattttaaatgttgaaatatcaagtatcagtcttgttactagtcctttggagagttgatgttccatgacattcagactcttaattgtcagaggatcatcaaacgttttctgtgaaatgtaccataaagcatttgcagcctggtgcaattagaggtggcattatttaatggaaagaacatagatttttgaatcagaaaatctaggtttgaatgtcagttccactccacttaagaagcattattaagactgagcaagtcacttaacctttctgagcctccttttcactgtctgtaaatgagggataataataataataatacctgtttgttatgggataaggctaaatgatatacatgaaaatactgtatagactcctataagtttaggtattgttgtcattttctcattttggatccaggtacctgagtatttgtctacaggaagtaaaaaatagactttcccaatgttgttggaatgttggtggcttagatggatttctcttttaagaaatactcaatgtggtacttttatctgattaatcagacctcgaaaatagtgctccgtccttcatgatatacagtcacacacccagacattcagcttgagtagagccagccatatttttgtgcccacgctccgtttaagcctagaacctttgcgccgcttttcagtgagtttcccgactgcagtaactaaatgatgttaaactggaacaagatacccagtggttttagtactacctgatttagctgtctctttgattttgttgtgctagaaaaaatttcagtttggagactgactaaaataaccctggttattctcaaatctttgatgacatccttttacaaacagcgagccagtggcacagcatcaactt

SEQ ID NO: 109537 - DNA, 1235 bp, Homo sapiens
gttagatctgtccttttattacacaattcatcgaggcaaggtgcacagcaagggaatataagttgagagaaatttatatggacttttcctcctggtaaagtaggcagttgtacttacttcattaactataaagtcagcctgtgctcttttctggctcttttccttgttgatctttttattggcaaatatttcatagtgggaagggattaataatagaaaggaacattcaagtatttaagaatctgatcattcgaaacaatgatattgtttggatcatacccacacacttcgttttagacagtaaaggatttagaggaatggccatataaaaccttctaatcatattttaaagtttttcttttttacttctaataaatcattgtaagactatgaatttgatgttcttcccagtccaccactctaccttcattcttagttgtgtgagtctgtgagaatacttttggcatgcatgaggtggggtgatgtagatcctggtccagagcaatcactgtcagttgttgaactttggatataaggcccccatacaacattagtgtcacacagtggaagggtttcataggcctttagtggcactcacaagtaggcaaaactgacaagttttgaagcagagaatgtcttcattctcttctgtacctgggatttaaacatgaaatactttaacaacaattaaataccgtatctagattatataattaaagaaatgtttttctctggcagagtgaaggtacacttctagcaactggttcctatgatgggtttgccagaatatggactaaagatggtaaatgaagcattttccttcttactttgttgttgatctaaagatagaaaatttaaaataatgttaatgtttttcttttgcattttaggtaaccttgctagcaccttagggcagcataaaggccctatatttgcattaaaatggaataagaaaggaaatttcatcctaagtgctggagtagacaaggtaaaagctcattaagttctgtaaaggcaaatgtattacagagcttaattgaaagcagtattttgtcttagctgccaattacataaacattcctatttgggaaattcacataggaatttatgctagaaatactccttaggtctatcagctcatttctgaatctacttaccaaaatgtccttatccttttatctatgtgaacacttttaattttacctggaatttgaaccataaacaatgtcatacgt

SEQ ID NO: 109538 - DNA, 1033 bp, Homo sapiens
tttctgctttaatatttgaatcaaatcacaagaaactcttcagctcaaagtttttagttttttaaaagatgtatttactataatggggcaccaggcctctgatcattatatgaactatattccatattgtttgttgctttgactaacagaatttcagaatctaattaataagcctttttatcagctcggcctacatcttattatctctttcatttcagctctatctgtacagctctatactgtaataatagtatgaattaaatgaaaaggaaaatgtaagcagtcatttccagttgctgcttgtagtttctttattccctccggacttcttatatgaattcagaaagttcctaaaaatgtttttttaggaacgaagattttcatttcatttctgattttgtataaatacaaataactttaaatattgcctttgatttttcttctctcacaattttccaaatccaggatggtaccttgtttgatggtcgaccaatagagtctctgtccctgatagatgccgtaatgcctgatgtagtacaaacaagacaacaagcttatagagataagcttgcacagcaacaggcagcagctgctgcagctgccgcagctgcagccagccaacaaggatctgcaaaaaatggagaaaacacagcaaatggggaggagaatggagcacatactatagcaagtgagctcagacaagaatttttttttaattacatggtttatttatttatttttttaaacttttaattcggggtacatgtgcaggtttgttatatagatgaactcatatcacaggggtttgttgtacagactatttcatcacccaggtactaagcctagtgcccaatagttattttttctgatcctcctcttcctcccaccctccaccccccaggaaggtcccaggagacaagaatttttaaaaattttttctcagaagaaatgccccatcttctatgctgaaataatttcatctgttaacttgcaccaacttgtttccctaacttgtatcacacagttcaattca

SEQ ID NO: 109539 - DNA, 1048 bp, Homo sapiens
cctattatataaatcaaaagctgtccctggaaaaagcctttttctgcatatatatatttacagataaatggaaatagcttctggcacaaaactagttcaagttttagatttttccaaggaagacttaagtcatatgctttttctggagtcacagatttttttgatgtgccaaaatacattatagtataattgcattctaatttaaaaaatgtttattgagtacttgttgactcaggtaatgtgctagtttcccagaattaaaggattactagacttaaacccttttgtcaggatcccagtctagtagtcacacacaggcaaacaaccatagccacacagttgataaccagtgtggtaagtgccacacatacagaaattctaggatcagcgtaggagagactggttagccctggtgtagtgaaagaggatttcacctccattcagataggagaaagagcaaaggaggacataaggctcagaggcatgatgtataacacagcatattcaagatgttagatgtaatttgccaccacttgaatttattgtgtaatgggagtgagacggggtgtgtagtattgagatgagactggagagacagaagagccagattacagaaacaactgtgtgccataattaggcgtttgacctttgttatgaaggccaaggggatcattgaaaattctcaagcaagaagtgatatgttcagttttttgttttacaagtaatagtctagctgtagcttggcatatatactgaattgaggaggaggggaaagaaatgtgtatagcaaagggtaatggggactaaacgcagatctggcagaaaaggtaaggtgatgagcatctacagatggtagagtggtaggatttggagtaggatggtaggatttggtaaattgtcaaatgccaagggaccgagagagaagagggagttaggatgactatgactttcaggtgtagtgaaatgagatcagaagtttctaaggaaaagtagttttagggaggggaagaagaaaattgattttgaacatagtaattttaaactgcta

SEQ ID NO: 109540 - DNA, 1480 bp, Homo sapiens
ttaaagctctgacctgtactaccatgtaacatatagctcattcattcatttttttgtttcattgtagcagtttcacattaggtctgtaatggctaatgaatattacagtgcagtttctttgttgactcagataaaggtaactgggccattccttcctatgtaccttatgcccagtgccatttatgaacagacattaccagtgtattcgatggagtcaggttgaagtggttatcagtaatgtgcttctagtcatgaagaactgcagtgaagagagctcagcgtctggtatgtccgccttcagtctgccttttagtttttatcagtagatgaccagctacagaagtgcaagtaggtatatagttttgttttataatcaaatgaaatacagaataaccttgattttacacacatggttgtatccatgactaattgacaataaacagcaagcagttgtcataaatgctgataattacaattctttttttttcccaaataagtttttctcctctttttgtaagctgaattaccattttttgctgacacaggaaattcgtattacacattcctgctagcacacttatcaaagggacaatggtcctttaatagttgccaaacagagaatttgttcaatgttttttaggactagccagcatagcgagagtataaggaaacatggaaattgcttttggcattattaataatctttttggaaagcaatttggcaatgatgaaaaccttctttaaaatgcttatatccccttcagcttttgagggaatccatcctaaggagaaaaaaacaacacacattgtacatggcaaaagcctatacatatagatatttgaggtaatattcttttaaaatagtgatcattggaaaagttcgaaggtccagctatggcgtgaataatttactggctgaatattatgatgctattaaaattatttcagaaagtattatttatataaaatgttcatagttacatgtatttttaagggcaaaattagggcacgaaattttatagctagtgtatcagtactagatctagctcttcaataacaaagatcccctgtgtcattttttccccatcctatttaccttttctaaaatctggatctgtagggcagagttggagtcaagaaagcatttgatgatgagaacatgagtataatttgctgagcttttctgacttgaagcttatataggaccttggatcaatcagattttcgtttcagactagggcagtatgttgtggtcatatttaagctttgccttttttaccagtttgtctcatctagtcatcctgtaccataatcatggtgttcagagtccattttcttattcttgtattgcctatttgcaaggtagagttggcaggctctgtatgactaactcccctttgagaacacagtccctaacatccttacagaaagcacttcctgaaacaagcgatctatagaaaatggctgttttgtgatcttc

SEQ ID NO: 109541 - DNA, 1522 bp, Homo sapiens
gaatcaccaagtacagtaatgtctgggttgttttggggattcatcatatttatcaccacaacctacaaatgatacttattgagaattagtcattcagtatctaagaaatgcgatataaattactcttaggttataactatgtttcttgaaagatctaaagtaataccgaagaaactggaatctttatactgctgctttccctgcaatagagcactgaattggattaggagacagcagaaaaggaacatcgtggcaaaggaagtatttgtgcagggacattcaaaggactggtttgtgaagacttccaaaaagcaaaactaaaatttccgcctggcctgtctcattatcaaagactgtccaaaaacacattatgaaagtttttatgttttgataaatatgtggtttagtaatactttttttatgtaagaacttttaacatttgttctctgcatattgttcagtgttgactgtgttatctatctgcagggggaaaatcacttaaattgttttaggcttaaatattttttactgttgtcaatactataagatactatctgttgaaagtttcccacctccaaaattacataaattctcagattcatttttctcacctataaaatacgttgctgtggagaagggatttacattgtgatattcagcctcaaatatttgatggacatctctgttttaaataagccatccctcagactcatcaaaactaattaaagaaaaatatatttattgtagggtttttattaactattgtaacttttattttttgcaattttatcactagaaagttcaccctacgcaaattactttggtcctcaccattctgcctttttatgaagtggacttccctattcaacaaatatttcctagggaataaaatgatttttttctctttagagatgacttgaaaactgagcgtatttaatatataatactgtaagtaacgattaacttgattcaaaagtattgttcctttaattagtgtttgcccaggggcattaatttcattgccctaataacttatctagcaaccatatgcagataaatacttagtggtacatgccaagttgcatatagtagaacctgatacagtgttaattttagaggcactaagctggtttggacctttttaatctctcccccaccttttgcgtcaccattgacttctttagttatttgcagttgtggtttgaatagtttctggcagttatttttgaactttctgacacctggttttcttataagacaacctgttttctataagaagatgtcattttatccagcttcagttgtatatttgctttagggaaagaattcttgatactaggtttaactattacatgtctaagagctctgtaacttctccatttatattgtacttgactgttggaagctatgaaacagttgcatcttataattgaacgacttaactggaattgcaaaatcaaaatgtccttgttactaaaatgagtaactttctagatagtgattctgaatattattacttttt

SEQ ID NO: 109542 - DNA, 1994 bp, Homo sapiens
ttatggttttgagacttgaatcattcttcttgtatggcatagttagttgtcctttcctatgcaaggaatacaaacatggctttcggtctgagagcctgttgcttgctgagatgttcccagctgttcttcagtgctgagcattttttgggggtaggggttttctattcccaagcaccatcactgcccctctctgaggtgtaacagctgtgaaagtgatgtccagaaggacagggagggaaagagagattagtatccaagcccacagagaataatttataatgaagctttgaagttaatagctcttgttttgttttctttgtttaaactggtagactggtactgaaggcagatctaaagaatgttttgaataagataaaatgattaataaagtgaaaaagtagtgactagtgattgttacgtatgtaacttgtaaacaagtttaacaatttcaaatacttgtgtttgaaagttgtgtagcactttcaacccaaatggaaaaaatttgttgggttaaagcaaactcttctttctgcttttaaatttaatcaccttttaagccagagctttgagacttttggacactggagcaaaaaccattgtgaaggatcagtagatgggaaatatattgtaaaggcttgttggtgtatggtaaagacaactatttaggttgagccatataaaattactgcttttggaagttagaaacagttgaatagctcagcactaccttgtcgttcagtggtgttaatgagagcagtaatatttttctttttctaaacaaaagtccacaaattgatacttgatgttactgtaagaaaacagtaaaaaggagcagtaaaataatattctcggttaatttctgaacgagtagattaaatattatcaaaagttgtgggtttttttgtttgtttgttttttgagacggagttttgctcttgttgctcaggctggagtgcagtggcgtgatctcggcggcgggttcaagcgattctcctgcctcagcctcccaagtagctgggattctaggcatgcaccaccatgcctggctaattttgtatttttagtagagttggcatttctccatgttggtcaggctgatcccaaactcccgaccttaggtgatccgcccgccttggcttcccaaagtgctgggattacaggcattacacccggcccaaaagtcttcttaaacttgcttttcttcttagagaaaaaacccttcaaaattccatgttttaaggtgttttatgttgaaataaaaataaaccaagaattaaaaaaaaatttgtatggtagactgatatatcaagttctccataattgtttagtatgttcttaggtgtcctttgtgtattctttagaaagttttagactttacagtgtagtggtgatgctaaatcacatctctaaaaatgtgaaaatcagtcccttggtaaaaattgtaacttcctgtttacattatgatttatagggaaagatcagactcaactgatgacattttgacttatggcagttttcccaggactgcaacttgccataaatttaagaactgcttatgttaagaattctgaagtttgagcctctgactacctgcatcagagtcacactgagtggggcctgggaatctgcattttacaaatgccccaggtgattcttttggcttaataaagtttgaaagccactggtctatattagttgtaggacaattagaacttgacaagacaattggcaagcatttagcatattcacaatatcttgacagaaaaattatgctgagtattcaagataaagtagaaaacatggaatacatgtacatctgctgaggtttgggctatgagagcatatcctaaagaggggctgccactgaaagtgtatatttgtgtttgtgggtcaggcggaataatgagatagcagaaataatgaggcgtttttatgtcttaaagggtgccatgagatatttatttgaaattgcatccagaaataggatatggaag

SEQ ID NO: 109543 - DNA, 1087 bp, Homo sapiens
gagaaaaagtgagcaacattttatgctatttgataaaatcattaaaatattatgctaaagccctctaaaaaattttgttttatttttgccagtatgttactttgaagaaaaataacaccagccatgttttggttgtataatcattttcctaactattggaagcaactttgtcaggttttattattaggcaatgtagaaccttcgttttacatcatttaataaaatcaaatggtttttacaacattgtttacatcttgtttaaaaatattttactgagaaaataattaactttgttttatttttagggttatatcctgtgttgtgacctcatggtttaagtgggaataaagatgagtataagcagtgatgaggtcaacttcttggtatatagatacttgcaagagtcaggtgagtacttttataaagtaaataggcctcaaattattttaatattctcaaaataatcttttatgcatttgaaatttgtatcagtccaaaccgttgaactttgtatgttttcttaatgtctggactgccattttaaagctatgttttactgcatggtttaactctctgactctttcaaatatgttgcaaacaaggcaattatttgtaacagtttggctttcgttgttcaaagaccatttttataatctgttatgaggtgagattattgcatatgtagtaggaacataaaaacttttagccaccatcagtttgataatgtatatccagaattctcaattaaatgttgttggtcctaattgtagttagtattttggaaattaaattaacagtattttcctagaatgctttcaaaattattatttgaattaagtgtatccttgatctgaattgttattattgtaatgggagtaattataaatagaaatcattgaaagccatttgcaactaatattaaatcaatcagtgatcttccaagttttattgatagataaaacagaaggaatactgcaaggggaaatgtggatggattaagcaaaaatttaaaagtagaagagggaacatggttgggtatgggtggaggtataggatggtgagaaagattaattgcaatggaaatgcc

SEQ ID NO: 109544 - DNA, 2011 bp, Homo sapiens
tatgtctttattgtgatataagtaagttccttggaaagcaaaacattaagatattattcattaacattttgttatattaggttgttcagcctgtcacctacctggctttaaggaacgaaatatacttggtggcggtgagggttggggaggtagcatagaaaacttggaatataagtctgtttgaaaagggcagtgggctccgttgatgttagaatgccggggatcagatttcaggctcacgagaaggtggggatgaggaagttgtcaaggcagagaggttaattagtgaaatagtgcccgattttgaggtggttggtaagaaaaaggttgatctagggaaagcgttgatagaagcgtagggagagctgtgcttactcacatttttccctaggcttaggcttcctgttggtaaagaggttgatcatggctcatacgcaaggactttggaaagaaggaaaaccctatcttatgcttgaatatcttctaatatatccacagcaattattgatgcagtcaggaatagcagtgtgagtgtagactagtttcttggcattattaaacacatatgcctctctattctctagctctttcactccctacatctcctctgttctttcttacgtatcctcaaggtacacagggatgggtatggaaactgtaccaggtataacttggaaatctggctataaagaatttcagattttttgcccagctagccctgctccctttattccttatgtagcaaacaggttgagtatgtaatgaatcaattctccagtaccaaagacctgcattctttgttgctgtgtatgtggtaaagaacgctaccccatgtttggagtcctgaatgggttttcttgggaaataaatgctgcaagagagagactagtttcaagttttggttagaaggaaagggattgcaaccctttggcaccttctacaatacaagtgatgagtctgggcaaaacaaacaaaaacgtgctgaatcccaccagaaggaaagacagtgtgttgcgggagcagtgcgcctttactgcagcttccacactccgctacaccttctactaaagtttggtagcaaatggggtaagtttggctatgaagcccactcttcactgtattgttcctttatattaatggatttctatattgctacagtgttaagggcctagaacagtggcaggcgtgtagtgtagtactcagtaaaacatttgttacatgcatgatagaaaaactaaatttaagtaaaatgattgaatctttccaaatagaagtccatttatagaagtgtagtctcagaaaatttataattttcattcctccaatatgttttagagttagtagatgccatgtgttatatcaaaactagagctttgatactctgatatttatggcttttaagtaccttttttgtttattaagtataaacttatcaatatgtattccaacatgaacacaacagaaaccaaactaaagatttaggttgtgttaaaatatgaccagtactgtgggctaaggagcctgttttccagtttttccagagaaactctttgacaaaaatatttgtcaccaatattgccatgagggactcaataggtctcaaacattttggtcttaggatcttgttacaatcttaatttattgatgatctcaaagagcttttgtttatgtgggttatagttatcaatattaaatgtatcagatattaaaatggaaattttgtattacttactaatgtattttttttctttttttgaaatcaaactctctctttgtcacccaggttggagtgcagtggtcctgtcttggctcactgcaacctccacctcctgggttcaagcgattctcctgccccaaccccccaagtagctgagattacaggtgcatgccaccacacctggctaatttttgtatttttaatagagacagggtttcgccatgttggccaggctggtctcgaactcctgacctcaagtgatccacccgcctcggcttctcaaagtgttgggat

SEQ ID NO: 109545 - DNA, 1512 bp, Homo sapiens
gtttcaaagatttctatcacagagacacattgatattacatccatcttaagactggccaagaacaagagagaaatcttattaatgattctgaatgtcgtattaggagatactatgtattgccaaggtgaaatgttcaaatgactaagtagtggacttgcatgtgtgtcaagttattttataatcactttaggtaatttgcatttaagaaaaacttttaaaaacaagctttttccatatgaatgtttcatcatatctttacatcctttaaaagttgatttctaagattttcttgattgtagagatacgtttactggttctcatatccttgaagtgttaagtctgccaggtaagaaccttagcatcaacataagcaatgaagtataaaggaacaaataaatataaagtagaacatcagctgatctttgaacttaaagctagttgttaagtttgtcagaccctggaggatttgctagaaccaggcagttaattgtatttaggtaatttagttagaaaaccacagtttttgaggtaccaggacctattgttactgatagatgtttgatttctttcagtatagaaaacttaaacatggagacactcttttaaaaaaatgtttctgtgtgtcactgaaaaaaaatatatattttttctttcagttagctttattgtcagaaggagaagccagatttctattttgagagaaccagaaaaaagtattatgagtagggaaaatatgctcattaacacagaaggatatcacaagcatacttattgttttattgcatgttaaatttaaatagtttaatttactctaatcatttttcttgtcattttattctttgttcagttatttcatcaggggcagttatgggcactttatcacttaaagtaagtactagcccaaaggtgtactattttctagatttacttgggcagtctggccaaaggtgaataggtcttttcgggccataatttgggttactcattactaattcagcttagatgttaatgataaagcctgataatgttactaaggctgatatattctaaaaacctttctagcagttaaaagttagaaagcaattgctttttgcaatttaaaattttgtgtatgtcctttttattgaggacataattatgtccttatgaaaattattttcaaccttgttccctactgctgtttccagtgttaacagttaaaccttactgttaacagaaatcttacatttgattgattcttcctaaattcatctttaggatcactcagtgttaaagctagaggagccctttcagattatctaattcagtaccctcattttacagatgaggaaactgaggccttggactagaacagaggtctcctgactcagtccaggactctttctattacatcatgcggcctgatatttgtctttatggaactcagcaacatcacatacagggtgagcttttttttttttttttaaatgaacacataaagtgatttgctaccctcattagttactagtcct

SEQ ID NO: 109546 - DNA, 1044 bp, Homo sapiens
tagagatggggtttcatcatgttggccaggctgatctcgaactcctgacctcgtgatccacccgcctcagcttcccagagtgctgggattacaggcgtgagccaccatgcttggccaagtttttcctttaaaaaaacaaaaacaaaaacaaaaaaaaaccattacttgatgggcaagttgcagtatttacagaagtatactgatgactgcaagttctttgaatagatgtattaacaacaaatatgaggaaatgttaattttaaattgtaggtggtagctatgtggatattcattttttttctatatgtttgaaaattttcatagtaaaatgttaagataaaatagagaccagtgaatgatatttctcgaagtcagattcctgttaatatgttgtttttttatggcattcatcaaaattgatttctttaaatttgaaaatagtttaaagagcttatcggtaacatttttctgcctgtgcattaagctgtgacctgcttatgatgcagaaagatagagaaatatgaataaataaaagcaagaagacaaaacatacatactaacttgatcgtttcaaaatgatgtagcaaagactaaggtcatttctaatacagacatttggaggggatggatacataattagactgtgctcagattcaagtatgattaatgggagatggaattcatggaattggtaatttcgaacaggtttttgaaaatgctatgggaggaaattattaagagtttgtttccactctcttaattgaccaatagtcatttatggattatggcttaggacacttttttcagtgtgttgtatttatttttcaaaaaaaaatgctgtatgatttttattgtggaattattagcgagattggattgattagaatttattttaaaatatctctttggaggccgagacggatggatcacgaggtcaggagatcgagaccatcctggctaacacgttgaaaccacgtctctactaaaagatacagaaaaaattagccagatgtggtggtggtcgcctgtagtcccagctactcc

SEQ ID NO: 109547 - DNA, 1190 bp, Homo sapiens
gctgcaaagtttaacttttatatttacacaaacggtttgtggaatataaggtgccctgacttagcaattgagaaaactggataagccctataaagtttaaagagaacagagttaataagttttgattgaaattgtttctaaaccaatgatatatttctctttattattaaacaatatagaatgcaagtttatgccattcttggtggcccatgattatagattatgaacatactaattggaccgtaatgcaataatatttacatgagttgagttgcctggtggtgagaccacttgtgtgcagatgaatctctttgagtctcattttgttcactgtgccaacctcttatgaacgttctaaagacttgccaagtattaagcactcaaaagttgctgctgttgtttatgataacaattacttgggggagaaagaaattcactggtggggaccttaaagaatatttcaaacatgtaacatttggtatggaaaatcttttaaactgaatttgttttagggcacattgaatactttactttccttttcctcagcatcaacaacagcaacttgtgattggcggtgaccggatattcagttgcacatccccacatcaatgcactgccaatggtaagactctccaactcccaatgtcagtgtttcttattctcttgtttttagaatcttttgagaattttgaaagtttctcacaatttgacaaaatacatgtgttcccaagctaagtaagtgttttttttttaaattttttattctttttaaatatatgtagtttaaagtatttaaaaataacttttgaatattttgtaaaggaaaaattgctacttttgaaaatttctattttcttttctttttatgtttttttgagacggagtttcgttcttgttggccaggctggagtgcaatggcgtgatctccgctcactgcaacctcctccgcctcccaggttaaagcgattgtcctgcctcagccacccaggtagctgggattacaggcatgcgccaccacgcccagctaattttttgtatttttagtaagagacaggatttcaccatgttggccaggctggtctcgaacccctgaccgcaggtgatccgcccacctgagcttcccaaagtgctgggattacaggtgtgagccaccgcatccagctgaggatttctgtgttctgtagttttaa

SEQ ID NO: 109548 - DNA, 3108 bp, Homo sapiens
acctgactagtaaaattctccatcctgtcccttcccttcccacccccacccagtggttctcagtccccattggaatcacacacatgcacacacacacccacacactgacacggggtgggtggggaggattttaaatgcaagtgatgtagatcctaccctagaccaattacatctgagtgaggggctcaccacgtcatagttaggttctaatctggggcatttctgtaggacagagctaatcaaagacagtcttcttggcagagccattctcatttctattggaaatgtgttcaactgaatgatttgtgtgttgtagcctaattagctattcagattcttaataccttgaatcagatattcaaaccttaggaagagtgagaaatctattaagatgtaggaatgtcagttttcttttctaacttaagtgccagtgtacccacctgtgtggtcttaggcaacaaagcttgatatccccccttcatattatttcttagatcttcgttgctgtttctactggtccacccctccttcggccccccacacttgtttctttcttccaaactgcttttttaacaaagggtttagcagctatcaaactttatgtaaacaagaaaacagtgtcatatctgtcgtatttcaaaggcactgtaagttacaccattaatttaataacattttggggaaaacagttatagttacacattaatgctctactcactttaaagaaaaaataacttaaaatcatagatacatttttatattagttttcaagtatccgtaaatttggagtgtaagctttttctcatgttcaaaatccctatcactgaaggtttgtgaaccggaagcttttgatgcataggcgttagtgcctaagtaatacacttgacttatgttagcattagaaactgttcaaaccaacctttaattttaagaactctgtgggtcattgtaagagagtttgtgctgttgtctttaattgcattgcttaccctgtgacagaaaaatttagaaatacttgagagttttttgttttattcttgcacaatagtttatttttgtataatcttaacataaaattcaatgacatgtgatgttaccagtgaaactaattcaactaaggtagtaattaggtgattagacaccagtgcatgtttaaattgttttctttttatgtgagtatgtggtcttgagaatagcttatttttaaaaattggtgtcagataacttttgaatcatttttcccctaatcgcttaagtaacaatgggaaatgaaaacataggcagtaattgcaaagctgtgcgtgatctgacagtgagtctgatctcagagtcacttaagatatccctgctgttatagctccttctgcttttcacctgccttaccttctggctgtctagaatattatctgtatgtgtaattccatgggaaatgaggatcgggtgaggacagtggaggatgtaatgcttagaggctttgacgtatgcgtagtatgttgttggagataacatactaacattcctttttgtaaaacggattaagaagattcagttgaaactctgatttacaaatatgtatatatttaattgttccattaggaggtaatactgtttttgtttctttcttaattgtgctttcaatcatgtgctaagcaatttaatttgaactttttctgtgacttttcctgggagttaatttaataaaaatctttctaagcagggtcaattctggtagaattcttatatatttctctctctctcttttttttttttttggagaccgagtctcgctctgtcacccaggctggaatgcagtgatgtgatctcagctcactgcaacctctgcctcctgggttcaagtgattctcctgcctcagcctcccgagtagctgggattacaggcatctgccaccatacctggctaatttttgtattttcattagagatgaggtttctccatgtttgccaggctggtcttaaccttctgacctcaagtgatctccctgccttggccttccaaagtgctgggattatatttttctcttaattcatggggtgactttcccaaattctgtacattaaaacaaaataattttattttttaaggataccagatatacttccttgaacttgttactgaccactaggttctagattagagtgtgttgctaccttaaataataagtttttattgtgtttgtacctttgtctaggaaaagggcccataatgtccattagcttttcaaagttatctataaattaaataaatttacttctagagactgcaatgtagtatttttgaagaacagtcaaaatatatcatttgcttttctttagaatttttccatgttaaaaaaacttcctaattgtgtgtaggtggcagatcttagaagatgtctgctaagtcaacagtgtctttctatgctgtaagccttatctaaaattaatacttcgtttactttagataaaatgctctgaaatacatttttggaagcaaagctttttgtttggagacaaaacacaaaccttacagccatttattttattacaagaagtaaatatatttagtttatgtagtacacaaaggaggtgatagtttttacactaataatgtgattgatcatgtacttcttgagtttcttgttaatgatggaagatccacctttattggtcaccttctggaagtggtgttaaagttactggtatataaccaggttctctcaagcattttcaaagtaacaatccactggtgagtttttccttcccagtgtgatttatttgttcagtaattcagtgtctactgcattttattttcaaatatgtttatatctatttctctatatctagacactaacattttatcagcatatatatcttaagaatcatgtatgttcaaggcattattcttagttctgttagggaacagcaagatgattaaatcagtcctgggtctctagaaatttgatcagagaggtatgatagaagaataaggcactatgcggttgtggaaagggagatatgttaagctggggctcatttctctctctggatggtggggtggataattaatggaggaagctgattgggcctgatctttggaggagggatagg

SEQ ID NO: 109549 - DNA, 1024 bp, Homo sapiens
tctcattaagttctgaccactccttcctctcatctcatttaattcttattcatatctagaattgtgttttaggtacaatagtaggcataagtcacagacatactgtcatttattcctgtgcatttacaatagaaggtattgaaaaaattcagcttagtgtcttcatagttctagctttatgcattttcacagacatttatcctttgcctcctctttgtcttctgctgaagaatagtgaacacagtagggaaaaaaaaaccacaaaaccaagaccaggtgttcttaagcaaagaagttctggtttgtgttttgttatttttccctagtcaggtattttaaattcgtaatggtgggtgtatagccctagatacattgtaagctttgctggatatttacaaattgttgcctaaactgtagaagggcttaagtcattagacattctattttagtgacatttttctgtttttctgtatcatgtgtcttggaaaaactttgaagttctttgatgttaattttgtaagaatgtgtgtctgaaaatattttgactgaatagactctgggttacagttaagaatttctttgatttggcacatcttctctttagcatttcatagcttttatcatggcctgcatatacaacatgtcaattataatgcctgataggtctcctaggagttgtagcttcacaatatataggaggcatcaggcacaaatcgatactgcagagaaaaaattagagtaactaaaacataaatgacgtattttgtgaataaggaagtgttctaggtatgccttccagtagtaagcggacaacaccaagatataaggcacgtcttcatacatcattgtctgtacacagaacatcgagcatacaggaagcttcctgagtatcttgctgtctctcaattgaaatacaaaccaactctggctctgaccatcctactttaatattgcaacccaggggttcctctttcacctctcttccccccaacttctgaatccctttaccctgcttggacttttt

SEQ ID NO: 109550 - DNA, 1050 bp, Homo sapiens
aggttacagtgaaccgagatcatgccactgcactccagcctggggtacaagagtgaaactccgtctcaaaaacaaaaaacaaaaaaaacctgattatccaggtttttctttgtttttatgagcttatactttctataggtcccatttttcttgagttattatgtggagttgctgtctggtttgcaggcaatatgcctgaatggttacaatgctaaatcgtatctcttgattttataaaagttcagtttgagaaactgacaaaatacgacacttgccatatattataatgtattcattttgtctctactcccccattaaaatacaaacttcagggtggtttcttgactgttgttcttagcatctgaaatgaagcatggcaaatagtacacattcagtaactagttattaaatgaatgaagaactatgatatttgacagcattacatgcaactaagcctcataaagaagggaattcacaaatggattctctttaaagtcttcctaatgtctgtctttttatttcctttcttcttccttccgttgtgggctttgttttgatcagtgaaagggtgagtataagaagctgcattttaagttttcaggaatctagtcatgcctttggataaaaataccgtggtcacacttttagctttgatgagaaaagggcctcattaggtcattttgagtcattaggctcaatgttaaagctactcagcgatgagggcatgaaagacgtatagttgtttgttcacagtgcttgtccttaaataggctcttaaatgagttaatgaatgaatgaatgttcaagaactctttagagactttgaaaagatcgagtgattttgaaataacagactctgggatctggaacttctatattcgcatggaatagaactagtttcttagaatgtgggtagtcattgcttgagctttctactaatatgtcctgagtctctggctgagaagagtggataaaatggtaggtgaggtaaagaaagaaagtcacaattcgtatactacctataaaagatttataaatggccattggccc

SEQ ID NO: 109551 - DNA, 2765 bp, Homo sapiens
gatactgttgatgctcattgtttggtatttgtggatgagcctgaaacgactaatatttaatcatgagtcttttctgcacttatgtgatcttctgtgctttgatttgcagctatctccactgtttaaagaacctgttgctctttgcaactgccttatttagccctatctgctagaagccattgatccaagaactctgcttttcctcacactcgactttaataacattatgaaagctagcccagtaaaactgaatttccaacaatgtggcttcagttgttggtggacttgcagtattttaggtcagatatctttcttcaagtgcacaagaggtatagagtaaaatttgacatctgtgttagaggcagatctcatgataatgttaagggatttcggtcattactttgcaattttcagggtacatgctgaacttcttgatgctcttctcttagttctattacatcacctcttctatgaccccaatcaggcgtgacattcttaactgaattcctagatgctttgacacaggcttacagtgtttttttttttttttatctgtcttatataagttatgtattagaggaggagggaatattttaattgttaggtactctatagtacctaacaatgtattccatttagtaaacacagtcttaagtaataagtaaatttgacagtaatgctcagaagcagcattttggtgaattaatcaacattgtagaaattattgattaatgtacttttaattaatagaataaaacgttgcttattaatactttagatttcaacacttcatggtttcaccttcacatcagttaattggaatgctgggatcatcctaaatgtatttatttgtaggattgggatgagggttgctcttgcattgtgattctttcaatcccattctctctaggacttctagtaattctaggtttccagtaattaatggctctttttattagttggaagtttcatggatttttttttttaaatctttagctaagaacattctaaaccacttgcagtatctaaacgtgtcagacatgaaggtagccttaatggaaacaggcttgccttctgtaaacctcacaaggaacagcctcgatgggattgtgagtttcatttcccatgtgccaaaaagaggcggagctcagagccaatgatgaaagatgttacttaatccttttagactacaaaatttatgttaattaccagataagaccttttccctcagggagtttagtatttaaagagaacgttaatgcatgtaatttataatctgcatgaatttagtctggctaaaaaaattgcacattgtttggaagggaggctaatgtttgaaagaaagatgcgtgtgaagtcaaattgggacttatttctagaggagataggctatggataggctatggaagggaagaaaaagattgacatccagcaagatttctcaatggactttatttttaaatttttattatgacaaatttgaaaataataaaagaataatgaattaccgtatcctgttagcttcaacagttatctgcatatgttgaatttagttgtcacatttcttgagactttaatctggcatagttcctcagccattctgtcttttatgacatcgatagttttaaagaacattcctcagtttatgtttgtttcctgaggacaagatttggattatgtttaactgtgattttataggaatgaaaatgttagaattctatgacaagccgtaggttataatggaactaattctggaccaagaatcaggagtcctgagtcctggctcttagaaaggaattgtagtatgcagtatttaaagaatgtagactttggattagtgacacagctttaaatctcagctcttttgtgtagctgtataataattgtataaatttaagcaaattggttaacattttagggccatgtataaaatatgaccagtaaattcctgtcttttcaagttgttaggagtaaatgagacaacatgaagtacaaagatgctacactatgtgatagtgattaaaatactgtaaatttgagctggtccgaaggtagtgagttaactcaattgattatgtagtcagtaacagatcgaacttgttctattctgttgccccccttttcactattgcactcgactagtctaaaaataaaaaaagtaaatttgggaaagaggaaaatcagtgagttaaagctgcgaaaaggaagtttgagtggaaaagattgcacgtgacctttgattttaaggatggattgactttggataaaatatctaggtgtagagtatccactggaaaatcttaagtgtaagggaacgtagtcagattagtgtgggaaataatgttagagtgaggaagttagaagactcttgggaattagagtttgaaggtctgggttgtagtccagcctttgccattagctggttgtatgatttggggtaagttatttaacctgtctagaccttgttctctaacactataaaatgactggtatgttatcagcattctttagaaacatcctggtaagacagagtagtaagagaaagctttcatcaggaaggaggtcatctgcatcttgaaaggtagacagcctctagataggagaagaggaaaagggaaagccattagaacaggaatgccgaattaaagaaggcataactggaggtaaagacctatactatcacagggaggagtgcatgttggaaagtaatgagaagttaaggttatcaattctgtgctccagaagtaggctctatatagttatgt

SEQ ID NO: 109552 - DNA, 1459 bp, Homo sapiens
agagtctcgctctgttgcccaggctggagtgcagtggcgctatgtgggctcactgcaagctctgtctcctgggttcacccgccattctcctgcctcagcctcctgagtagctgggactacaggcgcccaccaccacgcccggctaatttttgtatttttagtagagatggggtttcaccgtgttagtcaggatggtctcgatctcctgacctcgagatccgcacgcctcggcctcccaaagtgctaggattacaggcatgagccaccgcgcctggcctgaataacttattattttaatgcttcattaggtcaccaaaataagtaaatgggttgccatgtagaataagccttttgtgacttaagatatttgtttctggatttcagttgcttcatccttaacacgttatgttgaatctctgagaggttttttctggacctaatgttctttaaccctatgattgcatatataatttaaaaaattaagtgtgttcacccaaattacagggagtgtgtacaatactgatctctgcctgcactggtttttcttaaaacatttgcgttttccaggcacgttctcaattttgaatacattagtctcaaaatattttttagatatctgaagaggaaacttctattttattcattaaacttgtgagttcaggtgcatttgttacattctgtttcatggaagagagaattaaaataatatcaccaaacacatttttgagaatgattttttttcctttaatatctttattttcatggtatgattcctgaatgtcaaagccaattcttcagcagctaagcttttattttgctttgtcttggaaattgtgtactaaaactgtgtttgttaagtagtacaatacaatgttattcacatttataatcttctaaatactaaaataagtttcaggagctgcttatattaagtgctaattgagaaccagtgtacattaaaataatttaccataaaaaataagacatgagaagaaggcaggtgtcagggaataaagatgccaaacagtttggtcttttctggcaaacagttttgtttatgtctagcgtacagtttttaagttggtaaatgatgagaaggagctggaaattggtaagcagggctcatatcataaagtgacttctttgctgtgcctaaggacattcttctgaccgtaataggaactagtgaaggattttaaacggaacggcaggattatgtttcaaccttggatgtgtagtgtgtgaaggatgagatgaggatttgggagggaagggccttagctctggacaggggagaaagttgagctggtagtagtgtaataggtgtgaatgacaccagtaattcttggagtattgcaaactagttcatgtttctgaattctgcaaaaaatgcaattggagattcataagagagtggtattgaaaagagctaagcatccgggtctcctttctggcttgc

SEQ ID NO: 109553 - DNA, 1227 bp, Homo sapiens
tcccggattcaggcaattctcctgccccagcctcccaagtagctgggattacaggcacgtgccaccatgcctggctaattttttgtattttagtagagatagggtttcaccatgttggccaggatggtctcgatctcctgacctcatgattgcctgccttggcctcccaaagtgctgggattacaggcatgagcgactgcacccagcctgtagtgggtatgttttttaatttgttgcttctctacttggtttgttcccttttttgtgtcagatatgctggtgaatctagctgcctcattttatctagcctcatttgcctttcttgcgttttcttccagatgattcatgtgtattttgctagtagatatatcggttggttggctcctttgttctgacaaatcaacatagaagtgacttgttacaagtgagaactggtaatgacaggaaccataacagcatgctaatggtctttgataaatatggtgaatgcacatggtagaatttaaaggtcttggtttgaagccctcccaagagtagttgcaactttgaggttgggtttaggaataacttctgcaacctttagcttcactcctgggagaaactttggatacattttacctgcctctcttgagcttcagttcccatatttgcaaaatgccatgacttatctcttaagaatttagttagaataaaacagataccgtaagttaaaagaatacttggttgtgctccagcgtgtgtctgtatccggaataggctcatatgtaattggtaaatacgagaattatgtcagtacaacaaggagattgctctggttcatacgtgattttccccagcatattcatgttttgcatcaggtaacaatagtcgagctcaaagtacactaagagctgaatgaaacaagccatggtggccacttgtgaattcttcctgttggcctagtttggccatgtttttagtctttgaagtttttggagggggttgttgtgcgattctcccccatctcttcacagccccaagtatcttttttttttttttttttttttttgagacgtagtttcgctcttgttgcccaggctggagtgcaatggcgtgatcttggctcactgcaattgccacctcccggcttcaagcaattctcttgcctccgcctcccgagtaggtgggattacaggcacccgccaccacacccggctaatttttgtatttttagtagaacggggtttc

SEQ ID NO: 109554 - DNA, 1009 bp, Homo sapiens
tgacaatgagttgcgacaagacagagttggagaatagaggaggttcagagttggaagaaatgggagtaggtgatggcaacaccgagttgtcagagtgagctgaggcaacatcctctacttctagctcactgatgaaaatatccaggatagcgggtctggggtccagtgccatgggtcacgcctctaatcctagtacttggtggtaggccgaggtgggtggatcacctgaggtcaggagttcaagaccagcctgaccaacatggtgaaacccccgtctttactaaaaatacaaaaaactagcagggcgtggtggcctgtaatcgtagctactccagaggctgaggcaggagaatcccttgaacccaggaggcagaggttgcagggagctgagatcatgtcattgcactccagcctgggtgacaagagcaaatctccgtctcaaaaaaaaaaaaattccagggtaatctgagatcttggtatttagagacatttggttgggatgaggggtcttggtagatttgattctgttatcatttggaaccttccaaagtagaggatgacgcatttgtttttgagctactttctagaaaccagaatttactgtcagagaatataggattttcggttttaaaactttgaacttaaaatgattgcaacagtattttagtgatattctaaaaaatatttaaaaataaaagtttaaaaaagtcgtcagcagattaaaaaaactccaaggagagtaatatttaaatgagtaacatttttgttttcctctgaatgttgttaaaacagacaaggtactattaaatggggggggggggaatgaacgtatttatgggcttttcccttttttaccctttgtttacttgtctgtagattaaagtaggtactttaatcttttgtatctctgggctctgtttcttgtagtgggtatgcttttttttttttttttttttttgagacggagtcttgctccgtcaccaggctggagtgcagtgacacgatctca

SEQ ID NO: 109555 - DNA, 2299 bp, Homo sapiens
gcactttgggaggctgaggtgggtggatcacctgaggtcaggagtttgaggaaaaaattcgcaaggtgtagtggcgggtgcctgtaatcccagctgcggaggctgaggcaggagaatcacttgaacccgggaggcggaggttgcagtgagccaaaatcgcaccactgcactccagcctgggtgaaggagtgaaactccgtctcaaaaaaatttttgctttccggagtggaatccctacttttctccaggcaacactgctctggttgacaactgacaactgctttatcagtcacttcaaatatatatgttaaattttacacaaacgttaacatggattctcactaaaaatccatatggcacaacacagggtatgtatacatgcagaaataactgaagggttatcaggaacttatgcacacacattttctgtactcttcatttaaaaacatgcttttataaacctaaatgaattttattacttaattttattcagtgaatttagaaaatactcgttcaaaggagtatagaattgtacttttctacttttatggatttagagtcagtactcagaaacgtcgacgttctgaatgacagagcatggatgagttacatttattggtgctaatgtctttaggttgtattctgaagctgtatgaggattctgaagttatggtgcctcaattttgtaaggcatacataagaagtaagatacaaatgataaggaattttgattgctcttaaatgtaaatttaagagttttggagggaaaatctgaacagctgtagcttaggaaccctgaatgcttctcataaaggacagtacttagaagaatgaccattatataaagtttcttatatcccattagagaagaagtttggataattatattgttttaaaaaaatttacatgccataacatgttgcctgcatgaagttacactatttgattgaagattaagcattaggcttctttccgtgacagtcttaaattaacatccttgccaatgatgaccactagtcatgtgtttctagcacaggcctctccttgattgagagttatttgttgcctcatctcactaggcagagatccttccttgaaaacaggtctctctcacccatcttgaccctcagcatctggtacagtgcctggcactctttagcctttccattgttgagttgaatcctatgaggctctgactgaggtatacgtttgctagtacagtagactcttgttgcttttgtgagtgattcacatatacaaaactggaaaggagatacatccagtttcacaaattaattgtccttagaacttactgtgttcctgctgtcagagttttcttctttttctgagacaggatcttactctgtcacccaggctggagggcagtggcacggtcatggctcactgcagccctgaactccccgggctcaggtggtcctatcacctcagcctcttgagtatctgggactactacgccaccattcccggctaatttttgtgttttttggtagagatgggggtctcactatgttgcccaggctggtcttgaactcctgggctcaagtgatccacctgctgtagcttcccaaactgctgggattacaataggcatgagccactgggactggctgtgctgtaagaattttgagggtctgcttgataacctggcaccctgctctttggtttttgtcatctgcagaatccttttggcttgaaaacagtgtagaacttgctaggggaaacaaggaatatactcaaaatgtgggtaaaagattcaaagaccttggcctgaccgtagcagttaaacctgaattggggtgttatttgggcttgcccacttcttcctgatatttatgtattctgcagtctctttagacccttcatcatgtgtgtgtttttttttttttttcctaacttgaacccttacgtttacctgatactggcatatgattcttgcctggctttttttctgattcatggtcttgcatacccagtccatacatctactgctgcccttctctttgactgtggttttccctcagaggtcaaaggatgtgtatactctgtgtcctttgtctctttaaaccagttgcacaagtgattctgtggcccagattggttcttccgacctcctcctctcctgatctgctagcatggaatctatcacaatctagcatggggacatcttgtattttcccgtgttttctactgttgagtgtaggctggcagaggcgttctttttttttttttttaagacggagtctggctctgtcactcaggctggagtgtggtggcatgc

SEQ ID NO: 109556 - DNA, 1047 bp, Homo sapiens
ggctgcagtgaactgagattgcgccactgcactccagcctggtcaacaagagcatcaactccgtcacatacacaaaaaaagaaaatggatggttttgcccttttaattctggaatagtagccacagtactgggggaaaacctagtctagttaggaattgtgtcacagtaagttgactttatctggttatatatgtgtcaggtagttaggtataatgatgcttaagattttggactctttttttttttttttttttttttttttttgagatggagtttcactcttgttgcccgggctggagtgcaatggcacatgcttggctcactgaaacctccgtctcctgggttcaagcgattttcctgcttcagcctccccagtagctgggattacaggtgtccgcttacacgcccagctagaactttattttcttaatctgttaggttttttcttcattatttccttagtagtgtacctaagttaagatagtgtttttagatctcactgttttacagcattctgactgcactggagtttcatttgagccattactattaatttattaacattcagtataggatatatgtattatacaatgtaagtgagttttatctaccagaagaatgtctcttaaccatctcccttcagtaaatttttatggtaagactgtgctgtattagttccagccaaccagggtaattgactataaaggcaactaatttggtgttacatccttcttttttttttttttttgagatggagtcttgctctgtctcccagactggctggatgtgatctccgctcactgcaacctccgccccctgggttcaagcgattctcctgccttagcctcccaagtagctgggattacaggtgctggccaccacgcctggctaatttttttgtaattttagtagagatggggtttcaccatgttggctaggctggtcttgaactcttgacttcaggtgatccacccaccttggcctcccaaattgctgggactaacaggcgtgtaccaccacgcccagctaatttttgtatttttagt

SEQ ID NO: 109557 - DNA, 1057 bp, Homo sapiens
cacccatgctggagtgcaatggtgcgatctcggctcactgcaacctctgcctcccgggttcaagcgattcccctacctcagcctcccaagtagctgggattacaggcgcctgtcacttgcctggctaatttcttgtatctttagtagagatggggtttcaccatgttggtcaggctggtctcgaactcctgaccgcccgtctcggcctcccaaagtgctgggattacaggcatgagccaccgtgccaggcaaactctttaaatacaaagggaactctttcaaggtttgggtccagcagaacctagggtctgccttttaggctgtagtgattactttgggtaggtggttttattttatttttcctgaccactttttatctgtgtattcttttccgtattatcagatgctgtctagatagttgtccttagaagttcagttcctctatgagccttatcttatgttcacttcccatttttaaccatacttaatttagcactagtgttcactttgctaatagtcaaaagttctatgtatcaggactatacaggtgctttgacaagtactgtgacagtctgagtgctgatgcctgaatttaacagtgagaaaattgaggctcaggtagtaggggacagagcaggaatttaggcccagtttgtgtgaattctaggccagtgttgttacctagcagtctgtcttctcaatgaatgaatggttgtaggtctggattattaagtttttatttggttgccctgagcaacctttcttattcattttatcttctgtaactactgacagtgtaatttatttaaagtactggtttcatcttgtcagttcccctgctggagaacccataatggattctctttgccaactggattgaatttgtatgcttcagtctggcttttaagaaggttccattctacctattcagctttatttctcactcttagttgggattcttgccggcctctcaaatacggtagtttttgccatactcactactttgcttttgtgcatgctgttgttccctttgtccttcttatagcctagtttcagt

SEQ ID NO: 109558 - DNA, 2783 bp, Homo sapiens
ctattttgtgaaacctcgggcggcaatggaaatctcccctccccgggcgcgtccccggcccgggcgcggcgaccccggccggcgtgctgggggctgcgggcggctgttggggccgcgcgtccggggcgggggcgccggccgggggaggggcgcgcggcagccgggccttgctccgggacgtgtttatttgtaacttagtgctttttatcgtcttaaggaggtatttggtggaggctctttgaagttgggttcaggagtgtagaattggcaaagttattgccagcttcctggtaagttttgggtggcacagagtcacgttattttctgacagtgtaaaggccacgttgtgagggtggtttctcggtaacttcctctttgcaaccgatttaattttttgaacagaagcagacttttatttaagtggaatattaatcttaaatggcagctcgagggaagccatgcatgtgttaacgtgttcagtatttttggaagttcttaatttgctgaaacaggcatcacttcgcagtggcaaccgggattaaatttaggttgtgaaaatggtgtatttcatgtaaaatttgggttgtggcttttaaaaaatgctctctttgttaggttatctaagtgtctctaagataatttggtgattacaaatgagaaatgttggaaactagttaaaaattaggtgttctcagtgtctggagtttacttgaaatcttggactgtgcaggcaccaggggtgaagagttttagtacctatgtgatttacagttgacttaggaaagtttactattcactttcttgttttccaaacaggaaccgtatgctgatctaaacaagcttgttaataaaatgtggggggtgaaaatgccaggttatttttagtttgaattttaagactgaatggttgctctaccccccacctcatataattaagtgatcttccccctccgtttttcctaaaggcttcttcaccagtttggataataaggccctcgtggtgtgttcatctacttacctgaaataacttggaataaataatttcgattacacgttgaagatacaatgagtgactgtttgggttttccagtgtgattcattttcatttttgttaaaataagacccatgctacattgatgtattttagtaatgccgacttcctgggattgtatgttctcaccattttaatagtttatagtctggggaagtagggcacctttgtctccccgaaaacatggtgtgggttgggtggtatcatgggagttgatggcaagcttcccaaatagttgagagttctagaaatagttagcatttacctgtgggggaggggctgcaggaagaaagtatgcctgagagcagttaggcgtgtgatgtgtgattaggcttcttgctcttaaatccaggttttcttgtttggaatatgattttttttttcaaccctatcctgcactgagatgtatgtaatcgcaatcattaaattcataaataactactattttttttgacgtttgagttgttggaatccgacctacaggacaaaatactaaactgtatgggggacgaaaactacgtgcctgggaaaagtttttcttattgctaaggaacttaataaagtgacatgttaatggcataaaaattgttgcaaagctcaccgtcagtttatgacatttttcttttaacgtataccagctttgggtattaatgtgggagacactggtggtaaatggagtgaccccttgcagagatgatatttttgcattggttgcttcaaagaagtgttaagcattttaatacgtatgtctaagaatctttttgatatttgtattctcgacacctaattaaaggttttgcatgattaccatgacaccagtctcccgaaagaattagaggtaactgcttcctgtgttctaggagcctttcaagctaacagaaggtaatataaatataaggggtactgataaaaggaaatgtattaatagaccttttgaacatcaacttgttgattaaatctatcagtgcagtatatatacaaccttgtcagacgagtagctgacaaaggaatctccctagtacaacttgtagcagtactattataaagaattcctgacttgacacattttgatgaagttggttgaaataatttgttgggtttgttcaatttttggtgtcatttatataaaaagaataaagaagaatgtgaatggtaggaagtcaggggagaggcatggcagaaacattggtattcactagaacttgtatttttctagtgcatgtgaattggactcatttcacaaataacatttacagtataagtcactgaaatgcaaaaaaggaaagcagctaacacgagacatttatactttatgctcagacattctggtagtagaggagggctaggaccctagagctgtgtagtaaagaattgttgagtatcgttcagtttaggtaccacgaaggtggtatctcctgctctgccaccaatagaaacttgaagttaaaaagaaaagactctgagagcgctgatgctggagagatttggctgtttacccctctgggattggattcggtaagagtgcaattaattgccctgtaaccatagagccagaggagagggactaggtgctccgggctatgctctaggaggtgtgaggtgctttctatgctgtttataccctaggctaatcctatgaggtagatagtgttgggctttttttgtggatgatgaaacagagatgcaaagaagttaattcccttgttcaaggccacaaaattattaaatgaac

SEQ ID NO: 109559 - DNA, 2150 bp, Homo sapiens
agaatcatctctcatttcactgatggttctttatatgctttttcctttcactcatgggtactataaatatttattatagtcaatgatctatttatataacctttcaattttttattatccagttatctggatgccctctataagacctgctgcttccatgttatcaatcttaaattataatgggaaaagaagatatacccgcaaaatgccttcttacacttggagtcctaaaggtgtcttttccaaggaaagatgggccatccatgctgaaacaagcaaaatacaagtcagtatggaaaatttcttattgtatcttgagtttcaagggggattggtaaggacaacttcacacatactttcagtggccagttgcataaatgtaagtatgtacggaccattgcactggcctcttaactcatctacctgtttccactatgtacccctgaaatctgaatgccagaaagatctttctaaaatgcaaaggatcacgtcgcttaaattcttcttcttttttgtggggggggtggggggggggcgtgtggggcgggcagggacggagtttcgctcttgctgcccaggctggagtgcaatggtgccatcttggctcaccacaaccttcgcctcctgggttcaagcaattctcctgcctcagcctcccgagtagctgagattacaggctcccgccaccacgcccagctgatttttgtatttttggtggagacgggattttgccatgttggccaggctggtcttgaacttccgacctcaggtgatcagctcgccttggcctcccaaagtgctgggattataggtgtgagccactgtgcctggcctttttttttttttttttgagacagaatctcgctctgttgcccaggctggagttcagtggcgcgatcttggctcaccacaatctccgcctcccgggttcaagcgattcttttgcctcagcctcccgagtagctgggactacaggcacgcgccaccacaccaagctaattttttttttttttgagacagagtctcgctctgttgcccaggctggagtgcagtggcacgatctccgctcactgcaagctccgcctcccgggttcacgccattctcctgcctcagcctcccaagtagctgggactataggcgcccatcaccacgcccggctaatttttttgtatttttagtagagacggggtttcaccgtgttagccaggatggtctcgatatcctgacctcgtgatctgcccgcctcggcctcacaaagtgctaggattacaggcgtaagccaccgcgcatggctaatttttgtattttaagtagagacggggtttcgctatgtattttaagtagagacggggtttcgctatgttggccagctggtctccaactcctgacctcgtgatctgcccgcctgggcctcccaaagtgctgggattacaggcgtgagccactgcgcctggcccctcccacttaaaatctttcattggatttccaccgctcttggaaaaacaccaaagtcctcactgtgacctgagaacccccttgggaccctaatcttcctatgcctccctctcctgtgctcactgactgcctctcacatttgtctttcttcaattccttccaaactactatcttcttccttttgaagaacctttacaaaggttatttcttttgcttgaaatagtcttcccttctcatgcctccctcaacttatttaactcctactcaaatgtcacatttttagggaagtaagcctcttcagacttatttgcattccccatcatgcaaatttatatgattacactttttcacagaacttttacagtcgtaattttctgtgcatttgtaagcatatttgattcaagtatggccacaaggctcatgacaggatggacaacgtctattttgctcacaattgtctcttatggcttatgaggggatttaataaatattggttgaataaaatgaataaatgaatgaatgaaatataatttgtaaggtaaggataaaaggcttgttcttagagcctggaattctcttcattgtttaagtctgatgacataacatgaattgggaaatgtattaagaatttccggaattttttttttttgagacggtgtttcactcttgttgcccaggctggagtgcagtggcg

SEQ ID NO: 109560 - DNA, 1002 bp, Homo sapiens
aggatggtagggggaaaaaagaaacacaaaatacattttctagttctttgtctacttgagaagacaagaagtatgcctctgaatccattgagtggcaacaaagcttcaggtagtcgatatgacagtatccggctacgtatttgtctaaggacctttggataactagcagtaggaccttggacaaattacttaacccttctaatgttcagttttcttatctgtaaacttgacataacattatcttgcccacctttcatggttgttgtaagaaccaaagtctaaatgaaacaatgtgtattaatatgccttgtgaattatgaagtgccatacctgacttgaaaactcatttattagatgttattaacctaggcagatataggcccattgttttttggggggccattaataaatccacagatgttgtcaggcttctaactcattcccaaaagcacctgaatgtgaattagctattacaaattattgagcacataactaattctcactgcttacaacaatcctgtaaagttggtattgttatactatttggctaacaagaaaactgcagctccaggtttcagtgactctaattagtaagtgtgagatgatgatctgaaatctatgctctctgacacaggttctgtgttctggcctctgactcccagagtctgattctctgagtctggagtatctgtatatctgttaaaatttttcagtgattttaataggcagctaagctaaggaatcactgctctagcaagctcttggtgacaggagttgtcttgtgaggcaactcagagctctgactgtgagaaaagtcacaatctgcctcctggagcttctactgattggccccaatcctatcctgcagggacacagaggtagcctgaaaagctttcaatgacagtccttcaggcacttatcttcaggggcatctgtttagggaatctgggggccccgttcctaagagtcatattctactagtctttagactccaagtctaaa

SEQ ID NO: 109561 - DNA, 1003 bp, Homo sapiens
tagttaaaaaaatgtacattgacttgataatgatgagcatctttataatcctggacttttaataccatattttttatctcattttatggaactttgtgtactgttaaaaagggtgttaccagctagaaccgccttgcatttgtatagcatcttagaagttataagccgggcacagtggttcatgcctgtaatcccagcactttgggaggctgagatggggggatcacgaagtcaggagatcgagaccatcctggctaacaaggtgaaatcccgtctctactaaaaatacaaaaaagttagctgggcgtggtggtgggcgcctgtagacccagctactcaggaggctgaggcaagagaatggcgtgaacccaggaggaggagcttgtagtgagctgaaattgcaccactgcactccagcctgggagagagagcgagactctgtctcaaaataaagagaagttatggaagaaagacatccagatgatctgatttaacacccaaatactctggaaaatacctctttctcccttcctttctctagaaaagaaaacatagaccttgcatggataggacttaaagtgagtgagtagtaaaattgtagcttgaacttgggtcttctcactctagtgacatgttcatacactactctgcaatatctccactgaaacaatacaatattactgtggaaacttaccaaaggaaaagagaatacatcacctatgttttcttctccagacaaaggaaaggagagagaccttaaagtgtagtgtaattgacattttatgcaaatttagattgtgcaaatttgaaatagtgtgatatattaaaatcactgtatacacaaaattttatataataaaaatctgtgtttttagaaatcaggaaatgtgttatttctgaagtagaaagccaagtgaattataaactgtattatgccatcaccaaatggcaaaataacttatcctttgccaaaatcatgtgaatcttatcattgtatgtatca

SEQ ID NO: 109562 - DNA, 1051 bp, Homo sapiens
cttttccttaacaattactgcatgtcaacaccctttctcctgtcagcataccaaaccctgtacaggaggctggcattgttccaagtagactaaagttgggctttcctcttattacagtcttttaaacccaagggagttgaatgatctttgaacattcctggggattccatttcaagatacttccctacaggctgtggcaatgccacatttaaccttgatccccagaaactaggaatggcctggctttataactcataggtaacagcttgtgtgactctgttctgggcctctaggccacttcagaagtgattaaccctgttatcagaaggcagtgggaagcatttggcttcactatattctgtctccaagtttgattcctttttctttctttttttgcttataaaacctggctgaggaatagttataattttcaggtggaataaactcatgatttttatgttctctcctgtcccacatcaaaaataccattgcaaactggagacataagcaagatttttcagcttctaccatctttatgtccaaatatacatttttctctttaaaaaataacatacagtaaaattgactctttttttggtgtttgattctgtacattttaatacacatagtgtgtcatgtaactatcaccacaatcaggatacactgttctctcaattccctcaaattccctcctgctgtattcaaatctctgccgtttgcccagtacctagcccccggcaaccactgtcctaaagttttcccttgtccagaataacataaatggagtcatagggtatataatcttttttttcagtgtttttttttaaattatactttaagttttagggtacatgtgcacaacgtgccggttagttacatatgtatacatgtgccatgttggtgtgctgctcccattaactcgtcatttagcattaggtatatctcccaatgctatccctccccactccacccaccccacaacaggccccagagtgtgatgttccccttcctgtgtccatgtgttctcattgttcaattcccatctatgagt

SEQ ID NO: 109563 - DNA, 9413 bp, Homo sapiens
tatgacttctttaaaatagaaatgggatcctagtttgggatattcatagtttacttaatagcgtaagagttttctatagcattattatatttagcaatggcatagttttccattgcattcattaccatactttctttaatcctatttttgaatctcttcttccccctaaatttttgcttttataatcactgctgagataaacatattgctattaaatctcagtgtgaaaattcttagtattttcttaggataattcttacaagtagaatttttggattaaagggttagcataagcataagacttctgatataatgcttggaaattaaagtatttttaaaagcgtattcacttttttagagacacagccatttggaatttgggtttggctctacagcaatttttctgacaatggttggaggaatcattttatctttttagatcgaacctgtgtaaaattgtaattttaaaaatccattaacttcacattcacttaaagctaagaatctgtgaattttataatttgaacttagaattacaaattacagtgataattggtcaggttgtcattcacttaatgaatattttgaatatattatttttatctcttgctttagcaggtccttacttcaatccccgctctcggcagagaattccacgtgatctggccatgtgtgttactccaagtggccagttttactgctcaatgtgtaatgttggagctggcgaagagatggaattccggcagcatttagagagcaagcaacataagagcaaggtgtctgaacagcggtacaggaatgagatggagaatctgggatatgtatagtgattatcatattaagatagagcagcttttcctgcctgttgtttgccttttgtcaacttgccctgctttgtggtctttttgatatgagtacattcctctgcttaatgttaatacatgtaacccacagtggtaccatgagatgtcaaaacctgggggcccgggggcggggcggggggaggtgggtgtgaagaacgtgcttcttaggtcataacgcttttgcagggtcaatggtgttgagccgctcatagcatgtgacctacctaccccatcagaaataactttttatcttgctcaagttctggtcaactagtagcctgacggcttagaactttgactatttaaaagtttcattttcttttgcaattttagttttatgtactgttaaagaattgtactgaattctttttagatcacagtaaaaataggttggcagagatttcagtttcccagggcttaaccagaaccgccacctcaatgcattgtcagtagaatacattattagaaactgttaaggtctttcccgggacatttttttctgccattttcttttgcaattgtagttttatgtactgttaaagaattgtattgaattctttttagatcaaagtaaaaataggtcagcagagatttcagtttcccagggcttaaccagaaccgccacctcaatgcattgtcagtaggatacattattagaaactgttagggtctttcccaggacatttttttttctgtatcatgtctccccatcattgaagcgcaaattttcttgaattcaaatactcccaatgagcttgtatacttccaaacagctaaacttgatttccagttgtggatttcacacatataattgccgccttcttccctcctcttttttcccccctagttgaatcagcttgtctaacaagcccattttcatgccccagctgtgctgtgggttttccaagcctcatatttgaatattcaatgagtttaagatggatatgatttcaaaaaatagggccgggcgcggtggctcacgcctgtaatcccagcactttgggaggccgaagcaggcggatcacgaggtcaggaggtcgagatcatcctggctaacacagtgaaaccccatctctactaaaaatacaaaacattagccgggcgtggtggtgggtgcctgtagtcccagctactctggaggctgaggcaggagaatggcgtgaacccgggaggcggagcttgcagtgagccgagatcgcgccactgcactccagcctgggtgacagagcgagactccgtctcaaaaaaaaaaaaaaaaaaaaaaaaaaaatatatatatatatagatatattttccagcagtttttaggaaacaaaggtgtgtttgattttccaatttagagttacttcattgatagtaacatgcgcttatatcatgatctaaaccataagttcagattgcttgatattttgttttgccagacttttttgataatctgattcttacggtttacttacattttcctctgtcttgccagtctggtggccatcctgaaaaatatcaccacctgctgttttatacacagaggaattttttaaaaagcaaataaagtttcactatcttcgtttccagtagaaatatacacgaactatggttttattctttgtaattcggctttcttgaagatactaacaagtatatgatagatcactttggcatctgataattatatcagtattattatttttgtttttttgcgtttaaaataagaagttgtatgaacccaggaggtggaggttgcagtcagccaagaatcgtgccactgcactccagtctgggcgacagagcaatactccgtctccaaaaaaaaaaaaaaagaagctataatatatatctagattaactaatggagtgctctgtgaatattcattaactacattttatctatttactatattttatatgggtaagaccagtggtcatccgtatttcttttgaaagcccacttgatcaggaagtttatattttaagcagtatgtttgcacaatggtcagttcacatttgattgcttgtattactaattagaggtaaaacttctattttttcttgataattctgtaggcaaaaaaaattggggaaggcaaattacaatcattcttcttctgtaatactttgggacaatttttaaacaactcagacccatgtttaaaaacgagttttgtgtgattaacccttgtatagtatccagttactgtcttctcttgaagtggtggttctttgagaagtagaattattttgtaacttttcttctcccagaaacagaagaatcaaatactattctgttaggattctatctagacctgtgactcttagtataataacccttttattattattattattattattttttcagtaatctataaagtagagttgcttagttttgagcaatttagggcttttcttattggccagtaggttattcattttgctgctaaatataattttttggttaattttaacattatagtgctggccgcttggttctatgattacctaaaaatctagtttttttcctccataggtagatgtgtgtgtatgcatacccccacacacacacgtacatatatgttgtcatagagaggtatttcaacccttatttcaaataacagtagaagatacgaacatgaatttatattttgtaaaaatgtcattcatccactttgttttccattggaaatagttttataagaagggttccccttgctctctccacttaacaatttcattatatacgtagaaaaagcagccgacttaagggcttgatgttttttcaggccttgtggattcaggtttccagtttcccagtgcccttaatggatgttatgaatgcataagcacattttcttttaaagaaagaagttagatttatagtgttatttcttacttgctatatttctttgcactaaaaaagagctatgtgtttgttttataggacactttagtaccgtattgcctacaataactcagtttgctccttaaattccaaactctgggaagttgataaataacttccatgatcacttgtaaaagttacatgcacatctgaaaaaaaatcacaaatctctatgacagtaggttatgttttgagcttgttaccttgcagtattcttctctgttccataggtgaaaacaaagggtgacagaggttatcaggcaggaaatgcctaaatagatacatctctgcatggtacaatttctcatattcatgtattccataaacagtgttttttctctgtttaagcagactgttgtttcttctgagtcagtgatatgtgatcttcgttggtttcattttgtgaagctcagtctgtctctgtaacatactttaggatttgcaccttgtgctccccaggaattatgttagtgtccttttctatgctgtcttcaaggatggacagaggcctaaaccacaacaacaacaaaaattagaaaaaaaaatacttagatttcggtaatcatccataggaactcatagcatcagtctcttttctctgtgaataatatctttgtgtaagttgtcataaaaaatcaacgttagaagatgacaattagaattcttcttaggtattgagggtaagaagttgtaaagaaagaaaattcgtgtttcaactaaaagattggattgcatatacctttgaagtggttttgtaaaaaaagttcagttactaaactgagtgtgccctgtaatccttttgagtgcactgaagatgctttgaaaatactttgttggtcttcacattgtgcatcatgtcctgcaacttgtaaatatgtgcatgttgtttatgtttgtctgcctgtctcttattgcactaaattctgcaaggtgaataatttttttataccatttatttggaaaaagttcctcctccaactcttcttcactgaccttttaattagttggtaaacttagaaaaccaggtaggatttttgaagccctgagtttaaaagaagaatcgtggctatttgacatcatccttacattcccctgacttaaaaagctaacaagaagcacgagatcttccacctcattttagaaagcttttctacagaactatatgcttgcttatagctacctatctacagtttgaacagggagaaagggagatatgtatgtctggttacatcttccttcactcttgaattggctgggacagcaagcaacaacagtttgaggtccagtgacctacgtaaaatgagtgtcgtttgtgtcaggggacacatgtaactgtgcaacatggtattttctacagggagggctaggaagggtggttttggaacctaacctactttgtgtcttcattgtcagaactaaggttggaaatgccctttaaagaacttggtgaggcatatgctaggacaatagagctgctttagaaagaaattgagacatgttttgtcaggacagataaaagtttaatgcaggcttttgaacagatgttttaaaacaaatttgaccttaccaactatttttttcttctagccaaatcattgtacaggagtttcatatatgataaaaagtgttttgttattgtttttgctttcttggcaggggagaacccctaccattgtgagcagttactgtcactctggctgaatggacaaatagctgtgtaaatagcttctcataaaacgcttctactgatagctgtttgactttttcttcccgttatgaatgggaggaacatttgtaaacttcctttctgggtagctaccaaaaaacgtactggcttatggtcccatgtgaccttgtctccgttaagcccagaatctgagtgcctttagcaagtgttagcatttcacagagagaagagagacagaattattgctattaatcaccattcataaataggagcttggaataacaaaggtctgtgtgaattctgttctacgtcttttttttcccttttttaaataaatgtcaatttgatatcaagtaaaactattgtcattattgatcagaaaccatacattctgaaaatgaatccagttttcccaagctggcagaagtcagagatcatttttcaccttgatctgtgttgcgtttgtacttagtgaatggcagtgtggttgattggaagagcttgacactgatgtttggaaaaattctttattctagtggtcattttcaaacttgtcttctgtagagaggggaaaaattatgtatttgcagctaaagcgaagagactggcacaataattattaattgtgttagttcatttctatattaaatgaagcatcttcacaaatcaggtttgaagccattaaaagcaaaattttccctagtttaattaatttaaaattctaaattgcctgactacttagaatcttagaaacgccctgctagactgattttattatagaaatgttaacatgttcctcaacattttctcaagaaaattttcagacatatatcaaagttgaaaaaactttgcagtataaccactgctagattctgccatcaacatttgactatacttgtattgccatgtatctgttcatattctctatccctcttttcatccatcgatccatcagattttttttttaaagaacattccaaagtaaattttaggcaatacactgccctaaattcttagcatgggtgtcattaattaaggtttagtattcgtttaaatatctattttgaaagtggtgtatgaagttgataatctgagccaattaacatacttttttttttttcctcctgtggacttttgtcttccagtttctctttttgtgtgtacttagggtgagggaggacaattcctttcaaacacaagtttattttagaattggtcatttttaagtgcttgtcataaattttaaagtttcaatataatttttcttttccccacttctgataatgtatttttgccaaactatgcagcttcttcaaaaaactgtaaattactgattggggtttatgaaatcagcgaatacctcatttcaatctgttgctgcttttctccctcttgtcacttctcctttcactactttcagctgctctaccagaaggtagaggggagtaaagggtcaaacccctatataattagctgttttaaacaactctaggagagcagattaagtagcttagtaagttgaaactattaatttttctaaagaatttgatttgaattccttgagaattgtaattatccacacttcctccagctataattagcagaattaaaaatgattgtactgtacaatgagttgttgaaattgtaagccttagtaaccatctttagctttattgtagtcatgtttagaaaaaattatttttacatatgcctttatttttatgcccactttttgtggataagattctttagataaaatctaaagaattttaagtgactttctccaggtcatgaagattcaatgggtagaattgaatcagaattgaaatgttccagattcatattcttgtgtgtgtttgataaaattcatggcttccaaagtaactgaacacttcctttgggcccttggagggaaaatccatatttttactaattacacttttttttttagacatctggcagttctttgaacttaaacatattctcatggccatagttccaaattaagcccgacgcagttgctaaaaatcttgctgcactgttgaatactaataatgcaacatttattggatgtttttgcattttgatgaccttcatgattcatttataagtctttgtaagtgcttaagtgaccccctcactagtgaaaataataaatgttctatatcatttattattatttgtgtattctctacatgatatatttttttaaggaagagtaactccacatgtcagaatgagtgatattatcctagggcaaagcgcaaatagggcagtttgtttctactctgcaaatatggcatgtataggaacaaaactcttttggagtggctggtcattgttctgccctcttttggtacctgagtacctttctggggttttgtaaatcgtgtgtcatttgtaagaatttcacgttaactctgcgttacttggtgttcacctgtggtatccttgactgaccataatgatttagtttgggtatgatgtgtctgctttgaaatgccttactggagtatgtcagatcctgctttaaagcattccatatatctgctgggacaataagttgcttctccttggaaatatgctctagattcagaagcaaaaccgattttgctttcaccattaaggttgcattttaatgcagttattgttttaaattagagaataaaatgtaaaaccaagggaggctttagaaccctttattgaatggcatggcaaacttttaaaactgcttttgctatttcactagaactatctttgataaaggatatagctaaaaaatgtcagcccaaactgtgtgtaattagggttgtttattaaaattttctctaaatgtcatacagaggcttaagatctgtgtatgctgttgggtcggagtgccagtcactgctttggaagtctgtgttctggggctgcagaatgacaaacgtgtcatgggattaaaaccaatcaactgtgaattgtgaaattgaaactactctttcggttttattttctttagcatattgagtatagaaatctgaaacttatttaaaatttatactgcttttgttgatggctcattttggctgtgtatcctcacttatgtactgatttctgataaaggcttgacattattataacacgcattttgtgttccagtttaataaaacggtttctgagtcttgtctgaaaattgtttggttatgagttgaagatcaagggaagaaggtaaattgtcatcactgagacgttattttgatgccgattctcgatgactgtgggttctccattcatcagtctgcacacagtctgccatggtcttctggaaatcatgcaagtactgtaagcttttaggttggcagtagaatcaacctagctgcccacactgcccgttctccccatcactggagttagcctgggactggagtgagttctcaattttgttggtagattttaatatttattttcccttcaaattttaagaaagttggccttagtaccataaacactgctggaaataaacacattattaaaaagcatatacccattaatcttttgggggtgttttacatgtaaaatactcttacaaatataatcaatttatatatgcaatataattgagatgtggtcctttaaacagcctggttttctgtatacagtgtacttttgaatttaaatgctcacttaaaaaagtagattataggctgtaagatgctgttatgctttaattaatcaggatgcaagacacatacccttactgttgtgggaaaaattcttcggtctgcacacacaaaaaatgtttctgaatgaagtgaatagatcacactgaatttgtgtgttgtaaagtactcaaggcatcagcacattttattaaatcatctccaggagattcttagctttaaaaaagccatgataatatgcaccaaaaaagtcttaaatgatttcagattttcagcctttttaaaggcatttctgaggctcattc

SEQ ID NO: 109564 - DNA, 1071 bp, Homo sapiens
atgcctccttcagttccccagctgtggctcaggctcactatcaagggaagaatcatgccaagaggctgcggctggcggaagctcagagtaactcattctcgtaggtattgccattttctctgaggccaaagtgttatgtgagattgactgtctttaaagaaaaagagtagaaagggattcttgtttagaagactcactcttttttaaacttcttttctccagggaatcctcagagctgggtcaacggcgggccaggaaagaagggaatgagtttaagatgatgcctaacaggagaaatatgtatacagtacagaataattcaggtatcttgtctgtttccacataccttgggtacattctgtacctagtctcctttgtttttatttcttttaatgataatagatagccctgagaatttggagttagtcagtgttttattgaattagtctagtggcggcctttcaggctggtgtgtatttcaggtctcatttatttactttattgttgtaaataatatattatttattttggttttacactatagtctgtgttttaggatctcttatctttgtccccttatgtttgtttatatttccagctgagaaatgtaaaagacatgataaaaatgggctacttggtttaaagttgtaccatgttaaagaaaagattctaaagcagtgttttttaaccaggctagtgaaacagaattacccaaggagcttttacaaaatgcctgaaccatgacttagagattttcaatgaataaatttggagtaggacccagacatatgtgtgttttgaaaatgcttgcttgatgcttctgatatacacatttagttcacaaacactgatttataggaataaattctgcattttctgattgtcttcagtagggagagtgggctgagtagtccctcaccctcccctctacttcagcctctgattcatgcacatgccagcagaggtcatttacttgaacagtgaaacaaatagaaaacagagctaactgaaaagccagagaagcctactaaaaaaaggacatatagaaagcacaattcaggccaggctcct

SEQ ID NO: 109565 - DNA, 1023 bp, Homo sapiens
tgcgttttttttttttcctgtacatacataacccaggagaaagtttaatttataaattgggctagtaagagaataacaacaataattaattagaaaaaagaacaattataaaaatatactgtcatggaaattatgtgaatgtggtctctctctcaaaatatcttaatatttttggaccacagttgaccatagctaactgaaattgctgaaactgcagataagggtggactgctgtactcattttatttttatttctagggtaaaaatcatggtaagaaactccgaaattactatgcagcaaatagctgtcctcctcctgctagaatgagcaatgtggtcgagcctgcagctactccagttgttccagtccctccgcaggtgagacatgtgtgtcagggtgaagcagcattagggtggaagctgtaatatgcacaaatggttatagatgacatttgtcgtccatgtgtccattagggtacagttgggaaaataatcctgaaagatgctgcttggtacttttaactccttgaactacagtgctggatttaatgcaggctattgttacgtgagtctttatacatttcttaaaattctgggctaaataggccaggtgcggtcactcatgcctgtaatcccagcactttgggaggccgagacgggcgaatcacgaggtcaagagatcgagaccatcatggctaacacggtgaaaccctgtcccaattaaaaatacagaaaattagccaggcgtggtggcgggcacctgtagtcccagctgctcgggaggctgaggcaggagaaaggtgcgaacccgggaggcggagcttgcagtgagctgagattgcaccactgcactccagcctgggcaacagtgcgagactccatctcaaaaaaaaaaaaaaaaaagaaattctgggctaaatgatcctgaatgtctaggctaaccccaaaatgaaaagagagattttcaaacatgtgttcctttattgcagttcatcccatttatttcagattttgccttccagt

SEQ ID NO: 109566 - DNA, 1580 bp, Homo sapiens
aaaaggaccccttggcttttcttgggtaattttgtggatggtggtgccatttacctactgtggatgactagtggtggtggtgatggtggtgatgagaaagttctatggaggaggaatcaaaagttgttttaagttggatatgcctcttaagacgtgaaagtatggatgaccaggaggaagctggatatgtggttctgaaggtcaaagatggagattgatgatttggggagtcaccaacttactcatggtatttgaaagctataggtctgggtagaataacctagagtcagagaataaaagagggctaagggtgcgtccttggacattgtagagtttagaggtctgatagaggaggagaggtggggagggaagaaggagtatagatgatagtaggaggaatgtttcaagaaggaaatgaactgtgtcatgctactttgagttccagtaagatgaaggcacatatgtgaccactggatttgactctggagttcactgtgaccatggtaaaagcacctttagggtattgaagtgaggagaagatggatcttagttcattactctatttagctgcttaggtatctgtctcctcctctatgtgctagtccttagtttatttctagggcttagcatataaatagatggtgaataaatgtttgcctgcaggtttgagttttacaatgcagtttaaagaataatatactgttttacccttatttagaatgcttttgtactattgacccttgccactagtttgtgtcagttcaaggaatataatcatgtgactaataaaacgtgatgagaaaggcaagttgatgttagtagaggttcctagtgcatcttgaagccatcatgctgtagtggaaaagggccattctttgatttggaaggcctgtctcaggctttggctgtgctatttagcccttgagaagggagctgggggcaagctccttacagtctctggattgcagttccttggctgtcataaatggacaatattaacaaattcctcttacaagatttttgtgagcagcaaatgaataaatgcaatgaacatcctttgtaagtaaaaagatactctgtaagggcaattttaaaagaataattggattatccatttcattactaacttataaagtacattagatcagagtgtcatgaaattcatatttatctgtggcatataaatggcaagaagttgggtgaggacataagtcactggaaaatgtgatacttcttttttttttttcctaaaatcccatattcttttcttttcttttctttctttccttttttttaaaatttttttagtatttattgatcattcttgggtgtttctcggagagggggatttggcagggtcataggacaatagtggagggaaggtcagcagataaacacgtgaacagaggtctctggttttcctaggcagagggccctgccgccttccgccttccgcagtgtttgtgtctctgggtacttgagattagggagtggtgatgactcttaacgagtatgctgccttcaagcatctgtttaacaaagcacatcttgcaccgcccttaatccatttaacccttagt

SEQ ID NO: 109567 - DNA, 5621 bp, Homo sapiens
acatttgtttttttcttttattttacatttttgcgtatgttctaaactatgtagttgacaagattagtaattatacttaatttcagtttcctcagtgatacagtgaataaataaattagaaaatataagaaaagggaaatacaatttaggtaaatttctcaaaaatcagaatttttaagtggaaaggttgaaggagaacaggatgtaatgggacaatttaagcagctaaaaaccagggtaaagatgggaaagaaaagaggcaagcaagtaatcagaaagtaggagcttacagaaaatgaaaagtttgggtataataaagtatattgctaagacttcagaagcaaagattcgaatgagactgatgttattggtaactcttaaagagagaaggttttaacagacaactaaggcaaagcagttcatgtgtaaaaatacagagcaattatgttagggtaacatagaagaaaggtaatcttagaagtgaaatctggatttcaataagatagaaatggtcaagatgagagtggatagtgcaaagtgtagatcagaataataaacagagtgtgaacataactctagaagtgggtgagctaccaaagaaggaaagcgtagaaatgttagccaaaaagatgcatcagagggtgtacatgaataagcagtaataaaagaaagattactgaagacaaggctaagaccaggccaggtgtggtgcctcacacctgtaattctagcactttgggaggctgaggcgggaagatagtttgcgttcaggagttcaagaccagcatggacagcataacaagaccctgtctctacaaaaatacaaggaaattagctgggcatagtggcagacacttgtagtcccagctactcgtgaggctgagacaggaggctcacttgagcctgggagattgaggcagcagtgagctataatcatgccactgcactccagcaaacaaagacaacaacaaaaaacacacaaaaaagagaaggataagaccaatgagtaaggcttaccaagcacaggaataagtagaatgccaatgattgtagactaataaagtggtttaggattaaatgagatgatggatgtaaaattttatttcaagactaaaaacttactaatttttaatacagagcattaccaagctgtaccttcattatttcagttatgtgtgagataaaatgggtcacgggtagcctgtttatgagctagaaacacatttgtgtgaagtgataaatcactgtgattacattactcaaaactttttagtcagttgatgccattgttgaaatcgtggagtttcaaattgcctcgggtattgtaaacaatggtggttacactagagccggactgtatcatgtgccagtaatccaggacacgcagtggaaactgcccaataaatacttccctttaagctcactagcattttttcctgacatcccagtgttcccaagctggggctaccttagcagtgacccatgtgtatctgtagtcatcacagatttagttttattccaaggacttttaaaaactggtcagttggcttcaaaacatcattagctattgttttatttttaatgaagccatcaaatattatattcttaaaattagggctttggatataacttaatttaaaatccaatctttggaggagaaacatattttcattttattaaagtctatctgcaggcttcaggttacttagggcaaggctggcatggggtaacataccactgtttcatcagcataaatgcccagaggaagaattgctttagcagggaaggttattaacagaaataaagaaaagcaaaaagcacggatgaattttgctaaggcatccacagtttaaagtcaccagtttatttgctaatttgcatgtatatatttaaaaagatctacttactcaaagtacatttataaaatttgtcataaacatggctttctatttgtaatagttagtggccagatagcaacctaccatgaattagattgattagagaaagagaacacaggtgaaagaatagttttagaattaggatgctgagtgtagtggtcttaattcataattcataatgaagagaatgctattagatttttcccaaaatttaaagcactgattttggcacttacattttaatattgatcacccaggtttggatcactgaattaaatctcagctaattttcatgtattcaaaattctcctatctgatttttttccaaatggacttgcagtggactgagaatggccaaaacacacttcagatttggttttaatgcatgtgctttacacgtggcatatatgctttggaatctaacaactttgggctaggatcttggctcagttactttaggcaagacactgaatctctctttattcaatatctgtaaagtaggggtcattgtacttcctctgcaggattgtgagacttgcatatgttatcttaataaatgctggttgattgaaataggttgctattgtttagaagtgtttgggtctcaaatgagcagaatgagatggcacacagctgtcttactgttgttactaccttgatagtaacttgctgtaggaccttgtgtaaataagcaaaactttgttttccttgattgttctcccgagatagtcttttagatccagataccaggttaccttaaaagattctcatgaagaataattcaaccaacaaatgaggcaaaataaaatgattttcaaatgtaaatatgctttcaaccatactactcgtctgtcagcttagtccatttacccaataatcaatccttgttggttttcttgttctgctctctgaaatcgccagctctgtaggcttttctagctcttgctttgatcactttagaggacagaagctctctgtgatcctgccagttttttgcctcctcctctagtctacccctacctcatttcttcttatttcgaaatgatagataccctttcttttgtccaagtttgattcctcatcctgttttctggatttcatcaccttttcacctcaatcaaaaactatgcccaagtcttttctatataaataaaaatagcagcagcaaccttctgtttacttttaatcccttctattagcaacctttctcctctcctctcctgtccttagcattctgcaggtagaattgttctcttcaggtctttatttcccattcattcctcagcccactgtactctgatttccattcctataggccgctgaaatggtcctttccattgtcaccatgatcttacaggccaaatctaactccttctcacttgacccctttgtagcattagccaatggtaacaactttctcctaaaaaaatttaaaaatatttttatttaaaataatgcctgaggaaccaaaggatttataatgaaaagtagtaatcacctgttctccacccattccctaccttttttttcctctccattctcttctcctttctgactcccaacttgagctggctatagttttactttgacactgtcaagattgatcacatttttatccattctgtcatcaaattaagttttccatgctctatttgcaggttgatgccaattgttgaaaattaacattgagtttttgcattattgtgaatagggaattttgcactattatgagtggggaaatattgttcactgcagagctgtttccttccctgtatttccagtgtcatgatcccatgctactcacaagagatgttcaaataggtaaccctttcctgaatgccaccagttgctcaaaattgtgtctattttagtttgcttcatatgtggattataactttgaaataactttttgtttttccttgagtttctggtacttaaaaaaaaaactagagagaagaatcttaagcctttcaaaaaaggtattagcatctcaatctttctttatattgcttacaacccatttcatttatcttcatgaaacccactgttttctgattctgattttgactagttgttctaatttggattagttgttccatatttgaatcactacttcattgtgtaggttttgtatttcccggagattttagttgcttttcttctcccctctttttcttgcattatatttttcatattatcgttctcccctccatccctaaatctcaaccccactatttattgtatggaattttccttttatcctagatccctctatctccttgctccattttcagctggagtctgttgggtttgctgcacagctttgtcagctttggacttaccactctttaggtgggatcactattttctaaatatatgttttcttttttaaatcttgttttgttggagtatattgtcacattaaggaagaaagaatgaatataaatgtacaacactttttttttttcttgaaataaaatgggggagtaatgggaaataatttttttgagcccttgcgtttctaaaaaatgtttgcattgtgccttcatgtttgacagttcagttccaggttgaaaattatttttctttggaatgttaacagctgccctctattttctgtttttatctaatgttgctgaagagaaatcttctgattcttattctttttttggtgacctgttttaattttgtgtctttcttttttttcccctggaagcttttaggctctcccttttatccttgtagtctgagatctgacaatgatggttgtgtctagttttccccaggatactttttcatttgtcctggtcagcactagtagatcctttcagtttgtgtacttctgtttctcttgctctggagaatttaaaaaatatatatatttttgagacagagtctcactctgtcacccaggttagagggcagtggtgtagtctcaactcactgcaacttctgcctcctgtgtttaagcgattctcctgtctcagccacctgagtagctgggattacaggtgcctgccaccacgcccagctaatttttttgtatttttagtagaggcagggtttcaccacgttgcccaggctggtgtcgaactcctgacctcagatggtccacctgccttggtctcccaaaaaaaaaaaatattctttcttagtcactattctccagatttttttgtctttccttctaggaatcctgttagctattgtcatggttctgcttgattgattcttttttatttttctagctttattgaagtataattgatggatagatactttatattgtttgtctctgctatcttttatcattctttttttgttttaatttgagacatgttcttgacttctaatctcatattgaattttttttttgcagttgcaagatttaatagagtgaaatagagtgaaaacaagagctcccatacaaagggaggggacccaaagagggtagctgttgctggctcgaatgcctgggtttatatcccgatcattgtccctcccactgtgctctcaggcaatagatgattggctatttcttcacctcctgttttgcctaattagcattttagtgagctctcttactggtcgggtgtgagctaagttgcaagccctgtgtttaaaggtggacacggtcaccttcccagctaggcttagggattcttagtcgacctaggaaatccagctagtcctgtctctcagtcccccctctcaacaggaaaa

SEQ ID NO: 109568 - DNA, 1366 bp, Homo sapiens
ggaagatatgtttgctaagatttttagctggtggtcttttttttttttgagtcacagtcttgctctgtcacccaggctggagtgcaatggcacgatctcggctcacgaccacctctgcctccccggttcaagcgattctcctgcctcagcctcctgagtagctgggattacaggcactcgccaccacacctggctaatttttgtatttttagtagagacggggtttcaccatgttgtcttgaacaggctggtctcgaactcctgacctcaggtgatctgcccaccttggcctcccaaaatgctgggattacaggcgtgagccaccacacctggacagctcgtggtgtttttgtctgtgcatgattatcattaagagtgtttaagtgtaagtgtgcctgagggaaggggtctggactaggtgacatttgatgtccatttcagccatgtgacttttagatttagccgtggatgcaatgctgttaatgttcacgggccaaagggatagcagttggaactgtgccaagcaaaataaagccaaatctataaagccattctcagtggaagagcaccgtgttaacatgaattaacaggcaggggaagtctgctaaatgaggccaaaggaaagaagtcccaaagatgggtttggagaagtagaagaaagggtcagattatgttgtcatttacatgttatcttgctgaagtctgattttcaagtgagtttttttttctgtttttttgctgttgattcagatttgaagaccttgcttctcatcacccactggattatgccccaggcttccctacccaatgatcctcttgcaacacgccgtgcttcctccacctaagcagccctcaccctcgcctcctatgtcagtggccaccaggtctacaggaaccttgcagcttccaccacagaagccttttgggcaggaggcttccttgcctcttgcaggggaagaagagttatcgaagggaggggagcaagactgtgccctggaggagctatgtaagcccctgtactgcaaactctgcaatgtcaccttgaactctgcacagcaagcccaggctcattatcaggtaaagggagaaaagaaaaccaggcattgagtagggtgaacatttcagggctctggctatttagcagttgtctctccagatatgactgtgcctggaataccaagatggcttagagaacaactaactatgaatttgtttgattaaaagccttatgtttttactttaaaaataagtatcactttttgtagactggatctcaacctgttacactaagctgtgtggcatgcgatagcttaccagtctttgtaggcaaatgtaaatgatctatgctggcatctgaacctgtagt

SEQ ID NO: 109569 - DNA, 1022 bp, Homo sapiens
tgtgattaatgagaagtattgttaaattctatgactaatacttatgcactttgtccttaactacattattttcccatcacgctgatttcctttgttgcctccccaccccaaatttcgtctgaaagttgttacttgattttcaggtgctgtgtagttatcaaatatggtaaaatagactttaacttttcaaaatttacttgattcattttagtaattctattattgccataatgtacacatttccattgcagatggaaaatttcagcagcttaaaatagccatattctattgaccaagagaagaggttttaataatactgtattgagagagtggagggaattgtggattttgaaataaggattctaatttgggttaattagaatcttgggaactcaaagggtgtactgtggttcattttgagacactcagggttagacggcgccatctgggggggaggcaggagacattatggataaagattgaagagggagaggaacattttgggtcttttctgagggaattataatagagactatcagttatttgttaagaaggaggagggaaatagcctcaagattgaggaactggaattatactgtggcttatggtggtgtgatccattactccattggacatttccttgataccttattttgtgtaggtaatttacctagagaaggaggaaaaatttgggttttacaggggctgatgaatataatctaaggctgtatgaggcagggctgtaaactcaagagctcacagagaacaggcaagtaacaagtacaggcagcagctgagtggggactgaggtgtcccagagaaggcaggcctcgctagagggcacagtgcctctgagcactaactagctaattgcgtcccatataggaatgtgggccaagtgatgccagatcatcctttttcaagagaagccatgaatctcttgatttttaaatgctaacaactaattcgacttaaaaaaatgaaaacaaaactgtatattccaaacagcacatctgtggctg

SEQ ID NO: 109570 - DNA, 2371 bp, Homo sapiens
gtggggagagcagcagtttaaaggttctgttgcagcagtttaaaggatccactcagccgccttaaccgccaaccagcaggctaagggaggaacagaatgaacaatgtttggatcccaatgactggagatgaaagttgcaaaagctctgcccaggcttctaccaaggattaactttccagggcatctgctgaactgctcttcggggctgtctgctgagattggcggcgggaccctcccgcctctcactcgtgcctttgttccccacgccggcctaaccccgcgcccctgcgctcgcggccagggcacctgacccacgcgccgcccgccggggatgcgggagccgccactgctaccgctgccaccgctgccgggcctgctccgccaagcacatgcgcagtggcgacgccgagccggcgccctcagtctcctcctccaccgcctcccggttccgcagtcacttcctgcagctgtttccctgtgggtcgggttggactgacttttgacagtcagccttcggctgcggagggggctcggcggcggccggcggagaaagttgctccgagaagaggctgggtcgagctgggccgagccgggcgcgcagggcgggcgtcgcgggcgtcccgggcggacgcggcgcggagactgccggcgcgtcccgggggttccggtaagtgcgggcgattgggagccgcggagctttcaggacgagcccctggagcgccggggactagcggttcctttccgatgctctttccatctgccctccacgtgacagggcttgcgctgcttctatttatcagtttgcttgtttcaggcatttcacgtggaccaggtggatcatctgtgcgtgcagctgccttggccctctcagttgcccccgccccgtgggagtcgggggattccatccttcgtgatggcatccataccgggttgaggtgcgtgtgtgggttcgtgtgtatgcatgcacatcttaggaatgtaaggtggatgtgggcgacgctgaactgtctgtagctttgattcaaatctgtaaacagttctctaggattaggaaccgtcacagcggagactgaaaaacattcgccaattcaccaaggcctcttccccagttttctgcgttcttttgagccttctttataggatacaccttgcctcaagtgattattattattattttttttaacttttctccctctcattccttcttgctgcgttctgatgacctctgagtaatgctcgctgcctttccctcatttccagaattcccaattacagacttacctagtttgctgaggtgctcctaacctgttcctttattctattctctttcctctgtagatttctccaaatgagacaagagattgtctttaacacagtatgtgaagagtaggccccagtccaatcattaaaactaagtatgctatgacaattaattttctttaaacagggtaccttgtgaagctttgattttctttaatgtcgtcttagctcctttccaaaccaggacattaaccagcataaatccttcatttatgccatcgcaagcatcaaagtgactggtttttaagatttgaagaatatttatgccagtcttcaaattagtcccttttaaaccaatgcaacagttgaacagatctgagttgcatgttttgggtctctgtattccatcattcatgcattcactgaagacttggttttattcattttaagatttatattttatactaatttttgtttgcaaatgtactaatatttgatgcaattgtcatacatagatttttttgaggagtcgacattgtgttgattgttaaatataacaagaaataaatttgggatatcaagctactctttaaaaattgtaaagatcaaatgtgataatgggtaaatctgtgtttggcaagaattttttctttaaatcaggtaactgtcacctctggtaggaggccttttgtgcctctgttctttgagaaggatctttattttgagggaaacctgtagataacactgggggagacacatgctagaatttcctcaagtgaaagtgagctttcataaaacaagtccagacatgcctaggcaattggtagcatttgattttctgtttatattgctgatttcctttatccagaggttttgacacccccccccaccttttcactaatgaactagcagaatgtttgtggcaatttgacatcagtagcttttcaacattatgaattattattattaggtagttaaactttttaaaagctgttctttgtctacttagttccgttttctaaaatgaccatatctgtctttgctttctggactatctttgcttgattcaattaagagaaataataccattacagagaacctgactttttaa

SEQ ID NO: 109571 - DNA, 1272 bp, Homo sapiens
tatgtgctggattgcgtgttttaagaaaacttctggaaaatactcaaaataccgtgttgctaagttagtttggataaatcaaaacactttgctttcaaagcaactacagtcttaacaatttaacgtgtctttgtattcaggttttaagtttttggtgttttttttttttccttttaactgaagcactgaggtccgattgacagcatagatctccatctaaacatcacatgttctggaaatttttaattatcagattaactgttctgcagtgtcatcagccaaaattatctgaagaggactgtgtgtgtttacgtgtgtgtgtgtgtgtgtgtgtgtgtgtgtgttggtattttgcttaagttttttcatctcacattttgggacaaaataaaacttcatagcttttttcaaaagtttcttgtgctttttcaaactagagtactttcctattaaaatcacaaaatagtttatttaaaaatgatagcatatcgtaataatagcatcatgggggaaataacaagaaagtaaaggaatattaatattgcatgattgtgcgtataaagttttaaagacattcctgtcagttttaaataattaaaaatgaaacacctgtaaatatagaagagtgtttttatttaaggttaaaaaaatttaactaaattggttatagcattaaagagatgttactaaatacaaatattgtacttaaactgaaaaatggcttcatggaagtgtaaattgtcatgggccttgatatatttaaaagggagactaaaagtgcagtggttttgcttgctctgtgcgtggaacagcctttctggtggcagagcttccttcctgtcaggataaggtcctctccatcccaaatcagtatccccttaaaaaaccaaagaaaaaacccaaacttataaataatgcacaacataaagtagactgtaataactttttctctaaaccagtttactttgtgtgccgcttcttataagtaccctttactgaataaagagttttaaacagttacgattaccatttaaagggcacttgctctgttgatctgtttatttgaagagaggtaacttaatcccatttgatctcttgagcagctacagtagcattaaaaggatcagttctctattttgttattttatatcttgaattccaagataggggtgattctttaaatgaagtgtttcttaagcattataaaatatttcatctccagtgaaagtatttacaatcttaaaaattattcagctttagaagtatatgtct

SEQ ID NO: 109572 - DNA, 1106 bp, Homo sapiens
taggttacagagaggctgtgtgctgtggtgaaaaaaaattcgatcacgaatcagaaaacacggtttttccattcatctattaactagctgtttggcctaagatcttggcctttcagagcttgtttcttcacctgcaaaatttctaatacaactcccaaatgctgagattcctagtatgttaaagcctgtttttttatttcagggaagagtaagtaaatcactccctagagagaagacagtctagctcagtttgttgtattttcagaagctaagatcattttgtctgcctgtttataaatttgcacatattttaaaggtccttgtgtgaaattctgtggcagagaaaagctgccattggaaaagaatggagtggaaggattttccccccttttttgaaaccgttagtgactttggagaataaattgctacaggtgtggtcaaaattttggttactggcactgggagcaattaaatgactgccagacattgagagtaggtcatctactgcacaccagttgccagggttataaaggccagcagacttgtcacagcacccttaatagccactggccatcatccttacttgttaaagacttctaggaaagtatattccatatttcccttggtaactcatccctctaggtggttttcagaaaatgtgttctaatcttagaaacataaatctgtaggcatggtaagcctcttttttctaggtctatcctcagttgtgcagataagtatgtggaaagataacagaaatcattgtatttgatcagaaagcagtgatgtttatgctattgatttattgtttttttctgttaatattcaaattaccttcaacttttgaatattttttaaccagcacactgctcaggtaatgagatattatttagagttattttgaggatgtactcatttttcaacaagctaagcatatttctgcagcttgtttttctttgagagttcttgcttttccaagttctttttcctgatggacttatggcaggtctagacctgaaagtactattgtatttcaaaacaactgactgcctttagccccacagtgactgaactgtatttttttcttaggaggttaatgtctttgg

SEQ ID NO: 109573 - DNA, 1105 bp, Homo sapiens
attatttgcagttgagaccatgataggcagcatcttatggtatttatgaaagtgatatttgtgttcttttttctaactatataccaattgtaaaagttgaacatgactttttcaaagcagtttctatacttgataataacagtggtagtaaaactcagaacagtttaaaatattagtaattttacagtgtagagacttttcttcactagaaatgaccagctttcagatttcttagtgatattatgagactctagatttcttcaaaatcattttgagtaaatctaccagtgtataactgctaaagcacagttaaatgtatcatgctgtggtcttttttgtttgtttgtttggtataaatatcagacatatatgtttgtttactctaaaactaattttttttaccaatcaaaattgaggcacgtaatctgacaatgggacaggatatttgcagtcaggatagtcttagaaaagccacaaaatatggtcgatgtacttagacttctttaattttccttgccttttcctaaatatatctcataatgattaagagcatgttctctagagtcagactatcgagattactagttttgtaactttgggaaagttatttaacctgctaaatattctccgggtaatacgtatttcttcatttgtaaatgaggggtaataactacctacatcacaatgttgtaatgaggattaaataaataatacttgaaagcatttagtaaagtgtgttgtacatagtaagcactcagtaagtatctgtgaactccttgagagtaagaaccatgttacattcatccatttatttgggtgctttaacattatgaagtgaattgaattctgtcccttccaagaatttaccagtggatccgatttctggatagtgggcaataaggttgccttcaaacaagtttagagtagttttcagttctttacaatactgcttgctttttattcgttaaaacttttaaaatttcattctagctctaggaatctgaatgctatttcatacctactcctaagggaagttagcatatggatatttagtttaataggaatgaggaattaatggacagaaggtattaagtaagtgaatgta

SEQ ID NO: 109574 - DNA, 1017 bp, Homo sapiens
atatggaggtttcttcagaaattatctgcgatttttgttgtaattgttttcattgttgtgtgcttttaaagaatgacttttattaagcatgcttccaagcttttttgtacatgaaaaactgcatataattttgtctcttttagggggtgatatgtacaatgaaaaaataacatgacattggattgccctggggctgaccaagagtttgtttccatagtaagggattatgactaatttaggcattgaagttaagaatttattacttatttttaaatgacatcacgaagagttacagctgaaacccatggaagaagttttcttgatttttctatatgtacacacaaatgtgtattttgaattcccataaacccaaactttaatataaacctgaggagggggagcattatggactttgtatatgctgcctcccttaatcctcacaataacacttctgatacatgtgtaatcacttcatttccatgattaggaaaatgaagtcccacatcaaattaatacagtagaatctcacctcatttattttacatgaaatcaactgtacctactcagtcaaacataaaaacgtgacaaaaataatacagtcatgtgtagctttacagtggcaatatgttgtgagaaatgcatcattagatgatttcatcattgtgcagacaccacagagtgtaccgacacaaacttagatggtatagcttactaaacacctatgctatctggtacagcctgttactcctgggctacaaacctgtacagtatattactatactgaataccataggaaaatgtaacacagtggtatttgtatatataaatatatctaaacatagaaaaggtacagtaaaatacggtgtaaaaaattttaaaaatggtatgcatgtataaagccttaccgtaagtgaagcttgcaagactagaagttactctgggtgagttggtgagtgagtggtgagtgaatgtgaaggcccacgacattactacacactaccgtagacttgatgaaca

SEQ ID NO: 109575 - DNA, 2099 bp, Homo sapiens
cttctttaaaaaaaaaaaagtgagaaattagcaaggtaatttttaattttgtctgagaaactataaacagataaaagtaaggtatcttttgagtggaaaatgaaggacagagcgctaaccctgtagcttattagctatcaaaatatacaatacaattagagtaaatgaaagagttgaatactggcatacacattgatagtaaaattggtaaaagggaatagagatcccagaaacactctaaatatgataaagaagtaatcagaaattaggagaaaaaggaaaactaagatttgtttttgagagtattaaatacttaggaaaatagacttttgaatctttatttcatcttacataccaaaataaagtctaggtaagttgaagagttaattggaaaagagtaaacttatgcctagtgtcattttaaaaagacatttatgtgaatggggaaatactttccaaagcttcaagaattgtaagtactcaaaaggaggaacaatcattcgttcgactctcaaataagattggggcatggcaatgtgccccctctagtccaagctactcaggagactgaggcaggaagactgcttgacccccggagtttaaatgcagcctgctagcaagactccctatctttaaaaaaacaaaaaaagaaaaaaatctctttctctcacctcctctccccccaacccccatacaagtgaacaaattaaaagatgtgcagaccaggattagagttctgcaaaaattcaatagatgtttgtctttaaatttttactacaaatactttcaaaagcaccatgacccatatggatgaatgagcaaagaatttgagaagttgggctcatttactaaagaggaaatgcaggtacaagcataagggacatgtttttccctgacaggtaattgaagaagtgaaattttaatatgtagtgatttttttttttttactttttgagttagcagaagtatttttctaatgatgtttttgctggtgagggtgccatgcaatgtgcttgtccatttatttccattgacagtctgaattggtttaaccctttcgaaaagcacgtgaacaatttgcatgcctttaaaatcaacatacagtttgacccaataattctctttgcagcattagatataataatttacaacagcttatgtatttaacaactaaactgtttaacatctcccgtggaaataggttgtcatagaaaatgtttatgaagagtttacaataatttgcggaaatgtttttgtagtgaaaaaagatacaaaattatgtatactatatgagtacaagtatacaaaactatagaaaacaaagaaataaaccaaaaatatccagacaaaactgtaagagaatacataaaagatgctaatatggtgtcttaggtacgttttcttttggtttcatcattcatctgtgcaccgctatatttccgatacttacagagcacaatcccaggcccataatagacctttcagtcagtgcttaagtgaataaatttctgtaataaacatgggattcatttacattgaaagaaatatgaatacactttccatccaagttaagaaaaggaaaaatgtgggaagcactctagaaaggaaactgattaataccttacaattagattttgttttcagaatgttttcacatctctattttatgcgatccttttctgttctaatttaataatatcattacttacctaagttagaaatttgtgctaaccggctgggcgtggtgcctcatgcctgtaatcccagcactttgggaggccaaggcgggtggataacctgaggtcaggagttcaagaccaagcctgaccaacatggcaaaaccccgtctctactaaaaaatataaaattagccaggcatggtggcgcatacctgtaattccagctactcagaaggctgaggcagaagaatcacttgaacccaggaggcggaggtagcagtgagccaagattgcgccattgtactccagcctgggcaacaagagtgaaactctgtcttaaaaaaaaaaagaaaaagaaaaaagaaatttctgctaaccttgattctatcccttttgacctgccaaatccaactgattacc

SEQ ID NO: 109576 - DNA, 1045 bp, Homo sapiens
acagattgctggatattaagccatttgtctctcactttcacatctaaccttctttactctgctttgtaatgcttatttatttctcttgcagaaagcatgttatagtgccttatgggatgtctacaaatatttgtttaatcaaattgagctaatatttatgtaggaaacattttattctgcaacaattaaggcaaacagatatatgtgtgtaagtattcacatgggtttccactgtagttttgaaagctcagtttccaaagtttagatgtgtttagccttactgtagacttcactcttaaggtgttgatggaaatcaacaaccagctgcaaaattcagatccagtatgccataggatacatgtagccacggtttaaaccaaatgttagcaatgaaatatttagtagcaactgttcttttaaaagaaacattttagataattagagtcgtcttgtaatatcttatacccagctgtcagctttttactttttctgccaatatttctggaactgaaaccaagaaaatggaaattagggcaccacactttgaaatgtattaaacacttgaaaaactgttatatcttataggatttccaaaaagagttcttcagtgcctcagaagatttttataaaaagcaattatctacaataaccctccccagtattaagctgaaatatacacataccttagtaaataataggagcatttgggaagtggaagaattgcctcttaatagctactggacttgaagattattaaatttgagcattctaattccatttttgaaagtttctgatattgtttcttaattttgttaccatgtttaatcagtatctcactagcctttcattcatttctttagcttctgttactatctttctacttttaagatactcatatcttcattttctgccacatcaactttcagtaatattcctgattcctcactatgttagacagtgataatagtgtctcattcttcctttcaagtctttcccacccttctacaaaatgttatatataattactttttaaattgtcaagtat

SEQ ID NO: 109577 - DNA, 1237 bp, Homo sapiens
ttgtttagaaatgattggtgacacaaaggtctgtactctgatattttaagatccgaagtgtattctaccccttttttataaactattttgcagctgttccttcacgactttgctacatcttggagatcttttcatgtcagtacctacaagtctatatcattgatattatcagctatatagtactccataaaatgctttattataatttatgtaatcatcttcctattgatgaagattttggtggtttctagtttttgctttcatgaatattgttgcaatgaatattgtttggcttacttttgggtgaatttttacaaagacatccatataataagttcccagtagtggggttgcctaatctaagaataagtgtatttaaaatttgaatcatattgtcagactgtctcccagaaagtttacattcctaccaacaatctgagagagctgtctttgcagttactaggtttcatcaaacttgtttttttcagtatggtaggtttaaaaatggggatacatttttgtttttatttgcatttttaaatattttcttaggttagttggctacttaaatttctttttctgaaaactttgtatttatagccttttaaaattcttattgacttgcctgaactatttgtaaattacagaaattagccctttgtcgtatgtgttgcaggtgcttttccagtttgccagtggtcattcattttggtttatggtacttttgatagaccagaatctttgacttttatttagtgagatttatccatctttttctgtgtggcatcttggtattatagcattaatattctcttttcttttttttttttttttttgagatggagtctcactctgtcgcccaggctggcgtgcagtggcctggtctccactcactgcaacctccgcctcctcgtttcaagtgattctcctgcctcagcctcctgagtagctgggattacaggcatctgccaccacacccagctaatttttgaatttttagtagagatggggtttcatcatgttggtcaggctggtctcaaactcctgatctcaggtgatccgcccgccttggcctcccaaagtgctggaattacaggcatgagccaccacgcccaggctatagtttttctttatctgaacaataactaattataaagtatagtggaagagaaaaacccattcagaaaattaacaaaaagatcacttatctagaaataaacttaaaccatagcagagc

SEQ ID NO: 109578 - DNA, 1133 bp, Homo sapiens
atttctttacctttgtaacttttaattaatgaagatgttttaagatgaaatataaaatgtgaacctgagaactgtttaacatttaacattatggatatacatatccatgtttagaatgttctctgtgtattaatgcatgattttgtcataaataccccactaggaagagaaaggtcggagagagtgtgtgtgtctctatgtgtgtgtatttgtgtgttttgtcctggcaaaaagacaaactgagagaacagaagaacaaaagagcagtactgaaaatagctagattaaaggttgtttttctgtcaccacacaccagatatggagagtagtaaaagcagacagatggacagttctgttagttttggagtgtgtgaatagagaaaagaaacattctgttccttttattcagaaaaggaatttctagactaaattactggtatcagcaataagtttcatattctgaccaaagaaacattattttttttttaccctagggataatgactcatgctgttctcagaattttgcttttgtggaaactaaagtgcagtcataaatacggcactgttatttagatcttagtgctaatgatactattgtgagtagactagtgatgggtaagaacactagtattataaacccagttgtaacaaagaaaccaagcacatcttaattagctgattctagatgggaaagtagattttttaaacaaattaactaattgttttaattctgtgaattatgcaatagaaataggacccataattttatttttttaatacttcattattttgaggggtttatgtcagaagttaaatttctaacttccaatattgacagtggagataattaaacatattttctctgccttttttccttatgttcctcaaaattagtataagtctactaaatcatagtcacatacaccataaagcacctatcaaaagagtatcagctaggtgaagttcaaagattatattctagttttattttaacctttaaagtcttgtaatttaagaaatagaggtttgaatgtcttctttatataccatagtactagatgctctcactctgaatttttaccatgtcaggatactccatcacatatttatctctgtaattataattattggg

SEQ ID NO: 109579 - DNA, 1068 bp, Homo sapiens
gtcagggacctaagtatttatatggcaaacaaggatactcagtacatctagagccagactttttccagtgtctaatccttgttgtatattaaatactttgggaactaaaatatgttttatgacactgtgttaactgatgcataattatgtaatggaagccattagggcctgtgtcttggcaggaattaaactaaaagcaaggtccttctagtatttttggtagaagattattggctagtgcctattttcacagcacatactactaaaattaggaggacgacagaagacgagcattgcccctccctgtgcaaaattgatagacacattcaagaagtattccatatttttaagctaatctttttatttgattcacttaccagcaggctgttttcctgctgcaaagcaaattggtggagtccatttacaccttctccttagcctataagtattggcagaatcaccaccacgatcacagcagcacagtccagacagtgtcatttgattttgaaaatattgtccttgcaacagccagctaggacaatgacatactaatatctgctttgcttattatttgtgcctgggagtatgtaatcatagtcaacagacaccatagctacagttttatgacacttggtctcaggaaatagagaactctacagaagacagtagaccatgatgaagctttatcattagtccctggttctctcccctccagatcactttggccttctgacagacagtacagataaatctgttaagtttggaatgttgaattggtcaaaaatgaaaataatagtccaaagcaaaaagaccttctgtgaaacatatgtggatgcaattaggtgaatatattgtatctgctggtgtccccaaagttgatagctttatttattggaccagcctagactgaaaatcttctgtttaggcattttggtggggattttttcccctctgtggataccgactgttatatttaaggaagatagaacaattggttctaccaagaaacctgtagctaacccaagtttcactttatgatggcagcactttaaaagtttggtatgaaag

SEQ ID NO: 109580 - DNA, 1044 bp, Homo sapiens
tctcggtgaaaaaaaaaaacaacaacaaaaaccgtttccttccccatctggtgccagcactgtataattcctaataagcttgaaaagataatgttggcaatactttacaagtttattgctaatgtttaacatttattaggtgcttgctgtgtgctgatctctgtgcttacatatttttcatatatcacttcatctatcttcacaacagtccagtgaagtagatgccattattatcccaatttcacaaatgggaaaaatgagattcattgagataaattaaactacccaaggccatacaactatagactaagggggccaaaatttgaatctagtgtagattcaaattagagctcattctcttattcactactggggaatattgcctggccataactgaagtccaaataacagcatggttataatatgggctttaaaataatctagacctggattcaaaatccatttattggaggcaagtgacttcacttctgatcttcagttttctcatatgtaaaatgataatatctacctcaaaagtgttactgcccacccatgtacatggtacatactaaaaaagcaaatgttagttccatttgccacttctacactttatgtgaaccctgggggtaatggtttgtacagaataaggcctggcatgagaagacaaaaaccatctgacaaataaaaaagctgtcattctgtctaccagaatgtcaaccagtgcctgccttccaggatcaacaagtgttttattaccataatcacatttattctcttaatgaaaagggtgtgtcttgagtatttaatagttaattacccataaatatactacagtagaataaggaataaaaccagtgatctgtctactatagtaactaggtttctttcttggtaatacttagggaacatatgagggttccctgtgggttgttatttattatataaaatagttgctctggtagttccataatagagacctgtcagtgccattcagcagagaaaaatcataaacacagctgctgtttttgtgtggcttgtggtttt

SEQ ID NO: 109581 - DNA, 1120 bp, Homo sapiens
ttgtgcttcaacgtaaatcctaaatgttagtattttaaatgttataggaactactagtaaatgtggtctataatgtttaattttttatcacctttgcagattaatatgtagtcataatactctgacatgttacttttaaaatgaaaaaccttacaggaaatggctcgcccccttaatctcttacagtatataagaagctgtataatgcttgggaggatgcccaatttgatgttgatggctaaagaaagcctttattctcaactgccaatggactgttttacaatgccatcttattccagacgcatttccacagctacaccatatatgaatggagaaacatctacaaaatccctttgggttataaatagtgcactcagaataaaaattctttgtgcaacctacgtgaatgtaaatattcgagacattgataaggtaaagtcaaatgctgatgcttattattttatagaaattattttagataacctttttcttgcactatacagtaatctgttgacctgtagtatgttttcagatggttaggagaacatccaaatctccgaatgtaaaaatatatcaagaattttacttgagcttccatctaccttagctattatacagctcacagtcctttgttaataattctaatattcacaattctagctcttaaaatcaaaagttttacagaattcgtttggcagaaagacctgggccaaccttaagtgagggtttttataatctttattaaccccacttagtataaaattccggtatcttattaaagaaatattaatgtctttatgaggtactgcttcaccagctaaggaagtagtatttagtaagtacgtgtaccaatttagctttctaaaatatggaaaaactctgaattacatacctcccttaaggggattgtgggcctatatttatgttttagtagtctgatgtctccattgttattagtggatgaaggcagcaactaattttggtgaagactctacatcagtattaacgtgttacatatgtgaaaaaaaggagaaccaagctatatctgaacaaaaattccgtggttttatatttgagtctatcgagtgtgtgcatatgtgtatgttgagtgtatacatta

SEQ ID NO: 109582 - DNA, 1094 bp, Homo sapiens
ttgaaaaatcaattttttttttttagatattcccattattatagagatgattgttgaattttccttttggggaagaaaagtgttttgaaatgtgttttataatttagactagtgaatatttttctttgttttttaaggaacactgtccattggcatggggaaatataaacttgtttgattacacagacactctagtatctggaaaaatggctttgaatctttggccagtacctcatggattagaagatttgctgaaccctattggtgttactggatcaaatccaaataaagtaaggtttttattgtcataaattagatattttttatggcagtcaaaccttctctcttatgtatatataatagcttttcttccatctcttaggaaactccatgcttagagttggagtttgactggttcagcagtgtggtaaagttcccagatatgtcagtgattgaagagcatgccaattggtctgtatcccgagaagcaggatttagctattcccacgcaggactggtaaggcaaatcactgagtttattaagtatcaattataatctgtggatttaggtagatactttctctatggaaaaggatccatatattttactggcatagatactatgaactctaggaccaatattgcaatagaattaagttctctatatgctaatatttttactgcacctctgcttttttaaagccctagcttgccttcattcatttaacaaatatttattgaatgccgactatgtgtaaagcactgggaaaggcactaggtaataaagtcatgaactaaacagaccttcattgagtatgcactctaactgtgaaaacagacattaagcagataaaagcagaaatataagattacagttgacccttgaacaacatggatatgaactacactggtctacttatatgtggatttttttcaataaatatattggaaaattttttggagatttgtgacaatttgaaaaaaacttggagataaactacattgtccagaagtatcaaaaaaattgaagttaggtatgtcatgaatccataaaatatgtatagatacaagtctattttatcatttacgaccat

SEQ ID NO: 109583 - DNA, 1066 bp, Homo sapiens
ttgagaattcagaatttttcacttttcacccagaatgatgacagatgaaaactgaccaaggaagatatttcacaagcattagacaaatcataatatgaatgtagatagatagtagcagcctagagcagagtttcccaacctcagcactattgacattttgcgccaaataattctttgttgtaggagccatcctgtgtgtgcaatccaggatgtttagcatccctgtcctctaccctactgcaggccagtagtgccatcctgctaagttatggctatcaaaaatgtctccagacattagccaaggttcctgggtggtcaaggggacacaaaatcaccctagttgagaaccactactctaaactctaatcatggtgaagtttattatataaatgaaatgtcagatgacaacacctaaactgtctctcagttatcttaagtcttctcaaactcaggataatgatgagtaaagaatatatttctaacaacaaaaaggaaatttgatagtatttctaaagacaaaaaggaaatttgtattcacattcagttagtcattccaccagaatgacttcatcacacaatattttgtgacaagaacctgaacagcctgttttacagtattcttttcatcttttattatatgcaccaaaatttttttttaaattttcttgaacctctaaatctacgttaaaaatttacctgatacactttctaaatggacaaatgccgaaggtagctgtgtatacaaatgtgactagaaggaaaaagatgatatagaaataaaataactccttgagttgatcattctgattggcatttatagagtagaaatgttttgtaattacagaggaaaaaagatggcctttccttcaacagttatgagccgtcagaattttcaaaaatactgcattttgacaatgtagtttctagtttgacaatgatatatttatcttcaaaaccaggaaaatgtagataagaatttggttttataatatttaaattcttattaaaatgtctaataaaattgttttccccatcactttattcttctgtaagttattttatattt

SEQ ID NO: 109584 - DNA, 1453 bp, Homo sapiens
aaacaaggtacatagtacatatttaataaatacttgttgaacaaatatgtgccggtaatatttcttcatgctgctgaataagttaacagcatataaacacatacaaaccaagtggcatggatgtctgctttcatttttagccttttaaaaatatatgtaacccatcctaaggggtttatatttgttttgcataatacattaatatgtactcattattcattacacagttaatatatctatatttgcagggaatatacattgcttggaattatacaaaaaaatattatttttcgttttctaatattcaggatacagtgttttaatgggggtgtttcttcattctttttttcttactggtttttactttttaaatttgaaagctttgcagggatcataaggatctgttcaggcaaagaacatgaaagggtttacatttttatcattttagtgtttcttattctctatatcaaaaacattcacagataagttaacaagatcctcatcaggaggaaaagtaaattgttcactaccatcctctagtatcctaatctggtcttgttgttggctaacttcagcagttactattctgtgactggtgtaatattaaccaaataaattactggatttgttctacaaatattatgtcttagattggttctttcctgtctctgaaaataaagtcttgcaatgaaaataaattattttacaacagttaattagcaatgtaaaatttattgaaaatgtatttgctttttctgtaaatcatctgtgaatccagaggggaaaaatatgacaaagaaagctatataagatattattttattttacagagtaacagactagctagagacaatgaattaagggaaaatgacaaagaacagctcaaagcaatttctacacgagatcctctctctgaaatcactgagcaggagaaagattttctatggagtcacaggtaagtgctaaaatggagattctctgtttctttttctttattacagaaaaaataactgaatttggctgatctcagcatgtttttaccatacctattggaataaataaagcagaatttacatgatttttaaactataaacattgcctttttaaaaacaatggttgtaaattgatatttgtggaaaatcatactacattggtagttggcacattaaatgctttttcttactctgaattcctgatatgactttctttaggattgtttaaaatattctagtagttttaggtcaatttagatgtgatttagttggtctagatattataatttttaggggttccctttcatttttcttttttcttacgtttcttcaaatagtataatgccttattttcatttatgaagaaattaccctgctgttggtgatacgggtatatttaaataaaccagttgcagtgcatttctgcagaaagtccattaagacataaattttgtccagta

SEQ ID NO: 109585 - DNA, 1034 bp, Homo sapiens
atggattacaatatccccaaacaaagaaaaaaatgttttaccttgaaattcagaacaatgtcaaactcccgtggttcttactgaaaaacaagctaattaagaataaaaaatgttttgtagaatgtgatatatgtagtactcaaaagttacaggtcataaaccatataacttttcataaatttagaagcagatttatatctaatatgatattttaagtgttaaaatttaataatggaacccagaagttaagttgaaaacaagaagcataggcgtgtgtcagaagagtcaaacagcattcactgagcgctttgttccctccctcttcatttgattatttttgtgctcaatttccttttttcatgtttttatatcttgtactgagattagtcaatgaaaactagttgaaataaacctaaaaactagatgtttatttaatcacatattcaggaactacctgaaactcatggtggttttgtttctaaattacaggttttgaataattttattattagtatgattgtaacatttattggatttcaaaaatgagtgtttaaattgtttagcaaagattatttgtatactgatttaagactatatatatatatttttaattttgcacgattcttttagatctgagatgcacaataaaacagttagccagaggtttggcctgcttttggagtcctattgtcgtgcatgtgggatgtatttgaagcacctgaataggcaagtcgaggcaatggaaaagctcattaacttaactgacattctcaaacaggagaagaaggatgaaacacaaaaggtgtgtgactctagtttgtgtttgagactcttttcactgcagtggggcagagttgtttagaagcccagtgtatatacagatcatggtccttggaatcaagcagattaggatttggaaccaagttccactgcctctcagctgtgtagtgttagacacgtcatgcaggctctcaggactcattttctttgtctgtaaaatggaaataatacctgcttcataaggccattgtgag

SEQ ID NO: 109586 - DNA, 1336 bp, Homo sapiens
gtagaaaccctcttaattagaaagcagcagtctaggatgtagattcagagactgtacagtactgaggttctcatgtgagaaagagattagcagttagttttatcttttattaagtcagtttcttactgtgactatcctttttttttaatcaggtacagatgaagtttttagttgagcaaatgaggcgaccagatttcatggatgctctacagggctttctgtctcctctaaaccctgctcatcaactaggaaacctcaggtactttcttgggggtttcattgatatatttaaataaataccttttctggataaaatcttgagaaaagtaaaaatgtctgttataattagaatgttcaataatttatgcttctctctctcattctcctaccctcaaaataagagtagtatatcttaagttcagtactgcctttattcagaatgagtttttactacttaaataatacagtttaaaaccttctatggccagaatttctgttaccataggataagaaatggaaatgtaatatctgtaaaactaatgatatatctctatatatttgttggaaattcatatgcaattatataacttttaaaacttttagttttttttatactctttaggaatggattcctaaataaaaattgaggtgaaagttgtaaatctttgtaacacttcaaaaagctatattgtatttatattttaaaataaatttcagggtaaaataataataaagcaaaggtacctagtaaagtttttaactattttaaaggcttgaagagtgtcgaattatgtcctctgcaaaaaggccactgtggttgaattgggagaacccagacatcatgtcagagttactgtttcagaacaatgagatcatctttaaaaatggggatggtaaggaagagtattaatgagcttatgatgcatgaatttagctatctttttatacacaggatatttatgaaccatgaaaactactgaaagccatttaaggaatatacacatgtgataaaatatgtaatatttatcagatgtcttgacctttgaaatatgcatgtataatcaatgaaaagaaaagaagtactaggtttagatcagaagtcctgaaatcagttttttgttttttctttttcctgttccctgcctccaacccccctcccgtggacctgtgtagagaagtattttttgttgttgttttggttttttttttaatcagtttctaattatcatttgcttagctgtgtgagtatccattcattccataaatattctatgtgctaggccctggggttttagcagtgaagaaaacagaatccctgccctcttggagcttacag

SEQ ID NO: 109587 - DNA, 1050 bp, Homo sapiens
ttagtaaatatttaaaatttttattttccctatttcaatttctaatatcattagatgtaattcacataactaaaagctctttggagtcctcagtaatttctacaagtgtaaaggagtcctgagaccaaaattgagaacttctgccctacagttttatttcgatgtcaattaaacatctttaaattaacacatatttttaaaatcataaatgtttgtaaaattttaattgccacaataattttcttaattcttttctgataaaaatacagtgctttctcagttgaaggttataataaatgatgacaggtaattttgaggattattccaggagtatgtttatcacaccataaaaaagaaaattaaaattggggaaaggcagtaaaggtcatgcatgacaaatttactaataaaatactcatgttttagcctgttaaaacatttgctattttaaaattccatcatttaattgtaaacgtgttactcctctttcagaatgttaccttatggttgtctgtcaatcggtgactgtgtgggacttattgaggtggtgcgaaattctcacactattatgcaaattcagtgcaaaggcggcttgaaaggtgcactgcagttcaacagccacacactacatcagtggctcaaagacaagaacaaaggagaaatgtgagttgtattattctttcttcctatgttaatctaagtttttgttagatgagtctgtcggtgtttgtgtattcctctgagttagaacagagaaaacaattgtactttctatggaaaaaaatatgctcaacctttgaaatatttgatgttaatggatttaaatgattataattacttttaatttggtaaaatcttaaacattcatcttatgtattatctaaaatgtattgttattgcttattctttttaaaacaaatgaatattgcacattcaaaattttatttctaattcattgttaaaatgattagaaaaaaataattttaatgacatgctaagtattttttcacatgaagaattatgctttggtcagggaacatctggaaattt

SEQ ID NO: 109588 - DNA, 3897 bp, Homo sapiens
tttttatagctttgtctacgaaagcctctctaattttgtgacatttgagcaaagacctgaaggtattaacatcatttgctccaaactgaccaaactgttcttattacttataggtttcaggagatgtgttacaaggcttatctagctattcgacagcatgccaatctcttcataaatcttttctcaatgatgcttggctctggaatgccagaactacaatcttttgatgacattgcatacattcgaaagaccctagccttagataaaactgagcaagaggctttggagtatttcatgaaacaaatgaatgatgcacatcatggtggctggacaacaaaaatggattggatcttccacacaattaaacagcatgcattgaactgaaaagataactgagaaaatgaaagctcactctggattccacactgcactgttaataactctcagcaggcaaagaccgattgcataggaattgcacaatccatgaacagcattagaatttacagcaagaacagaaataaaatactatataatttaaataatgtaaacgcaaacagggtttgatagcacttaaactagttcatttcaaaattaagctttagaataatgcgcaatttcatgttatgccttaagtccaaaaaggtaaactttgaagattgtttgtatctttttttaaaaaacaaaacaaaacaaaaatccccaaaatatatagaaatgatggagaaggaaaaagtgatggttttttttgtcttgcaaatgttctatgttttgaaatgtggacacaacaaaggctgttattgcattaggtgtaagtaaactggagtttatgttaaattacattgattggaaaagaatgaaaatttcttatttttccattgctgttcaatttatagtttgaagtgggtttttgactgcttgtttaatgaagaaaaatgcttggggtggaagggactcttgagatttcaccagagactttttctttttaataaatcaaaccttttgatgatttgaggttttatctgcagttttggaagcagtcacaaatgagacctgttataaggtggtatttttttttttcttctggacagtatttaaaggatcttattcttatttcccagggaaattctgggctcccacaaagtaaaaaaaaaaaaaaatcatagaaaaagaatgagcaggaatagttcttattccagaattgtacagtattcaccttaagttgattttttttctccttctgcaattgaactgaatacatttttcatgcatgttttccagaaaatagaagtattaatgttattaaaaagattattttttttattaaaggctatttatattatagaaactatcattaatatatattctttatttacatgatctgtcccatagtcatgcattgttttgcaccccaaattttttattgttcatagcagcatggtcagctttcttcttgatctatagatgaggctcaggcactatcccatttataccaataaccagtgtataactacttaaggaaaacataaaaacttcatcttctttccttttatttcttatgtgaatctcccgtcttccattctcttttataattgagaatgtctcaatcatatgaaattagttaccagaattaacacaatttagactatcttcctgattccttaaacccctttactgaagtatactcatgaataatactttaaaatatgggggaatagaaaccatgaactttttacctttttaaactatttatccatatctccaaagtagaacattaaaccattttaagatatgtctcattcccaagtagtcagagctcactctccaactttattaaatactatttgagcacaggacacattcttaaacattttgaaaaacattaacccaagatgtagaggctactgctagtcgtcattctagaatctgatattttactctgtatttgaaatgaatgattaatgtcctaggaaattagctttagcagatgtccaggtgccacatcaaaaaagtgcaataattattgacagttttttagattaggcatattattggaaaacaactttataaagagtgaacattgtatactctagtaaaacagcatcactttaaaaatattcatttatgaaatctgttacctatagttgaagtcttgagtagtgaacaagggactctaataccaatactcttaatatctggctattttagatcccttaaagggcataattattggaaatttaggtatttcactaaagcatgtatataatattgccaacaagaaaagtaaatttgaagattaagggaacttacttctgcaaactgtcttgcgatagttaagcagaatttaaactctgttttaagcaggaaaccagaaagattattttgcagttgtagaagatttcataacttattaaaacttattaacattttgtgttgtttagatataggcagttgatacatactaacatcccagccttttcaatatcagggttaaattataggaaaactcagtaaaatggtacaaatctgaaagtttgatggtagaaactgaagatttaacagagaactgtgttttacccgagtgccaaaaatgctgtgagcctccttgcacaaaatttataccacttttgcatttttatctatcagtccagatagttgtctcccctccttctcccaggacctctccaccattaaaatgcacaaaccacatggccgatttcaccatttacatttattttcaaaagttactacaaccaaattaattctattagaagaaatgtagacaaattctataaagactatagattgtgacctaagaaagaaatgaggcaaagaaccaaacattgaattaaatgctacatgggtgactaagatctgtttcaagtcagtgataatatagccacttctgggtacttcagtatcagagatcagttctcgtggtttagacagttcctatctatagctgactatccttgtccttgaatatggtgtaactgactattggctctacagttttattgggccacttaagaaatatttccttgaataattattttgagaaaaagtctaaaagtaataaaaataattttaaacacactgtagtaagaaatgactgttggaaaattatgctttcactttctaccatattctcagctatacaaaaccatttattttgaagatttttagactactgttaatttgaaatctgttactcttattgtggaatttgtttttttaaaaaagatgtttctaattggatttttaaaagaagaatggaatttggttgctattttacaatagaacctaagctttttgtggttcttagtgtcctatgtaaaacttagtgtcaaagtaatcaactttgagattttcccttctattctgctttatattaaaagcccattagaaaatgggaacctggtgaatatataatgaattgtaaaatattttaatgtgtaactttttcaactgtgaaactgacttgattttttgatgaaaacagctgctgataaagtattttgtgtaaagtgtagttcttattaatcaggaaaatgatgacttgattagactgtatatgccctcttggattttattttaaatggattggtgactttcacataggtaaaacacagtccatctgtattcttttttccatcaaaaatcgagtgatttggaattataaaaaaattgtgagcagcctatttgaaaggcatcatggaaatttcacagcacaataacacggatttgttttttcttaatgatgtaaatccgtttaattcatactttgatcaatagcccatgcttgccaactctgaagaaatttaatttccagcagtattttaaagctagcctgttaactttttctgaatatttaaagttcctcttttttctatgtctgca

SEQ ID NO: 109589 - DNA, 1054 bp, Homo sapiens
taacctagcagatttttaaataaatgatctaacatttttgagcactgctactagatgctagaagctaagctaaagtttcacctgccctactttgcttattccataaaataacaactgcgtgaaagaacgggttatccccattttatagatgagaaaagaaaggtttacacaggttagcttatttgcccaaagttgtaattatggcctacaaagtcaaataaatcctactctgagacacatgttctttccaccattgcacactagaaaggaaaacaccaagattattcattactcatcaagtcaatattgctgtattcagctaatttagtaatatgtgtcgaaattaattgctaaaagggattaaactgacttagaatcagttttttgtttgattacatctacatacaaaagtagcttcaaatgtctcattccactgtccataatttaagatttttgagtataataaaattttaaagatactttgaggcactttggaaaatcagaccaaaatctcttttccactcatagattcggcttaatcaacctggaaagcatttgttgagagccttatgacatcatttaataaccatggttgattcattaattaaagtacagacaattgttgactatccatgtgggacttcttttctattaggttgatgcaaaaataattgcggtttttcgccattaaaagttaacagcaaaaactggaattacttttgcaccagcctaatacgatgtggatcatctgagatgaatgttaaaatccagtatagcttcttcatatttctggcccatttttcccaccagaaagtgcacaaagtgaaatgagcttatgaaaagcttaattaactagaaaaatgttactgaaagaaaaattacatggtacatgacaaggctaaatactagtaactctaaacttagtgaattttctaggcagcagctttcctctgctgtctagactggtaaagaacaaactaaagccaagcgcagtggctcatgcctgtattcccagcactttgggaggccaaggcgggcaaatcacctgaggtca

SEQ ID NO: 109590 - DNA, 1049 bp, Homo sapiens
gaagctttgggctatatgaatcgtaatagctcttctctttttgatttttgaatgcagtgaattgagatggttactcaaggaatgattgtttacattgttaggtgaggcgtttgattttattcttttttctttctttctttcttttttagacagagtttcactcctgttacccaggctggaggacaatgatgtgatctcgggtcaccacaacctccgcctcccggattcaagcgattctcatgcctcagcctcccgagtagctcagattacaggcatgtgccaccacgcccggctaattttgtattttcagtcgagacggggtttccccatgttggtcaggctagtcttgaattcccgacctcaggtgatctgttcgcctcggcctcccaaagtgctgggattacaggcgtgaaccactgcacccggcgaggtgaggtattttatatattggtatcatttctgtacatttcatggttgtctgtttctttaggctattctgttccccttctcccaactggtagctaagaactggaagcaagatgtgcatgcattttcatctctggttctcccacttattagttgacttaactttcactaaggctgtttccacatcagtaaaaatgtaaatgggtttgatagtaactcctccatgtaccgcacaggaccattttgaagatgaaatagaataagggttaggaaaatgcttaataaactgaaaaggccgggcgcggtggctcacgcctgtaatcccagcaccttgggaggccgaggcgggcagatcacgaggtcaggagatcgagaacatcctggctaacacggtgaaaccccgtctgtactaaaaatacaaaaaattagccgggcgcctgttgtcccagctacttgggaggctgaggcaggagaatggcatgaacccgggaggcggagcttgcagtgagccaagatagcgccactgcactccagcctgggcgaaagagcgagactctgtccgaaaaaaaagtaaaaataaaataaactgaaaaagcactatctcattccctgctgtattatat

SEQ ID NO: 109591 - DNA, 1041 bp, Homo sapiens
tttcattgaggttggctctgctgtgttggcagtataagaaaaggggtctttgtggccatctctaatacacctcgcatacatttacttgggaccatctcagtcttacctattagtctacccagcctacacattcttcatatctgaagaaattaaccctagtatactgcttactggcccttcctagacaacacttgaaatgactatattcagaagccctaagtggtccttaccatttcccctatgtaacaacctttctctgcatgacatggcacaccttcctggtgtttatttcactgttttgtgcagttaatacagtgtttatcatatatttttattttgtgtgattctgagtataaaacaaatgtatccttgtatatttcaaagttgttatgttttagagtatgtaatttgtggttctttcaaagtcctatgtcaatattggatctgaaatataaaagctttaaaagttgaaaatgtataatattttcattacagatactataattaacattaagaacatttgtataagttagataacgggaagtttctcattaaatatgtatgtttactgtacttgaaatatttttcattttatgttcagattcctctggaataagcagaattgcagatggattcaatggaattttctctgatcattgttacagtgtctgttctatgagacagccagatttaaaatattttgacaacaaaggtatatctaatattttcgaaaatatgtttctttaaactgcttttacattttttattccttacttgaaaatgtgggtaaaatgtggattgatgatttcaaaacagacaagtctttgaaatttgttacaatgtaagaaaacaaagttgtatttttttaagaaagcaagtaattttaactattctttttttttttttttttttttgagatggagtctcgctttgtcgcccaggctggagtgcagcagcgcgatcttggctcactgcaacctccgcctcccaggttcaagcaattctcctgccttagcttcctgagtagctggggttacaggt

SEQ ID NO: 109592 - DNA, 1922 bp, Homo sapiens
aagcatttgcttgtttgagcagattttctgtgtctgaggtatatagataacttatctttttatgactaaatccaagtccttagttcctgttggaattcaaaatcatatttaaaaattgatgctttgttctataattaatgctttgattgtataaataataagtattcttccaaatccctttttacagatgatgattctgataccgagacgtcaaatgacttgccaaaatttgcagatggaatcaaggccagaaacagaaatcagaactacctggttcccagtcctgtacttagaattctagaccacactgccttttctacaggttgggggaactaatttatagcattgatatattttgtattggtgaattttaaaaaaagtgcatgcaataaatttttttttgcccagttgtatttaacagatcttatttagttatagtcatataataggtttgttttattcttcagaaaaatctgctgatattgtaatttgtgatgaagagtgtgactcacctgaatcagtcaaccagcaaacccaagaggagagtcctatagaagttcacactgctgaagatgttccaattgctgtagaagtgcatgcgatttctgaggattatgatatagagacagaaaacaattcctctgagagtctccaagaccaaactgatgaagaaccgccagctaaactttgtaaaattcttgacaagagccaagctttgaatgtgactgcccagcagaaatggcctttactgagagctaatagcagtggcctctataaatgtgaactttgtgagtttaacagcaaatatttttctgacttaaagcagcatatgatcctgaagcataaacgtactgattcaaatgtgtgtcgagtatgcaaggaaagtttctctaccaatatgcttctgatagaacatgccaaactgcatgaagaggatccctacatttgtaaatactgtgattataagacagtaatttttgagaacctcagccagcacattgcagacacccattttagtgatcacctctattggtgtgaacagtgtgatgtacagttctcctcaagcagtgaactctacctacatttccaggagcacagctgtgatgaacagtacttgtgtcagttctgtgaacatgaaactaatgatccagaagacttgcatagccatgtggtaaatgagcatgcatgtaaattaatagagttaagtgataagtataacaatggtgaacatggacagtatagcctcttaagcaaaattacctttgacaaatgtaaaaacttctttgtatgtcaagtatgtggttttcggagtagacttcacacaaatgttaacaggcatgttgctattgaacatacaaaaatttttcctcatgtttgtgatgactgtgggaaaggcttttcaagtatgctagaatattgcaagcatttaaattcacatttatctgaagggatttatttatgtcaatattgtgaatattcaacaggacaaattgaagatcttaaaattcatctagatttcaagcattcagctgacttgcctcataaatgtagtgactgcttgatgaggtttggaaatgaaagggaattaataagtcaccttccagtccatgagacaacttgattattctctttaacttacagaatgttagtttaaaataataaattcatcctttttttggagatgattaaatggatgattgtaaacacaacttatgaaatctgcctttaacaagtaacttttttaaattataaaattttattggcattgctccattttctgtatataaatatatctttaatgtggtattttcaattgcgtgatagtttgtagtttcaaccactcttggtgactgtcatcctgtttcttccatattctctgatttcatgaattgaaaagaaacaaatgtattgaagaagtgagc

SEQ ID NO: 109593 - DNA, 1063 bp, Homo sapiens
tgtttataagtgcttaaatcatctctgagccatactggatatagctgcttgaaccctcattgtttagtatctattagcctagttttatatttcagccatctaaagcataaacattaaaaagattgaaatattgagcatgttatttgctttgtcaaagatcactaagttaaaatttcctagacttcttacagatgacagctggaaatcctggtttttaaacttcaaattatatataaaagctgaaaaaattctgtaacccaaattttctttttaagaaatataatacaatttttatttcactctcattagtccaggcacagatgtcactacagagctggatagctggattgataagttttgcctagatgctgatgtctttgttttggtcgcaaactctgaatcaacactaatgaatacggtaggatttaatcatattattgtgtttcgatggtaggaaatgaaatggtatctgttttaattctgaaaagcaagggaaatccatatcgtggattagaaaaaacttctaaaaacaggcatgaatgaaggggtttgtgttttcatagaaccagaagggctgtttctagtctttctatagtgtgtagttccctggatttctctagcagtatagggcttgatggttctagcttctggttatttgtcagtctcagggaaaatgagtgccagaaattttaggatgcttatttaagtctcttgaataaagtataaaccactccttccttctgccatctatcaggcaaggctttttatattttcagtattgtcagctatttccagcttcaccagaatatactccaggtttcagcttaactgtgtacactttaagctgctgtcagacttagaagattatttagccagatgtctggagccagactcatctgaaataaactttccagagtttaggtaatctaatattcaaaattataacatgattttttaaagttatcagtttttttcatctttgaaagtttaatgctcatagagtgctttgggatcctttgtcagtggtgttaattactgtttaaatggttcagactttctcatt

SEQ ID NO: 109594 - DNA, 1072 bp, Homo sapiens
gggtatgttttatctttaggtgtgtacagaacaggaatgctataacttcctacattaattttttcaaaatcagtgaaaataagtgatgcataaatgagcttcaccatgggaaaaaatgaagctaggcaatgcaagaaagtaatggcttcagagttaaatattgactaaattaattaccctcatgtgctctatagctaaataatctgttttgttttctctacctcaaacgaaatgctgaagaggggagctaaaatggcagtagagattatagtctttctgagtgctcaaataatttcagagacatgaaggctaagcataggtcgtaaataggacattgaatgcacgtgtagcatcctgatgatttcaggataagaaatgtagcactagagtattaagtaaatgccttttgaagcctaaaagccatttattaaaggaaggatagtaatgaacttcaggaagcaattaccacaatttgtattagctaaatatatagaggttcgagaagatgaattcattggagtatcagagaattaatatatccctaatttttaaaaaatttatcatagaaaataaacatgtctcttataaaacatctatagtacttactgtgctatatttcagtgcagaatttgactttctgtgaagtaaaaatgaaataagacaaattgtaatataaaaattttataaatttttatttatttattttttgagacagagtctcgctctgtcgcccaggctggagtgcagtggcgctatctcagctcactgcaagctccaccttccgggttctcgccattctcctgcctcagcctcccgagtagctgggactacaagcgcgtgccaccatacccagctaattttttgtatttttagtagagatggggtttcaccatgttagcctggatggtctcaatctcctgacctcgtgatctgcccgcctcggcctcacaaagtgctgggattacaggagtgagccaccacgcccggcccaattttataaattttaaatgataaatcatagtaaatatatatttataggatgggcgtggtggctcactcttgtaatcctagc

SEQ ID NO: 109595 - DNA, 1740 bp, Homo sapiens
atttgaaagtgtcgatatttattctgcaaccttgcacacatcatttatatcccctggacctcactattcctgtgtatgaattgtgatttttaaaatgttttgtggctttaaaatatctttgaagcagtggaagaaccatttcttcaagcagatttttatgaagaagtccaaaacaggtgatcctctttctgcattcaacccacgacccattttttaatatggtcatacattggtattttgaaatcactattttatactagttgtgtttgtttattgcctggtgaacaaacaaggcgatgctacctgccaaccagaaagttgatttggtaagcagtaccctttatgttatactgtacggcattattttatactatttgttaccttgtaaaggtggcaatgaatacatgaaaataccagcattatcgatacaaagtataattttcacaaacttggtatgcttgaaacacagatcgggatgttattagatgtgacaaaagtaatgatgttaagcctcgataggaccttcagtggacttaagccagttgaaggaaacataaacgcatcaaagcttaagtccaagatgacataacattggaattttaaatgtatttgctctttcagggaacaaagaccccttcatgtccctgtctgttgctttataatggtactttcttaggaatgaattaagttcaaatgcagagaattgccagcatataaaacgcaaggatcagaaccctgagtttgaactcagcccctgtgtacagcctccgtgtggcctctgtttaattagatcgtgctgctatagcagttccttctagctcagttgctttgatgtagtacccaaattttggcctaaaagtgatttaattagtaataatttttaaagatataggatgttgaacaaagtatagcacaaagaagatgtgatttgaggattgtataatcataatgtcctgggaacttcttaagtaaaagatcttcttaaatggatctcaggtctttattttcctgtatcagccagagttgaacaaacttttgtttaaaaaaagagccagatagtaaatattctaggctttatgggccataaagtctcttggagctactcatttctacagttttagagcaaaagcagccatagatagataataggtaaatgaatgggtgtggctgtgtttcaagaaaactttaacaaaagctggcagctggctagatttggcttgtaaggtgctatatgctgacccctgcttattaactaaagtcagtattgcattctgttttgcctgttcatatctatgaagacttagaattcttattcatcctttctgggattcaggtgccacatgggcagagaaacgtggtttctatcaaatcatctatataaaatactttataagtgaaatattacttgaatcctttgagatgttacaagttttttttttccttgagtcatgctaatagatggttcaatacatgaatgagtcccttgctgaaatgctttaggacttcagactaccctgaacgttgattactctttatactgaaataggcattattcagtggaagagagggaagaccaaattgatagactggactttattcgaaaccagatgaaccttttaacactggatgttaagaaaaaaatcaaggaggttaccgaggaggtggcaaacaaagtgggtaacagtagcttcatgattaaaataacctggatggaaattatttttgataatgctaaaaatg

SEQ ID NO: 109596 - DNA, 1044 bp, Homo sapiens
gttcgagaccagcctgaccaacatggtgaaaccctgtctactaaaaatacaaaaaaaaaattagccggtggcaggcgcctgtaataccagctactctggaggctgaggcgggagaatcgcttgaaaccggaaggcagaagtggcagtgagccaagatcacaccactgcactccaacctgggcaacaagagcaaaactctatctcaaaaaaaataaaaaatagccaagcatggcgacacgcttctatagtcccagttactcaggagtctgaggcaggaggatcgcgtgagcctaggaggtcaaggctacagtgagtcaagatcaaagcactccagcctaggcaacaaagcaagaccctgtctcaaaaaaaaaaaaaaagtcaaattaaaaagaccattttggcatttactgaatattttatgtctttataaaaactacatactttctggagaaaaaataatatggatatttaccattgttaacaggaattaaataagcacatagaggatggtatgggaagaaatttggctgatcgatgcaccgatgaagtaaacgccttagtgcttcagacccagcaagaaattattggtaatatttatgtctacaaggtcatgtctggtttgttttttcattcatgactggtgaagagcttattttcctttaggcattccattgaaggtaaaacatttaccattcttatcttaagtgttgtaattttgttctttctagaaaatttgaagccattacttccagctggtatacaggataaactacatacactgatcccttgcaagaaatttgatctcagttataatctaaattaccacaagttatgttcagattttcaagaggatattgtatttcctttttccctgggctggtcttcccttgtacatcgatttttgggccctagaaatgctcaaagggtgctcctaggattatcagagcctatctttcaggtatgtatctttgaatctaccaattaagactctcctttattattttgtttatgtggtttttctataataaaactagctttacaaaa

SEQ ID NO: 109597 - DNA, 1050 bp, Homo sapiens
tttaatacttcctaagcattttcacatcacagcacacaaagaaatatttgtacgttgaggtaataagaaaaccccaggtgccctatctagccttctctgaatatcaaggggatctgtcttaagtattaaatgttatttttagtagtagttcttatttgtttctttaaaaaatgtatatcattaacagcatggatatgcttgttttggtttttgaaaggtctgacctacaatatttaacattgttttatttttgagatacattgaatcaggataagtctggcagcttataaagctctccctcatttgtgtgctgatcccttttaagcctgattgatttctggtaacttcaggttttctcatggagaaggaatatacatttttagaaaatgtatctaactcaaagatccatagggaactaaaatgcttttaaatgtactctccaaagtggtgtttttccttctcagactaagctatgactttatcttacagatttggaaaactataggctggaaactcctatctgtttcattaactatgtatggagctttgtatctttatgaaagactgagctggaccacccatgccaaggagcgagcctttaaacagcagtttgtaaactatgcaactgaaaaactgaggatgattgttagctccacgagtgcaaactgcagtcaccaagtaaaacagtaagttggaaggtgcatctttcctttaaaaaaaagttactgaaatatgacatacatgcagaaaaagcacaaaataagtgtattgctcaaagaattatcacaaaatgaacatgtttcgtgatggccataaatgagaaaaaatagaacaatactaaacctcactgctgccctttctccctcctaatcactattcttctttccattctcctgatagattaggtttgaacattagaaaattggtagataggaactctcaagaactctggaggggtttaaaaagatagttcttaattttttttcttttttttcagagatagggtctctgtcgcccaggctggagggcagtggcacaatctggctcact

SEQ ID NO: 109598 - DNA, 1027 bp, Homo sapiens
aaaagattacatcaaatatggactctgtgggtcgaatacaaatgcgaacaagacgtacactgaggggccacctagctaaaatctatgctatgcattggggatacgattccaggtttgtacctgtcattacctgtcatttttaaactgttgcagaattattttcattaagaaccatcatttgcattttctttgtttaaaaacagaatatattcatgaagcgtttgcagaaaatgcatctcagatgaacatgctgctttcaataagaatattaattgactctttaaaagtataaacatttttaatatggaatccaggacaactgttcagaagaggattccttttctttgcagtggaacattgcagacattctttgttttttaaataggcacaaagcgtttttactgtatatgaagcttgaaatttcagttcataagcaaatacgtattgaacacctatgtgcaagtttttggatattgctatagtttgttattacataaattcgcaaataatggaaattacatgaaacaaaggtgtttgtactgaatacatcttttactccctcgactgcatcacagaaaggtgtgtgcttgaatgtgcaagctgaccatctgcaggtgcacaggcacacgcacagctgctacgtggcctacagttagatagattgctcatcactgtcattcactatgtgtataaggctacagcacagcctatgtttttccattgtctggcaatagcagatgtgtctgctatcacagtggtttacttgttcctttgatttggttaatcttaatgggaaatgcctaaaccaagaaacttctatgttttaatagaagttgcacatttattctcttctcccaggagacactaaaattataaagtagaagaagcctcaattgttgctctaattgggatacttgaccacaataatatagaacatgtgcctcttacgaagggatacataaaattatataattggcaactgacataatgtcttaatctttttctttttcttttcttttttcttttt

SEQ ID NO: 109599 - DNA, 1034 bp, Homo sapiens
tcttccttccttctttccttccttccctcgctccctccctccttccttcctttctctctctctctttcttttgttcatttgttcattcattttttttctttttttgatatggggtcttgtaatgttgcccagggtggtctcagcctcctggcctcaagcaatcctcccaccccatactcctgagcagctgggattacaggcatgtgccacaacacccagctagtgattttttctccctcccttcttccctccctctctttttctttccttttttcttttctttctctttctttctttccttccttccttcctctctctttctttctttctttctctttctttctttcttcctttcttctttctttcttcttcagctaagacagcagaagaagtgatttattgtatgcttgttacacttggccacaagggaacacagaaatagttcagaatgccacaggtccagggaaaaggatcaatatggactgttttggttatgagctaggtgggtctccaaggtagttttggtgatcacatggcaatggaagttctagatccattgagacaagctctagacagtagcatgaagtccaacaacttgtactagcatccccagcctctagcattccatgtttctgttcctgtggcctccatgggtgcacaagctagtggattacttggacctcttgtagggaaaagaaagagagatcaaaatagaatttcttatgtcttccttttctacatagacttctacatagatcagactgttactgtgtgtatgtagaaaaggaagacataagaaactccatttttatctctttcttttccctacacctctgcctcatctttcttcttttgcacttcagcctgtgcattcacttcttcctccacttggttttcatggcacagaggtttccaagatgatagtgttaaggctgggagctgccgattatttctttaaataagcttttcctcctttcctctctcttctcattctgggacccctataattcatatattattttgcttaatggagt

SEQ ID NO: 109600 - DNA, 1004 bp, Homo sapiens
gcctccgcccattccctcgcccacccgggaagctccgccccctccagctccgcaacccaactccttctgtcctgctgtcgctttcctctttcccgcccccatggctgccttcgattggctaaacctgctgggccgcggcggggatgcggcgcagccgcattctgattggctagacttaggcctggaccctagtgattggctgataggaggagccagcaagtgtggctgagctccggggtgtgtggacgccgctttgttgcctgaggtgggtggcggtggaagttaagggagtcaggggctatcgctcctcgagactcgcagtcgcggccactgcagtcacttcgccagttagcccttagggtaggagtcgcgccggcagcagccatgagcggcggcgtgtacgggggaggtgagtgagtgcggccggacgagagagcgcgccttttcggcgtgtggggtttgtaaccgccgctcccagccctcccctccccggcgttcccttccggtctccccctctcgggaccccggcctccccgccccgtccccgccccacgctctgcccgcccccggagcccacccggctcgccgtgctcctcgggctccctgaagtggcggctctctgtggcctcttcctgcctctgtccccggaggagcagggttttggggtgcgcgctcggttctctagggagcctcggggctgggcgggaggctcagtctagccggccgccgggccccggcttgggtgaccgccccagggtcgcatctccccgagtgcctcctggactcagctgtgtcgggacgcgtgtgcgcccgcctaaacttggaaggtcccggcggtttgcaagcgtggacggagggttcccagagtgtcccataggtggcaaagcgagcctcaagccgtagaactgactagggaagcggcggccacttagggtactgcctcctccccgtctgcgccccatgcgcgagctgcctcacctttcagtaactcttgcctgtttttt

SEQ ID NO: 109601 - DNA, 1816 bp, Homo sapiens
gcaagcagtgtgtcaattataatagcagcttacacttagcatgtgtattttctaagacttcatatacatgaaagcacttaacatgtttaatcattagagtatcctgtgagataagagctattatgtacattttacatattaggaaactgaagcagagaggttaataaattgctcagttcttgtagctgttgaacattcttttgcatgtctccttgcaacctgtatgagagagtgtctccagaataagtaagtgtaattctatgtatgcacaatttcaactttaatagatatgactaaattgcccatagtggttgtcccactttggacaataaattatagaatcaccctagttgatggtggagggaggttgctggtatatttattagcctggttcattcacctcagggtaatccatggctaactgcatcccctctactaaaagtcacagctcctgtcaggtagccctccccatacaactttctctccagattctgataacagttatttcttcttgtttcttcagtttgaagaatggcaatggatccattattattagttatcattatagtactggggtactgtactgtcccttctggttgtcctgtatttcacctatatctttgcaaataattccctttaataagtaaactgaaattacccagttttagtgtaccatttcttaactgattgaacctctacttaaatacggtgtatgccttgttatattttaattaaatgattctttaaggtgtatttgaaactaggttcaagtgagtaataatatgaatataattgggctgagtgcagtggctcatgcctgcagcactttgggatgctgaggcagaggattgcttgagccctggagtttgagtccagcctgggcaacatagtgagaccttatgtctacaaaaaatttaagaaattcattgtagtcccagctatttggaagactgaggcgggaggattgcttgagcctaggaggttgaggctgcagtgagctgtgattttcatatgatacttttgcaagctgttaatgctaattatctttaatcttttcagatgaagttggagcccttgtttttgacattggatcctatactgtgagagctggttatgctggtgaggactgccccaaggtaagtgtaatgttagagttaattggatatgtaaagccattcatgtaaattaaatttatgcagaaattctgattcaaaacaaaatataataaaatacattaattggggaaaaaatgccttcttgatgaaaggtgaaacttgtatgtcatgtttctgactcttacaggtggattttcctacagctattggtatggtggtagaaagagatgacggaagcacattaatggaaatagatggcgataaaggcaaacaaggcggtcccacctactacatagatactaatgctctgcgtgttccgagggagaatatggaggccatttcacctctaaaaaatgggatgggtatgatgttttccccatggaattgattatggagtgtacatgttatattttagatacaaagtagtagcttcctataagttgaacatcaaccatggttttttgttttgttttgttttttattccacaaactgatttccagacactgagaatacaaagatgcataagaaatgttccttttcattaaaagcttacagttagttgggggaaatagatgtatatatacaaataatggtacactgtgggataagtggtacaatataggtatgtgcaatgagcaatgggattagagaggagaggtatttgactctagtgttgggagtcagtgatggttttcacaaa

SEQ ID NO: 109602 - DNA, 1060 bp, Homo sapiens
tttgtttttgtttttaagaaggggcatgtggatagaaggcaatgttttaaccagttggcttaggtgaattgaaagattgccattttaaaatctccttcccttccaatatcatagaaaactggaaattggctgtaaattcattctccttcaaatttagtcagtcatcaaatcctgcctgttcttccctgctatttgcttctctctgtcctactgccacagcattaggtggaagctatttccaggattactgaagcacgtcctcttgtctgcccattctttacgctgttgctctaataatctttctatttttatttatttatttatttggtagagatggagtttcgccatgttgcccaggctgctctcgaactcctggactcaagcgatatgcttgcctcagtctcccaaagtgctgggattacaggcatgagccaccgtgcccagcctctaataatctttctaaagtgctagtctgctttaagccagaatcgtcttctacatttcttcctttattttactttcagaccgtgctgaggtacttgcagttctctgacctcgctgtgttctcttgcttcttggtcttcccacatgctcctactcttgcccatattcccttccccagattttactattgaatatctcaggaataggtttcccttttacatcaccatcttccctgggacatcctgagcttttctttttacagctttattcatcatctacttcactaaacaggataaccttcagggaaaaggcagttttggtgcaccattgtgtgtctactgtgttaaaggaattttagtgccaggtgagcagcctccctccttcctccctccctccttattaagcaccagacttagtagacacctaatagatgctcagtaaatatttgatgaatgagtgaatgtccctactcctaaacatcagtttagtatattcaggtagtataggccatctgcagcacagaactgtggaaaatgggatctgccaatatttaccaactgtggaattcacctggaatagttttcccgctcattgagttggaggagataggaactgc

SEQ ID NO: 109603 - DNA, 1568 bp, Homo sapiens
aatgttttaaactagatttgctaatggtcgttctactgggctgattttggacagtggagccactcataccactgcaattccagtccacgatggctatgtccttcaacaaggtaaatgtatttaaccaggatacactgagatgattttagatgccatgaggatgcacataatgaaataaaatgatgagtagcactattaaagcatatcagtttctgaataagattttttttaagtatgttaaaaatctttagtatataatgtatatttaaaactgatgcatggctttatttatgtgttgaaggatagttcagttcattctacctgaaaaagttattcacataaatacacccacagaggaaattcgttcaaggaagtttggacttactgccctcttagccttgtttcatctgtttcataggcattgtgaaatcccctcttgctggagactttattactatgcagtgcagagaactcttccaagaaatgaatattgaattggttcctccatatatgattgcatcaaaagtaagtaattattgaattttctttgtagaacttacttctagctcccccacccctatgaagtgaactccattaacctagcatctcttggtactctcaggaagctgttcgtgaaggatctccagcaaactggaaaagaaaagagaagttgcctcaggttacgaggtcttggcacaattatatgtgtaatgtaagtaaccctcattctctttacaaaaatgttacaggctttttgcatgagtattaaaaaaagttatatataggctgtaaatccttgagtaaaatatgggcactttatattttcaagctctttattttttttattactaaatacattttgaagattaaatagaacatgatctcagggtcacactctatatttttaatgatattttactaacaaaagagcttttctgtgagaggcatgcttttcatacttgccaaacaaatctctacaaattactacatactcacttggattactatggtgagacctggaaggaattttggttttatgctattctgaacatttttggctgagaaaatggttttaggttttgtagaggcctactagtatgtctcagttatgttctgtttcccagcatcagtcagcaatatcaaaaatgtgtttttgttcagaacaaggaacccatgagagattctctttactaaaaacccatctctgaacatatggcttactgatggggaagaggttagtaaaacaacctgatgccacagatacgccttaatttcttaaaaaaaaaacaaaaaaaaactgttactttaggttcaggggtacatgtgcaggtttgttaaatgggtaaactcatgtcacggaagtttgttgtacagattattgtcccccaggtactaagcctagtacccaatagttattttttctgctccattccctcgtccctcagggaggtccaactgtctgttgttcccttctttgtgtccatgtgttctcatcatctagctctcacttgtaagtgagaacgtgctgtatttggttttctgttcctgcattagtttgctgaggataa

SEQ ID NO: 109604 - DNA, 2201 bp, Homo sapiens
gtcacccaggctggagtgcagtggtgcagttgtagttcactgcagtctcaaacacctgggctccccctgcctcagcctcctcagtagggaggactacaggtgcatgccaccatgcctggctaattttttatttttatagagacagtgtctcgctatgttgcccaggctggtcttgaactcctggcctcaagcgatcctcctgtctcggcctcttaaagtgctgagattacaggtatgagccactgcatccagctctgacagtttttgcacctaaagataaagattttgtctgtgtgcacatgtaatatacgaggaaaaattaggatgattagtcatttttcctagatattagacaagatttttctagaggtcgtgttagttcacaacattttattaaactgttttatactatgtacagtcattaaaagttgcataaaatgtgatgtacatgcacatgtgtatatgtaggtaatgaaatcttgcttctaatctagcttatttttaaggagaaagtggtgttctgaaattggttttgttatgcagaactgtggtgcaggggttcctgcacctgcagttatttatctctcatttcataactgttgtaacttaaatgtgtgtaattaacttctaatgcaaatgattagaattaggtttcttgatactcagaatccttgttaggtacatttatactcttgaaatgatttacccatctagaaacatggtccaatttcattcagaaaagtatttaaaatatgttataaaagtatagattacaaagataaatctcaaccttgtttgttacttttttcttttactcacagtgtgttatccaggattttcaagcttcggtacttcaagtgtcagattcaacttatgatgaacagtatgttttcttattaaaatgtatactttataaatgaggaaaggatttgtttaaaaaatacttaattgaataatgtttaaaatattctcactcccttttttttttttacaagtttataattccctagtagtttataattttgaagagaattattttttgtcttttgtgtaatacggtttaatatgttttcagagtggctgcacagatgccaactgttcattatgaattccccaatggctacaattgtgattttggtgcagagcggctaaagattccagaaggattatttgacccttccaatgtaaaggtataaaagcttatttcataattagcctggcttttcctatataggtaaagagcttttgtggctaaaatgttttggatatgctttactgtatgaagagcttccatgtgactacttgttttcttttgttgtaggggttatcaggaaacacaatgttaggagtcagtcatgttgtcaccacaagtgttgggatgtgtgatattgacatcagaccagtaagtgccagtctcctgttacggtttaaaggtatcttttaggggactgaaatgtccccaaatcattgttaggttgacagtgatctaatggttgtcagtgtcattgactttgaggttcattttataacagtatatgtaaaaagatgaagtactagaaaaggaaaaatgtgaaactctagagctatggtgtccagttttgtagctacccgccacatgtggcaatttaaatttaaaatagataaaaacataaaactcaattcttcagttgtagtagcctcattataaatgtggctagtggctgcatcagacagcgcagatatagaacatttgcatcatcacagaaagttattgtagactgcgctagagatttcctgaaatgtggcaaaccaaaatatgtattgttggtgattttcttacagatagcacaacttctacttttatttttcaggaaggcgtggtttaaattatatgagtaacttttacatgaagtttattttaaatgctcttcatattttttgtgctttgtcaggttttaaatactaactccatattatatacttcactcattatcagtgataggttcttggagactgcaactttaactgaaacgatgtacagtaggtccttgaaggacattgtttcaggaaaaaaattggttttgttacatgacattttgctgaaagtcagtttccaaggtcatattgatgacattaaatgaggacttactttatcttatttaaacccaattcagcttatcacccacatactgcctagattttgagtaaattaatttgcttaa

SEQ ID NO: 109605 - DNA, 1065 bp, Homo sapiens
gttggtgttggatgaaatgaaataataaagacttagcacagcaccagatttatagtgttaggtgtggatttgctattttaggatagaaattgtgaatgctatacttcagtatgcagctttttaaagtttgtatgttttctcatcatataatcgcatgttaaaagccataatcaaagtacttttaaaagtctgtacattagtctaacctatgcttgttatcttggctatttcaaaattaccgtattttaatcagtgtttgaaccacagggagccattatgaagtctgtcaaaattgaatttcctggctgggtgcaagtggctcatgcatgtaatcccagcactttgggaggctgagatgggccgattgcttgagtgcaaatgtgaagaccagcctggacaatatggcgaggaagaccctgtctctatttgaaaaaaaaaaaaaaaaaaagaattttctaagttgagtcacaagatttgattgtactaatgcatattcttctatttcagagtatgcggttgaaattgattgcaaataatacaacagtggaacggaggtttagctcatggattggcggctccattctagcctctttggttagtagatgagctactttgcaaaaatattcttactgaattatactaaatttagtaaaaatacaaaaaataattccagtgcttcatttgtctgtgcattttataactgtcaaatgagtggaagacctaatggaataaccagttttatgtgttctgatgtaacaaaatgcctctgcctaattagtggacatttgtcagcctaatttcaatgtcccctctcaaacagaggtggaaatatgttaatgtatgcatgccttttctaataatacccccattggcactggtcagggcttgtctggagtgcatttaaaatgaaaacattgcttctcaagttctggtcattccccagtctgcagtgagatctacagtgaggtctaggaagtcaggaattggtcttggagcaaatggtgaagtcatggtgcggggtgtaagatgttgcttggactaccatctgccttgaataaggacaaa

SEQ ID NO: 109606 - DNA, 1249 bp, Homo sapiens
agggcagaaataatcgagtactattttgggggacgggactcttaaatgaattattcaaagtttaggagttacgaaaataagatattaaaaaaaacgctggtgcagtggctcacacctataattccagcactttgggaggctgaggcaggaggatcacaggtgcccaggagtatgagaccagcctgggcaacatagtgtgagaccccatctctacaacaattaaaattaggcaaggtggcatgcccctggagtcccaggctgaggtgggagcatcccttgaaccaagaagttcgaggttgtaagctacaatcacgccattgcactccagcctggctgacagagcaagaccttctctcaaaaaaaaaaaattttttaagccatttctagtaagaagtaaggcataattatataaatttctttccattttacagggtacctttcaacagatgtggatttccaagcaagaatatgaagaaggagggaagcagtgtgtagaaagaaaatgcccttgagaaagagttcccaagcttctaccttccttttgtcaccttacgtttcatagctttagtatactcaggaaaagaatgaccatcttttgtagaatgtttatacatttttgcatatttcaatttccacttaaattttttaaagctttaactggctctataaattaagtttgtgctttccttgaaatgcacttattcttattacaagcattttataattttgtataaatgtctattttctctaaatattttgctttcagtaaaatgctttccaactctgtttagtgtattaattaccagtggattggtagaactgctttttattgactagtaaaagttactgcctatgctttttaccttaggcttacagaattaaataaaaattagccattccagaaatatattttggactgttgtgcactgtgattactactttaaggactaaatgtatttctcattattttgaatcaaagtcctccgtttattaacagcaatacccacatcctcttcatagcctattaacaacagaggtaaaactattattcaaattcaaaaactacggtattgcctttgctgtggcagttaccatcaccttcacactctaaggtagcaggtgacatttaaagcctgcttaaatgtcagaatttataaagtgggaatctcatctgaactttatacctgatttttagaagcaaattagcttctaccaaattagctaattagcatgccatattcacacttag

SEQ ID NO: 109607 - DNA, 1041 bp, Homo sapiens
aagaaagcaaaaattcttttaaaaaagtttccacatcttgctgaagcccaaaagtcaagtcttgtctaagatgtctgaactattaaatttaccattttgtttttcttgaatagtctgtgtacaggagtaaatatgttaagtggtttataaagaaattctgtttttagtcaagtgactttactaatcagttgttctaagtgtgaatatggcatgctaattagctaatttggtagaagctaatttgcttctaaaaatcaggtataaagttcagatgagattcccactttataaattctgacatttaagcaggctttaaatgtcacctgctaccttagagtgtgaaggtgatggtaactgccacagcaaaggcaataccgtagtttttgaatttgaataatagttttacctctgttgttaataggctatgaagaggatgtgggtattgctgttaataaacggaggactttgattcaaaataatgagaaatacatttagtccttaaagtagtaatcacagtgcacaacagtccaaaatatatttctggaatggctaatttttatttaattctgtaagcctaaggtaaaaagcataggcagtaacttttactagtcaataaaaagcagttctaccaatccactggtaattaatacactaaacagagttggaaagcattttactgaaagcaaaatatttagagaaaatagacatttatacaaaattataaaatgcttgtaataagaataagtgcatttcaaggaaagcacaaacttaatttatagagccagttaaagctttaaaaaatttaagtggaaattgaaatatgcaaaaatgtataaacattctacaaaagatggtcattcttttcctgagtatactaaagctatgaaacgtaaggtgacaaaaggaaggtagaagcttgggaactctttctcaagggcattttctttctacacactgcttccctccttcttcatattcttgcttggaaatccacatctgttgaaaggtaccctgtaaaatggaaagaaatttatataatta

SEQ ID NO: 109608 - DNA, 1893 bp, Homo sapiens
ccttaaaatataattgtgtaactatgttacctctgaaattataaggtagcagcttctataatgcagtattaacaatactttctaaagcattttcaaaatttattgtggccaagcatggtggctcatccctgtaattccagcactttgggaggccaaggtgggaggatcacttgagcccaggagttcgagaccagcctggacaacatagtgagacccagtctctaaataagaaaaaaaaattaattcttgtgcagaaaccctgagtagctttttaaaatgttatcgatgacaaaatgattatgtttattatgataatgtttattgcttataaaatccagatattataaaacttttacttgtttatgtgtgttcaattgcaggttttttcttagtttgttgcctaagagtacaccaaatgtgacatcctttcaccaatatagattacttcataccacattgtcaaggaaaggactagaagaattttttgatgacccaaaaaactgggggcaagaaaaagtaaaatctggtgagatacttggatttgtcaacattagatatatttatggaacccccccccccgccccgcccaaccatcgttctaggattatatatccagtttaggaattatttagatgtttcctttttcagttttctttgagactgtctactagagaaaattaaagggacaatataatagtagagttaattgttccttggcagattggcaagatggttagataaggaataggctgaaattattaactaaagtaaggtttagggcttattttagattttattttttaatgataatttaaagtttgtttatttatttagagatggagttttgctcttgttgcccagactggggtgcagtggcacaatctcagctcaccgcagcctctgcctctcggattccagtgattctcctgcctcagcctcctgagtagctgggattacaggcacgtgccaccacgcccggctaattttgtattttaagtagagacaggatttcgccatcttggttaggctggtcttgaactcccaaactcaggtgatgcccgccgtcttggcctcccaaagcgttgggaatacaggtgtgaaccaccgccccagttaatttataatgacaaagtattttgtcattagggtgtgaaaatacgttctgtactaatgctaacattttttgaatgctattgccagtcatgttaatagtattttcgtatgttacctaatttatctctaattacacattgttatatactataaaaaagctgttatatattttacagataaagaaacaggtttagacaggtttagagagcttaaataatttgccaaagggcacatggctagaaatgttatttcatgttatgtattattttaataggagcagcatggacctgtcagcaactaaggaacaaaagtaatgaagatttacacaaactttggtaagtatactaagtacattaacatctagacgtttgaagccgttatagtgtaacaatgaggtgaaaacaatctatctgatataagaaattgagtaaagcgatttcttttgtagtactatggatgataaatctgatgtttaagatcatgaaagattttatatgacagaggttagattatgacaaatgtcacaattctcaagtagttgggaattcagaaattttactgtaatttacattggtcctactaacatgtttatactagcaatttcagttaattaataaaatgaaacagagaatagttggtggcttttgtttttttctttgagacaaggtctcgctctgttgcccaggctggagtgcagtggtacagtaacggcttactgcagccttgacctcctgggctcaagtgatcccccacctcagcctcctgagtatctgggaccac

SEQ ID NO: 109609 - DNA, 1051 bp, Homo sapiens
cctcaccaaagtgggctccggctctgccatccaggcggccgttccattcttgagttgttctcggcatctcggcatctcggcaaccaaacaagatccaaagttggagaggtgggcaaacctactttatacatcacttaccctgtgcaggcagggacctgaggagttattaacgatcgggaagatttcagggcggatgaaactctcctacaaagaagggccaaaccggccgcagccatgttttcgcataactggcaaaacgcgtttccgccaacgatagcgtcacttccggcgtctcaagccggcggtgaggagaatagaaaacttgccctcacttaagatggccacatcctgcctttgtcctcattggtaaattggctctctcagcttccgtgacccgcctcccttcttcctcctgcccgtagtagccatggcggccatgagtttgttgcggcgggtttcggttactgcggtggcagctctgtctggccggccccttggcactcgcctcggatttgggggcttcctcactcgtggctttccgaaggctgctggtgggtgctggcctagggagaacgggcgtgaagcgggtgcggggcgagaaaagggaggacgcttccagggtgaccttggtgggatccggagggagccgggacaagttgtgggcttggggcttgacaggagagacggagcacgagctatatgaggggttttcctgaagtagccagatagatcgtgtttacattattagcatttctaaaacgttgttattcaccatcccaattaatgctaatttgcggatgaagctgagtctagaaaggtatagagctgagatctgtatctctagggcacaagcttattgttgcgttccacctgcccaaaggctaggttctagtcccacagatgcaaagtcatcttgccgagaagcccacctatgctaaggaatatgaagacaggtaatatgtagacaggtaaagaggctcagggccaacttattctttaggcacagtaagtaccgtgccgcccaataatgagatgcagatgaactggggag

SEQ ID NO: 109610 - DNA, 1011 bp, Homo sapiens
tgctgtatccacctcatctaagccattcataaaaaccttgatgctgcagggcttttgagagatctctttgccaggttactgcagtaattaatcagtaccttttgcttacagtcaatcaagtacccattacaaatttctctaacttcctctttctctcagcttataatgtcccctcttcccaacccccccatcttgtctaaataggaacttttcttctgggccactgtatcctatttctttcccttgttacccttacagatttgtaattacttgtgtagtgtgtatttctcccagcaagatctatatccctcttagaccgtatatagttctagcataggatctgcacatagtatgcaattaaatatgtattgaattaatgagtactttgtactgtcatccaacccgttttcttcatctagtccacaaaaaaaattatgtatgtttcagatgatttgctgaagtccatacttactttgtcaaattctcttaatcttgttatttaaaaagccttagtagtatgaattatatgtagtaaattcatgccagtttctaattctcttgtgaatcaacctcccaaactcactgcaagctgctgcagatgttaccaaaattaagaagatagttcctgctttcaagatatttatacttaaaagtggcagcagtaaacacaaatatacatgtcacaataacgtacagtaattcaacagtaggaaagatctcgtgtggttgggaaaaatgttggcatcttggaagataagatgttatctgggcctaacatagatttcaggagaggggacagcattccagacattaaacatgaacaaaagattcagatctttctgacatctattatgactgaaattcctttaatgggaaattaaagttttttattctacagtgactcacatgcaaaatatccttgagagtagttacacagtgaaaagataggaaccttcagtttctaagtaacagctagatcctttcctgttcccagtggaaagggcttggaat

SEQ ID NO: 109611 - DNA, 1046 bp, Homo sapiens
aatggcataatggaataatttaaattaaatgtatttcttttgcagcattagcaaatatttgttgcagaggagacacagatgagcagctcattaagtacctaacctccctgcctgctattgaaacaaattaaaatgattatttagatactttaactttgaattaaaatgaggaaagttatgctttagaacagtagatccatctttgtttaaagataccctatctgacctggccttattactcaaataagacattttaaaatcttaactcatattaaacatctaagaatgtatattttctttttgtttcatgtcagatgggtaatgtgcctacctcataacaaggtttgagggaggcacatctcacacctgagtgtgaaaacccagtcatcctgcttatgagctacaaaaggatccttgtatttttttataatctgattttaactcagaatataacagtatacccatatgaaccttgtataaaacagggtaattcaatattcccagctcctgttcgacacagtggagaccatgggaaaagactatttgtcatcagaccttctagattctatgacaggcgttttttgaagttattggtaagtttaaattttttgttgaattaaagtctttgcatgtaacagggaaaaaatttttgcctctttagaaaacatctttcattttatgaaatattttattttgtaaatttatatttctttctgtagaagatactgagactgtaaagtctgatttgttattgaatttctctttaaattagtgaagctttccttcttcacaaaaggatttacactaaatggaggtaaaacttgaaccattcctttcttctgaagattatggcgtttcgaaatagaatctgtgttcctataactaaaatattctttaaattaccaaagaacttgttgaaagacttgcttaaataaaggagctacattattttgggatatgattttatatttatatgttgttcaggaacatttatttcagagagtaacagggatctatagtgcaatcttaatttagcaataatataa

SEQ ID NO: 109612 - DNA, 1083 bp, Homo sapiens
aagtgttattgtgagccttgaatggagtatatcccatcatgttttattatctgaatgaattatattttaaatacaaatcttaaaccattaaatcttaaggcagaccttacacttagtttgtttatgctaactggtgcaaagagctccatttttgaattaccaaaacctgggtttgtcttctgaatctgccacctaagatactcagcatagtgtaatggaaaagagtacacagctttggagtcagacagacctggtttgagtccaggtgctgccatttattagctacgtaactttgtgcaattcacttatctttaaaatgcggacaaaaatagtatccacctcatctgttaaaattattttatatataggtatattagttacatagtagatgttactggtttatctaactgaaatgatcattttaaagaatagtcaactagaaaagcaaagtattattcagaaatggactaatattaaacgaattttctcttgtagcatcccatatcaagatggattgcccgtaatttctatgatagtcctgaaaagatatatgaaagaacaatggccgtccttcagattgaagctgaaaaggctgaattacggtaggaaaaacgagggggtaggtgggaaagaaaatcttcctaaggtagcaaaccaccagaaaaaattaataaaactatgaatatttcagcactataggatactttatgtaaaaggataaagatacgtccagatgcagtggctcacacctgtaatcccagcactttgggaggctacagaaattagccgggcgtggtggtacgtgcctgtaatcccagctactcaagaggctgaggcagaagaatcacttcaacctaggaggcagaggttgcagtgagccaagaccatgccactgcactgcagcctgggtggcagtgtgagactccgtctccaaaggaaaaaaaaaatggataaagatagaattagcttgtttggagtgaaaactataaactggtgacaaggagactattaggagatatgtgtcagattaaagagttcttttttaaatttttgaatttttttttagagtggaagtcttgctct

SEQ ID NO: 109613 - DNA, 1097 bp, Homo sapiens
tcaggagttagagaccagcctggccaacatgataaaaccctgtctccactaaaaatacaaaaattagctgggcatggtggtgggcccctgtagtcccagctacttgggaggctgaggcaggaggatcacttgagcctgggaggtagaagttgcagtgagctgagactgcgccatagcactctgacctgggcaaccgtgcaagactccgtctcaaaaaaacaaaaacaacaaaaaaactgtttgatagctatctatataagcaacataataaaagtcaaaaataagtcccaaattttggttatagatatataccagatgtatgcctacataagggtctgtggaggagcattatactttacataaaagcagactccagtgattgtcctttatggaaatggctcattaaatttataattggaagtgctggaatctcaatattgctgttccatttgttacagggtaaaggagctggaagtgcgaaaattgatgcatgtgagaggagatggaccctggtattactatgagacaattgacaaggaacttattgatcattctccgaaagcaactcctgacaattaagcatttttttctccaaatacaaagtatattctctttattggaaaataaattaataaatatattctgtatttttgctctccgtgaaaaacaaaagagcctctgacattactgtctctcagtgttggttcagattgaggcttttgtttgaggagtttggcttccagtccccaaagaaggtttaaaatgtactaataaaaactggagaaataggaatttgtgaactcctaaaattgtagcaactttgaaaggttagtgttttatttacctgacaaatggaagttatagaagtctaataatgttaagcaccagtaattatagtattttgtacaaatgcctgtactgtagatgtctgtattattgaggggcaactcaggattttaagttccataaagtattgaaccaactctaaaatgttaactccttaataaacagattctcagtaaacaaattttaaagtttataatgctttcatggtttttttttttgccatgtattgttcttttttaaactacacacag

SEQ ID NO: 109614 - DNA, 1053 bp, Homo sapiens
tctatgtttcaggggaggaagggaaggtttgataatatttatcttaaagcacagtgcgtgataatgggaaggttttttttgttttgttttgttttttttttgagttttgctcttgttgcccaggctggagtgcaatggcacaatctcagctcactgcaacctctgcctcctggattcaagtgattctcctgcctcagcctgccaagtagctgggattacaggcgtgtgccaccacacctggctagttttgtatttttagtagaggtgggtttcgccatgttggttaggctgctctcgaactcctgacctcaagtgatccactcaccttggcctcccaaagtgccaggattacaggcgtgagccactgcacccagccagtattttgttatggtatgtaacactatactatgaatccaataagggattcttcagcacctactatgtgccatctcatacatgcatgactgtaaggagcataaagagcaaaatccattggtgctaaacacgccagaaactttaatccacaagtgccacgggatgtcttagggaaaaggccaaaaccagctgagtggaaaaaagaaatcatccctgcattggttactgttgaaaaaggttatgtacaaagatggctagaaaataagggagatcaacattcaaggccagggaaattatatgtgcaaagaagatacaacgtgtgaatatttcccactaatttgcctgtaatgtatttggaataaaaagatacatttggcaagtagcaagaagtgaggtagaaccaagtagagagtagatgatgggggccttgaatctggaaaacatttgatcttgattttatatggtcagttatggaaagctattcttggtcatgtgatttaaagtggtgttggaggaagattgtgaatcaacaaattcacagtgtacctaccatgtctaaggcactgtctgtagacctttgccattcttcacctttgtgggatatgagtagtgtattagtatctctcttcccttcttcccacctcctagggcttaacacatagcagatgctcaataaca

SEQ ID NO: 109615 - DNA, 1591 bp, Homo sapiens
tacttctttttataattacaagcagctcatttggttaatttttttttcctgtccgctcttttttgagtcgatgttctagaaaatacggtgttctggtcttcttggccttccttttccaagggtgtgtgagtcaccgtcttcccgcggtgttagtatgtgatttgtcctggcgtggatttgttgtgactccatctacctacatcatgtttctctttgcagcaatgaccgcttgttttccacaggagacactgttctgtagttataaaaacaagtgttacgcagcgactgtttcctgagcgcgttgctcacataagctcatgctcccttcctgtcttccagtgggaaggctggttgccaagaaaacatcatcataaacaaagttctctgaacacctaccgattgacaaagtagtgtatttttatttaaaatgactattcacttgctactctgaaacatgttgcaatcttgacctttatatttgccaccgttttaacattcttttaaacggcaggcaatataaaatcagtgactttgtctttgatgttatttctgaatagtacatagagggatacaatacaaagtagcaaatgaatggctaagtatatactgtatgtatattgaaatgcattgaagacaggattttaacaatacatggggcttctaatgctgctcctttctttttctttttttttctttttttttttttgagacagtgtgtcgctctgttgccagtctggagtgcaatggcgcgatcttggctcactgcaatctctgcctgccgggttcaagcaattcccctgcctcagcctactgaatagctgggactacaggtgtgtaccaccatgcgcggctaatttttttgttagctgggactacaggtgtgtaccactattcccggctaatttcttggtattttagtagagatggggtttcaccatgttggccaggatgggcttgatctcctgacctgcctcccaaagtgatgggattacaggcgtgagcctctgaacccggccagtgctgctcctttcttaccgtttgattatggggctggagaagttgtcaagggaaatcattatagagccctgtgcagtatttcttgactttcttctgattttggatgtcaaagtcttgcatcttggtcaaatttctggttagtgcatcataaaaatgatcattagaatcctatttagcttaggattgtgcacagaactgcacattggtcattctgggctgggtgtcctctgagcaccggaggcaggtaggatccaaggtgggacggtggtgcagagaaggcagccactttcctgaagaaccatgtgagactggcttggttacagcaggtgggagagctggggcagtagggttcaagtgtccaggctgctaagagtgacttcagccaaacaaacctgaaaagctagaatttctgctggtgcctcaggctgtttttctatgcgtggccatgagttttattttgagaattcccattgtttagtcgtgccagagactttaagtggaagctgtattatgatgcattttaaattcagatcagaagggcactgaggaatagtttgagagagagagacccaat

SEQ ID NO: 109616 - DNA, 1111 bp, Homo sapiens
ctatactgtggtctaaataggcgaggggggattttagctgaagcaatttttacagaagcagaactggcaaaaagttaaaaaagtaattggttacaaatgtagttacaaaaaataaacagttccaggtgcaggggcttaaactatcacaaagagataaatgcaggggttttgggtgccatccaccgagcgcgtcctcaggagctggcggtgcagcttgcctcaatatcttatcagtaggtacattcctggacgtgctttgagtcagtttacactagttacgccttaagggaggggggtgaaagggggctgcaagtgaagaaactaaaatggagtctgtccggctctctgtctgctaggacagagtcacttgggttaaaacaaggtagggtatcacagcaggagcctcggtggccctttgccaggcctcgtcttcagcgtttgccttccttccctttccctctttctacatctgactactgggctaggtgtcgtcggctaatgtactttttctctttcttctagaattctgaaggtggactctatgtatgcatgaatacatttttggcctttggaagggaacatgttgaaagacattttcgaaaaactggacagagtgtatacatgcacctgaaaagacatgtgcgagaggtgagagcggcactttcagagaactggccttgatgtcttccctgtaacgttgtctcagtgtgctttctcacgtggaaatttgaccatgcccacataacttccgattccctttgacgatgagaaacaaaaacagcactgcttgcaaaatccagagagtctcccaaaccttatcgtaaccagttttatttttcttcctctaaacttctgattggtgtttttaagaatacatagattgactaattggaaaaaaaaaaccgaaactaggtttaaaaatacagaaaagtacagagacacccatggatccaaaaatcataaaaaaaaaccatttgaatgttcctgcttcagatgtgttttgttttgttttttagtataagaaatagagcttccttaaaaattcaagttccttttgtccctctccctcgccagaagtaaccactgctttgaactttttctgtgtcatgca

SEQ ID NO: 109617 - DNA, 1040 bp, Homo sapiens
actttttgtagagacggagtttcaccatgttgcccaggctggtctggaactcctgagctcaagcgatccaactgcctcggctgggatttcaggcgtgaaccactgcacccggccaattttttgctgactttcaatagctggctcttgcagtgactcacgcctgtattcccagcacgttgggaggctgaggcaggaggattgcttgaacctaggagtttgagatcagcctgggtaacataaaaaggccctgtcgttaccaaaaaattaaaaaattagccgggtatagtggtgtgtgtctgtagtctcagtgacttgggaggctgaggcaggaggatcacttgagcccaggaagttgaggctgtagtgagctatgattgccactgcactccagcctgggtgacagagcgggatcctgtctttaaaaaaaaaaaaaaaaagaagtcaatttttttctttttatttctaaaattagccaaactacagacttcattcagatttcataatttttctcccgctcatgtcctttctttgttacaagatatgatccagggttccgcattgtattcagttgtcatgtttctttaatcctttccagactctgatcattcttcagtttttctttgtctttaataattgtgacacttttgaagagtgctggtcagttattttgtagactagacctcagtttggctttatctgatgttttctcatgaaaaatgtgaagtatgtacgtatgcatttttggaaagaatcctacagagatagtgtgcccttcttagtgcatggtatcaggggtacatgatgttaacatgttgtcatactggtcatgctgaacttgatcattgttaaggtagtgtctgctgggtttcttcactgtaaagttatagtgtaattaagaaatattttgagagtgatactttgagactgtgctaaatattttgtttctcctcaaagttttgctcactaattttagcatcagtggaccttgcctgcaataatgatggctctagtgtttgactaatggtgatttgaaaatttcc

SEQ ID NO: 109618 - DNA, 1049 bp, Homo sapiens
atgtggctgttaccaaggataaaatatattagtggacaaaatggccttacctcatcccattacctgaaattatataccaatgcttatatttctgtaatactgagagttcttactgccttgtttaatataactcttatttctgctgtcagaagagaagaaacattgtgaataaatgttatgataaattattttcctttcagcccctcatgaataagtctttatgttaaaaaaattaataaaaaagccttttcttattgttgtacttggagtataatttgaaatgtgaatagtcttatttaaaataagagaagtgccatagaaatctgaatccagcaagatatatcatcatttttactatagagtcttttagtattaagaaatactttaagaatgaaaaaagaagagagaattatttggaagatgagggtggggagataaaaggaaaagcctggacttatctgatggtaatggataggatttatctacatagaagatgctagttactatattttcttttcatgcttttgctatatttttggtgttcgacaattctctttttaaactgttaaatagcaaaaattattgagctcaaaccatctaaccaggtgattcttccttcatcttctgagtgttttagcacagaagaatttcattttcagagagtgactctataggttctaccagaaagttaaagcacctctgggtgatgctgggttcacagagacatagcactgtgagctcggcaggggtcttagagcttgaaatccaatgccttcatttttgacatcaggaattggagcagtggtgtgcttgtaaatgtttaacaacaggctccctagggaaaaaaagctctgttttgtagtgtctgctgattccatggtgtaaatactcccaccatgactgatttcaggttatcaatatgacgtcactgaatgcggtgttggaaagagattggtagtagcagaccattgtacagaatttccagcattccgctgacatgcatgtaaataaaacctcaagaacacatagataataatgagatacagtaa

SEQ ID NO: 109619 - DNA, 1026 bp, Homo sapiens
tctctgttattccactgagcctttgttgtgacctgcctacttgaaaccctctgtcttcttagatgttaagttttaaaattatgccctggctgttctgactactctccaatggctttccagtggttggaagtgtgccagatgcgacctgcgagaaaacctctggttgaatctgactgacggctctgtcctgtgtggaaagtggttctttgacagctctgggggcaacgggcatgcgctggagcattacagagacatgggctacccactagccgtgaaactgggaaccatcactcctgacggggcaggtgagtgcgcctttaccgactttgggaacatgcagtggcttcctcttagatttaaccaatccctgaatccaggtggttggaaggtgcaggctctggatgcagacagcccaggtttgaattctaattctgcctcttattagttttgaggtcttgggcaagttttctaatctccctaagctttagaatcctcatcttgaggataacgatgatgatacctctttcctgtgtttgttagtgtgcataaagcatttagctcagtgcacgctgtaaggtcctaatacaagttgctgctgttgttattatccttctgtgtatctcttggctaaggaggacagagcaggaaacaggatttgtgaagtgagtgtgcataatcaagtctactgttagaacagcaggaggaagccctggaatccattacagggattaagtatcattttaggaacaaatggattaattatggagaatatgagttttaaaggatactgtgcattaaaagagtccctgaaatcacctggcagtgatggtgttcacattctccgggggattagaattgtttccttcttgcactgtcagcttcagagttggttctgtttctttttgtcctcacatggtgtgctttgaaacattagcttttggccatgtttgtacagttaataccttctaccattttgcgagggaaaaaggcaataatatcaggatcagtaatgagaaacttaaatat

SEQ ID NO: 109620 - DNA, 1066 bp, Homo sapiens
aaatgtgatcatactgtataaagttttattccttatttttctctatttaacattatgtttttctatgctattaaatattcttcagtattttatgatggtttcataaatcatttcactattctgtaagtggttacaattttttttctattctgatgaacatccttgtatatatgcaaatctttgggtgtttgtctagttatttctttagaataaattgctgtgacaaaaagagttaaatctttaaaattttcagttaccaagattctcttttaaacagttgtaataatttacattcccatcaacagtgtatgacagtacccatttcaacaaatccttgacaactttttttattaagacttaaaaaaaaaacctttgctaatctggtatcttgttttaatttgcatttctgatgaggctgaatatttttcttagtattcttggccatttgtagttcttttttgtgaatttcttaggccaatgtttttgtaggtttaggtttttaaaaattgttttttaagaactctttgattattaagaatattaacccattgtcttccatagttgttactgtttttgtgaagaagaaataacttttaaggtttttcttgtcatataattgacagtatttgaatgcatctgtttcaatcatagaaagtataaaacatttggcaacagcaatgcagatcgtatacactgtgataagggttgtgaattcatttagctaaaataatgttaactttttgaaaaagatcaggctttgattcctgcgaatattgtgcagagtcagttttaataaaagtattttctgtctaattgtaatttcatattagtttatgggatgcatacattctattttggtttcctttaaatctgtttaatagatcgcaagctgtaacatattgtttatttaaaagccacataaattaataaaaacatgcataaagtttccttaaatgtctaatgatgagccttgtggacattgaggcccaggggtagggtgccctctgtctgggggtagccatctctcggtgaagtttccactgctgagggtctgctcttccacact

SEQ ID NO: 109621 - DNA, 1033 bp, Homo sapiens
tctggtgtttgtgacttatagatgagcctgaaatgccccaagagagggaaagaagattcactgaaacagagaaggggatagatgatgagaggaatgtatggtgtgggggagagagcatgaaggatgggtcagagccatgtggcagaaacgcctttttacggggccaccaccacgcatggtcttaataactagcatcacatagtgcttgcaaagggccaggctcttcctctatattcactgatgcggaaacggatgcacagaagccttgcccaaagttgcaaagccagtgagtggcagagctgggaattatatcaggcagtttggctctggagtctgtgtttttgatcaccgcattatcctacttccctaacagttgttccaagacttatttcaggctcccagtgcctcagtgtgtggatggtggcaggtggatgacaaaagggggcgtttgaagtttgcagaattaccaggtagcccagttatgagggtttctcactggcgtcttccaagttgagtcatttctagaatatatacttcccagtattaaattaatctgctataaaccaaggttaaatctagctttttatatatgcatgcttaataaacattgtcatgcataaaaaggcagcagtatttatttgtggtaccgccatttttacttaaatatgttgaattgaattttaagattaacttgcacttgcagtagataatagttactataaaagggcatttttttcttcaaaaaatattttctctatctttatgcattctaaggcagtgctttcaaatgttttaaagctgaacactctacctcatttcttcctccaaagataacatatcttaaataactctgtattctgaataagctgcatttcttaagcgacaatttatttgatttctcatctaaataatcctcaacacatacttgctggtctcaacttttcatcaacgtgagataaccagtgttctgcttcaaggtggtataattttagctgtgaacataagagctttgtttcccttaacctctattttc

SEQ ID NO: 109622 - DNA, 1062 bp, Homo sapiens
tgtttccttgttagaactaggctgcagtggtttctcttgtctgcctcagggttactgattcacatgtctgctcaggtccatgatcttttctaactctgtttatcatttattagtgataactttttttttttagaataaagcctcccgagtagctgggattataggcacccactaccatgcctggctaatttttttgtatttttagtagagacggggtttcaccatgttggccaggctggtctcgaactcctgacctcagatgatccacccgcctccgcctcccaaagtgctgggattacaggcatgagccactgtgcccggccaacagccagtgttcacaggttggcatctgcccctcccatcactttccaggtcttatgttaattctctacatgctcttctgtaagcagtgttttcacttaaatgtttgccacatcatcacatctgttaacagagcataatttctgttttatttgtacctaatttacatgagtgtatttatataatcatattgtacatgtttttatgtttccagggcagccctttatttttttccctttctcttttgattggcttctcctcctcctttcttctcattccatgaatttctctcccatggtttttaatttaataatattgaaatagtaatccatgatgaactatattttattttaccaatccccatttttggactttagataaattccagtgtttttctattaaagtgctttggtgaatgggcatggccagaggaaatgtttaataaagccaagtgtttacaccgggtttagagttcattttctactaagtcttagtggctcaatattcatacatttactaacctgatacaatccatccttcagaggaaccgcatcggctcagaaaacccaagcgatgtttttcgttttttggtggaagaacgcattcagtgctgtcagacccggaaagtccgctacacggagagggtggattacctgatgcagttacctgtggccatggaggcggcaaccaacaagggtaacaattccaaagcgggaaattggtactgtgtgtcttcatatg

SEQ ID NO: 109623 - DNA, 1115 bp, Homo sapiens
tggtcaaacgaaaaagaatttattgctgtctgtttaacatgtatttgtttggttgaaaggatctttttagaaactgtaggaaaataaacagaaccaaccaggtgaaacaaagcacagacattgggttaggatgtagtgagttgtgaacaatcaggattctgggtgtgatgggggtccctgtctcataggtgatcctttggtgccatgtgaccgagagacatggtgtctaaggcccatggcctggagacctgggtgctgctcctagctgactgtggaccttgggcaagtccttcatccgtcctgtgcctcactgtcctcatctgaacaatggtatgatgacacctgccctctctttcaatcatgctttgaggatacagtgagattggttacagtgaaccttcaatgagtagaatgtggtatgccatggtgggttgtagtagatggtgctccctgccttttctcctctgttttcctcaatttgggaacaaatgagattggcagaaggagggagctcacggtgcagtacttttctaccaaagtgtgcccactggtgtcacctcctaatgttaacttggatttcctaaagcagtcccactctgttatgagagtcactgactcccgtggacatccccacagtaagcagccttacaaaatccagtccccttagggcagagtgagtgtcatagaataatgactccaaacccacgtcaaaaatggcttgttttcagcgatgttataaaacaaaggcctgttttttggaattgggggtgactgggtggtttggattgaaatgtggacaaagatagcatgtgtattttgaataaaataaaaattttgtaataaaacttttaaaaatcagtgatgtaaaatcaatatttaagactataggctataaattgtttgatttcattaactagcccttttgatgcctagacatgttgtaaaaaaattgtgctatggctgccttttcttctgccccacaacacaaagggctatttctacaaggcaaagttttgtatatgtgctattctttacttcagattgagagttgggaaaaactggagtaaataatgggtttcttacttgcttaaaagcatatttatatgtgtatctca

SEQ ID NO: 109624 - DNA, 1092 bp, Homo sapiens
tgactgagaagattattttcatatttttcttctggttttgaagacatgggggaaattttcgatgagatgttaatccaagttgtagcaattcctacctgtgtgaccttagacaagtttcttaatctctctgaccatctcaaatttgaaaattgaagtgtacattaattcgttaagaagcctaattgtttgatttctgactcttgtcgataagaacattcacagatttgttgccaagttttaatactggattctctgctttagaaatatccttatattattgaggggggacattatccagttgataaagattatctcatcaaaacagagaccactacttcccatcatttaaaattctacaataaggtgatcatatggaaattataccctcaaactaattaatgggataagttagttgcagtgggaagtatttctgtttccttttatctctctgatttcctcagtcccaaggaaatacaaatattttcattgacagttatattagatgcagaattgtgaattgcctttggtatacccacttagagagaattgaaggaggaaatatgatgataaataaaaatgggaaactagaacctcaaggtatgcttctaccttaaatcactgaaattgcctgtttgcacatttaaaatgaggtatcctcataagtcagaagtagaaaccagaggctaaaattccaaccagagccaggagcacacttttatagaatgttagcaaatttaataccttgggacagtgaaagttcttggcaaacattgatttactggagatcagaaaaagttggttgactgggaggaatatttatgcatttatatatgcattctttaagtaagcacgattatatgagtaaattacagtctacagagaaacataaaatcccagagacctggagttcaaattattgactttatttccaactgtgaccctatatggccttaaacctttatgatctattccatggccctaaacacagcctacaagacattaccctactgagcaatggagaagattgtttggcacacttccttcacacgttccactcctttatgcacacaattaaaatagacaccaatacac

SEQ ID NO: 109625 - DNA, 1832 bp, Homo sapiens
acccaggctggagtgcagtggcgctatctcagctcactgcaagctctgcccctgggttcacgccattctcctgcctcagcctcccaagtagctgggactacaggtgcccgccaccacgcctggctaatttttttttctttgatttttagtagagttggggtttcaccgtgttagccaggatggtctcaatctcctgacctcgtgatccacccgcctcgacctcccaaagtgttgggattacaggcgtgagccaccgcacctggccaagaaaaatactgtttaacaataataatcatttcgaaagttcaaagattttggtatgtaaatagaatgcagatttcttgcttgggattcatactttcactgtcgagtgcctgtcaagcagagttaagtatagttacttaaaaaatatttgtggtttaactttttaatttttattttctttaatagcaaaaatttctctgaagatgattttgcttctgcattgagaaaaaaacaatccgcatcttgggctttaaaatggtatgaagactgtctttcaacaattgcattatatctagtctaaaagcttagggcaaggcaagcatgcttatatcatcaataagacaaatttgagatgcattaaagtgatgcctttttgacatgagcttttcttttatagatgtaagtagtcttacattttacacttaacagataagttttactcagcatttcagttttctcaaaaggaattagtatattgatatctaggtttcaccaatatttgttgtgaaaatgtccaaaggcagaagaacgttccttaggtatattgtgagtactctgaaaactaaatattttgccaagtttgatgacatttgcttttaaaacttattcacactaacattttatttagatattgtttgaagtgtttgtgatgctttacaaatgtcttttttagtgtgaagatcggagttgactattttaaagttggacgccatgtggatgctatgaatgaatacaataaagctttggaaatagacaaacaaaacgtggaagctttggtagctcgtggagcattgtaagtgaatcatacatggattttaaggaatgtttaccaggtaaatgcgaacaagatttatgaagagcttgtgagatacagccctctatctttgtttcatgtctctagatatgcgacaaaaggaagtttgaacaaagcaatagaagattttgagcttgcattagaaaactgtccaactcacagaaatgcaagaaaatacctctgccagacacttgtagagagaggaggacagtaagtatcagattttgtttaatagtggaggtctaatgttcaaccaaccactaaaaaattttgaacttaaggaaatagtttcttaagcacttaatttataacactcttggtttcaataaataaatgggaaagtacaagagattaggcaaatactcttttcctagataatatactcaaaagtttttggtttaatgactatactatttgtgtagtcattcctgtttgtgatcacaaattccaagttgattaaattttgcaatattcgtttataatttataggaacttctatttaatgattggagcagctttttacatacttactaggtggataactagtaactacttatatgtggttgtcttatagccttgtattgatgtctttgagctgagtgaatagcaataccctgtagttacctaagccagagatactgttcatctttgacttgtcctttgtttcccatatccagtctactgacacaaaagtgatcccattgtatttgttttatagtaatttctttttccttctaagaacccaaagcacttt

SEQ ID NO: 109626 - DNA, 4597 bp, Homo sapiens
ataatttacttggcttttccctaataagctctctcatataagcctttgacctgtatgcatatttggatagttttgttgtttttacaaaaaagctaaatctttctttcaaatttaggttagaagaagaagaaaagtttttaaatgctgaaagttactataagaaagctttggctttggatgagacttttaaagatgcagaggatgctttgcagaaacttcataaatatatgcaggtgattccttatttcctcttagaaatttagtgatatttgaaataatgcccaaacttaattttctcctgaggaaaactattctacattacttaagtaaggcattatgaaaagtttctttttaggtatagtttttcctaattgggtttgacattgcttcatagtgcctctgtttttgtccataatcgaaagtaaagatagctgtgagaaaactattacctaaatttggtatgttgttttgagaaatgtccttatagggagctcacctggtggtttttaaattattgttgctactataattgagctaattataaaaacctttttgagacatattttaaattgtcttttcctgtaatactgatgatgatgttttctcatgcattttcttctgaattggaccattgctgctgtgtctgtgacatctggtgctgctcatccccatccacaaactggaaaatgatttcctatgtaatcatgcatccaactgggctgtgctatttttttaaatggtttgtatttgaacatggtgattcctccttcacttcaccttaacggaatgtctttatttgaattttatttgtaaaatgtgtcctgtttaaatttttcaatctttaaaaataatttttatgtactttttttttttttttaacctttcttgcactctgggtcatgggtaccactgcaatggcttcccctttttttatgggataccaactgcaatatggtcctcaatgctgttctggccatttcaatgactaatgccaaacatctgtatgactaatttttttatgttaaaaaaatactgtttaatgctggctctatggtgatttggttttactaaattgggtttctcgttgggggtggtcttttgaatactgggttttatatattctgctatttttaacgtgtggtttttttcgatatctgggttctaaaagaaatctttggaattaagagaaaaacaagctgaaaaggaagaaaagcagaaaacaaagaaaatagaaacaagtgcagaaaagttgcgtaagctcttaaaagaagagaagaggtaaactataatattcagtatttttaaacttaaggcaactactgaattgaacccaaagtgccatactggaggtaaagtaaataaaaatatgaaagtatttcaagtgccaatcagtgactgttaagaatctttagcaaatatgtgttccatgtattttcttattaaagagatgaagtggaatttaaggctagaattctacaaaaaaagagtatcttagaattaaaatatagaataagttactttaattatgttttaggaagaaatattttagaactagagcagtggttctcaactaggggtggatttattcacccggggacatttgacaagatgtggagacatttttgattgccataactgatagggtgctactgcatctagtgtataatggtcagggatgctcttaaacattctgtaatgcacaggtcagctcccacccgcacccccaccccctaccaagaattatttggctgaaaataccaataatcaggtgaagaaaccatgaactagaggtagccaaataaaaaagttgagttctcctttatgtgttcagtagtcttaagtttttaaggtagtgttgaaaaaagtctgtctttcagagatgatggatttgcttacaatgatacctgtctgcaagcattttttcccccaaaagtgcttaatagtaaaattagatcttgtagtagccgagattattgtatcatttatctgaaccacagcttttataaaatctttaaaggaaacaaatagggcccacatctttatgaataatttagaaacatttttgtatatatatgacaaatgaactgttttttttaggctaaagaagaaaagaagaaaatcaacttcttcttcaagtgtttcttctgctgatgaatcagtgtcttcatcatcatcctcttcctcttctggtcacaaaaggcataagaaacataagaggaaccgttcagagtcttctcgcagttccagaaggcattcatctagggcatcctcaaatcagatagatcagaataggaaagatgagtgctacccagttccagctaatacttcagcatcttttcttaaccataaacaagaagtggagaaactactggggaagcaggataggttacagtatgaaaagacacagataaaagagaaagatagatgccctctctcttcatcttcacttgaaataccggatgattttggaggtaggtctgaagatccaagagatttttataacagctataaaacccaagcaggtagtagcaaaacagaaaagccatataaatcagaaagacatttttccagtagaagaaattcctcagattccttctgtaggaattcagaggacaagatttatggttataggagatttgaaaaggatatagagggaagaaaagagcactatagaaggtgggaaccaggttctgtgaggcattctacctcaccagcaagctcagaatactcttggaagtcagttgagaaatacaaaaaatacgctcactctggatcacgtgatttcagtagacatgagcaaagataccgtttaaatacaaatcaaggagaatatgaaagagaggacaattatggggaggatatcaaaacagaggttccagaagaagatgcactaagtagcaaagaacactcagaaagcagtgttaagaaaaatttacctcagaatttactgaatatatttaatcagatagctgaatttgaaaaagaaaaaggaaataagtcaaaaaattaatacaccaaggatatcggcaccattacacaaaatgccattaagtgaagtttttggttgtattagtcataacagttgagtgcagaaatctctgcttctaaaattatttgtagagattacaggaaacaaatgcttttaagtaagtttttctcaaattttgtttcagttctaggtcccttgtcacagcttggtttttagactttttatgtatatgtttatgtacagtatattactcttgacagtttgaatttcttcacctaaagataattctctgaaagtactgtttcttcattctattgcggtatatgagaattcctgggtgcatcttattctgctgtttgagagaaaaatttgtgcattgaacacttggatcatttttataaaaattaatttcattttcttttctgttaaattaaaaatcgtcagcttttgaaagattatatgttcgaatgtttcttgaacacttttatatttatcagtttaaatattacattttttgcccaattttttttaaaatttttaaatggtagattatatgtcttaattttcctctaaagcccaatttgattaaaagtggtttgtgaacagtcattggcttccacccagcataagtgccttaggaataagatcataaaagttgaataggagcccattttgcttatttctccattattttttacctcattgctagcatagccataaaaagctttttaactttaaatatttacaaggcccttagggcctgtattccacgcaagggtaaatcagaaaagaaaaaaatccttttagcaaaaacatagcagtagcagagaagcacattgtaaatctggcttttctttagggaaagaaaattgggagactctcctagtgtagcagatgttcagtccagaaggcactaggcatgtcgttaaatctgacctgcatttcttcttaccacctcctgtgccttgatgcttctctgatgacccctttctcagagtctgaataaataactagaccaactagagcctggttttactaagaataataaattccagcagctagagctgaagaacaaagagacttggattataaagatcctccccaaattgctgaaaatagtgtggtatattctttgggagacagatagagataggagtcataggtactgggtttatgatgtcattagagtttgcagtttaagattctcaaagctgtaaattacaatggactttagatactgtcacacacaatgacactagataagtgggtgggtagctgaggatctacagaggtctaagtgagggagaataatagaggaagaagagacttattccttgttctgtcttgcagttcttgccaacagtaaaatgtccaggccttaagtactgggtgtgtattatctgtgtctatcaaactccagtaatgagagcctagtgaaaaatctgaaatttcttttgcaaatggaacagtgaaaagaaaccctggtcaagagcaatagataatggtgatagaaatcggctagtcactcaaagcattagtctttgcaccaagaagaagcttctttaagaaattcatcttaaaaagagtccttaataattctatgtatta

SEQ ID NO: 109627 - DNA, 1170 bp, Homo sapiens
gaagcgtatgaaataatactcaacatcactaattagagaaatgcaaattaaaaccaaatgagatatctctcatcagtcagaatggctattacaccccattcaatgtaagagaatagtaccttatcctgtaggctgcctgaatttattaggtaggcgcaaaagtaattgcagtttatgccatattaagcagagtatacaaaccaatttctaaggaagttcatcacagcaaaaattattggggatttacattgtcaagaatagcgacatcttcagtaatttttctcaagatcatatattgccatatcttggtctccataagcagatgaagcatgacttttggatatgaggataagtgtccagatttggagataggttgatcccctgtcgcaccatttgtcattactacactgaagttgttagaactgttatttaaggattaaatgtagattcgtatgctggcccaagaaccaaaccattccacaaattctgtgctaagctccaggtggcaactcagtaagtagaagttatatagtgcaatttctgtgtgtcaagccctgtgcatcttttttatattatcaaattcggtaaacttgtaggtaactttctgtgtctatagtacaaatgaggaaaacagggaagtaactatccaaggttacagagctagtaagatacaacctctaccttcatagaagagtgtttaatattacttcaagttttaagtaattcccaaactagcacagggctgagaataagaactttgatgagcaaagtgactttaattagtttttaggtcttataaatctcatgcattagagcagtactttagccaaaaattttattacctaccttttttttcgcccaccttattcttgactttgctatgcctttttcctatttctaaaacaaaacaaaaaataatcaggagaactattcactaccactactgcttttcagaaagaagtacaaacaacagttctaaaataatgacagttgtaatgagcattttttcccaaggtttgaaggagacacatgtacattcgtgaattctaatacatttatttaaaatccagttttataatattccacactctattccaagagtacaaagtgttgggcacatgttataatgaagtgttaactggaaaaactactacatttggcagtctacct

SEQ ID NO: 109628 - DNA, 1017 bp, Homo sapiens
gtctgagaaatagttactttgaataaagaaaacctaattttggtgtcttgtagggtaaatgagattttcacattgcaatacgctcataatagtacagtaaatctttagaaatttcttcttgaaagattgttacattagaagtgagtgtagtttcgtgaaataatgaagcaaactattttctaacactacgaacatcagaattacagtgaaatacagcatttttcctatgcttgtataacatgtagccttgtcaagaatctgctattaatttcttcagtatgaagaaaacagtagagaaaatgagaacgttcctttttttttaaaactatcagtttttacacttaccactaagtttttacactttccactagataaaatgtgttgggtcgttttgtattttaaagtatatttttgtttttgtgtttacaactttttcagaagagattaaaatgtttatttgctgctctttttgctcttaacattactagagctactactagcactagatggcctagaagggctgcctactagtgaagaggaggccgggaatttaagctccagtactttaattgaagactgagaagtagatgtacttgtactcctagatgacctagaagaaaaaccagaattataaattcaatgcaaagtttatattttagtatagaccctctcattattggcaaaaggtaccataattccataagtaaagacatcaaaaaagtacatattaatagtgttaagtttttaaatgaccatcaatagatatcaaacaatttaaacaggaaaggaaagatgaacatagatgagtttcaaaccagtagaaaagtagtttaataagtatgttcctacatggtaaaaatgctttgaactataatcagttttttagagttggaatcattaagcattgaaagtttccaaaacagaggaaatagggccaagaggatttggtgctggcaaaaataattaaaatgataccttttgtaatttaagctgaagagaagagagaagcatattgat

SEQ ID NO: 109629 - DNA, 1033 bp, Homo sapiens
tccttttttatggctgcatagtattccatggtgtatatgtgccacattttcttaatccagtctatcattgttggacatttgggttggttccaagtctttgctattgtgaatagacaatgcacattcttttatctttcagtgatttgccttagtaagtactttctactagattattattttttctttcaaactattttgttttaaggagcaatcttaatgtgatctttaagaaattaaagttcattaaaggattaatgggtagatcataataactatgacctaccaactaataacaagtaatcatcagggcttaccactaggattttaactaatttacctaagactctgagcacttgtttttgtctcctttaaatgagactgttatctcttactatctacttccctaaaagagattctaaataactgtcttcttggtggaagagcaagagaatagaagtagcagtaatgatagttgacttttattgaaggcatattactaaaaatgcctgtagaatttacctggatgtcttcttgaagttctctgatttgtctttgtttgtatctgtatttttcatcaacagctcttttttgttcttctagttgaatttttagctcatactcatcacctgaaatgtagaacatttttagtttaaaatttcaacatactaagtagaaatcaattttaaagtattatgtaaattgcaccaatatttttgttatgaaagtttaaattttttatatccacttgtagaaaaacactatgggcatgtagtagccatttcttgttttgtcaacatagagcagcaatatgctgccattttttttcagtctttgaattaattaccctagagaggtgatatgccatacagatcctgaactaataatggaagtaacaccctagaaaaccacttagaaaaaaaaatgtcgtggggggaggaaagaaaagggattagtttttctgacccaatctaacatagtttgcttttgttcttcctcatgtctcacagtgttccttttaactatacactcgtca

SEQ ID NO: 109630 - DNA, 1035 bp, Homo sapiens
catgggtaggaagctgtggggagtacagtctgcttatgtgtcactttcacagcagcctgcagcagggcagggggaattgtaaagataagttttattagtaatatttccattcttaacattttcactggcatttattttatcgtgcttcagaacattagttacacatattttgtgataagtattacataattttaaaaagtttagcaaaaaaattatagaaattatatctaattcctttgagtctcaaattggtaaccccatttcatctgaaatataaaagaatagtgggaaaatgagctggaatgagccaaacaaattttagttgtggactactgggtcagtttcttcatttttcaaatgaaggagttgaatttgttcattttatgcaaattcctgatataattccatgtatagcttgaagttctaaaattctgattccattcgcttctaaatcagagatgatatatctctcaaaagtctgtccaatattttcaagtaacttaattggacagtgtcattaaattgcagtcagaactatactgtttccttataaagactaagaggaacttggaaatgagatttgaaaaatactagtccttcactggttactaattatatttttcagtttggcctttaagggttagatattataagatactagagttgatgaaaaagccatgtatgccccatagaacaaagaccaaagacaggagcttactacaagaccaaagacaggagctatgaattgagctgtgtcccttataagaagatatgttgatatcccaacctgtggtaccccagaaggtgaccttatttggaaatagggtctttgcagatatagtcaagttaaatggaggtcattaggttggtcctaatctgatataactggtatccttattaaaatgggaaatttggacagagggaaaactgtgtgaagagacacaggaaggaacaccatgtaaagatgaaggcagatttcagggtgatgcatttacaaactaaggaacaccaaagattgtcagcagaccaccagaa

SEQ ID NO: 109631 - DNA, 1039 bp, Homo sapiens
atggcaatattaatttcttgtgggatgcagctaatataatacttagagggttttttttacttcaaaactgaaaattaatgagctaagcatctgaagaatttaggaaaataacatttaaaaaccctgtataaaagaaggaaaaaatagtaaaggcaagatcagaaactaatgaaataatgaatggacaatagaagatagcaataagagcagatcctttccaaataatgttaatactgattaacttgtggtgagaattatcctaccccaaaagaatgcacaaataaccaatgtcaggaatataaaaggaatcatctctaaaaatactacaactattaactaataaaattataaacaactgtatggcaataaatttgaaatttggataaatatagaaaatttttcctagagaaaaatagaatttaccaaaacagaatcaataataaatacaaaatctgcattgtcctataaacagtatataaaccaatagttgaaaatgttcccccatagaaaacttcaggctcccaatggcttttttttccagtggggtctttgaaaaacaaaaaagatataattccactcttttagaaacatattcaatgtatagaaaaataagaaatacacacaagtcattttatgaagtcagacataaccttaatagcctgataccctgacaaggacagtagagcaaggagaattatgggtcatttatacacatgaacatagatgcaaaaattgtattaaaatattccctaacaaaatctagatgtatgcaaaagataatatgtaacagacaagttgggtttattctagaatgtaaggttggtttgactttgaaaaattgatcaatatgattaaacacaacagattgaagaagatacatcttgtcaataagtgctgagaaagcatataataaaagtcaacatccattcttgattaaacaaaataacttcttagtaaaggataaaaatagataggagctcaatgtggtaaaaggtatctaaaaaatagaaataaactacagtaaaccttatatttaatg

SEQ ID NO: 109632 - DNA, 1044 bp, Homo sapiens
agatgtgattatatgctaatatattctagagaatattcacaaccattggtgtttaaataattatttaaaaataatgtctgttaattagaatatgtgatcaattcatataaaacatgtcatttctcaactgttttttaatggatatttcttatttgtagataataagttttaagtctaactgaaactttggttttctttagttttcctagaccagcgtagtatctgaaaactattgacagtattttctcctagcacagttcattgactttcttacaactagtgagcaacaccaactatattgtaatcacagtctaatgtaatgtagattttagagtagtggaattagtagtacttaatgtaagcaatttatgggaactttgttttaatctaatggattattataaatatttgtattcaaaatttctaaaattttaaaagcctttttatcttgtgtgttattctgtagtctctttgcaaagcaagggagcgtgagactgaaagtgaagaacattttaaggccattgctcaaagagaattgggacgagtgaaagatgaaattcaacggctggaaaatgagatggcttcaatactggaaaagaaaagtgataaagaagtatatgttgaaatattacttaaaattctgtgctactgctcattcttccatcaccaaatgagcattgacttttttttttcttgtatgggaaaggcatacattagtttcctagtgtttacttacgtattttttggacagtgaaaggcacatggagctgtgatttgaatgaaacaataatagaatagtacattttcccattattcattcatcagctacttactgaggcttactatatgcaaagtaccatgcttgctgcctgttataaaatactaggcgtggtttatatgtaagtgttagatttttaacagccacattttaaaaaatacttttagttttgaatttcatttaaaatattgacctttcatattgatttatcagttttgtgactctaacattaaactactttaacctatttctgtcttttctttagt

SEQ ID NO: 109633 - DNA, 2769 bp, Homo sapiens
agctgttgtctgtcagtcaatctcactaagccagcatctcaaatgtttgagagtcttggctatttttatgaagggccttcttctaatacatgagtattgtgcgtatgcaaagtgaattctcacaggttttcatttcagcgtaccttttatcctatgggtttttattttatttggccacgattttctattttcagcattttgattttcttttcttagtttactgattagctctgtggatttggtttaactgtcacgtggtaccagcataatggggaatcacagcgtataaaggatccccctaagctttttgcaagtttaaatctccttaggtggtaaacttaaagtaggaacagtgcctgttggaaatgagactttatgttaatgcgtgagtagttaacattgacgttctcggtttaagacttgatgtcagaccaatgacctaggtgaaatttgagtacatagttaattgacttttgttgttattgaaacctggtggttgctttccctggactactgcagatacagttcgctgggtaagacggcgaaaagaatagacttatctatgtttttcctatcaattgtagataagtcgttttgcatcaccccccacccctttcccgaaaagttttaaattctcactatttggccctgtagttcttgtataagggaggtatgcattttttcttgcatattggaaaaaataaagtgattattttgctttatttcatggttctgcatcatgcatgtggtagacaactatttttagcaaagtatatttgtcaatagcctgctatgcaagatattttttcctttttttaataaggtgaaggtaattttagtaaagattgtttgcagtcttactttggtttctcacggtattttttttttccagtcaattcacaatgaatcaaatgtccccattttggaactctgaagtatttataattgatctctatacatatctacaatctactgcttgtttctacttagactttgactccattactcattttgcctcacaaagtgagttggtactttgacaaaggttggaaaggacactagccacctgtgtgtgcactgaaatcatgtacgcttgaacatttggaattttatgtccagccataatccacttgcatatgcactttgtggaaactgtggtcttcagaactctggaagaatgagaatggcggagtggaaaagagtcctggatttgaagtaaacagatgagaattctaggtctgtacttcaccttaccattatctaacaatggacccctgaacaaatctctctgtctaacatgaggggcttgaagtagttctgtgatccccagtatatttttatcctattaaactgctgacttgaaaaccattggcttattgcacagaagtttattgctttttattcattagaatgtaaaagttaatgttaatttacatacagtaaaataagccttttttggtgtacggttatgaatcttgataaatgctgacaattatcaagattaactgtcactttaactgtggtggtgtcagcatttatcaagattcatagcccccaaatttccgtcatgcccttttcagtcaaccattcctcaaccccagcttctagagtgttttctgtccccatagtttttcttattcagaacgttacgtatatagaatcgtacactatattgtgtagtgttttgagtccggcttccatttagcgtagaagcaatttaattttaattagtttttttccaatttagaagataatacatggtcactgaggtaattttggaactcagcaaaaactagaagttgccttgagatgagagctgttaacattttagtgtatttctttggttttttttggtggtttttcaatgtacaggtgatctgaatttcccttttttcccctcctcttaccccgtataggcagaagacacacatttggccgtaagtgtgaattgccattgatgagtttcaaagtcagttatcatgccttgaggcagtactctgtagactttgattaaagtttttgtagtagaactgaaacttcatttcacaaattaattggaaccagtgaaacgctgaagatctgaatattttacctaaaattagggtagcctttaaaaaatagtatgtacacaaatggtggcatgctaaatacattgttctgcatttaacagtggctctatagttagagatattagaaacttgatttgtgcatgttcgtagccctataaatctgcggggatgagagagaatgggaagatgttaattaagcatttgttggtgggctatgctgttatataaaataacattataggctttgtacttttgtacttctcatacctaaagtagcatcttaggttttatactactggacatttaaggtgtcttgaaaaagaaagttttaatgaggtagaatgtatattctataaaacaaccttttttaagtgtacagttgaatgacagtgtatttacagagttgtgtaaccaccgccacagtcttccttcagaacgttccattaccccacagaaacctccggctcatttgcatcattaaagtgctttttaactgatgtataaatatatattagtctttgtaatagcattgcaatttgtatggccttgggctgagtataatttcattttatttttattttttgagacagaatcttgctcttttgcccgggtgggagcacagtggtgggagcgcagtggtgcgatctcggctcactgcaacctccacctcccaggttcaagtgattctcctgcctcagcc

SEQ ID NO: 109634 - DNA, 1909 bp, Homo sapiens
acatttttttgttttcttgagacggagtcttgctctgtcaccaggctggagtgcagtggtgcaatcttggctggctgcaacctctgactcagtggttcaagcgattctcctgcctcagcctcctgagtagctggtatttcagggacgcaccaccacgcccagctaattttttgtatttttagtagagacggagtttcaccatgttggccaggatgttctcgatctccaggatggcctccatctgtccgcctcggcgtcccaaggtgctgggaatacaggcgtgagccaccgcgcctggccagagttaattacttttagagctgtctgcttccaccgtgtaactgtctacaaaacaaatctcaaagtactatatttctataattccctgtttagcttgatttaatattaagtggaatttgagcgtaatctaaattatgcatagatatattaataatgatgaccaatagaattatagtaaaaagttgcgttcagagggtatgctgacttttcaaggttagtacagaatcttgttagttggtttcattgtggagatttgtaattgaaaaaacgataattgtcttaatattaggccaccctgttaatttaaaaatacatagttccagataatttaaaatggttgttttgcatatttaaaaagataattttcattaaaatgctaagtaatgaagatttaactggatgtcaaaataaatgatcacaacagcttttattttcattcacagatagttgcaaaacgtggaggggaaggaaggctgggattttctactctatcttgctgatggtgatcacagttattaaaaagtcaacttaggccgggcgccgtggctcatgcctgtaatcccagcactttgtggggctgaggtgcgtggatcacgaggtcaggagttcgagaccagcctggccaacatagagaaaccccgtctctactaaaaatacaaaaattagccaggtgtggtggcacgcgcctgtagtcccagctacttgggaagctgaggtgggagaatcgcttgaaccggggaggcagaggttgcagtgagccgagatcatgccattgcactccagcctgggtgacagagtgagactctgtctccaaaaaaaaaaaaaaaaaaaaaagtcaatttaaatgcatatatttcttgtaaagttttgtgttttgtattagaagagcaacacataattacgaaaaatatgaaagcagaaaagcacatcttacctatctagagagatactgtcaaggccctggctttaaatacttccagaaaacattatttttccgtatttttacttttatgtacctgttattttctatgtcagatatttgtgtgccttctgtaagataatagtttaagatgagagcctgttctttactagattatgtattaagcttctatatgtatttcctgattttcttttcccaagaactctgtgaggttggttttatttttttaatttttattttttagtagagatggggtcttgctatttagatcaggctggtctcaaactcctggtctcaagcaatactcccatctgggcctcccagagtgctgggattacaggcatgaaccactgagtctggccagcattagggatttttcaaagtaacttttaggatagtgagcttacattttcattaggaggaaaagggcagatactttgctggattatcactctggataagttctctatcacagtgtttaaggttgtcaaattagcttttttgtagtgggaagagcaatatgcattcattccatgattgacccctaattcttgtaatagtttttaactggcaggatcatccaggtaaacaccttggttttttcatatgcagtatgaagcagttgtatttcctttaacctatttataagttgtgaaatctttgctagtt

SEQ ID NO: 109635 - DNA, 1310 bp, Homo sapiens
ctgcctcagcctctggagtatctgagactacagacatgtgccaccatgcccagctaatttaaaaaaattttctgtagagataggtcttgttatgttgcccaggctggcctccaactcctggactcaagtgatcttcctgcctcggcctcccaaagtgctgggattacaggtgtgagccacactgtgccctgcctccccatccttttaacttcttttcttatattgctggtcatagtgagattttagtttttaacataattttttttttccattaaggcttctgggtttccagtcctggttaagacagtctgtgcccagattatacatacaatttcttaggttactttggagttttatttttacatttaaatagtacgttaatatttttgcatatttgtatgtataggcagttatgctagtgccatgtattaatcatctctgtttgaaagttgtttttcttgcatgtgtgtctctccttagctgtatctccctcacttctaggattgggatgagaggttgatgctcagcatcctggagggctggatcccattccagattgatagaccctcctgagaattactccaaagagtctggggtgtcctgggaataccatacagagatctcgagaagggaacattgtgatttgctttttggcaaataaggccagttagggatcttattttccttacattactgtcttggatcctctcttgttatacacagtaagtagtgggatctgagaccttacagtgaaaccactgtattgtagtgccttcatttagtgaggcttttttttttccttgccctgataaggagccctttatataatctgttaactatgtagacagtccagaaactttattatgaatcttttaaattactttacttatcataaaagctccaggaagatttaccatggtagttgtggggagggagtagctttaagtactcctagcacatctttgagtgtcagggagtaccccagtttaagaatcttcacctcctttattttgcaaatagagaaattgttgtttcaggagaccggtctgttgatctgtctccctatgttgcccaggctggctggcctcgaactactaggctcaagtgatcttccccgctcagtctcctgagtgggttgggattacagaccctcaggcatccttcttgagaactttaaagttgcctagataacgatgatcacccagatctgggagacaagtcagacttttgcagcttgagtttctgtttttttttgagacagagtcttgctctgtcgcccaggctggagtgcagtggcgtggtcttggccc

SEQ ID NO: 109636 - DNA, 3696 bp, Homo sapiens
tttttttttggagatggggccactctgtcacccaggctggagtgcagcagcatggttatggctcactgcaacctctgcctcccaggctcaagtgatcctcccgcctcagccttccaagtagctgggaccacagacacgccaccaggcctggctaatttttttatatttttggtagagatgggattccactgtcttgcctaggatggtctcgaactcttgagctcaaggtgtccgcctttcttgttcttccaaagtgctgggtgcctgggcttgctttgttttttattacttaagttacccttcttccatttactttgtaagtttcaaaaaaaaaaaaaaacaacttttttgttgttgtaagttgccttttccctttattctcttctttcttttgggtttattccttcaaatctctttactgttagttaatggacttttgggaaggagtgagataaacagatgtgttcatttttgtcttactttgaccaggtactatacatgtgtttatatagctagtgtgccttggacattatggagtctagtgtgataaagatgttttagaaaagtatttcctatgtacaccatggttgaaagtgtgtgtaagcatttgactaacattcagtaatttgcagttctgattcatagtaatataaagtcatttaatgttaattgtaattatataagtgccaaggactgcttgcctatggttacacagtggtggaatcaggatttcagcaacagtaattctacacccaagtcctttgctctttcttgagtatgtcagatcttatggtttctttcagctgtattaatcaaaggaagatagaataagaaggctaattttaatagtaattttaaggctgaaaaatgaccgccaattgttattgagaatctgtattcattccaacataatcgtgaacagtgtactcactatagcccaattttcttttaagggaagggaaagagaagtatgtaggaaaaataagattaagttaatggcaaagatagtattcaaaatggagtcatgcattttactgaaggtgaactataatgttgataacatttataacaaaattgggttcttactttgtgccaggtactgtgctaaacattacttcatttacttctgataaatttttcattaggtggatgatactgtaattaatttcattagatcaaaactgtattcaagaatatacaagtgatagagcttgggtatgaatcctggcagccagtactccagagcttgaactctttgtcacagtagtaaatactgaactcttagtcacaatactaaataactgccttgctgaactaatacctgaggtgttccagggatgtacatttacttttgctaattcccaggtagatgacaccgggtgaaaaatgaggttcagagaggttaagtaacttaaaagatcatgtgtctcataaatagaatagatggaaatcaaactcacatctgcctaattccaaaccttgtgttcttttagtactccctattatctttgaactaatacaaccttttagagttacgaagtgctttaatatctatgcttttataatgtttttgtgtcttgcagggatttatcaaagatgttcatgaagactcccttacagttgtttttgaaaataagtaagttatttttgttgacaaaggccttaattttagagatggcagtgccaaactttttgcttttgggtgttcctactgccagtggaaaaatgattttgcttttagggagtggggaggtttggttgtttgatcataagtctagttttgataattctttatctgtttttctgtccataattgtcacttttttcataaccctcttcgccagaacatgtatggatatgaatcagttttgcagaaatagatggcacaaattagatgataatatgcttaatatttaaaagcccagaattttcaaatgaggttgtagaaggtcttccagttgactactggtcatcagaataagtattaagccatttttaattgcctgaggggtatgcagtctaaaaatgggaaagacagcatgctgggtttggttaggaagggctataaaagagcgctgggctgcgtgcggtggctcatgcctgtaatcccagcactttgggaggccgaggcgggcagatcacttgaggtcaggagtgtgagacagcctggccaacatggtgaaaccctgtctctactaaaaaatacaaaaaaattagctagtcatggtgggggggcgcctgtaattccagctacttaggagactgaggcaggagaattgtttgaacccaggaggtggaggttgcagtgagctgagacggcgccattgcactccagcctggacgacaagagcaaaactccatctccaagagcactgtttaattgatggtcagaaaaaaactgttcagcttccacttttaagctgtttctggaattgcctgaaaagatctttgcctaacagctgcttcatgtagaaacaagtgttgagatgatttctatctttgagcagctgccatttggacagtaatggtgaaaagaaagcatccccaaatcttttacttgtcagctgctactttgcccagccttggcagatagaaacttgagggacattttatgtcatagtatacttcccagacatataaatgacctatgagaaattagagtagggaataattttttactttataatttcagcttttaaaatacaacatgaaaaatgtcagttaactgctaaattggtttaatacattcgtatttgctacagagttaaaagtaagctttttctaggttctaattataatgtatatatccactgtaggaaagataaatggaacgtgagaaaatgaaatcttttgtaattcagctattcaaaataattgctgataattttctgtatttctgtgaacatgtatactaaaaagaattacacagtttatattgttttgtaatatatgaaattgtgtttcctttattgataggtcatgtagttgtgaaactatttgaaataagttgataccactactatttattgggcagctgtccgaatcaaagttagtcatcactgtgaacttagcttatttcatttgcagaataatgtatgtattgctcttatgatgagtaatttgggagaatgtgtactgctgttaggatgagtaatttgggaggtaatgtacaattgttaacaattatgttaattatgaacttattaagagtcatacaaaatctgttctacttcagtaactaatttcttgggaaattattaatagtatgaatgttgttttccttctctttagggaaagctaaatgataaactaacttgaaaaaatatgcaacaccaggcgtagactatatatttttaagttgttaatacaccttttctaatccttcagttggcaaccagaacgccaggttccatttaatgaagttagattaccaccaccacctgatataaaaaaagaaattagtgaaggagatgaagtagaggtatgtatttttaagtttattttcttgtgtctatttttttgatttaaataaatactcttttaggagaattagcttagttgatggaggataaatctaattcattttctctattctttctattggtggtaatagctgtgtaatacagcagtgcttgagttttggagttagaatcggtctcacctgtcccatttttagctttgtagactttaaattta

SEQ ID NO: 109637 - DNA, 1037 bp, Homo sapiens
attggtgttagagattgaatgatttagaaattgaatctagagttttttttaaatttcacgttatgttttatgattcagctctggtcaaatttgctctctagaattttgtaagtcattatctgaaattaaaatgtgattttttttcacttttgaaaaatttaaaaattaatataaggaaaaagtttaagcataatcttgccacccataggattttgtttttttgtcaccgtttattaaggatttatccatattacgtagagtgtttagaaattcggagttagtgctttcccaggtaacgtttcgaaagcctcttccccttctttaaatttaaagtaataaagcttaatgtaaaaaatgaaatggtaaaaaattatataaagtacaaagtaaaccttccatcttaatgtaggtgtacttgtccacccaccctatcttaaatctcatttaccagagttgattctcttgtaagttttttatttgcatgtataaaggacatatttaagttgaaaaaaaattgggattaagttatatatttgtgacttttgtattcacttaattaggacagcaaacattttcgtgtcttctcatttaaatttacctcattttttgtaaccacctcaaaattatttggtgtggatatatcaaattaaaagacattgaaattaccagattttttgctgttagcaaaagaaaacaatgccagagttaaagttaatattcttatgcaagtctggtagtataattcctaagaggttaatgtttttaaaagtattaaaatgtaccatttcatcctccaaaaatgtcttcagaattactttatacttttattaacactggaggtatctttttcatacattaagtgactgtattatattgttcatatgtacagttttgtaaacttggtggatggaaactgatgtctcatgaattctcatttccttaatgaatagtagtatgggaacatcacttaaattagttggttggctcttaaccccttgttctgtgaattgtctattttttgtttgtgcagtttttgg

SEQ ID NO: 109638 - DNA, 2403 bp, Homo sapiens
atgtattctgctagatggactgaatgtgtgtaatttttttgttcagttaaacaattttagtacatttgatttaggttctttagcacgggatctaaatgtcatatcctcgatggaatttaaaaattacgttaatcactttctgagaacaatttttaatattaacaatgttgacagaaacaggaagacctgtgttttacattatttaaaactcctttgtaagagcatttctttaaaataatacttatgtttagtaaacctcatgaatatggaattaatttctaagaagctaaattgcccaaaaaagtagttttatttttaagtagtaaatttaagttacatatcactttctttaaattgcatttaatatgccaatttaaataaaatagcatttttcattcttaagtttattgggattgggtattaataaaaagtcatttacagcattgaaatcttttgggatgaatggatataggcatttttttttcttctcaggtatattcaagagcaaatgaccaagagccatgtgggtggtggttggctaaagttcggatgatgaaaggagaagtaagtactcttcacacttgctttgtgactagtttctaaggaagtacctcagtgcttggtttttgtaaatcttatttcaactgttagttttatttctaaaagcctacctgagaaatagttgatcagacatttccattagcattaatttctgtttgtgttctgtattggcaaacaccaaagctgctctccagaggtacacctcaagcatgtaaggaccgccaaggttcatgcttgtaagaacctataatctagtttaggcaaatcagattgatgtagctaagctgtgcttagtattttatgccacatgggggagggtccgttggttaagctgagcaaggtaattagaacttcatttaaacttcattatttttgttcagatgggatttttaaagtattttgatgtcttttagttttatgtcattgaatatgctgcttgtgacgctacttacaatgaaatagtcacatttgaacgacttcggcctgtcaatcaaaataaaactgtcaaaaaaaataccttctttaaatgcacagtggatgttcctgaggatttgagagaggcgtgagtaattttatatactattgaattgttctgtgaattaagaagatttttcagtcctacaaaacattttccctaatgcccaatcaaaccttctgatggaaaatcatcttaatgaacaaaggttttagtggggcttgtcaaaatgaaacactgactttgtattgtgactctcctctgactttaatctgttattgagttcttacacataaattgatttctctctaggtgtgctaatgaaaatgcacataaagattttaagaaagcagtaggagcatgcagaattttttaccatccagaaacaacacagctaatgatactggtaagatagtaccatattataaggtagcttattaatggatattgcacagattttataattacatatttcagaagagaaaagctaagatcaacttagtgtatagtgaatttattaatatagtgtgggagaaaaatttgtttgcagctataaaatgttaattacattcttaacatcataaaattcttaatgtgtgagattccggatttttccccaatcaaacatattctgaatagcagatctaaataatacaggaattcagaaaggaaagtgtgattactcagagtagtgagtgttaggtgaaagaagtgtagtagatgagaagcaaggaaggctttgcatagaagatgggatggtgtttgtgctatttggaagaatgattaaagttttgagtaattagcttgtttgtttatagtctgccagtgaagcaactgtgaagagagtaaacatcttaagtgacatgcatttgcgaagtattcgtacgaagttgatgcttatgtccagaaatgaagaggccactaagcatttagaagtaagtgggtttacttacaaaagagttttctgtgtcccatttagtttttgtttgttttttggagacagattctggctctgttgcccaggctagagtgcagtggcacaatcttggcttactgcaacctccacctcccggattcaagcggttctcctgcctcagcctccgtgtagctgggattgcaggtgtgccccaccaagcccagctaatttttgtattttagtagaggtggggttttgccatgttggccaggctggtctcgagctcctgggctcaagtgattgcccgcctcagcctctcaaagtgctgggattacaggcatgagccaccgaacctggcccccatttagttttatatttttcaagttccttgcttcaaacgaaggcagcccaggacctctgtttcgtgactgtttggagttgtgtccgtaga

SEQ ID NO: 109639 - DNA, 1055 bp, Homo sapiens
aataaaacattttgtggccgcgtgtggtagctcatgcctataatcccagcactttgggaggctgaagtgggaggattgctttagcccaaaagttcgagaccagcctgggtaacatagtgagagctcgtctctacaaaaaataaattaaaaaaaaaaaattagctgggctcagtggtgcgtgcctgtatttccaactattcaggaggctgaagtgggacgattgcttgagcccaggagattgagttggcagtgagccatgatcacgccactgcaccctagccttggtgacagagtgagaccctgtctggaaaaaaaccaaaccatacaaaaaagccattttgtattttgatcttttatattactaattttccttttttattagtgcacaaaacaacttgcagcagcttttcatgaggaatttgttgtgagagaagatttaatgggcctggcaataggaacacatggtagtaacatccagcaagctaggaaggttcctggagttaccgccattgagctagatgaagatactggaacattcagaatctacggagaggtaagttctctttctcctgccttggcctttagtgtattaaccatctattgtttgattatatttttatctgaaattccagtttcccatgaaacatttttgaggtagaatttattcaattagcatcagtcagcctagtagtcttacttatgaagctgaattgaagttaactttgtattgaggggagtgaaagatttactaagtaattaaatatgtagtttttttattgaggtttcttaaccgcttctgagtttacttcagttttatacccgttaacaaataatctatcgaagtatttttttgaatgtttactgtgtgccaggcactggcaggagtaaatggcatatattagaatagcttttctagaacttgagtttgtataatacttcgtcactggttaatcatgacgtttgcaggggtagaaaattagtaagttatttttaaaatgttattcagccaggtgcagtggcacacacctgcagtcccagctacttgggaatctgag

SEQ ID NO: 109640 - DNA, 1934 bp, Homo sapiens
aattatgaattttgataatcttaccagtaggtacttttaaaaaatgcatctctgcaaaaatagctttttaagtcatatacctgattttgagaataaataaatcagacaattttaacaatttgtattgttaacatttaacatgagaatttcaagcaggaggtatagactagtatatttaggattgggttaaagttttggctgttcagcagctgtgtaatttaaactctgacactaaatttctcagcagcttaaagattttagagatgttattttatttttggttttaatagtactgactgatttggggtttttaaaaatgatttttttttaagtactttgtgaatcacttcacctgaaatctctccccagtggaatgagcataatcttttagtagaacataatcattcagaattttctcttttctcatcttcttgttttggattatgggttgctccgagattgaaacaggatttcatttttacttttcccctcatctacagagtgctgatgctgtaaaaaaggctagaggtttcttggaatttgtggaggattttattcaggttcctaggaatctcgttggtaggtacttttactaaatgttaaataagttaataaacattatttagttacatatagcgacttaattgaaaactagtcttgtagtctgataaccttattccagttatgtgtagatttatttagatagcaatacttcttttctttttttggtgataacattttgtgtaacttgttattgtcatatgttaaaaagtaaagatgtttcttctgtacaggatgactcactaataaggcccagggtttttataagtttgtcattacagtttttcatcagtcttttcatcccttgggatcttccctattattctcactcctttactctctttttatcactgatatatattcatcaaaattatgatagtactttttgagaaggtattggtgatatttgttttgtttagtgcagaagaaaaataacagtgaactaacaatagggtaataaacttctacacagtaggtcctgaatagtaggttgttgcaaggcatagaataataagaagttgtgggcaggagagaaggatgataatatgaggggaggtttcactgtttattatttgacaccattattgaaactgttgtacccatggattatagttaagtgacaagaatttgcatttgaagctatggttaaatgagcattatagcttggaatgagttaatttatagctctgttattaatatgcactacatctgtgctgtctttttgctatttgaggcaattgggaaggctttggttatgtgttaagtatgcagtgactatactaaaaattgacttacctaaacatttaatataaaaagaagcatcaagataatgtagtgtagttttactaggagggggacgagtttttgttccctgttatctctcattatttttttttgacgctagggaaatactttcagcttcttgggttccatttatataatgcggcctgttctgcctttaggaaatgatgtttagctacggacattctatttgttaaattgtataaaacaaacgttaatagaaaaataaatacttccattctaaaaagattttttttttttttttttttttggtcattagtaagtagtatattcaggaaaagtagtttaaaacacaggaatttgtttcttggaatttaactgttagtatttatgtaaaaataaattttttttttttttttttggagatggagtcttgctttgtcactcaggctggagtgcagttgcagcgatgcaatctcggctcactgcaacctctgcctcctgggttcaagcgattctactgcctcagcctcccaagtagctgggactacaggcgcctgccaccacgcctggctaatttttgtatttttagtagagatgtggtttcacca

SEQ ID NO: 109641 - DNA, 2567 bp, Homo sapiens
agtacctgttgtctcttttcctgtatcctgtctacgttggctttggtgatgtgggttgtgtgctctataggaaatacacattagcagtgactattacacactggtgaaatactcaggagtagtacaagaatttctattggttgtcatgtgtaaaaatacagtgtttccctccataatgttttatggatgaagcaggcttttgaataatagtacattcttagtccaaatgaaagaaaaagagaactgaggattaaaagggaatgagaacacttgggtaagttccagagaggatttccttacacattcgggttctgagagttctaagatgaccattcccacccctcccaaatcaaagggaaaaatatctgaacgttgatttgaaaatggttcaaaacctttcacctccagaagccttccttaatcacttctctctgtcccttcagcatttatattcagtgctcaatttatactacaggtctacttcagtttgtcaatatggtctggaatttaaactatggaaatgatcatttaaaatattgacggtctgtggtgggactaaataaaacttgcaggtaggttcctgccaaggaccccagaagggtgatggatgatcactcaaaactggtatagttcacaagaaggaagtggcaaaggttctgggggaggaatatggtatgtcaacctaatctttgtttttcgaaagacatttgcttacttttagcagggtcaaggatggagttgctgcttgagcttcactgtgttaacaatgaaggttgcttttatgtgctgctgctagggctgctcagagaagatacacgtcatgtgaattccctgccctactttttttttttttaacatgttcaattgctgctgcttttaaatttaggcttattaatggggaaggaggcttgagagtaggaatacaagagagaaaaacccattatagtccttttattgtactgaccagtctactgttgtcgttcttattcattctttaatagaaactgttcaggcatgcaacaggaaaatcttccattttaactctttcaaccaaggtttaagtttttgtgaaaagtgatatacttaaattaactgaggatgtggacttgataacaaatatgctgtcgctgttcactgtctaagggatacatcggttccatatggtgaaggttacttaatagtacttgttaataggtacacaactcagtgttgctttgttatttatgtgagtatgtgctaatctttagatagtcctttagggaaagagagccttttgacccctttatttattaatatactcaataactgctgtttgacagacttacaagttaagtgtagaaagttaaatacttgaattttatgtaattttacaatattttatacctagcaagacagcatatcatgtacatgctttatgtcattttttatatagctgtggagtacttgaaaaacttcttggtgtaaaatataatacatgtaaatattcattctaaagttatcttcaagtcatagaaatctcttggacccatagaaacttgaaaataaaagcaagattgatgaatttgctacttatgtgaattaataaagtgctaatgattaatgtcaaaatagtttttctctttgcctttatgtatacatccaaggttttgaaatgggttggatattttaaaaatatgaaaatgatataagcatattttaaaagtctagattttgagaattccttacatgtgagcactgttgtcagtcccagttagtaaccttaggcgtgctgaaagagaagtaagtttcagaccaagggtgaaatttcttggtagtctgtagggcgagttaattgatagtaaaaagatgggagcttcacttgatggttgtaatttagtagcaagttacaaataattggggctgacactgaaagaatagcagaattgagttttagcttaccattgtatttgttttctcttactaaaggaaaagtaattggaaaaaatggcaaagttattcaagaaatagtggacaaatctggtgtggttcgagtgagaattgaaggggacaatgaaaataaattacccagagaagacgtaagtatttaaaatgtaatctgcctctttaaaatgtcctttttttggccaacttaatagttgtaaacattttgtctgttttatctgatacagagggtttttcttctttttaaaattatgtttttataatattatttcatacacttagaaaacaagtcattttctactatgtgggccttgttcttagttgttttgatagtacttcagtaaaaaaagccagttcttgacataaagatttctatttgataatcttaacagttatttttcatacgtagagtgtaaagctgtagaacttgatactccaaaaggaattttttttttcaatagtttttggggtataggtggtttttggttacatggttaagctgcttcagtggtgatttctgagattttagtgcacctgtcacctgagcactgtacactgtatccaatatgtagtcttttatctctcacccccctcccaaccttcctccacactgagtctccaaagtc

SEQ ID NO: 109642 - DNA, 3310 bp, Homo sapiens
ttaaatattttttgttaattcagcttcagatttgccattgttctacatgagaatttaaaaagtcctttgtcatcataaaatgattggccttgtgtgcataatttctcttctttctgagcttttatatttctttctttcttaagaaatgattcctttgtcttcatgcaatttgactctcagatcacttatgtatctgcatgttcatactggagccattttgtttttacttttgtactttacatacaaatagggtacagaaccaggagtgacattgggcttccttggtaactttggcattatgcaaatcatctgcatcatctccactgacattactcgataatttgtaaccattgttaacaaaatagtctatttgagttgatacataaagagcaagggtttttagaaaaatatgacccataaattattaaacattttaattttattttctactctttcccttttattcctgctgtgtttctttttaaagtataataatatcctcacctgttctctgcctctagtatgttttcctcccagtctgtcgtatcattgttgctgttactattttgagatcactctgataatgtcatttcttttcttttgaaattcatctttatatgaaaagtcgcaattaaagctggcattttgaagccagtgctttatctttcagtactcatcttttaaccaagagctttctctagacatctaacctttgcatcctgtaatgacctcaatttctgaatgacaaagtctagcactccttctaggtcacaactcgtgtcactgctttgataggaaagtagcttgttaatagtacctttcatagatgctacctgtatctcattcagcaattctaactccttgagggcaaaatctggtaatattgtataattgttagctatttaataaataacttattttaaagctgtctgttaaacatccccttgattggggagagtccatgtcttcttttatattgtatgcctatagtagcatgtttggcacactctagaccattcagtaaatgttgaacagaaacagcaaatgacctcatcaattctgttgactaggaacacaatgctctttaccatctaattgcctaaggtcacagctttgatagggagtacagctttagctttaggctttaggaaaacaaaaagttatatataagaagacttactcttttttgttttgattgtaggaagtagaacagctaagaatggaacgcctacagattgatgaacagctgcgacagattggtatgggtttcagaccttcttccaccagagggcctgaaaaagagaaaggatatgccactgatgaaagtaccgtctcttctgtacaaggttctaggtcttatagcggaagaggcagaggtcgtcggggacctaattacacctccggttatggtaaaaaaaaattttttttttttttttttggtaatagtaataatagtagttatagtttaggtgctctaacacattttcttataattagttcattactctgtcttggctttgagggtagaaggtagttctgaaggtttagtacacgtcttaatagtagtgatagtatacattaaaatgacagtaaaatatataaaatttccaagcagttatgtaatgaagcaaagcatgtttttaagttggtagttcattgtcatgtttattatatttacaaagaatacatatgtaacttgtttttcaaatactttactagtacagttttatacatttcccagtaaatacctagtaatggtggtggtgatacttctaggaatcatcttttgtctaccctctttaagtaaaaaatgaaaagtgtgcgaatcactgccaagattgcatatagcaagtctttttactagcttttaaaaaatattttacttactcatttggcgtatttgaatatattaacatctcacatctggaattattttatttaacaacatttcactaaaatgaagactctgaaagccagaatctaatttaacactttataaatgaacattttctaaaatgtatttcactgtgaggattgggtctaacccagataggaagggggacagtggagtggtgatagtcaacaattctctaatcctaaattctcccttattcttcttcagctttggagttgttccatttttctacatttggacttggatcttagcagtgacctgatttgtttttttccttcgccccttctctttattttctcttttccttttcttttcttcactcctatacttactcccttttgaggaaatataaaaccttttccaaaatgtaaggcatttaaggaaaatagaaataaatgcaaatttcatgctttaattgaaggatcatctaatgctgacaaagttatattaaacctgaactatcttcaatttgttgtagagttgtaagtttgtgtccctgccctttaatatcatatctttatgttctcattttcttatatatgtttttatttaatgcagtattgaaacctaaacagcaaaattctaataaagaagtgttcagcatataaagggatgaaaattgcagactattattatatttctgaaaatgtttaatgcaaaagacagttaaccagtaatcacatagaaatcaaatatattctcattgatttttgaaccatacattattagcatagataatcagacttggcttattggatgatgcgtatgatgaattcattgaataattttattagcttttgtgggaagtcggcttattgatgagagcttactctggcaaaatgcttttgttgagagtagataattatgtgagaggtagagaaacatctggattcaagaaagctgtgcaaattgttcagtagatggcactcttagctctgaatcttagtggaattgataacattttatttcttgaaatagttactgaacctgagtgggcttggaaaagcaagaaaaaccatttgaatttggttgtagacgttcatgtatacattatatcagagggacttgtagttgatttatatatatatatatatatatatatataatgagtactgtagttttatcagtttaataggaactataagaaacatttcccagtataacatctctgaagttggtatgtgtgttaaattggacatcttacaactttagcagcattttcttttttaatggcacataaaataatgtcttaaaattgatggcctcttggagtcgataaaacgtgattatttttagctgttaagcttagcacaaccaaccattgaaaaatgatataaaccatcttcataaggtgattttagaagtttgaggggaaaatatgattttaaaattggt

SEQ ID NO: 109643 - DNA, 1016 bp, Homo sapiens
ggtgccaaaacctaggaattaatgttctgtatattttctgtaatttttctgttgactgcatttctgcacatcagttttttttttaacttccatgactttgtatttcctggatattatccccttttgctgatgagatggtcacacctttgactatattacatgacatagcacatcttagcagactgcagtgagggattcttctgctggttttgaagaagtgagcggccttctgcacatcagtttattttttaatctgtattaactagtagatactatactagtatattaatagtataataattgattattccttagtacgtttcagattgattttaactttcatggatctttctttgaagcagccaaacagtattgcttatttaaacaataatttgtaggacataattttgaacattttaaaaggctttttatagaaatctaagtggtttatgttcttttcttttccaaggtacaaattctgagctgtctaacccctctgaaacggaatctgagcgtaaagacgagctgagtgattggtcattggcaggagaagatgatcgagacagccgacatcagcgtgacagcaggagacgcccaggaggaagaggcagaagtgtttcagggggtcgaggtcgtggtggaccacgtggtggcaaatcctccatcagttctggtagtcttttctatactctgtcagcatccattatttgtaaacagtttaattttacaaaagttaattcatctcccagggccacccatttttggaagtttctcttgctactcattgtcttagagaaagtagtggaccatatagcagtatcaggaaaagccctcgtagagtgtttctcagtgaaggtttacttagaatatactggtcagaactttagttggcagcttttctttatatgatgagggtcagatgtttctctcttcaggttttggaggcttatttaattagaattttttttgttttccctagaattttggggttatgtttttttgtttgccagacagac

SEQ ID NO: 109644 - DNA, 3626 bp, Homo sapiens
acgggctagggagttaattgccagggatagatacatagactatattaaggatataactttaacatatcattatggtataccacgttaagaaacccgcaccttccttaatgttatacccatgaaaacttatgtagtattttaatattatagaaagtgtgtgtagatacattaaatatagatgccaactgtgcttacaaattacaaaaactggaacaaatcagggcaaaaattaggaacttgttctttgtttgtttagattttctccctttccacagtaatactctttgagccttaagtttagtttacaggctttcagggtaatagtttttatattttagtacactttgtacagttaccaaggtgtttaaaattacagtatactgaattgcaaaataaatgtacttgacctagtgttttatgattaatggatacgcttagtgtcttttgcaaagatgcttagcttgctagctgttaccaaaggaatcttaggaaaaatcggaattaggtgaatttcttctataaatttgattgttggaggtaataaatgcacataggtaagatgggtatttttcttatgaattgtaccttacagtttttccttttccaccttcacatcaccttccataatgtttctaaagatggagtactagtcagcattcgtttcaacattttcctttcataaccagttagaagttcaaccttatttaattggctgctttgtttcaacttgtcttgattgcttcagttcagttacggatttctattatgtcatggaatgcaggtattgaatattatttgggaaacagtccatcaacatcaacacaacaaagctgcagtcattttgaactcagttaaggggatgaaagctcgctcttataattatttcttaacagctgaatatttgtttcttttcatttttgtttttctagtctctgggcaggattaccttgaaatgtgaatgcaagaattagcatttaatacactattttctaatgtatattttaaaaacaaggcacaggaaatgttaggaagccaagatgtctgcttactttctgctttaatttttcatcaccacttaaagttttatcatatttaattatctttgttattttccaggtaaataatattgaaaacattttatttgaagacagtgcatttttattgggggagactgaagtttatttgtcattgatatagttcaatatagatcaaacattcataattgcagtactcttaaacgaatatttcttgcctctgacatgaatatagtgctcaaagatccagacagcaatccatacagcttacttgataatacagaatcagatcagactgcagacactgatgccagcgaatctcatcacagtactaaccgtcgtaggcggtctcgtagacgaaggactgatgaagatgctgttctgatggatggaatgactgaatctgatacagcttcagttaatgaaaatgggctaggtatgtaagcacttagggaagagaaatatatatatatatatatatatatatatatatatatataattgtaaactattgttagtatatgaagcttttttcaaagaaatatgcaattcacaaattgactttttcttagtgtttactttgaacaaggtagatagctttttgtctatcttaaatgtttagttctcagatttgttatagccaaattatttgaaacttggagggttaaagtgccctttgatgccattaaatcagtacaaatattcagctggcaaggtacttagtgcttttattgtccccaagctaaaatcaggctttcatcttgcctcttttaaaataattataaatgacactggtaaaggtacatatatcaagagtaggcattaattttcaagggctaaaatgtcattaacttcggtataaaccaaactgtactagagaggaagactgtgtccctgaatgatggcagtttaagtctgagttttactgtgagttaaaaccctctgaatttccagatgataattccatttttaatccatttggaatgctgaaagctacaaaaatgtatttcctgtcagtaaacatttgttgttttatttttgtgtttaattaaaagtttatttttcccctttaaatctttgaaggaaagaaggtttttttgtttttttgtttgtttttgtcagaatagttcatggtaaactttgcaattacagatgatagtgaaaaaaaaccccagcgacgcaatcgtagccgcaggcgtcgcttcaggggtcaggcagaagatagacagccaggtaacttgagtggacctgtggacaccatcaggtcacaagcatgaaaaaaatgtctatgtctgctttctaaatatattatacttacatgtacacatgtgtgcatatacattcaaaatttgcattgcataaattgtttattcaactaataagactactactattaagaaaatgcattcttccttcacagtgtgttagtaacttgtctaattgaactaatgttgtgtcctaattgtttacatggaaatactgttgagaagaccattttgttcacttggcagtttcttcacacttgagatggggcctgccatccgagggactgtgttgtagattgtgatcaaggttgattggcaaaactgggcagcttttgcatggtgcctgcttactatatctgaattcagcacctcatttttgtgggagttgtaatacccacaattaaaaaaaaagtataaaagagaaaaatatttgaaggtgtctttaacctaatgcgaggaatgcatgttgtttttgtttgtttattgtagtgtgatgccttttcccttacacctactaactattcaaattaataatacttacttagttttagaatgtttattttatgtagtcattaatttttagtaacttcaaagaaacttgtttgctgtgtctattattttgaacataattccatttcctgtgtacagagaatcacatgtatattcacaatgaagcaattgtgtgcaccagaaataaacccctttcaaactaatcaatttttgcattctttccaaaaccagttctttcatgtgttttccccaaataaagaatgtaaattctggcatctttactattttaaatttagtggttgtagagacatttgggaaaactggttaagagaattagttcccatccctaaaagttcatgttttaaagatagttggaaatttttagagcaattaaatattgtcaaaaaatagaaagtgtccagaaaatatttgttttccttccccttctttcctcccctcctttaatgttggaaatatattttagggctgggtgcagtggctcatacctgtaatcccagcactttgggaggccaggtagcaggattgcttgagcccaggagtttgagaccagcttgggcagtgggatcctgtctagagaaaatacagaaattagctgggtgtggtagtgcgcacctgtagtcccagctactcttgagactgaggcaggagaatcactttagcctgggaggtcgaggccgcagtgaagggtgatcgtgccactgcacgctagcctgggtgacagtgagaccctgtctcaaaaaaaaatgttttagatgaagagattatttcattttttgaaggtggtacagcagtgaat

SEQ ID NO: 109645 - DNA, 1004 bp, Homo sapiens
tctattcctgttttacttctttgggattactacttccctcttttaaaactcctcacattccctagcttgccccttctcccaaaagatagggtgggtaaaacaagcacaaaactgttaacccttgatcctagtagcagttctaggaggcagcctccctctaaagctaatatcaatattctgtttaaaacactcatttaatttgatctcatctgctcaaaatttcttgttgctcttagtgtaaattaagcagtgaatattctttaccacacttagaatgtgacaatacacactggtgtccagttgattaacttggatccattcgaggaaattctagagtccatgtcattacagaaattgcctgtatttttttctagatattgttaattattaatctgtattggacttttaaggggcttgtattataaggactggctataaacaggtttttatttgaattaacagaggtttcttttggcttccttttatttaggtagcggataccccagctaagtgcttgttaatttagttgataactatatcaaaatattattctgtctctgtacacagtggatgaaaggttctagaattgtttcaacaatgtgttaggttggtgcagtttttgcacccacctcaaaatggcaaaaaccacaattacttttgcaccaacttaatttagcagcaggctttccaattagatgttttcctaggtgtcactgagggccgaacttggaaacagtgcattcactatgctgttccccacactggctagaattgttcttgtaataggtttgctaccatgtatgtagacataataaagtggattatgacaatagccctttttccaatattgtaaactctttttaatgtagttataaatatattagcaatgaatttaaataatttaaaaagcttcaagatgagcgtactgtttcttacagtttggaaggaaggaggcagtttcagatttgaaacatctttagtggttttctagtaaatgatgtatg

SEQ ID NO: 109646 - DNA, 1025 bp, Homo sapiens
gagtgcagtggcacagtcttggctcattgcaccctccacctcccgggttcaagcaatgctcttgcctcagcctcccaggtagctggaattacaggctgtgtcaccacgcctggctaattctgacggggtttcaccatgttggtcaggctggtctcgaactcctgacctcaggtgatctgcccaccttggcctcccaaagtgctgggtttacaggtgtgagccaccatgcccggccctaagtttcagttcttgaagagagagtgttgatgtataaagtgagtcagtccacatactgtagaacataggtcatttgttgaagttgggttgacgtgacagtagggtgttaggttgggtttagtctttttcctaatccactactgccacttctttgcaaatacacatttcagatcgtccctaccaagattggcaaagggggtgtgggaggggtgtcattgaatacactctggaccttttcccactctgatcaatgtccacatttttagggtggtggtctgtcatctttagtttgcttgtagtttcttattttaatcactcagaatcgtttctagtgtgaaacgttaaaacaaaaccatagaataaaccacacttggatatcttaattgtgctttaaaaaaaaacacacacacacatttgagtaaatatttttgtatctgaaattttcaaatttaagtatatcatactgtgatttggaccaaatttgccccattcccccctccccccgactccccgataattgcaaacactgggcttagaacactgcgtttgtatttccttttactggttgtgggtttctctaacaactttgttccacaacattagggtcaaccagaagcaaatagctggattcttgggaaagaggaatttaatctagatttcctcaatctcaagcttgaaattttcttcagcaccaaaagcccaggtagatttttaaagctttgtttttggttggaggtgatacccagcttaagaaaattttgacactgggtgacccaccactagtttaa

SEQ ID NO: 109647 - DNA, 2830 bp, Homo sapiens
taattcaggagcaataggctatatacctcttctcattgatggatatagaccttttaaattttagttcttttaaatgctttacagtatttgatatgtaaatgtgatttctcaaaataaggtgagtaaagtaggtgattatttgtttaatattaactgtttatgtcattttcatggtgagctttccagtgttttaaaattaggtacagttttcattagtttagatgttttctgtggtttgggcactgctaggtactagagatacaaagttgaaagacccatagagtggaatactttgttatttgttttgaattttaaagatgttttaatactttgatccattgtggtatataaaactgaaatttttaattagctaattagtgtttatgtagctgttttcctcctcagctatagatttcatttataaagaagttgaaaaagttgtctccctttggcaggcaaaagatgtgattgaagagcatggtccttcagaaaaggcaataaacggcccaactagtgcttctggcgatgacatttctaagctacagcgtactccaggagaagaaaagattaataccttaaaagaagaaaacactcaagaagcagcagtcctgaatggtgtttcataaactgaagaagttcctagtttacagttcttttacattacatttacaatagtgcttgtacaagcttgccaaagatagaatatggatcgccagtctttacatcgcactttcagttcctccatttggaattcaaaaaggggagggatcctgaagaaatcatatgttaaacatactttgacacctactgtgttataaaatatatcatcagatgtgccttgagaatagtatatgtaacattaaaaaaaagttgctggctataggaaatgttattttgttttcaaaatatggcagagatggggggtggtgggtggggtgggatccctaacgtaatattctttatgaaagcattagctgcttttgttacatttttaatatgcaaccacttcttcacctgaggaaaactagaatgaaatgcagtctaaaatattttgcactgaattgtaatttcttcattagtttagtctggaaactggtctgttttaatgtgttttttaaatgctgtatgtagaggaaaatctgcagaccactggaatacatttgttaaactctcatctgcagggacactgggcgatacttggcagtgactgttctaccttgaggctttgtttggtttatttattaaagtgtacagtatttaaaaatcaaacatagctttagttaaaacactaagctgaattagtcatgtccattcagacataacctgaactactgaaaagatcaatttccagaaggtttattctgtataaactacatgttagtcttcagtagagtatcttttttttttccttttttttttttttatttcggttgtttgatgtgcaatatgtttttgtatgcaggtagtaaataaactttgatcttccatttgctgaatttttttaactttctactttttacaccaattgttgcaaaatagttggagctattaataggcttaggatagtatactttgctttttaaaaagcatttatacttgctcataaatagcattaaaatgtcagttggccatttaatcattttgtaatgaatcatctgaaatctttacacaagtttaggctgttagatgcataggtaattaataatacatgtgataattagcaaaaaaacctaacaaaattctaatcaaaggcaactttggaagacaatgggggatagaagggatgacaagcaatttttaaataataggccaatgatttgctttattcattctcaacttattttgaaggctctcatatcagtgaccaaaaatcagttattaaactttatgtatatattttagccagagcttaatttttatgaagataaagacatgaagtttaacaatggacaacagttagtacagctaattgtgaggtcaagtaattgttagacataggggaaggctttgttccacaatattatatggaccactgaacaagaatgacagccctttgttatcacttggcatatgaaaagtgttgtgtgcatagtttgtgttaattttttatgtgcataaaaatgtgattttaatttatatgctctgaaggataattcagggtatagttaaaaatgtacaatgtgccagttcagtatatataaccctagccctcaaattattctgattaaggttaaaatgtgctggtattacgtgctttttcctgaggccttctgattggttcttggtaacagaattttaaagtaaggtgtgagtagtgcaactcctgtcctttatatataaagatatcaagtaatttcatgtcctgatatttaaaaaaattacccacaaatgtgtttttttaaatcgatcaaagctagcaacaggttaaattgtctcagttctcttacataattgggttaaaaattataaggtattagaagaattttaattaatgccaaattggtaaatatggtgtaaaaaaaaaaaaaaagacttttcattttctcccacatagaatagtcagatatattaaacatcccttttccataaagatggtttcaatgggaatggaagaaacaaaatcttaaaagagtgagtatagctgaaccaattcttcattctagcaataaccacactaagttcattactttacaaatgactaaacccaatgtcttgtcctttaaaaaatataggtagtgcagaattgtgataaatacgcatttgtttttttagagagccccactccccaaagggtagccattaattcaggtagccttttaaatgtatttga

SEQ ID NO: 109648 - DNA, 1134 bp, Homo sapiens
tttcaactatgctgaatgcaatctataagatattccaaacaaggacaaagtaatttttcacaagtcttacagccccactattaagtatgctactaattagcttcttgaatttctttgtatttcagtgattgggatgttctttttttttgggaaagtttttttacccctttgtaccctcttaattggattaactgtaaaatgtacatattaattttctagttttagagaccattttcattaaaaatattttccaatagtttttctagataaacaatttatacttaattgttgcttggttgcttacatttcaacctctaggcttcctttttcagctaacttggctgtcttcaggttgtaaagaaaaatgtaaacatatatttgaaatttcattaactgaaactgctgtaaggtgttagcaaatgttaaccataacagattatcccatatcattggactgttctattattgggtcaggaataataggtgacacaggatagaagctcttcctatatatatcttgttgctaaggcagtagttggctctaagctgataaacagcacactgtacagcagtccaaaaactaaaaccagagcttaggtcattcaagttaactggtactcaaggttactcattccaggatactttacataaccaaaaacctaggagagcattctacattgtaattttttttttactttgtttacataaaatttacagggttttgtttttttaagcttagtctgttctttgacattgttgattcatgttctaaattttcatcagatttaacatgtttggaggttcttgtgcactcaatgtgaacctactacaagcttctgaactgcaaaaccttttttttaggtcactgtcaacagaaagatgccttatagaatttctcatgattgaaacagaactctgcattctaacctaaaacccctctaaccctttaaatgaagcattatgcctgcgtgaaattttatttttagacatttctgatactaggttttctttacgggggggcatacatattcagtatactgaatttatacagctttcagtgtggcaatatattaagaagctagttccctaatttttctcagttctcattggttttccatttaaatgtttccgtaa

SEQ ID NO: 109649 - DNA, 3514 bp, Homo sapiens
tctttaaaatatatctggaagcaccaatgagtaaagacaaaggccccaagctagatctgtagagataagtactagactcacatctcagtactatcaaggaaaacatgcttaggttatcagaattgtgaaggccatagtacaaaaagttaagagaacggaactcaggatctgagaaagatcagccattctcagcatgttgccttggctgcttaaccttactaaacttccatttcctcacatgtaaaatgtacatcataataactagtctactgagataagggaagaatacttagcacagtgctagtacactgtaagtactcaaatgttacagatccaagtattttgtaagaaaataccagcaaaagataaaagtttttttatggatcgtatttgtatcaatcacctacatgatctagagccctcacatggataacatttaaatgttcagtttgcctaatagccttcaatgaaacacggattcttctacttaaaaaaggtaagcctggagaaaataaaactgattactatgcaagaaaaaaatgtgctctgctgtgctccttggtatttttaagtggtttccattgtcttaacacctgtcttaaaacgggtatgttgtttgcactgaaccctcaaaagtatttatacctattaagttaaatttccctttttagagttaatgcttcattgcctgtcggcatattatcactatctgtctttgaaaaattttcttttaagtctcaactatttcttcataaagctcttgttcagagaaacattttttgatttgtccaatggactgaaataaaaggttagtaaaccaaaatacagttgatcctcattattagtagaattccttatctgtgaatttgcctactcactaaaatttgtaactccaaaatcaacatccttttctggtcatttgtgagtatttgcagagtgacaaaaaatttaaaccactttatgtgcacaaggcaatgctctaccttgtttaagctctcacaccataaacagatatcctttttgtggtctatttagtgccaagtttcatgtttgtgctttttgttggtgattttgctgttttaagatggttcctaagagtagtagtgaagcatgctacctagtgttcccaaatgcaaagaaggccgtgatgtcccaagcatgagttagttatagtgctgttggctgttaattgaaagttaatgaaatactaaagaatgttttcaagcagaaacaggtcgatcaaggttatatactgactggcagacaatattgtgaccaaagggtcacagaatctgtatttctcttaggaacttgttccttatttgctaattcagtgttcatagccaccttaaagaacagaattaccacaaacaagaaccagctgtactttcatgtctccttgtccctggaaataatttatcctgcataaaagccttagaagctagtgtttcatcatacactaaatcataacagactccatcagattttaaacgagggtattggatagaaaacacaaagagcagatatacctttactttataaggcagataaatattacctccactatttttttaacctcaaaagtccttgtatcctccaataattaagaaacttatgatgacttaaggaagtttagacggtaggtagtataatttatcatcttagagctacacataagaaatactcctgttgagaaatacatactagtttataccagatgttttatacaggtcctcttaagatccttatatattttatgttagacaaacagtaagtaatttgcctttaaacatcatttaaatttattagtgtataaattctaaagagtccaaattaaatatgttgatattgagaacatttcagttttcagttttgctaacagggtttaagcttaatcataacaattgcagaagtttgattatgtcaagaaatagccaactgaaggaataatttataaatggtcattacctttaaggggctagctgaatacaatgtaaatactcatgcctgtaatcccagtactttgggaggctgaggcgggaggactgcttaaacccaggaggttgaggctgcaatgaactgtgattgtaccagacctgtactctgaaatctttatcatactatttttaatgcatgaaataaaaatggtttatatgtacatagaatacacacacacacacacccctaggtcaatttcttaggtctcagttgtggttaaattcacttttaaatacaaggttccaagtatccaagttgccaggccagttgcctgtacctggaacagcctttccaccgaataagaagagtccctacttaaacagcttaagctaatttccatcatactatttatcacagtctaattaccagtttatcagtctcccattaaagtgggggctccctgagagcaaggactgtcatcttcactttgccttgaaaagtagacataggtcccaaattatctgctaaatgagtaatgaacaatatttctattcagaaggtgtgtgcttgcccataattaatacgcaaatattctaaactataatctgatttaaaatccccaaatttaaacaagaaaattataccaaggctttgagatttagcttgtgctaaatcattttttaaaattgtagctctgaggcattttattataaaaacttagtactcatatacataaactaatacgaacttaaaattcatcatacatttacttcattttttagcttgaccttctagtaaatctttagcttcattgattttggctgctatataaggagatcctcctataggaagaaagaaaaaagaacagttacaatatggattctcaatttctgcttggtaaaaagctactcttgtttcaaggactccaatgcttatctgagggagatttagcagaaacagtgttttaatttttaaaaaataaccctgacactgcaactggatgaccaaatatatggtaatatatgtgaccaatgagaaatgaagtaatttacgtgggagatatttctacaaaaataacacctttttagaaagcttaaactgatagaaataggatttctatcatatatattagatatatatgtatatgcctttgaactggtgttagcctattcatgattacaggtcataaatgaacatcaattataccatgttattttaataccatgatattctcagaggcttctgagctgtttactggaaagatcccagtttgctttacatcctttttctgtccagtttttcttttcctgttatctactgtcccttcacaatgtcatctacagctgctttcctacgaatctgctggaggagtgattctcaaagtatggtcctaagaccagcaagaaataacaggaaatttagtataaatgcatatttatggggctccactgccgacctactgagtcagaagccctccatataaaacaagctaaatttcataaaagatactgtgaagtagatatcaaacaattataaccctgtttaaaatgtcaaaaccctttttattaatgaaagc

SEQ ID NO: 109650 - DNA, 1082 bp, Homo sapiens
catattggtaaagcctacaatcactctattctgttacacttaatcacaacatattcaacaggtgatcacagccaaatctattcttaactgtgaccacagagagtatgaccataacatcaagccaaaccctatagcctaattaactagagtgctacctatgtatgatgtttgggagtgccagggccacatggtcagatcggatcactttagaatcatatacctctgtgtgtgcgatgcagagcagatgaaggaaaacaagaatatgtacagatgatgctgaaggtgatggtatgtgaaaaagtgaaacttgggtctagtggggtactagaattgtcaaaaccccatccaactctgtcacatataacatctgatgtttcagggtagcaccatcacaaagttcagaacttctatactctccttgcaggaagcaggagaatgggtccaaagcaatcacttagaacttcatggatatttggaaatttacccttccctaagtgtggctctaggtttcaaatagaagcagcaaagaattaacaaagtcttacagattttggtaggctttgaaaaacttgttttacttgaggctccatatgcttcatggcttgcaaaacgtaacggcctaaaaccaaaagcaacagaataagtaaactaaatctccaatctccccgacttcacttccatccccaaaccataaacaaacctgcaaatcctgcagcagcaatggtcagtccaactgctaccactgtactggcctggtaagggggagaagagtaaatatttacttctctaattcccaccctttctcattttgcccattcttccatccccaactcattacaaactgcattttaataggagaaacaacttttttttttctttttttttttttttttttaagagacggagtcttgctatgttgcttaggctggtcttgaactcctggcctcaagcaatcctcccaccttggcctcccaaagtgctaagattataggcataagccaccatgcctggcagagaaacaacttttaaggcggaaatattctgtccagtaatctttaaaactactgcatctgttatgctga

SEQ ID NO: 109651 - DNA, 1030 bp, Homo sapiens
tgaacttgggcctcggttttttgccttttaagaaaaacttattattatggtaaaatacatataaaagttaccatcttaactattttaagtgttcgttggtattaaatacattcataatgttgtgcaaccatcaccatcttccatctccagaactcttttcatcttaacaaactgaaactctctatccattagataataactcccttccctccagccccttgcaagcaccattctactactaatgctgctatgaacatgggtatacaaatatctatttgagaacctgctttcaatattttgaacatatacccagaactgaaattgctgcatcatatggtaattctatttttaattattttaaggaatcaccatactatttcccacagctgcaataccatttttggtttttaacaacattgcataagggttccagtttttctacatccttgccaacacctattattttcttttttttttttataatagccatcttaatgagtataaggtgatatctcattgtagcttttatttgcatttctctaatcattaatgaggttgaatcttcttatgtgcttattgcctctttgtatatctctgtggaaaaatgtctgtcaaatcgtttgcccatttttgagttgggttgtttgtttgtttttgttaagttttagttttctatatattctggatatcaacctcttatcagacatatcatttgcaaatattttctctcattctctaggatgcctttttactctgttcataatgccttttcatacacaaaatttaaaaatttttcatgaatctactttagttttttgtttgcctgagcctttgctttcatattcaaaaaatcactgccgaatccagtgtcatgaaggttttgacctatgttttcttccaagagttttatagtttgaagtctttaatccaacttgagttaacttttgtatatgatgttaggtaagggttcaactttattgcatgtggacctaacagtttttcaagcaccatttgttgaagcagttttttg

SEQ ID NO: 109652 - DNA, 1032 bp, Homo sapiens
tctattagtttgctctgaaaggcagccatcagaattctttttcaatatgcattttaaaattaaataatatgtactagcatttcctctctccttcacaaggagagagaaaaataagccaagattagcaacaggtcattgtgttgctgctctgagcaaaaccatcacttgcttttgtggaaagtaaaagcttccaataatttcccatgtatctattttcttacattaagcttcaaaaatagtgggtcctctttctcaactctgtctttgtggtagcaacagtggggagcatggttcatgcagctctttgtccgcgcccaggagctacacacccttgaggtgactggccaggaggcagctgcccaaatcaaggcacatgtagcctcactgaagggcactgcctgggaagatcaacctgtgctcctggcaagcacacccctagaggatgagactaccctgggcaagtacagtgtggaggccctgattaccctggaagtagccatccacatgcttagagggaaagtccatgtttctctggcccattctgggaaagtgagaggtcagactctcacggtggccaaatggaggaagaggaggagggggagaaggaagaagaagaggaagaggaagaagaggaagaaaaagaagaagaggaagaaaaagaagaagaggaggaggaggaggaagaggaagaagaagaagaggaagaaggtggaggaggagaaggaggaggaaaagaaaaagaagaagaagatgatgacaggcagggttaagtggtggattcagtacaaccagcgcattgtcaatgttgtgcccacctttggcaagaagaaggtccccaatccaactcttaagtcctttgcaattctggatttctctaataaaaaagccacttagctcaaaaaaataaaataaattaaaaaataaaaatagagggtcactagtcaccataaacaatgcttataatcctgaattgaaataatatgtctaagaggaaaggaaagaaaggagagtttagtagattattcaactacc

SEQ ID NO: 109653 - DNA, 3438 bp, Homo sapiens
accaactcctgcactggctgtttccagaaatacgagttggacagccgccctgagccacccactgtgccctgccccacccccgcaccttagctgcttcccgcgtcccatcctcatttaagtaccctgcaccaaaaagtaaatcaatattaagtttaaagaaaaaaaaacccacgtagtcttagtgctgtttacccacttccttcgaaaaggcgtgtggtgtgacctgttgctgcgagaggggatacaaaggtttctcagtggctggcaggctggctctgggagcctcctccccctcctcgcctgccccctcctcccccggcctcccccgcgcggccggcggcgcgggaggccccgccccctttcatgcaaaacccggcagcgaggctgggctcgagtggaggagccgccgcgcgctgattggtcgctagaaacccatttattccctgacagcccccgtcacatggatggttgtctattaacttgttcaaaaaagtatcaggagttgtcaaggcagagaagagagtgtttgcaaaagggggaaagtagtttgctgcctctttaagactaggactgagagaaagaagaggagagagaaagaaagggagagaagtttgagccccaggcttaagcctttccaaaaaataataataacaatcatcggcggcggcaggatcggccagaggaggagggaagcgctttttttgatcctgattccagtttgcctctctctttttttcccccaaattattcttcgcctgattttcctcgcggagccctgcgctcccgacacccccgcccgcctcccctcctcctctccccccgcccgcgggccccccaaagtcccggccgggccgagggtcggcggccgccggcgggccgggcccgcgcacagcgcccgcatgtacaacatgatggagacggagctgaagccgccgggcccgcagcaaacttcggggggcggcggcggcaactccaccgcggcggcggccggcggcaaccagaaaaacagcccggaccgcgtcaagcggcccatgaatgccttcatggtgtggtcccgcgggcagcggcgcaagatggcccaggagaaccccaagatgcacaactcggagatcagcaagcgcctgggcgccgagtggaaacttttgtcggagacggagaagcggccgttcatcgacgaggctaagcggctgcgagcgctgcacatgaaggagcacccggattataaataccggccccggcggaaaaccaagacgctcatgaagaaggataagtacacgctgcccggcgggctgctggcccccggcggcaatagcatggcgagcggggtcggggtgggcgccggcctgggcgcgggcgtgaaccagcgcatggacagttacgcgcacatgaacggctggagcaacggcagctacagcatgatgcaggaccagctgggctacccgcagcacccgggcctcaatgcgcacggcgcagcgcagatgcagcccatgcaccgctacgacgtgagcgccctgcagtacaactccatgaccagctcgcagacctacatgaacggctcgcccacctacagcatgtcctactcgcagcagggcacccctggcatggctcttggctccatgggttcggtggtcaagtccgaggccagctccagcccccctgtggttacctcttcctcccactccagggcgccctgccaggccggggacctccgggacatgatcagcatgtatctccccggcgccgaggtgccggaacccgccgcccccagcagacttcacatgtcccagcactaccagagcggcccggtgcccggcacggccattaacggcacactgcccctctcacacatgtgagggccggacagcgaactggaggggggagaaattttcaaagaaaaacgagggaaatgggaggggtgcaaaagaggagagtaagaaacagcatggagaaaacccggtacgctcaaaaagaaaaaggaaaaaaaaaaatcccatcacccacagcaaatgacagctgcaaaagagaacaccaatcccatccacactcacgcaaaaaccgcgatgccgacaagaaaacttttatgagagagatcctggacttctttttgggggactatttttgtacagagaaaacctggggagggtggggagggcgggggaatggaccttgtatagatctggaggaaagaaagctacgaaaaactttttaaaagttctagtggtacggtaggagctttgcaggaagtttgcaaaagtctttaccaataatatttagagctagtctccaagcgacgaaaaaaatgttttaatatttgcaagcaacttttgtacagtatttatcgagataaacatggcaatcaaaatgtccattgtttataagctgagaatttgccaatatttttcaaggagaggcttcttgctgaattttgattctgcagctgaaatttaggacagttgcaaacgtgaaaagaagaaaattattcaaatttggacattttaattgtttaaaaattgtacaaaaggaaaaaattagaataagtactggcgaaccatctctgtggtcttgtttaaaaagggcaaaagttttagactgtactaaattttataacttactgttaaaagcaaaaatggccatgcaggttgacaccgttggtaatttataatagcttttgttcgatcccaactttccattttgttcagataaaaaaaaccatgaaattactgtgtttgaaatattttcttatggtttgtaatatttctgtaaatttattgtgatattttaaggttttcccccctttattttccgtagttgtattttaaaagattcggctctgtattatttgaatcagtctgccgagaatccatgtatatatttgaactaatatcatccttataacaggtacattttcaacttaagtttttactccattatgcacagtttgagataaataaatttttgaaatatggacactgaaattattcttgagtctttcatttatttggataacactgtgattatacataacttttcggggaattataatactgtgctcagccaagaaagcaaaataccaaaaaccttggtattactagtccagcatcatgtgctaatgttaactgcaaaaaagaaacggctggatgattaataagtactggaaaaattgaaatttctgtcatttctaaaatagaaactagagacatatattgtaaatccgccccctccttttctaagcagcatgaataagcatgatggggacctatacttaaaactgatttatgccacttgttgccagaaaggattcaattctgaaatttttcatgtagtttagcagatgggatattgagccaaatcagaaccaggttggctggttttgttttcattttcttcacagcacaatggccctttgaaacctggctatagagaaaaatgatgcttctt

SEQ ID NO: 109654 - DNA, 1185 bp, Homo sapiens
tgagacatcgccatggtctttgaattagcgatgcttctgcatcaccacccacccttgctttggggcagccggataatctgttacctagtcagggacttttctactttatttactacttgattcgctcgtcttcccccacccacggggaccaggaaccaacaatcgggcacttttaagagcacgggtttgcttcccacaatttcaagagcttgtgtcaacttgctacaactttggagaagttggaatccggcagcgtcttccacccttgagtaaagtacccgctgcagccactaagttagctcatcccgttggtttgcatcttctcatttccaagaaagtatttctttctcatggtgttgctaatgttagttctgggctgaactgaggatatctcatattttctgtactttctatttttttctagattgctttgttttagatatgtactggtttttatttattacttttttaatcctcatttttaggataacattgtactgggaagggacaattattattccagttcccaattctaagcaaggcattttcccccctaattaatgcagagactctaaaagaatttcccctagcctggccagccattgtaatgcatatacggattattcacgtggtaatgagcacattcgccagttcttgctcacacatacgaataaaagaaactttgaataaagatccaaatgatcatcctgggggagtggggaggatattcccggaatttgaggcagtcaaatatatagattatatatattttgaaaatagaaatatattagaaatatgtatagaggtttacagtaattgcactgcactcacctctcattttttaaaaaaaagcccacagggtcagcaactttctggcaaaatggtcaggttcaaatatttagcaaaaggaaagggagcacaatattttgggaagtagaactagctttgaataattgtcactatctgcataaaacaagagaactcccgttcccccttctaccccttcatatcgccgagccaaatagttgaaaaatgaaagtcaaaatattttgtttgcaaatataaatgcttttgataactacatctgagggaaatgatatatatcttgtacgatcattcatttgattaaattaaatggttacctgagatatgtaatttcatggctagattaatatcgaacatata

SEQ ID NO: 109655 - DNA, 1021 bp, Homo sapiens
tccttctctccccacctattggtctgaacactgcaaggtgcagtaggggggccagtgttccatttctgccatgtcataggttcctctgtggccctaggtaaaatggtaagggaatgattttgagggtaagattcctcgacaataatataaattgaatgaataagagataagctgcaatggtggggggggtggcggtgggaacagtaattacaaacccaattcattcagcttttcagaacttttgttgtgggagctccattgacgggttttgagctgccagttttctcacattaaaaagaactgatcagcgcctcagggggacaagaaataccgcttaactgcatagtgatggggtcttcatttagaaccattacaagatgaaaattaaacagtgcctttgtgtgcatgaggtttacttttcaactgctaacagtttatagctaactgctctgagattgaagtttgactatggtttgatcgcctgctgattgacgctgctcatttatttatttatttatttatctgttataattaagagaacttttcatcacctcaccccagtttcatttattgatcttggagaattttgaaaaacagatcctcatatttttctttgtggaaggagtttcctttgccatgagctttagcagagacttcagttcacattccccaacggacaacccccaccccacacacccacattattcccttaaaataatttgcatctcattctctgttttttttttctgctgcattttcttgctctccaagctagagttgcttttcgggcagcaagtagggttggagataggggttaatttatttttttgctttgctttctttttgtgacctaaattggaagagggctggatggatttcctaaggacttcacctatgaggtgaatccctcaaagaaggaagaagggggagaaactctgacctttactgtgaaaatatggatacagtccaaaaggacatagtttccggagttctagagtaagaaaagctgtggaaggagctt

SEQ ID NO: 109656 - DNA, 3846 bp, Homo sapiens
ttctctttggaagggtggagtattaagataagtctaagattcttgtctgtggcagaaagctctctttctctattcggagttcagatggattttattttatactttggtataatggtgatatttctgattccttgagcactttgctcagtttctctcctaaagcaaatagaatgtcttctcatttcgggatgcaaagatatttgcttcacctaggcgtttgaacttgagatgcttgttctactctgcaaagaagtgtcaggtgatttgaaagctggaggtgtccttcgttttattaccctagtctgcctgcgtgtacagaatgaagggtgcactgttttatatagagttcggcgctttgaactatcatttgcctagctctcccagcttccgcgcgggccacggctccgggctgtgagcgcgccggcctcccgccggctgccctggggagcgcgcagtgcccagtgctgagagccgacgcgcgggcaaattgaggccgagctgacgagctccggcgggtggacctgacgtcaccgcggcccgggtcacctcacccatggggctccccaagaaggtgctgtgtggggctcgagttctctctgcccgggctctgctcaaacggtcgcattccctctccctcaggcaccgacccgcgtcagacaagtctagaaagtctcccgaggcgttggggccctcaccactccagagtcctctgcctcctgcgccccagcccaagccctctccatgttgacctcgtgacacgggagacggtgtctaggccccagattcccacccacatcagagattgtctacccaaggggatgtttgtccctgtttgtggccaaatctcagtattagtgatctcgctcggttcttcccgattagaggccgaggattggcagggctgggggaagcccccggagcaatctgggatccctggaatattgggcccctctggattagagcaggtagggatgggaagatacagacccttcactttcccacttgtgagatagggataatatatagttacctcgaagaagatgaatacagagtgcctgacaaaacaggcttaattgataagcatgactttacttactgcccagcagaattagggaagggaagcagttctcacgttagactacagagaacaatacagaaaccccggtcctttctggccttcctggctctggacagtgaaattagtcttgttcataccacccttcttacttttccagtgctctctctgacttaagatttgcctaggaagttatcttgcaaacttgccatccctgggcatcgtcctgaagggagggatcccggcattccgggcaggacccgcccccacccgcagaaggcagaaaaataattactgtattaaataaggagcggtgaattcttcccaagggttcttatcgctggcggccaggccagaagcgggactgcgcccccacccccacctcgtgacgtcagggcctgcagggctccggggatgaaatgattcgtttgagtgttccagaaagggcaatccgaacgcttacagggcgaggccagtgcagcccagctccatcaccactaccaagccccagtttgggaggctcccgaggcccctggccgccccccagaccccgtctccagaacataaccacatatacaagtaaccataatcctaagtacgtatatagtcacgcgcacaactctcgtcacaggaccgcccttcttccaaatatatatatgttatttagtttgttagccacaatttgttgtgggatctgaatgagttgtttctgttgtgtttgtatgtttttgtttttagacggtcgacaaattacgacaaatgcctttacaaagcacaccatagctttatttaacccggtgcaagtttcagcggcgatttaagaaatggacttagaagagttttctggctctcatatccagccatggttaggacaattgctccaggcttaccattgctgcactagttctattttctctttcccctctattcctaagaatttgtatagcttttaaaaatctttttagagtcatgtattgctgagagaatttcttagaactgtgatttaaattgtagataagaggaaagattatctggtcagtggaatgtgtgtaagtggcatagaagtatttgttagggaaaagcacctgggcatttctggatttctgggagatgcacttctcaagttttctttccaactctcaaatcaatttgatttattgaatgcccttccaatggaaaggatcctggaaagcaggccttatgttctgatattggtccaggatctcacagagtaacgattagccaatattttgcatgcagtcagtttagtatcagctcacatccaggtcgattttatcacacttaacagctcaaatcggggttattgcataatattagagtttaatcagtctggaatactaaatggcaaacctgtcttctccttctcaaggccctcctccctttctctatttctccttcctcccacctccaaggaaactatcttaaaatcaagtttccctttgagagtttgtttaccccaacttctgttaaactagactaacacgctctcatcagctttctaaacactgtctcatcagctttgtgaaatggtgcaaaaacatcttggaatccaagatggcaaaataaacttgagcatatggggggaagactgccttgttaagaaattgatttaaatgtttagcttacacttcagcatcaatgcttcccttactacccactcttacttccctcactgcccactcctggttcttgggtaccccacctctattagcaagctggttcccccagcataaattatgaatgcatatcaacaggctcatctgctgtgataaatcagaggcttttctcttttgcacatttctgcttttattctcatcgaaatgtctttctgccccatgctagcagtgtctttctacaaacttactatccccgtataaactatggagatatattctcaattggaaaaatcaggtaatttcaaccgttccccccacccccaggaagccttacaagttaaggatacaaaatatttcatggttagttgtatgagcttccaaattagctgcatataaagtatttaagatttttttttttttttttggctgtcactggctggcaatactcattttgtgtgtgtgtgtgtgttggtttgaaaagcaggaagaaatgtaatgaattgagtgctgtcagagatgtcttctgtttgaacaatctgcgatgggctgaatggcagggactccctcatccagtgcaggtgcagtagagctggggaaggggggaggggggctccctctgttcagtcaaaaagcaccattctccacaatagaccacacactgacagccagcgtgacatcaactcacactttcatacttttccccccatccatagttctgagttcacaaagtggccatacagtagccttggttaggttcctttaatgaacattttgcggctcctatgaccaacattgaaatccgcagagccctgggaggaacaaatagatttttaatcgtgagttccaaaccagaatgtatagctatagatattaaaagtaagctggtctccacatcctctcccaatgccaatgcccacagcaaccccagatgatgtgaaaactctgagttaaaagttcttctaagacttattaggttccaagacactgttttccatgtcctgagagagatcaaacaggaaaggagagaaggcacaaattttatgtatttatttaaaggtaagagcacctctagtattttattatgcttcatgagatggttaatcctacaaattaacaaacattaatcttgtggag

SEQ ID NO: 109657 - DNA, 1133 bp, Homo sapiens
gcaaggactggaccttccaagagttcgttttacatttgttgaagcccaggccttggtgcctcaagttttaaatggaattactcaaggggggcacactactagacaaactattctagccaattccttcatccccgacccagtccctactcctctctgcccccgcccacttcgccacttcttagtcccggatctgaacattttagctgaaagagggaggggtgaggaaagggccaggacagttccctcagtgccaccactgcgggcaaggacagttccctcagtgccaccactgcgcctggagagatccccgcggccctgccgctggctgattctcccctgtgccttgacttgctgaaacatctctctggggaaaattactccctacttgcttacatgtgtgtattaaaaaacacatgtagccatacacatgtttcatcacggcaacaaaaaatatcaacattctagccccaggagcaaaacgtatcaatcattcgcctaaatattgttcagtagatgggggcgggaataggtagacctcctaggagagcggtcacaagtcccctctcctccgcatggacaccaggaatgcggggtctggcggtgctgggcgcagggcgagaagatttgatgtgcagggtaagtaaaggacaagttatttaaaacctcaacacaggaaaagatggtaagagtgctgtgtagccctttgcttgcttgtgactacgagtcgctaggtggcccgcgtttagagtatgcctacggcgcctactaacgtctagacctaggagaggcgtctcccgcccctcgacccacagccagccgccacttgatagctaacgcgtcttccggccggtacacacccacaattaatctttcttattaaagcctccattctgtacccatggggcgactcaaacctatttagatttccgtggttggctgcacaaatttaagtgggcaacgagttataaacctaataacagaggacgagagagggtgatttgagtagagaagacgcaagattcactagggtcgtgaagatgctgcgggccttgcccaccacggcatctacctcggggtgcacgccaggctctgagaaaggtagtgaacctcacaatcacactcaccacacacaa

SEQ ID NO: 109658 - DNA, 1010 bp, Homo sapiens
ataatatcgcaactcgggacttcaacgctcagaccccctccaggccccagcctccgtattctcggagccctccactactgatacctctcgcggagtgcggcgccccgggaaaagcctcttggccagggactctgggacattactttctagtttgttttgttttttgtttttctcccagagaccaccaccaccctcatcctcttcaggcagcatttaggagaggacctctgagatcagcagaaggcctcagacggtcaccatattggtggaagcgtttgtctgatgttttaaaacgtataccaaacggggcgtcagggccacgtgctgtgccttcgaaacgccgccgcgggccctgcctttcagagctgcggcagccggggctggcgtggagggggcgctgaaacaccggcgggcgtcaggggccagcgctgagctgcagatctggccgcagcgctgagtgaagcgaattatctggagcgtgtttgatctgggactgcgtagtcagcttctgctttatttgtttgtttgtaatctcatatttagcaagccgggacggtggcagcaagggagaaaggacgggatggaggagggggcttcgcggtaaccacaccccttcctaatgagttaatttccatatttgcgcctcccgcatctagcgccctctttttttttttttttttttttttttttttgcctgacgccactgtgctgttgcgtcttgcgcagcgcagacacctccactctggattgaaacgaaaaagctcgcggtaagagcagaaaattggtctattgatacattcgctccgagtgttgatcttggcatcaccgatagccggttaattcccccaccccgcccccgccagtgggtcgcacgcggattgccgagggcttgcaggcactcaggcagacgcagacagaaacccacatcgaccccccccctttccccgcctccagctgtccgaccctcaagtctctttctttttcttttttacccaactccggattatttt

SEQ ID NO: 109659 - DNA, 1229 bp, Homo sapiens
gcgagggcacagtccgcacaaaaagggggaaaataatcgcaaaccaaggaaccaaaagtgaaagtttcaaactagataccaaccctgatggaggttgggtgctgacccgactgtgggtacttaagagaaggaaggagggaaactgaggtggtgagattatgtccacagtatgggtcggttaaaagttgtagtaaagaagttttgggagggccctcactagaaactcaaggcgggtttcagctgatttaacctggtttcctacacatttttgcggtgattctgctctggaaattggcgaaagagacagacctttgcaattgctcacccctccctgcccccaaccaccctgcttactttcgcgaagcgcattaggatgtgggctctggcttgagctccaaaatagcttgcttgtcaattgcgagctgcagcaatatcaaagtgaactgtcccaagtaactcttgtctagaagctgggaagaagcttaagcagctcgctttaatgatgatttgtagctcggcgaggggcacggacagcaaacaccccgcaggtgtgtgccgtaacaccatcatccggacttgaatgtagattactctggcgatcgtttgatcggccctttgaaaccctttacaattgcctgtgacgaacggccagtctcagtttttctctgaataatccctgagggtaagtcctccgggcttttaaagagctctagtattttttttttaaagaataaaaagaaaaacgttcgattttagtttagacctcgtcaacttttagtcgctaacaggcatcactcaagccagtcaatacttaatgaccgttagttacccttgctgtcttcctagaaaccatatacatatgtgtgtatatatgtatgtgtgtgtgtatgtacctacatacatactttgtgtttataaaaaggagaacaatgttattaatttcattttctttagtttcatacctccttgcctgtttatagaggtgtgtgggggtgtttattgtaaacatgcattattattattaatgccattgttaatcttgtcttaatgccttctctgttctctctgaattatacctactcagtgggagttaacgtaaaggttaaagctttacaaagtaaaactagagtttaacccccctcagcaccttcacaccaaccgctgtcaccaaaatgaaaatgtagtgctgttcaacctttaatatttacttagagtatttacataagggg

SEQ ID NO: 109660 - DNA, 1015 bp, Homo sapiens
ttctattctcccagctgctcacgtattccttaacgatagtctgtggtagaaacttgattatgctgaatccatacatttcgatggatttcatcagcctaattaatgcctcagtgtggtcctggggtctgaatgaaccctttactatcgtttgaggttaaaggcagtggtggaatgtagaaggatttttttttccttagttactcccggggtacttagggattccattaagcaaggtggatagcagttgttaaacagactatgtggaacaagaaaacccatccaaatggcagaaaagtgaggctaattcttcattcttatttcacaccaacactttcggattccatagacaatctccaaatatttagtaaagtggaaattaccatcttccgttgtatcttaaaacttcactgagaaggaagagttgaaaatagatttacaactgatggctaaattcattttgttttattcatcaaggctgtccctgctccttctcttcctgttcccataactttcagactacttgccccctcaatttcaactttcatctttcacaaggaagcactcatggctgttattcagcagaaactcaagtcacccccaatggggtgactacattttgtcttttcaggtgtaaattaacatctgaatacatctcaatcttactgacccctaccaccaccaccaatcctgcctcagcagagttgcggctaatctgtacctccacaaatggcagggtagatagaagtcaaatttcccaaactccatcccccagcaggaagaccaaaagtgcttgtattgcctatgagataaatcctgatatttgcacatgtctaatgaaacacctgtggaagaatacctttcaagacatgtttccttggtggtcaagaagaaataaaaagaggaagaaaaaaaaagagatgaaggtatcttgattctttaagaaatgttccaactctgactttgagtccctaaggacaaactgttcacccagcagaacttccttcatgcaagagat

SEQ ID NO: 109661 - DNA, 1015 bp, Homo sapiens
tgagtctgtttccttatgtagtctagagtattggtattttatgggcaagtgtagttaaatcaaatgtccaaatccagttatttaaatgggcagtagcgttttgaggagcttaatttgccttaaaaaaaaaaaagatttccctttctcttcctcccaccaaccccatggatagtttttctaacactgaggctttgagaacctagtgccaaagcaaccagttggaaagagaaacatccacgtaatgactggttgttttgtctatgcagtgtgaaacaagaagttggcatgattttatttttcacctagttgacagttttgttttgttagatttctttggactgaaatgatttgttgatttggtattgtgtaaaccaagcccaattccacagtacttttgtgactattaggaaaaaagaaagaaagaaaaaaaaaaagcaggtgaagagtgaaaagaataattaaactgctagccaggagacttggtgattttgttccagctttgtcacccatcagttatgtgacctcgggcaggtcatttcacctcctcggaccttcgtgtccttaaatgtcctaaaatgaggagtctgggcaagacaagtccttaggttcctggcagttcaccttttaataatttttttgacctggaggctgcagaatagagctctagtgtaatcctgagatcagttggtgactaacatttgagtagctcagggagagaatcacaggtttgcagttgtttttttagaaccagatcagtttttggctgaattctgactttatttatttttatttatatttttattttttgaggcagagtctcactctctcacccaggctggagtgctgtggtgcaatctcggtttactgcaacctctgcctcctgggttcaagcaattcttgtgcctcagcctcccgagtggctgggattaaaggtgcttgccaccacacccggctaatttttgtatttttagtagaggcggggtttcaccatattggccaggctggtctcaaactc

SEQ ID NO: 109662 - DNA, 1082 bp, Homo sapiens
atttctccatccacaatgatcctgaccaagagaatttaaatatggcataaattagaagactggttattatttgcagaaaggtagaaaggaggtaagagggaagtgtgtgtaaaatttagggatgagaaggtgagtctataatctgagacagcctaagtctcagacaaaagttaacaggagctatgacaattgtagtctcatttcaacaaattccccaggaaggaagaggatgataatatggatgaagacagaagaaaaaatgtaggaagggagatggcagagttaaaggtctagggctgagaaaagaacaaaattggatccaataactgaatagaatatacaatttaacactggccttgtcaagccaagcagttggctttaaaataataagagatttcttgttttaactgtaacagtttttatcaggttaagcatgtaagcagactagcaatgcacatagatggggcaatttaccatcttggtttagtaaacgagtttatgtgctgtgttgaaacagtgcaacgtccttaatccaatatctgatgaaggagcactggtagaagaattaatttaccacacagtaattaaagaggggtatgcactatatatactgtgaaagtctctgaaatgaatatttgataaacaatttctggtaaattaaaaacctgaaatgttaaattaaatgcaaattaaaaatctggaatgttaaattaattaaatacagaaacctgcatcaaatatcattataggtctcagttaaatcagagatgaaaaaaaaaaaaagccaagtaattcagcatcacatcatgccagcgtgcactcttgactcacctgttgggaataaatgacggtgccaggaacttcagctttactggtgaatttacatatcatatgcacaatcatttctgggcaccttttacttgtgaaactaagtaaggaatgaaatgaactttttgctttatcatggaaaaaaaggctaggagacttattcacatcactggatcctcttctagtttgagctaaggacggccaaattgctacataaagggtaccctcaaggcagagtaattcatactgcgtgc

SEQ ID NO: 109663 - DNA, 1126 bp, Homo sapiens
ttgtgtttttagtagagacggggtttcaccatgttggtcaggctggtctcgaactcctgacctcgtgatccacccgccttggcctcccaaagtgctgggattacaggcatgagccaccgtgcctggcctccccatcttaatcattgtccttgtgtactgtgccctctttatctctctgtccataagtctctctcaatctttttctccctcataaaacattagctattctttcaggcctccctgtttcatatatgtgtgtgtgtgtgtatatatatatatatatatatatatatatataaatatatatatatatacacacatatatatacacaaactatatatacacacaaacagacatacgcacacatttttttttccttccttgaatccttgctgccagcttgtgtgatttgcattgtttggacagaaaaatcaacactgctagaagccagcattctgggaactacttctgctccaaccaagtctgtgacttactttcacagttgcttcctgatttgttgcttttgtttaagagacatttcctcttggacgaaaccaactaaaatataacattaaatgtccaggattgcgtgagagtcaaggcagctctaacgactatgactgatgggagttggtgctgagaaaaccagaagccaaaagagatgtagcatttgccacccaactggaaatgaaaagatgcctgaagtttggtggtttctcttcccctccaccacgttccttttatttttgtggcaaaccttgaaacaaagctggaagaaaagtgctttttatttggtgggtggtggaggttctgactcaggctttacaaacatgacattgcttgaacctcaagatgaacgttcccacaggattccagagaaacaaagctgcctgctgcattgtgtggtaacaacattcaccttgggaattccggcagcaccggggaggtggccacacaggtgcaggttttctgaagcacatgaatggagttgccagagttcaaagaggtttttgaactttagacctaggctttcttggttgcatttggcctatttggatggtagatttaggtctggaactactaaagcagaaatttccaaaactctcatgaattattattattatt

SEQ ID NO: 109664 - DNA, 1033 bp, Homo sapiens
ttatttatcttctcaggccaaaaatctaggagtcatttcagattcctctctttctctcatttcttacatccagttcattggcaagtcctactggtaccacatccaacatatatcctaaatctgaccagtctttgctcccttcgctactatcatgcagcttcaagccactatccagttggcttgaatagttcttgtaatagccttgtcactgttttcatggctgtcactgctatcctctacccagcagcataatcagctttttataacgttagtcagattgcattattccactacccaaaaccctctgagcccccagccatactcggaataaacctaaggtccctaccatggtctacagaaagcttacatgatatagcctgcctgcttcccctaccttctctcctaccgctctgtccttgttcactaagctcctggcatgtttctacctcaatgtctttgcatgtgttgtttcttctgtctggaatcccctttccccgtgtatcaccctgaatttttctatcacttcctttaggtctgtgctccaatcaccttatttgagagggctttctcatttaaactgctatcactctccatttccttactctgcttaacttttctccaaaacatgtacactatctggcattatattacatacttattttgtatgtttactgtctatattattcctgtctgtgttactctactgggagcagcacttctcatgcattactgtttcttcagggcctggaacagtataagcacataatatcttttgaatgtgtgaatttaatccatgtcccctcttcctacaatactttagttaaattgtggcttagagtttgaaagaaaacattttgaaatttttctatggcctaaagtgacaatgacatcactcaactttgggtggtcattaaattagtctgttatttatttatttatttctgagacagagtcttgctctgtcacccaggctggattgcaatgacatcactcagctttgggtgatcattaaattagtctgttaatttttttt

SEQ ID NO: 109665 - DNA, 1044 bp, Homo sapiens
atttagggatatctgaccagagttgccctgttctcattagctatatataacataccacacatcacctttcagaaatttgaattagagagctgggtttgtcccagaaagctgcctcagggaagctagtagaagaatgatgtacttttacttctgtgtcagtcaatccctgttgtagacaatatcacgttacttcctttttacaaatcagacacaattcctgctgcaatgaatttctaacagaaaataataggaatatatcattttggtttttcttttcaatcatgcaatcaatcaaacacttattgaaatactgcaatcaagaaacaagataaacaaatatttactgagcccagtaactttgggaagtctcctgtttcctcaaggatcttacctcttagcattgtaatcagtgtactgggagggtcagaagacatgtaaaatgtagcccaatttttaaacatgcaaataacctggttgggaaggtcaaaccaacacacattaaacagaaaaataagctgagcacagtgtggcttttggatactctggagttgactattgctattggtgagttgtaaagaataaggctagaaacataggatgtgagctggattatagatcttgaaagctaaaaagaggtgcttattagcaggagggagccactgtgagttcctgagtctggaatgacataatgaaattgcactttaggaagatttttaggtctttaattatttcctcccacttctcattcatctgggagccaagtaatagtataaattatgcatctcaaaaattgtcatctgatttaactaatggaccgtgaaatgtaaaacacagtgtctcctcacatttaaagatgatgaagccaacggctggtgggatcaatgtctatgtaaaacaggcccgaggtgattttagacctcagacagacaaactttgatctactaaagactactacaattagcaatagtagcctaaagcaagaaaccttcttgtttctgtaatcaaactgtcccttaagaaagattgacaaatatataaaatgtg

SEQ ID NO: 109666 - DNA, 1075 bp, Homo sapiens
ttctttttcttgctttattccactcaatctgcactatgatatggaatggaaatagtgagagtggacatccttgtgttgttcctgatcttaaggggaaatcattcagtttttaattattaaatataatattaattttaagtttcttttgtagatgtcctttatcagctcccaccttaaaatagaaaaagggataccaggtgcagtggctcattcctgtaatcctagcactttggtaggccaaggcaggaggattgcttgagcctaggagtttgagagcatagtgagaccccatctctctctctaaaaaaaaaccaaaaaggaatagaaaaagaagagaaatcaagcccaaagtgagcagtgagcagaataacaataaagttaagaacagaagtcagtgaaataggaaacataaaaacaatagagaaaatcaatgaaatcaaaagttggttaattgatgagattagtaaagctggtaaacctctagccaaactgattgaggaaaaaaaaaaaaagagtgaagacacaaatagccaatatcaggtatacaaaagggacataattaccaacgctgcagacattaaaaggataataaatatcacttgcaactgtaaacttataaatttgacaacttaaatgaaataggcaaatttcttcacagcttaaaattcaaagcttatgaaagaagacacaaataactcaaatagtcctctacctattaaagaaattgaataattgtgaaaaaaaacccacaaagaaaacttttctatttgttcttgtgtcacttttggtaaattatattttctaaggaatttgtccatgtgtgtcacttaaattgtcaaatttattggcataagttatcatatcttttaaattaattttaaaatgtctatagtatttgtagtaatatctcctctttcattcctagattttatgatttgtgtgttttatcttatttctatattgtacatgggttttctactagatcaatttgtttttatgtttattattttcatctttcaattttctttgggaatattttgctgttcttttcctagctctttgagaataagtgctt

SEQ ID NO: 109667 - DNA, 1079 bp, Homo sapiens
cgggagtaaattactgcatttgaaggaatgccaatatcatagtcatgcaggcagttatatcaaatattttgcagaatgttaggataaagaaagcaacaaggaaatagactgaattccaacggaagccagcactataattcataccatattcccataaaaatgaacagacacatgaaaaaaagcaccatagaggtttcactctttattatcataacctaggaagaatttttctttaacactagccaaacatcatgcccataccctttgtactgctgaatcttcattgctggctgtcactgccctagaaatggagctgacattccttcaaaacaagaaatccacaattttaacagacatatcaccactatcttttcctttacaatagagtgcttactatcaactcactgctatttttactgttttctccaagtctttgtaattttcttggttgttgcaagatctgaatactacttggcaaccctattatggtcctttctctcgaagtcttaaaatactaaactgattttaatgttagagagatgcttgtattgcctttgaaccatgagttatgcaaaagaaagagagataactataaagagaaatagaaattattacagggctaatataaactctacacggatcagctttgtgccctatgacacaattaattgtaagataactcttaaagagtgttttatgttgcagcatcctgccattaggagggtatcataagtactattgcctgtcattcactacactccttgcctcctggtactgaacttttttattggtagtatttaatttgacaggggataattttggggtacctctttcagtgggaaaaatacaaagtatatgctaacttatatgatagtttaaatcatttatgtatatatacactttaaaccccagggagatactttttttaatggagcctattaacctgagcatgacaataactaatttcagtgcttttaaaaacctggtccatggaacacttgcatgagaatttcttgggggtatttgttaaaaatccagattcatagtctccatcccctgtccccctccaaaatatactg

SEQ ID NO: 109668 - DNA, 1010 bp, Homo sapiens
aatgcagtagggatagaaaatttgtcctcaaatacttctataggtctcccatatgattttttttcaatatagtagtatttctgacagagaatgaactgtttttcattactaaaggcattacctagttaagtttctatctggagataatgtacctgtttacctgtgaaagaaaaaaaaatagtaaagtttctatctggagataatgtacctgtttacctgtgaaagaaaaaaaataggtggcatagctcttctaattagatggattgagtctatatgcattttaagggcaatagtaatatatgtaatctgaccagctaaataaagctaacagtaaagtatcataactaacctggttgactagtatttctttttctcttgcttgattggtcttagggttttgacccaccacatcagagtgacacaagaaccatctacgtagccaacaggtttcctcagaatggcctttacacacctcagaaatttatagataacaggatcatttcatctaaggtaagaattaaaatttttattgttaggccaggtgcagtggctcatacccatcatcccagcactttgggaggccaaggcgagaggatcggttaagcccaggagtttgcgaccagtgtgggcaacataatgagaccttgtctctgcaaaaaatcaaaaaattagccaggtgtggtggcacacctctactgacagctactctggaggctggcttcagcctgggaagtcgagggtgcagtgagctgtgattgtgccactgcactccaacctgggcaacagagtgagaccatgtctcaaaaaaaaaaattattattaaaactgtagatatggatcattttatttttaaaagtgattatatgtgtgtgtgtgtatttatttatatccttacaaattcaagaaaacggtggtcgatttatcttaaccaaaatggttaactgtagaatacaaggagtggctaattgctgatatcagtagcccacatgccaaaaaattatctttagttg

SEQ ID NO: 109669 - DNA, 1040 bp, Homo sapiens
tatctaaagcatttctatttctttaacattctaggttatttcctcatatttcatactaaacaaactatttcctctgtttctgatgctaaactaactaaaatataaattgtatctagtatctgcatttctatcaactcatatttatctttagcattaggtttagttttgtataccaaaatccaaaataagttattaaaatgttgttttagatctgctttctctaacttctaaaaaaactggaatttagtagcaaaattgttgggtttcagcttattccatttttcaaaattaagctaaaattgccaataaatagtaaaaggaagaaaaaagggaagtagaataaaagtcctgaactctaaaagccagatggtttctgtagcatatagacttacagaattttgtctaaggggttagtaaaaccgattttactttacttcttaatattatgtctatatacttgatattatttttaaatattaatttattgatctctttctttttagtacactgtgtggaattttgttccaaaaaatttatttgaacagttcagaagagtggcaaacttttattttcttattatatttttggttcaggtaagctttattactcaatcttaagtttgtaaacatagtttctaaaaatatgtcttggaacaaagaaaaattacattgtgttgctaatcatttgaccatgtgaccattttttctgcagtgcttctgcattgtattcagtgaatacaatgatctgtcatatctagatttctaaaagaaatagcctgtaaactttaagatcaattgtatattgtttcatcaataatgtgctgtagtacttagattaaccataatcttagctaagagtgtaacctaatatctttcagatattctgcctcagaacataaatgtttaggcttttaatatatagttcatattttcggtacatttctgcctgtggaatcatctttgtacaaagtaaacttttctttggcttttaattttttaatttaaatttaacttaaatttaagttatttaataagaattgt

SEQ ID NO: 109670 - DNA, 1107 bp, Homo sapiens
cagcacactttcaggacatcatctgtttggttctgaatatgtttaagacatttatgagacatcaaaattgagatattaataaagcaattaggtattcaagtttggagttcaaaagagatatatggctggagatacacattttggaattaccagcatatttatactatttgaagacacagggatagaagaaatctcttagtgagaaagaggaatgtgagaaaaggatccataaaggtgacatcgaaggagcctccttaaggaaattgagaagaaataactagaggtcctgtgaaagccaggaaaatgtatatgacaaaaaagaagcaagtgtttccagtaggaacaaatatcagatacctatgagcatgtgcatccaaatagcctcatatgattctggaatgtagtgttccagggaagtttttgagttttttttcttatttgataaaagtatcttcaaattatactgaaaaattattttttaccctttggatatttacagggatatgaagattggttacggcataactcagataatgaagtaaatggagctcctgtttatgttgttcgaagtggtggccttgtaaaaactagatcaaaaaacattcgggtatgcatctggtaaataatggaaatcaactttatcttgatatcacaggacataattctaatcttgatattacgttttagttaaaagcctactttcctatgctaaaatactgtgataggctgcttctttagagcccaataaaagtaagtccttgccttttaaaatttataaattcactcttccccaaaattctttataggtgggtgatattgttcgaatagccaaagatgaaatttttcctgcagacttggtgcttctgtcctcagatcgactggatggttcctgtcacgttacaactgctagtttggacggagaaactaacctgaaggtttgcttgcatatgtttgagtattgctcttggtgaacaaagtgtctttggattataattatacttaactttggttaaagtagtaaagtttgaccagattaaggggaagtttttaaaattactatttcaaaaataaaaaggttttaagaaagaattgatgttatatctttat

SEQ ID NO: 109671 - DNA, 1001 bp, Homo sapiens
cttgtaacccatttattcattcatttaccctcagctattatttctccttttctccattaatacccaaacttttccaggaaagggttaatttaaaagcactttgcatttcatctgctagtaatttgtggcagcagcaagtgaggatgaaacaaatcccatgaaatgatatcagaataatttagtaagattatttgtgtttttgcatttctttttctgataatactaggtagtaatattaaaaggaaacatagctgcttttttgcactccttatacatttaaaccgacgatgcctagtaagtctagaatatgaaaaatgttttatatgatgtttaacaagtataagtgctatgctcttcttcacttcagaatcattcagtgcaagctggggtgtttagtggtcaatccagaaccgcttacttacttttctgatttttatttttcttggttgtttcagattgttttccctcaatatttgggttaatgaatggctcctaaatgaaaggctttgtgtcagttcaaagacatgctgataggatatgattacgttgttactcatgagcgttaaccttatttggaatcaatcttggaatcagctcttgagtttctaatcgcatttgacattctacctcttttctggggacatgttcagtttatactggctgcatgaaataagtcactataacagaaagagttgagcattttttaatgaaatcctcaagacaagccagcaaaaataccatacattcacattgattcacatttttaataagcattaacataggagcatgttcagtaaacactgtagcaagatctttgtatgtgtacgatccctgctgaataactatgcctaggtttattttgatttttatagggaaatagtgagaaatgtgtggatacatagtctgagttgcattaatatgtaaaggaaaatagcagttatattacttcagcccctagaatggttaaaaaaatgaaccatgttctctactaaaacaacctg

SEQ ID NO: 109672 - DNA, 1025 bp, Homo sapiens
ttttttttatttttttttatttttgagatggagtctcactcttgtcacccaggctggagtgcagtggcgcaatctcggctcactgcaacctccgcctccacggttcaaaaaattctcctgccttagcctcctgagtagctgggactacaggcgcatgccgccacgcctggctaatttcttttgtattttagcagagacggggtttcaccatgttgcccaggctggtctcaaactcctgagctcaggcaatccacccgcctcagcttcccaaagtgctagcattacaggcgttagccaccacgcccggcccctgggcagctttatagtagctgggattttggttttatatgaaagtggtgttatggctatagcttaagtaccttctgctgaagatgccatttcagaattgaagagtttttaatatattcagtgctttatggttattttctttttttcctagacctctggggccggagagtctcctgcttcgtggagccagattaaaaaacacaaaagaaatttttggtttgtacatatttaaacattttaaattattgatttgtgttgatgctttatatgaagtacttttaaaagtacaatgtggtcttttggttagataatttattaattatttgtcatttatgataattttcttataaagtttgtattacagtagtcgtgtattgaacttttgttttgttgatgatccctgttttttaatagtagactagaaccttgatcttatgttatctttacggatacttgtgaaactgagtgcagataatttatataacacttctagtaatggtgggtgagaaccaatataatatggtatcatggtacagtaaaccacttctataatttcattatgattattagattggattaataactgcagatttatccattcatacattcattcaacaaatttactgatatctgaatatatactaggtactattggaacatacactgattggatcaaaaggatgaataagtactgctcttgccttggagatggatca

SEQ ID NO: 109673 - DNA, 2768 bp, Homo sapiens
ccaggctggagtatagttgcacgatctcggctcattgcaacctctgcctcccgggttcaagcaattctcctgcctcagcctcccaaatagctgagattacaggcatgtgccaccatgcccggctaatttttgtatttttagtagaccacgttggccaggttggtctcgaactcctgacctcaagtgatccacctgccttggcctcccaaagtgatgggattacaggcgtgagccactgcgcccggccaacacatctttctagtagtaacttcgtcactcctgtttactttaaagtaaaccataatgaatggggtccaaattttgtacactcttaaaagaaaatgtgaatttgaatgcctttagatgggtctgtcttctgttgttttgcctcagtaccacctctccctattggatcattctggctattttaccacgtttctataatctctatttgagttataataccctgcctttaaggaataagtcaagataaaacttccaggacaaatatttaggaagagggcatgaaaggttctatattgcttttcaaattgtactatttagggatgggaatgaatatttattgatcatctctcagtttttaggcattttgttaatttgtcatacagacctcacaactctatgaggtattttttcccatttaaagatgggaagattgagactcacagaaattacttacccgaggatgtagaactaataagtggcagagctagaattcaaaccaaggtctagctgcaaagttttttgataagctggtctcacctaattccatttgttgtccagttttagtcccattactactgtcatccttgctcatctcaaagtcattcaataggcgcacattttttaaatagcactttccatgtgcttacttgatttactctgacagacttccatgttatctctccaatggttatggaataatgtctagacccccgattccagcattcagggcttttcacactgtggccatagtccattgtcccaacctaacagaaagtgcttttccatatctgtctttgttaacactgctgtatttgtaatggccttccctgacacttttatctttccagattcttttcctctatcaattccaattcaagtaataaatttttcattcaggtatctgttacaactcaggaacaggactccatgccctcccccatttagccagttgagtgactggggcttcccaaaattggactcagaaagccttttagtactctgaaaatacttaaagaaaagcaaaattataacaactgtcagacagtacactaaaagctttcatgctggtaaatatatttatttcttgtgaaacatgctagaggattattttaagagacaattttgttttattttacaggtgttgcggtatacactggaatggaaactaagatggcattaaattacaagagcaaatcacagaaacgatctgcagtagaaaagtaagaaaactgttttcatttatttatatgtaattataactctacattttttattcgtttggtataaaatattatatatataatatatattaagtaaacagaatgaaaaccttggggacagtgatagtttcttatatttttacatacaagtaacattttgcacagtattggacatgtagtaaatgctctatagtatgacttttaaaataaatactattgaataaatggtggaatcacttaatcacactaacgcagataacagttctaaaactgaaaaaaaaatttaaataaacaactatttgaaaacattggagacaaaccagaatcgaatagaaatgggcaaggagtgtaatcctgaaagatgatagcagcaagggggaaaatttaagagtatagctttttgcctgagggcactccccagtttatgtgctgcttgggacatcaaaaagtctgaactttactggatagaagtatcagaggacaaggttaatagctggaagagcagctggaaagttaggggaaaataatgtaaggggattagcattaattcccttctgtaagcaatgagatgtaagctacagaatggaattaactctaaaaactgcacataaattctgcccaggtccttggctgactgctagaactatacatgtgcaagggagacaaaagaactcaacagaattttactgctgcccattgcattggagacacagtttgttgaactaggtgaagttaacttcctactggaataaaaatagcactcttctgaggaacataaaagaatacagactgtctacaatgtattattatgaagtccagtctgcaataaaaaataagcagaatatgaagaaaatgtaattcatccataagataaaaagcactcaatagaaactgtctccaaaatgatccagatcttgcatttagcagacgagaactttaaagcagatattataaatttattataaacatgtttaagggcctaaaggaaaatttgaatgaacatatgggaaaacacagcagagaaatgaaaactcttgacttgaaaaacataattactaaaatggaaacatcattaggtgggtctcaacaccagactgaataaatcagaccagtgaacttgaagaaaacacaaattactcagtcgaagaatggagaggaaaaaagattaggaaaaatgaacagagcttcagagccatgtgggataatattaagctgtttggcatatgtgtaattgattcccaaaaaaagagaaaaaaggacagaataaaaatatttgaaaaaataatgactgaaaatttctaa

SEQ ID NO: 109674 - DNA, 1027 bp, Homo sapiens
taaaactaatacacagtaaaaaaattaggtaataggagctgtggtactagttttaaatttaaataagggaaagttgaatgtaaaccaatgtaattaggacagactttaggaaggagatggattttgagttaaattttgaaaaataggttagtaatgtagggaaaaaggagaatatgtctgatgagggtagacatgagcaagaaagatggaaataaaccaggcattttgttgccacaaggagacatgactagtttagtgaaaagaggtcaaaatttagactcagacagatgtagatttgaatgtcatatcccttccttactagctctatggggctttagaccagttgttttcttctcttgatccgggtgttctcatgtataaaaatgcgagcagtactataggtgaagtgctgaatactatgcctaatacataataaccaaacgaaagccagttcctttcttacattccttatttactgtcacagcagaatatatagagtttacattggaacatggtggaatatcagcttactccatagttaagattaggttcaattatgaaaggcctagggagaaaaatcagaattcaggcatttttcagtcttttaaagagtttttacaaagcttgtgattcacattttccctcaatatttgttggatgtgagagttcattataataacataacttgttttgcatacatttgaatttataatgatgagttcctttaattgtattaatatgtttttaaacttaaagacatgtggcattaagcttacctaataaagagaagagggattctgaagtcaattcctgacatgtgtgattttgggatatttacagaattatttttgggctttgatctttgtcagttaaaaagtatataataatttcccctttacagggtttttgtttgtttgtttgttttttcgagacagagtctcgctctgtcgcccaggctagagtgcagtggcacgatctcgcctcactgcaagctctgcctcccgagttcatgccattctcctgcctc

SEQ ID NO: 109675 - DNA, 1074 bp, Homo sapiens
gtgagccaccacacccagccagggttttcatatagattaggtaaggtagtagatgtgacaaacattttataaaattttaatgctatacaaatgctatttttagctattacacttaaggtgggtgctgaaaatgtaaaaaaaaaaaaacttagaataattacttatggcaaaaataactgactaaaaccgtcatttactgtaaacatttttaatggtaacatggctatattaaataggcttgtaacctgtgtgcactggttcttttattgctaataaataaattctatttaacggttatttcttgaaaacaaaagctgtgtattttaaaatagttacagtaataccctctatgttttaatatcttctctaatacaagtactaattttcaagcaaatgaatatagtaatacatgagttgtatgttttatattctctttttcttccttaaggtcaatgaatacatttttgataatttatctagtaattcttatatctgaagctgtcatcagcactatcttgaagtatacatggcaagctgaagaaaaatgggatgaaccttggtataaccaaaaaacagaacatcaaagaaatagcagtaaggtattttatggtgttattgactgtgtcataaaggaaactattacttggcacgattagtgctttggtagtgacttctgattggagagaccactgtaatcctaaaactgttggtactgaagggtgacagaaatggcattgcaaatgcagagaagccagcgtgtttgtactgatacgctttttgtagtttacggcataaaaagttgtattccctgtggcatgacttgaatagttcaaagaggtcacaaaattttaaatccatctatatttgcatttcacattaatactacaaactcaattttctcttccacttactgtgtcttataaatgaatcaaagagtaaatggatgtatttttaattttgtcttaataattcaaggatgcttgttatcagtcttaatatgaagtaatatgcaaattatgtcatatattttaaattgattaaacatggactaccaagagaatttaacctataatt

SEQ ID NO: 109676 - DNA, 1050 bp, Homo sapiens
cttagagtcctactacttaaaataccttagccaagaaaaagaaaagaagcattaataccaaattctcgtcaattctacagataaacatgtacgtaaagatgccacaaacttcaaaatctatgtagctttaaactattttgtgttaccctgttttctttccttggcatctatatttatttaattgtgcttggattataagaatctcagcatccatatatcaatattaatagataaactggacttcaggagagcgaggacagagatttttttcttgtttaacataggaccatgaacacaaaggtttattttcttttgttttctatctctataggtagagtacgtgtttacagataaaactggtacactgacagaaaatgagatgcagtttcgggaatgttcaattaatggcatgaaataccaagaaattaatggtagacttgtacccgaaggaccaacaccagactcttcagaaggaaacttatcttatcttagtagtttatcccatcttaacaacttatcccatcttacaaccagttcctctttcagaaccagtcctgaaaatgaaactgaactagtaagtaatttttaaattaataaataagggtttcatatgaaataattctcttcagtagttgatgagttgcaggaaaaaaagtttgtgtcagtagagcaaggaatatacatttgaaattcatatatttgattcaacaatataaaatataatcctaagaatttgttgttacagcccagtttaacttgttatttaatacgtgtctgccttagctctttgagtatttaaatggaacgtagttaagaaaagcccttactgccttgaagtgaagaagactttctttgaaaaatagagcttaaatttatttaatactttttgagacctcacttcttctataaaaaagtgttcccctctacttgcaatgtggttgtacctcctaaaaagatgctcacgtgttgaagggtcctaagcaaatgtgacattttactttttgaaggcagaaacaaccaactgttattcaggcaatcaaggttgtagca

SEQ ID NO: 109677 - DNA, 1892 bp, Homo sapiens
tcactgctataatgagcctttgatattaatgtgtgttgtgtttgtcaggtgtattaggacagaaaaaagcgttgagaatcagttaccttttttagtcagaaaaacatggagctgggcagatctggattccagttcttgctctgccactcacaagcttacctgactttaggcaaattacttaatctttctgaggttaatagtcctcatctataaaaatgagataagacctactttcttggcctctcatggatattaaatgacataaggtgtgtaaaatacatggcatttggtaattactcaatgtcagtctcttctatttcttccctgttttgttattaatggcatgtaacctatcatcatgaaaatggtattaattcttgttctcaattagccattttatcttatatatggattatttccatatagtcacttaatattattttaaaaaaagtaaagtttttgtctttcttactttcttttgtttaggtacaaactgcttcatattctggaatttgattcagatcgtaggagaatgagtgtaattgttcaggcaccttcaggtaaccaatctaaactttcatgaatttttatttatgtaatattaagagtctgataactcattttttttgtctctaggtgagaagttattatttgctaaaggagctgagtcatcaattctccctaaatgtataggtggagaaatagaaaaaaccagaattcatgtagatgaatttgctttggtgagtgcaaatttctatgatttaaaaaactctaaaagatatatttatgaaatattttggactttatttcttataatttatcaaaaattgtggacattctgcagttgtgttacactgtgtgttggctccacattccttttgtgaaaactgacttttaacgcaagcaaaaatatatcttctcttcaaacctactctacagtcggggcatttctggttacaaggtctactcaaactatgctattttagaagagtgtttattaaacaaacataggggaatcctaatgatgtggagaaactggaacccttatacacatattgctggtaagattataaatggtacagccacattgaaaaataatttggctaagttcctcaaaaggtaaacattgagttactatatgacacagcagttctactcctgggtggacacccaagacagctgaaaacatgttcacaaaaaaatcttatacacgaaatgttcataagcagcattatttccaatagccacaaaaatggaaaaccccaaatgtccagctaacaagtggataggcaaaatgtggtatatccatataatggaatatcagtcagctgttaagaggaatgaagtaccaatatatgctacaacatggacgaatcttgaaaagagtgtgctgagtgaaagaggcagtcaaaaaaggccttatattaatactacatttatatgaaatatccagaataggcaaattcacagagaaagctcattaatgattgccaggggctggaggaaggggaaaaaggagagtcctcgtgggagcaatgagatattgtggatttagatagtggtgataattgcacaactctgtgaatatgcgatataacactgatttgtactgtttgaagaggtgaattatatctctcatttacaaaatttaaaaatataggggaatcttgttaaaacaaagagccatcattcatgtaaatggcaaaattattatgcagttctctctcagtcttagaacttcatgatctctcatttttgcatttctgtgaatgtgtgctccacactcacctctgctcatctgccttctttaacagtttatgatttttttcccattatttgtttcctaattgtttatgttccagtttacccaccacatcgtaacatctgtgaga

SEQ ID NO: 109678 - DNA, 2049 bp, Homo sapiens
tcgcccaggctggagtgcagtgatgctatttcggctcactgcaagctccacctcccgggttcacgccattctcctgcctcagcttcctgagtagctgggactacaggtgcccgccactatgcccgcccaattttttgtatttttagtagagactgggtttcaccatgttagccaggatggtctcgatctcctgacctcatgatccgcctgccttggcctcccagagtgctgggattacaggcgtgagccaccgcacccagcctattttgagcaacttcttaagaaaacatcagaagttgaaagaggtatatgtgtcccataactcagatcagtagagctttgtgacattatttatttcctgtcactaggtgatagtactttttaaatgatttgtgattgacttttggtactaggtcttcagtgtattttgatagtgacttcttgattttctgtttgttgtttgtgttcaatttttgtctttaatttttatttgtttgttttagaaagggctaagaactctgtgtatagcatatagaaaatttacatcaaaagagtatgaggaaatagataaacgcatatttgaagccaggactgccttgcagcagcgggaagagaaattggcagctgttttccagttcatagagaaagacctgatattacttggagccacagcagtagaagacaggtaagtatcagataattaaaaaatattacttttctctcataggaatttttgtaaccaagtattctaatatgtgacataaattctctttactaacatcccatgatatatttaagatcaaagtagagaactaaagccttaatttttcccggtcagtatgtacaatttttgttctagctagatacctgaaatggatgaaagaaactagctctctatagttttttcttataggcttgaatctttagaatactcctcagcatgtcatgcaaacacttgaagcacctgcttaattctccagccttccctcctaccactgtctccttccgctttatgtttcaacaataccaaactgtctctgcatgccacctgtagctaaaactattctgttttgtgcctatgttggccttctgcctgggtgattcttcccttcaccatccctctgtgactacctattcataaagtatagcttagatattagctccagtccagtaagacctttcctgacacctaagaggattaaaaattctcttctttgtgaagtctcattgtaggtagttctgttgttgtctttgtggcactatattataattatttgtttaaagacttctcctctgttaacctgtgaaatccttgaagtccatttattctttgtctttgttcccagaacctatctcaatgtctgtttcacagtttcttaaatttagctgaattctgagattgaattctgcagattaagtttgttgttatgtttgcctccaccacctagacctaagggtgtttgcatatttttaaaatctatgttttcatttactttttggttgtccttacgagatttctgagactcacctaaagttagctagacctttattttctacagtctgattttttaactatatgagtggtttgagatatttttttaaatcaaaacaaaaggagaaaaatcttcttgtttgaaatgtaagacttcgtaataaaacaggagtttatgaagagcacatagtttcatcctatgaatagcaactttgaagatacattcttaaaatatgaaattgtagattttaattggttgattttgtgttaaccagacaattaccaatctgtttattcgtgtttccttcctaatgagagaaaattccagttatattgctatattgtataataacattcctaggtcaagtcaaagagtttagaattatccttaaatatactatgtagtttaacttaaaatacagtcataaaagtattctctactactaatttgtttctgttcttttcagactacaagataaagttcgagaaactattgaagcattgagaatggctggtatcaaagtatgggtacttactggggataaacatgaaacagc

SEQ ID NO: 109679 - DNA, 1048 bp, Homo sapiens
gggcacagcggctcacacctgtaatcccagcactttgagaggctgagacaggcagatcgcttgaggtcaggagtttgagaccagcctgggcaacatagtgaaaccccatctctactaaaataacaaaaattagccaatcatagtggctcatgcctatagtccaagataggaagctgaagcaagagaatcacttaagcccaggaggtcaaggctgcagtgagccactatactccagcctgggtgacagagcaagaccctgtttcacaaaaaagagaaagaaagaaaaattgaatattatctgttttactcatcagtgactcaattctgcttaattttaaatttaaggtagtaaaacagtttgtttcctgacataacagtcttgtaacagtaagggctgtgggtaaaagatccatctttcagtaagaatgtgttgttctatatgagtgtaaataatatggcttcaaagtatcttacagagaatataattattttctcttttagaattacagaggatcatgtgattcagcatgggctggtagtggatgggaccagcctatctcttgcactcagggagcatgaaaaactatttatggaagtttgcagaaattgttcagctgtattatgctgtcgtatggctccactgcagaaagcaaaagtatgtatatatgttataaaaaagtcccataaagctatttagatataaacatattatttaaagttaatgccttacatagttccatttggtgatgtgcaatatatacattttgctaggagtcagtcacatctcatgttgtaaattttaatcatgtacatcagacttttggaattctcagagtgagtttcaactattcatagtgacccagaaaacctgtgatgagtagcagtttgtgatcttgcagaaattaaactgtgataactaatgtttcgcaagttagctacttagcgagtgaaggagcctaggagacatcaattatttgcaccttcagatggttctgttgatctccgtttattcttgcattctcatgaagtgataattctttgttacttt

SEQ ID NO: 109680 - DNA, 1053 bp, Homo sapiens
aatcttgattgatttttttaaagtcttaaaattttactacaagaggaaacaattatttctttcatatcaaatgaaaaaataatttcttaagaaaaaattttgcctaacagttcaattaagtagtcattttttacacaattactattaaaccttctaaatatttaagctatatttaaaagattcttgtttctcatcataaaatccaaagataattctctgttttattataacatttctgaaagacatctctaaaatcttaatggagataccctcaaaaaaatgaacctgcatattattgtctaataaaaaattaaatatttctttcattagtgttcttactatagtcatttcagataaatgactatatgaatgcaagaaaattgaacttgcgtcataaataaccaattcattatgtctttcaggtaataagactaataaaaatatcacctgagaaacctataacattggctgttggtgatggtgctaatgacgtaagcatgatacaagaagcccatgttggcataggtgattgattcttcctgaaaagtttttcctgaacttttaaagttggtggtattatttggtggtttttaattttctttttgtagattaaagtacagtatcaaatttgtgaatgaaaattgcaacatggtaataatatagcacagtgtgccccatcagaaacttactataattaggccgggcgtggtggctcacgcctgtaatcccagcactttggggggttgaggcaggcagatcacgaggtcagaagttcgagaccaacctgaccaacgtggtgaaaccccgtctctactaaaaatacaaaaattagccaggcgtggtggcacgtgcctgtaatcccagctactcaggaggctgaggcaggagaattgcttgaacccgggaggcagaggttgcagtgagccgaggctgaggcaggagaattgcttgaacccaggaggcagaggttgcagtgagccgaggctgaggcaggagaattgcttgaacccgggagacagaggttgcagtgagccacgatcgcgccactgcact

SEQ ID NO: 109681 - DNA, 2053 bp, Homo sapiens
attttaaattcatattttccttttaaaaagtgcactttgacttattcatggaagtgttaagcaaacaaatgactcattttgctaaactcaaatgactcaatttgaatattttttatattcagtgaaaatagtgaagttaagtattttatagcattctgtccatcagaagtctgttacccagtacttgtgcttattagtgtaataattgatgttcctgctaaatccttaactttcaatattattttttatattgtattttatctttttatattctaattctttggaaattggtgttatgtgtctgataaatatcgtagccttatattaattacatatttaagtagaacaaccttttggacatctgctatctgctgtatattaggatttaatgttcctaagtgcatgttcaactattataaataattaagatatttgcagatttatcatgaaaattacagttatcagtgaacatgtcttttgtcccttttattataggaatcatgggtaaagaaggaagacaggctgcaagaaacagtgactatgcaatagccagatttaagttcctctccaaattgctttttgttcatggtcatttttattatattagaatagctacccttgtacagtattttttttataaggtgagtttcatgtatttagaatcaattattgatatagtaatatgaagtttcaatttaaggaatgttataaccttatacatttctctttaaaatagtttcaataagtaaaaataacagtattttgtcataaatctattctatactgacagaaagcaaatcagtggttgcctggggcccaggggttccatgcaaattagaacatagtacatttgatatctttaaagttattttgtcctgaaccagcaataagttttaacaccaatataatggttttaagtagagttcttagcctttttatgccatgaatgaccttttagtagtctagtgaaatgtgtgagctcctcaatatggagcttttatatgcataaaatgaaatacatagggttacaaagaaacaaattatgttgaaatattgtcctatctttgggtcctttggtacaaggtgggagtttgcagaacccacattaagagcccctgttaccaatacatttaataacaccagagtgtactatgttgcatatatttctataattgataactacaatccagtgatagaacacaagtagattgcatattgctataagatgatggcagtttttttctaacttatttttctagcttttacttgtaatatgagtatattgagatggaaagaagtttcgatagtttgatttattgtgtgttttaaacatttttgtgttgtaaagatatagccctaaagtttgagtaaatcttacttattgtactatatatgaaaagtattgagtaatagtttgaaggttgtaaattcaaaattatagtgttgcttggcagtgagaggagtcaagggttttttcattctgatgtctgcactgttgcttagaatgtttttagacattttttgataaaatgggaatcctgcattcctgttatatatggacaagtccttatcctttacttaccataccaactgagattgtttttggacactttaacagccattttttttattttttattttgtctttgaaacctaaatattttaattattttccatttaatcttgtttttcagaatgtgtgctttatcacaccccagtttttatatcagttctactgtttgttttctcagcaagtaagtaaatagaaacttgtgttttgtgttttgtccttttagagtaacgtatgtatgttcagattttgatagacgtttgaagggacttttttcatttttcttagtcctgcagggaaccagacagaacttttctgtttagtatatttaaccagcatgacattcagaatatttatttattctggttttcagtttgaggtgagtgttaataccaaaatgtaattctggatgcttttaaaaatagataataacccttaacagcttatgagagaattttgataacttatttgtgatatttctgta

SEQ ID NO: 109682 - DNA, 2131 bp, Homo sapiens
tctaaacccatctttgggttccagtctgataatgatatctaaaagatcattgtctataataataacacatgtaaataatgctttatgctgttcttctcatacttttaactttatgagtatagtcaccagtttcaaatgtacctgacttaaataattcaagggatttttagtagagaattaaatgactttttacctgacatttaacattatgttaacacgtaatgtaatagtgtattctttctgtttagatgtttggaaactggacatttggcactttggtcttcacagtcatggttattacagtcacagtaaaggtatggtactgaaattagaaatgtggacacattttgcaactgtttacatagttagttaactttcttcatttctttagccatagatactttccctttttccattttcaataacgattaatttcactggttactattttaatagttaaatttttgtcaaaaaattatttttaaagtttattattttgggaagcctcagctgatatttatgatcacatttttaaaaatctctaaaaattttgcttctctgtgtatagtgcaagacagcgtaatttgttttaggccatggagttgaaaatagagtaatcacatgaaatttgaatgctgtttcctcaaagaagaaaaacattataaacttgaaattatttcattttatactaggaccttttcattcatatttatctctgagggattttgagggattgtatctgtcttctgagagacttttagatacttatgtttattcttgagtttcatctgaaaggttaaggtaaagctttatttgtttatatttctaaggatataaaaacttttttttagatggctctggaaactcatttttggacttggatcaaccatctcgttacctggggatctattatattttattttgtattttccttgttttatggagggattctctggtgagtgaatatattgtattttaattggattgcttcaactataataaacatttattgtgataggttacattatgaacatattctgctcataacagatttcagactcctggtaagtttacttcttcagttgatcttactgatatggagaggaaaaaactaacatttattgaatatctacaatttttctagattttttttatataagatattgattcatcataataatgatccctgtttttttctgtgtagaaactgagcctcaggatcacaaagacaaaaaagtaccaaagccaagatttaaaccccaattgtcttatttcacaattttctttacactagttatattatgtattaatgtattatgtgttaatatatacaataaagtaagtcacatagaaccattaaatattaatcattaacttttctcacaaaagtaagtagtatgcatcatcttcattgatagaatcagatattcaactggctactcagatagattaaaaattaatgtttctcctaagattctttggtaagtgatggacaactgagggctctcttttggagaatttatattacatttgcctgctatgtctttgatccatttatcagacaaaaaaaagcttctgaaggtaggccaaaaaaatttggattagctaaatattaacttctatttaggatcataaaaggatactcttatgaatatttctatatttcaccatattcttttgaggtagtatatacaaaaacccaaaaagaatatctttataacacttactactatgtaaaactagtattcgtgagtacattaattttaaaatatgtttttgaagaagagcctctgaataaagctttcattctaagatttggataatcggccttctaaaatattttattacacactttttcttgctttacttggtcccttaagtctgtattactacattattcttctgatccactaccactaagatagggttatctggtcaactgcttgccattttcctaataaaaactatagttgttttatttttaacaattaaagcttatcttgttttgttagttcagttaattaaattatactgatttcagttttgaacattttcttggagtacttgttactttcaactgtagtgtctttatatgatgtcctgatttaagtctttcagtttccacttttat

SEQ ID NO: 109683 - DNA, 1032 bp, Homo sapiens
gtgtgtccatcccttttctgtccacttatagatgtactccaacacagttgctttaagtgacgagttcatcgcactgcagccattgtcgagggcaaggaatcagctgagcaaacttaggtagagtaggaggagtagagcctcattaactcttctgcatgctaaaggtcaattaaacaatatcaaaagatgggcagaggcataaataaagagcggggcatttttgttagcatggccctgtctctgaataatttgacctttattaacatatacgttaaaacctaaaaaaaaaaatccatttcttctttgagaagaaaattcagataaaaattcaacgtgatcacagaacagagatctataccttgttaatatatctttacaccttaactaccttttctagtacaattctaatgcttctgcttgtcatgttattcatatttatgaatgctcctgcatgttgagtaattaaagctacatatttggaagtgagagttgcccattttttttatcttgccttaatctgtattgtaaatacatgtgcatatttatgtttgtgtattgtaatggctgctgaagcatttcatatcctggctactatttagtgcatctataaatcgaacaatgtgtgtgtatgtcttatctttatctccacagacagattcattctgtcagtttgtacaaaaaataatagtttagggatgccttttgataaaaagggatgaaagcttaaattctagaactgtttatattaagatactataactatgtattaagtatggtttgaaggggaaaagtaatataagttattatttttctttttagaaattgacacttttccatttcttgccctattggtttcttacagattcttaatcacgtattttttaaattattttttattctcaaggtttctaatctttctctatgttcatttgaattttaaattctgttttattctcaaggtttctaatctttctgtgttcatctgatcaaatgaatggcttttacgaagcaccacttaaatagccttttata

SEQ ID NO: 109684 - DNA, 1166 bp, Homo sapiens
attgttttttattcattaaggacattgtcttataataagatttaaaataaagatggctatggaaacattttaaacttccttagaagatctctaatacaaatacagaaaaagaactgaaatttatataaattattgaccctcattaaaaatctgtttcaaattaaggattaaatttcttttgttaacaaatagatcaggtgaagccctttgcacacatgctcaacatttctaaggccatgaagtccagttagagtagagaagtcttctgagaagggaagcaggaaaggtgagaaattggacataccttttcaataagaaccctaaatcttggtggcaaatgaatttaatagaagaaactgaattttattgaaagaaatttggttttaacttagctgtaatatatgtttagttagagcttcgtgcactgaaaaatcatggctttattttgtgtgcttgtgttccccttaagaagttcccattagccctcttttgtgacagtaaatgtactgttctttgaacattcttttgtgcctcagattgtgaatgccaacttgttgctttgatcttaaacctctatatggtgaagagtatcattctgtaatatgagacttgttgcttttctgtccttccagatggaagaagataagggttcagtcagctcagcatatgaatttgctgaaagccagcacagaggggaggacagtaggcacctgctagctgaggcttgcagccagcaggacagttgttgcgtgcactaggtagtactgcgctggaccttcccgggcactcatccgctaagttctcatgcttggggggcatgtcatgggacacctgacctgacatttccatttctttactaattccttcactgttcctcatatgttgttttagtttcgttgttttccttttttgtggtctttacatttttcatatgtccatccctgaaaattttgtcaatctctctttagagttccaaagataaatcagacttcacctcacattctaagctgtgaagatattctcacaacctattgtcttacattcaagaaaatactcctttttacttctccttttgaaaatgtcatgctatttctgttatctctgaaatcattttcccccttgaagttgtagttgtgtatcatttacccatcttaatatagttggat

SEQ ID NO: 109685 - DNA, 1139 bp, Homo sapiens
gagtggatctatgtagagtgcttagaacctggcacatagtaaagcatacgtaaagtgtttgctgccattgttgttgttactgaacattggggtgaggtcctgcctgattgttatttcccagtcttaaagataattcatactccacttatctcaattgttggacattgttcattgaaattgcaggctagacatttttaattgaaattgcaggagcatttcacctaaagaaaaactccatgcagaattggaattcattacattcctgagtggttgatggaaatcattttgaccataataaatgattaaaatgaaacattaaaagtagatttacataatatccagcttcttaatttatataattattttactagacctctaatttaggatacaaggctttaaaataattttggatggttatactctagtaaattaaagcctttcatatgtttcccatattatagaaaaacatgtaggtttatatatgttacctttgatttgaaagtgcttgttgtaatgttctaatgcttttcagaagtccatatctttaaacaactgatgttttctgcttcacctcccgcagcttactgaaacaaatgcaggtatcaagtgcttggactccatgtgctgtttcccggaaggagaagcagcgtgtgcatctgttggaagaatgctggaacgagttataggaagatgtagtccaacccacatcagcaggtgtgaaatctctctaagtagcctttgctgcagatgagtatcctatctggaacaggatgaacctgccgctctagatacctaataaatcagcagctggttttaccaactgaagcaggaagtctgctatttattagcactctttggtggtagatttcactttgtggctttggggtaagggctttttcactcacaaaggaagagaaagcacctttgaagagacttcatctaatgaacaaaaaattttgtttcataatctttctaaaatgtgctcagtaggagtgtgtttatggtactcttttatggtttgtataactttcttttttaaattatacatatactatttcctttttatttttttaaaatttttttgctttttgtctttacaaaataatctcaacataacagtgaagtcaaaggctttcctt

SEQ ID NO: 109686 - DNA, 1699 bp, Homo sapiens
tcctggtgagccaaacttttctcttattgttactttagatcatggagtgcatcggatcctttctataccaacgacaggagcatcttgactctctccacaatggactcatctacttgttaaaggggcagtagtactttgtgggagccagttcacctcctttcctaaaattcagtgtgatcaccctgttaatggccacactagctctgaaattaatttccaaaatctttgtagtagttcatacccactcagagttataatggcaaacaaacagaaagcattagtacaagcccctcccaacacccttaatttgaatctgaacatgttaaaatttgagaataaagagacatttttcatctctttgtctggtttgtcccttgtgcttatgggactcctaatggcatttcagtctgttgctgaggccattatattttaatataaatgtagaaaaaagagagaaatcttagtaaagagtattttttagtattagcttgattattgactcttctatttaaatctgcttctgtaaattatgctgaaagtttgccttgagaactctatttttttattagagttatatttaaagcttttcatgggaaaagttaatgtgaatactgaggaattttggtccctcagtgacctgtgttgttaattcattaatgcattctgagttcacagagcaaattaggagaatcatttccaaccattatttactgcagtatggggagtaaatttataccaattcctctaactgtactgtaacacagcctgtaaagttagccatataaatgcaagggtatatcatatatacaaatcaggaatcaggtccgttcaccgaacttcaaattgatgtttactaatatttttgtgacagagtataaagaccctatagtgggtaaattagatactattagcatattattaatttaatgtctttatcattggatcttttgcatgctttaatctggttaacatatttaaatttgctttttttctctttacctgaaggctctgtgtatagtatttcatgacatcgttgtacagtttaactatatcaataaaaagtttggacagtatttaaatattgcaaatatgtttaattatacaaatcagaatagtatgggtaattaaatgaatacaaaaagaagagcctctttctgcagccgacttagacatgctcttccctttctataagctagattttagaataaagggtttcagttaataatcttattttcaggttatgtcatctaacttatagcaaactaccacaatacagtgagttctgccagtgtcccagtacaaggcatatttcaggtgtggctgtggaatgtaaaaatgctcaacttgtatcaggtaatgttagcaataaattaaatgctaagaatgattaatcgggtacatgttactgtaattaactcattgcacttcaaaacctaacttccatcctgaatttatcaagtagttcagtattgtcatttgtttttgttttattgaaaagtaatgttgtcttaagatttagaagtgattattagcttgagaactattacccagctctaagcaaataatgattgtatacatattaagataatggttaaatgcggttttaccaagttttcccttgaaaatgtaattcctttatggagatttattgtgcagccctaagcttccttcccatttcatgaatataaggcttctagaa

SEQ ID NO: 109687 - DNA, 1123 bp, Homo sapiens
ggttcatccatgttgcagcttatacctgcgtgtagttcctttagttgctgacttagtgttcactgtttggatataccacattttgtttatccattcaccagttgatagacatttggctggcctacaattagtttttttaaattgcgaataataatgctatgaacattcataaatgtctttgtgtggacatgttttcatctcagattcctagttgtggaattgtcaggttgtgtggtaaatttatacctaacgtttttaaaaaaactgctgaactttttccaaagtggctgtacttctagaactattcctgccacagtgcatgcggactgccgtgtctgcacatccttgccaatacttgtcttttttattgcagccatcctggcgggtatttactttatgtgtgtgagttatacctaggcatcccaactcgtgtatcgattggatgtgcagtttgagtgagtttcaagtggcctcagcgattgctgtaaaattagttactctagtagacatgtactctcttggaggtagtattttctgtagtcagtgagggtaataataatacttccagtgggggttccagtccctcagtgatctctggtgagaagaaatgtgtcagcgaagagtggtgctgatggctggtgctttggctctgttattgtttgtaccaaggttgatacagctactcgactagcctatgactgactggtggtggtaattaaactttgtacagattactgtgtgcagatagttactgtcttaatattaagtttcccagagattttacttttgagatagctgagaattaacgactcttggaatttataaaaatttagttgataccatttagttgctgccagctgcctgtgttcttatacataggagacatcggagtgagtgctttttaaaaaattaatggcgtatgtcaggtatatgtaaaaggacaattgcataatgaactcatgttaacatgatcaatccatggccaatcttgatttatctaaatgccattcatctttgaacccctatttattttgaagcaaatcccagatagcaaatcatttcatttgtaaatatttcaatatgtatgtctaaaagataaggactgttaaataaaaccacaatt

SEQ ID NO: 109688 - DNA, 2150 bp, Homo sapiens
atgcaaaaccttttcaacaaaatagtgtttgtcatcaggttggtactaaacatttataattactgtgtaattataaacaaaaatacataaagctttgaatataattatgtagcataaaagttaaggttgttcactatgatggcatcttagaattaaacaaaacttttactagggctgaaaagagaagactgatttaatgtggtgtgattattctgaagataaatgtctggctacagggaatattttgtactaaaaaatgattacacatatggctgtgtgtgtttgagtctgtgtctgtgagagagccagagagagtgagagagattgacagagaaagggagagacacacacacgccccttgaattgctttaactcctaagtgtttcagtcctcattccggtaaactccccatgctgattctttgttttaaactgaaccataggtacagtttcctttttgccaaatgtcaaaacaggtacaaattttaaaatgtaatgctttttaaatagaaaaatgtataaaattagaagtgcccacatataaaaaatacttgagatgaagattatctttagtgaatatcatctgcatatctctgtaagttcaattgtgtttcttacagtccctgtcatattaccaacagaggcaataaaagctgcagtgaaattgccatgactaaatcttttcacatatttcagtgtattttttttatagatttaaaatatacctgaaaacttttctaggaagaataattattcatggaaagagcattgtaatggcatgttttggggagaaaagacatgccaagtcttgtttactacatttaagatgtttacaactatactgggctgctttattaacaatactgtacttgcataatatggcattataagtacatgtccttccttagacttttaaaaagttttaatgagagaaagtaaatttactcaacaaaataacatgagaaatcctttacgtaatatctttactggggaattcttatttaagcaaggtacactattttttcctcagacttaaatgaatgaagtgttcatttattttttatttgatgataatcaagaagtgagtagtagtagctaacttaatgtacactttgcttaggtttttaaacatgttactattaagactacgtattgtaaaccttctgtaattttcacatatgaatgacaggagaaagttaaacctaatcgaaggagttttggaataaaaaagtggtgctggggaaattcaccatggttcacaaagtatgcctttgtaaaactgaatcaacttttagcaagaattaatttatgtagttttaaatgttaaattgtgtatatttaacagaaaatacttatctggcacctcagcagttttaatgttaccttatacttttaacagtatgatttatattgaatacttagatgttttcataagattttatcaaatttgataatgtaatgataaaatgtttttttaaatgtgaactatttaacatataaatggggacacaaaacctgaattgtgatttctacataatgtgataattagggttcaaattatgactcatcatttaattgattataaatgagtatatttctgaactctttattgcctccatttttacaatcataatatagcaataatttctatttttatttcataggactgtggtgaagttatttatcatgacacctttatctttgatttctgagggaaaggggtgtatattttgtagttaagataaatgagaaagttcctaatagtacaaatgcccttttccaggtttatctttgctatttgttgccatttttcttaaatatttgctttatttgtacccgatttctggaggcaaatagtgctgttttttcaaactcataatatagttacataaatgattttatcagagcattcttgctatcttattttctttcctacctgttgagtaagtagcatttcttgctcaccaactcatttatttgactaggttcagtgtttcctattaatgtgtttttttattttcctttggttgattttgaaaaatctgtcacaaataaggaagttatggtaaaagatgcacagcctttgtagttagtggaattctcaataagtaatgtctttatggagttttaaagggaaattatttaaaggga

SEQ ID NO: 109689 - DNA, 2051 bp, Homo sapiens
gtttgtttgtttgtttgttttgagagggagtctcgctctgtcccccaggctggagtgcagtggcgcgatctcactgcaagctccgcctcccgggttcacaccattctcctgcctcaggctgccagttttgaccaaattacttccattggctgactgcagtggccttgagaaaatcatattattgatgagttgccagacaagttacttttatcactcaaggaacaaccaaatgttggagtaataaatcacaaggaatacaaggaatatttggggtaaaaactccaaaaagtttgagttttgaaagacttaatcagtgggaatagataagaatgatatactttaacgcttatgaggaagtcttaaaaaaaggattctactaaaatgttagccttatttctgcttttttcccccttctctttctttcatattttttcttttttccaggagcatggcctgttcttattgatgactttgtggaatttgcacgccctcaaattgctgggacaaaaagtacaacagtgtagcactaaaggaaccttctagaatgtacatagtctgtacaataaatacaacagaaaattgcacagtcaatttctgctggctggactgaactgaagatcaatcctcacaattcagactgagggttgagacaaaactttaaggatacatcttggaccatatcgtatttcattcttctaatggtggtttgggcttgtcttctagtctgggccgctctaaacatttataattccaacattgtggatttcatcttatatctgtggaccatcctagtttattctcccataagtcttagaagctttatggtgattattttgaggttttcattctcgcataaagcacaatgctgtcttcatcagaaaacagttggcataagaattaaacatatgaacatcacaaaacaatttataaaaacttcttaaatatacgctttgggctagttgcaaagactatgctaatagcacttccagtgagagtgatatatttaagtgtactggatctggaatggtgttttggtttggggggaattttttttttttcctggcaaatcacatgtgttgttgatgtgagtatctgatgaaaaaacaatgtcagaataaccgacatgaaaattttttaggataacttggtgcctacctgaaaaatgtattgtgttttagactcttgatttcaaaaggttccacagaactagtctgcgcttaccttacccatgtttatatatagctgtcctacagggagcttttatttagaaaatgtctgcataatgttagattcttctcctgtctacattatgcactacataattggacttcattatgcttttgaaatgcttatctgcctgtcacataagttaaactatttaatttgttttgaatgttttggattgctacacaatacaatattctaaatttaggcatgagggtttttttgttttgtttttactttttttttgtcatcgcactatggaacacaaatggaattctcttaatttataagaagatagttgcagttaaattttgaaaatggttgtaatgagccatgaagttcaatctttataatataggtactgctctttcagacaaatagtccattttcgatgacttattattttgttgaaattgctttaactgctaatcactgtggttgccaaatatttacttcaggagcaaagattttcaaacaagcatacacgatgcaaaataccaatctggcttctagtctctttactgttttcgtttcactcagattagctcagttttctcatcaaagcagaatgctatcttgtatgtatttttttcattacaagccccatgagctgcttttatgctgaaaatggtcatttccctgttcacttactgacatgtgaagaagggtttcttgctttcttaaacatttccgtaaggcaggctagaaatgtaatacttcaaatgtttgatgattatggtcttttgataggaatagattctgcttgggatatatatccaggcactctctaaggtctagggttgatattaacaaaggaatgtacttag

SEQ ID NO: 109690 - DNA, 1040 bp, Homo sapiens
ttacaggtgcctgctaccacgcccagctaatttttttgtatttttagtagagacagggttttgctatgttggccaggctggttttgaactcctgacctcaagtgatctgcctgcctcggcctcccaaagtgctaggattacaggcgagagtcactgctcccagcctactctttgttccttgttttttttttttttgagacggagttttgcttttcttgcccagactggagtggagtggtgtgatcttggctcagtgcaacctccgccttccggtttcaagcgattctctagtctcagcctcccgagtagctgggattacaggtgcccgccactatgcccagctaatttttgtgtttttagtagcgatggggtttcaccatgttggccaggctggtcttgaactccttaccttgtgatctgcccgactcaacctcccaaagtgctgggattacaggtgtgagccaccccgcctggctctttgttgcttttaaaaattggggcagcacttgcctcaatttttgtctttcctaatcactcatgatttctcaattataaagaatggtttcgagatgtcatctatcaataaaaggacttttaagttacttaggatgtaatttttcttgtgctggagaagtaaattcactcataaaaactaaacactttcttaactgctatggttccttgaaagagatcatagttctctgtcatgtgataagtgtagttctctgtcatgtgataagtgtagttctctgttgtgtggtaagcgtagttctctgttgtgtgataagtgtagttctctgtcgtgtgataagtgtagttctctgtcgtgtggtaagtgtagctctttcttatgcggcattattgccttctctacccttctctggtccatgcccagttaaaaagtcatttatattgtctttggcaaactttaagaaattcttggtttcttattaattttaagttttagatcagtatttttaatgatctctttgtggtcaggatcagtcagtaaataatttagagcataaggttacttagga

SEQ ID NO: 109691 - DNA, 1535 bp, Homo sapiens
gatctggaaggtgttacaaagaatgtagaaggaaaatgaaagcaaaaaacgattagaaggaaaaaaattgaattgatttgtttgtggaatctataagaaatagggtatttctaccataaggctctatgaggaaagtaaggcttggtacttagagcttttcaaactcttcgaaagttgaatgttttgcacatacagaaaaagcttaatattaatttgagatgattcagttggaggtggtaggaggttcacctgtttactcctgtactgtgtatataacaagaagcaagttttcagaaggaatgtttcctcataagcaagagaccatacttttagttaatttagatagtagacgcgattaattactgtgtcagtagtgtctaatacagtttaaaatgattgttatgctgattactatacattcttatttatccactgaagctgacttctactagtgaaagtgttgatagtctagtgaattatgtaattaaaacgaatagcctgtttcttttaaaagtaattatttagaacatttaatcactctagacctcttcttcccgcagctaacccccatgcgtgtttatatttatgtaatataaaaagactgaattcgaactatttgatttttaaaaaagtagttctaggaaataaatgtaagccctcatgggaataagtaagttattaatttatagtgaaacagttaatcttttataaacttaattttacgacgcagatgtgacagcatagaaaaactaaaggcccagatacccaagatggaacaagaattgaaagaaccaggacgatttaaggatttttaccagtttacttttaattttgcaaagaatccaggacaaaaaggattaggtaagaatttttaaaaattatatttggtgtttcagatatattcaaatacattgacagtgtcgtttttgtaatagaaagttatgtgttttgagcataaagtcatgaaaataccagttattgaaaagtaattagaaacaggaaatttttaatcagaaaataccatgcacattgagtaagtttaccctgggtactatatgtgaaccactgacttttgctttatgaaaactacagtcaatatagaagatagttgttaaaattccactgacagttatttatttatgcattcatccattcattcattttttcattcatgaccctgaagatattttaggatcttaggatctatagaaatagcactataagatttctgagtcatagaatgccagataaatttattcttttttgttatgatttatttgaaaactataaggatgaaaaatgaagtgcttatcattcatagtcttattatccagaaataaccactgtaaaagtttagatcaatccatttgtatttgtacatttgcttttgggatagttaaggggatatgagagtaaaagatacagtgtaatttgcaaattacctaaaaagattagatagtgctagtaggtaattacaaaataataaaagtatgtaagggttttagagggagaaatgagtaaaagcaggagtggtt

SEQ ID NO: 109692 - DNA, 1667 bp, Homo sapiens
actgcactccagcctgggtgacagagtgagactccgtctcaaaaaaaaaaaaaaaaaaaaaaagaaaggtgttagtaaatcatatttgatagcagtctatgagtgcctctttctctttgtttttgttatttaaaatttttgcctctctgataagtatagatttttttctttaaacaagagatatttacattgttgagattagggttgaattgcatagtttaggtcacagtttttctgatactcttaagaagtaattgttgtggtaaaatgaactttgttctaagaaaaaaagaatttctgttcagaatgcctacctaagcaaaatatggatatcttgaattagaatcccatgtccctatatacgaatgtctgattttctgaatgtgtataagtatgggacatatttcacatgaataaatgagactttaaaaaatcatgtctcatctgcatatatctctacactttaagaatgctgttagtaaggagaatggctttaaataatgggaaagtgtatgttagagtaatatcgtttcatgccttccatatattgtggtcatttaaaaaatggcatataaagcattacctttttcagttttcataatgtagcataatatgacactactttaatattgcattgttatttttaaagaccctcaagatgagaataaaattggaatagatggcatacagcagttctgtgatgacctggcactcgatccagccagcattagtgtgttgattattgcgtggaagttcagagcagcaacacagtgcgagttctccaaacaggagttcatggatggcatgacagaattagggtgagtatataattacaataggaaattagatatgttactgtggaactgaattatgtcatgaactttttagtgtaaatttaaagatttgctggcccacaaacattggtataaatagaaatgggttaacttgctagtttccatgttatacagttttttgggtttgtcaagttatttatatagttagtacagcctattctatttggctatattcttatcatttacttctaaggcaggttcattagtattaaaattatgcattaatatttactatggaaaagtgaaatgaccaagttttaaagttatttcctaatgtgagactttgaaccctgcatttataaaatcctagaatttaaaaactggaagatgccttagaagttactacttgtttcacttaacactttgacagctgattagctgaatgtctttggataaattgattgaaaagtcatgggtagaggttttacctgtgacctctagttgtccatatttaatgaggttgcagacagaagtaatcagtctgttggtaggtaacaagctgccctttctgttttttagtgggccactattgaatagtaatagctaacatttattgaacattattttatttcagttaactgtgctaagtacttctcctacctcttcacagcaactttttgagaatagttttctatccccattttagagatgaagaaattgaggtacagagaaattatagaattaggtagtattagagtcatgattcgagtctgagtgacattgcagtcagtcagcgtccagtcaagatacaaaaaccacaccaggggctaggcgcggtggctcatgcctgtagttccagcactttgggaggcc

SEQ ID NO: 109693 - DNA, 1040 bp, Homo sapiens
cagtaaacacctgttaatctcatggttccccaggggcatttgctgactgggcagatcatgtcatcttcttccctgcgtctgatcatgtcaccttcttccccgtgtctgcttgtgcatccatctcagagcactgtgcttggtcggggtttggagggtagcgcggcttcccttctgcagcctttctgtatgctctcaggacccactgtaggagaaacgctgggtggttgagcttccttcgcttctgtcctatttctcttccaaaactgtaccatattttctgtttcatattttttaaaagttagcctttctgatgaataatagatcaaaaataaatcttaagctaaaatgttttaatgttttgtgaggaaaaagtattactaagaatgtttagttagccatatagaaatatttagtcttatgtgattttacatagagtttcagtttattttctggtttcaatagaacaagttgaaatcatcgcagaaggataaagttcgtcagtttatgatcttcacacaatctagtgaaaaaacagcagtaagttgtctttctcaaaatgactggaagttagatgttgcaacagataattttttccaaaatcctgaactttatatacgagagagtgtaaaaggatcattggacaggaagaagttagaacagctgtacaatagatacaaaggtgagtgcttgcttgtgactttaagtaaattttggaccagattttccaaagagatgggcttatgagaaatgaaatactatatataacttaaattgggtggatgtgtccaatagaggtctgtagatcttagagttatttcaagaggtctgaggaaaaattattttcttttcactaaaatttcttcttggcctctttattttcctcccccattgtgcaagttgagaatggggatggggaactgttttttctgccctcatatgtataaaactcagctgaaccagtctaaggaaacctgcatactgaatctttaaagaattataaagtaatgcatacttttaaaaaagttcaactgcataatagg

SEQ ID NO: 109694 - DNA, 1068 bp, Homo sapiens
aaaattcatattaatgggtgatcaatgatgttaatgcctatgttttcaatggctttaaatatatatgaactttgaaatttaagattatgttgtcaacaaatactagaatttgtaaattcaaatacatgtaggtctattcaaggttgtcttttcataacttgttgcacattctttgcatgtctacaaataaaggaggttatcagttcttttcagtgattattatacgtctgctgtgtgctagagatagtgttaggcactgaagggatgtatatatcacagaagagacaaaaatcctcactctggtgaggggtaccttttagtagggagacataaataataaacatagtatatagttttcttctttactatgttagaaggtgttaagtgctgtgggagaaagcagtgttagggaaggggattgggggtgctagggcattgatggaagtagggttgctaaatatctgtatcaccaatgagataattttgaacagagtaggggatgagggaataagccatgcagaaatgtagaaatcttgaggaacagtgagaccaatgtggctggagcagtgtgtgtgtgtgtgtgtgtgtgtgtgtgtgtgtgtgtgtgtgtatgtatgtatatgtacatgtgtatatacagggggtcgttggagcagatgaggcctaggtggcaaggagtgggggtaggcatgggtggacactgtaaggatactgggcttttatcctagagaaatggaaatccattgaaggattctgagtggtacgatataccttgtttttttttgttccatagtgtcctgtgacagtattacagataattatttttaaaagcagttttttcagaagacccttattacagttttctttaccatgcagcttctatgtacagagttttgaattctgtttaagatgactgtctaatgttcaataaaaactaatggattatcaagtatacctagccacactagggttaataaaaacacaaccaaacctctttgatagattgttgaatatgttctagtggtttatatgtagttcagtgactatatgcagaaaactgggcctttg

SEQ ID NO: 109695 - DNA, 1506 bp, Homo sapiens
gtctggggttccgggtgagtagcctccccccgccccgaagccggggcttccctctccgcccggccggggagaaggaaagactttcccggcgcgcctctccctcctccgctcccggctccaataccccgcaagtctcccaggcagttttgcttggggcggggtatcagcccttttcctttctccatcacctctcgaggcgtcccatgcttttggagaaggagagtttccccggccagttggtggaggttatatttacctctctactgaaaacatgggagactgctgagcttgggggagggggtacggaagtgcaacctgttctcatttcataaaattagggaacacagactagcgagcgccctttcgagcacctattttatttgcttgggggtgggaggagtaattgctttattatagtagttaagggccatttgtgattttttttaaaacagtttgtcaagttactctccttttttgtttgggggggggaaaaagtcctctccaggcttgcagacccttgtggtcgagttgtttactttggtaattaagtacctgactctgctggacgctcttcgcgtttcagaagcgctgtttggcattgtacagtctgagcgtgagttgaattccgtgcaggttactgtatgaatagtaaaaatgatattgttgtcctttgctcgtggggaacataaaggcctctttgaggagggtgtgtgtgcgcgcctgtgttaagggaatgctccagtgtctttgtttttagttggtcttatttttgctgaatgacacttctagtcccatcctccagcttggcagtattttgttgtcatgtatggatatatggtttagtctgacacatatttaacacttatgttctgtggcaagttgtgtaggaatttacagtttgaattggtaagaaaactttaaagtgcaggttaatgtatagattagtattacagtgttcagagatccaccaggcagtctaaacagtttctagtttcttaagtatttagatggtcatagacattactcctgaagtttccagactcttagcatttagataagtatagtaagctcgaagtaatgacgttaattccctgggaaacactcagccacagctgaaatgtgtgctcttcaggatggtctccagatccgcatcatcccctagacagtggggtcccggaaatactcatcacctgttcaggaattcaggcatcaagtggttcgtagggagagttcagcttgtaagcttctattcttttggttaatattaaaattagctagttttgaaacttagccataacccatgtaattctaccagtggtgacaagatattaatttaaaacatatcctgtggctgaactcagtttatgtcatgagaattgtcgtgatattctctggtttagctaactcaccgtaggggctgggcacggtggctcatgcctgtaatcccagcaccctgggtcaccgaagcaggaggattgcttgagagcctaggagtttgagaccagc

SEQ ID NO: 109696 - DNA, 1635 bp, Homo sapiens
agtctgcctacttgggtatgagggttataattcatattaatgcctctggtttgagattatttcttgtccctgttagctggtaaagtagattgccaatttgttctaatctgctcatggaactacattcacaattttaaaatgtgttttcgtgaatctttaaacaaaactgttttcaatctaacctttatgtcctaagagttccacaaacattcaaatggctgttttagtaggttacaaagcatagtaaaatgtcatatttaacttaggatagatgagaaccaatgtgtaaatattgcagtgtgacctatttcaccttagtgtacgtaatatatttgaaaagaatagccatgtgacttctacactagcattgtgggaattgaaatgaagactagagagagaagatgtaaatggattttttacctcagggaaattttaaaacaggttccatgtccttttatcagcttccttgaaacattgtgaactttgttctttggcatatggtctctgagagtgagaaaattatggccaatctccagctaatttatgttcttaaatcataactgaaacccatgattgggcctacgtgttgataagataaaagaatatcatctaattatgtgattctggcatttttttggtgactgactttggcacaggaaaactaaatttgacttcaaatactcagaaataagtttatattacaaacatgtaatatatgcaaatgaattttaataattttgcataacttggtttgtatttttgtttcatatttttaatgctatctttatatgtttacgtgaacctttatctatagcattatggtgctatggataagttatataacttttttttcccttttaattatcttcctgtcatttctatgtaaagtatcttggttaggaataggggaaaagttccatgactttttaaaaaatatatgttatatatgtttaagacacattttatgttttaaaactaccaatagtgaagaattgattctgatcttattaattctgtagtgttgttcatttattttaaaaatcttatttttcatttttttcagattgaagataaaactttccaagtccttggtaatctttacagcgagggagactgcacttacctgaaatgttctgttaatggagttgctagtaaagcgaagctgattatcctggaaaacactatttacctattttccaaggtaatgtctcttctttataatatccctcctggggcatgggagaaaactgtttgaccagagacattccactgaaagagattagaaagatccagcttcctgtgaccactgctgtgacctttttccctcagtttcccccaccattctgtgtttctttgccaaattcctgccctctgtagtttcccattcacttctctcgttcacacagatgctcattgatagacacatacccattttcttcctgaattctgaaacaaatccttccattttctttgtcagagcatatctccctgctcagtgggtggtggtatctcagggctttgatgtctgaacacttttccccacccaccatccccctgacaactggaatcctggtgattttggaggaggtgaccactgagagaggagtctgtggaccagttgttccttgtggggaa

SEQ ID NO: 109697 - DNA, 1073 bp, Homo sapiens
aactcctgacttcgtgatccccactcctctgcctcccaaagtgctgggattacaggcatgagccgccgcacctggcctgcatttttaaaattataatactgcagcctttttgttgagggaaaaatacgtaaaatattcgacaaccttaaaatatctaaaactcaagcctggatgtggtgactcatgtctgtaattctagcactttgggaggcccaggcagatggatcacttgagtccaggagttcaagaccagcctgggcaatatggtgaaacctcatctctacaaaaaaatcaaaaaattagccgggcgtggtggcacgcctgtagtcccagctacttgggaggctgaggtgaggggatcacctgaccccaggaggttaaggctgcagtgagctgtgattgcaccactgcagtccagccagggtgacagagtgataccctgtcttaaaaaataaatcaaaataaaaataaaacccctgaaattccattttaaaaaagaaaagtttgaaattcatctttattggtactagcttgacagatgcttttctaacaaaatactttatttccaagaagttcaaagttgttgattttcctttgaatagttggttgtctttaggttgagagtgagattctttatatctcggttattaaataaatgaatgtcttctaatttttcttcattttttccctttttccataaagatgtagccatagctgtaacgtataaccatgatgggtcttatagcatgcaggtaagccttactggttttgttctacagtgcagagctgaatctgaccgcttttatactgaatagggtctttcactctctggtttcccttaagcctttgactattatgactgtagttaagagaatatcttatgcttgtatttcagacccaatttggggaaattaccccctatacagtttctaactgattgtttactcagttgggctgtgattcctttaagaataaaaacttggcaaaaagtaaaagctcaaatcagacattcacaagcccctaaagtgtgtgcctgtatttacagcaaaagcagcagttttcacattttttgt

SEQ ID NO: 109698 - DNA, 1042 bp, Homo sapiens
acctcctcagattcagccaggcctgaggcagtggggcctgaggcagggtagagcagtaggaatggaaggaagagatgcataggatagggaagaatttggcagctttgtagtaactgtccctatttataaaataaaaatttttaaaaaggaaaaaaaaataagatgccagaagcatttatgagtctaaagcagaagaacttctagtgacctcagtgagaatgaccaactgttttaagtattcagggtttgcaagctattctctgctactagaggccatgtttcacagaacccagcagtggaaactgttgcatgtgaaaagcgaaggagtacgaggcatggatgttgcatgtggaaaacaaaggaggatgaggcaaggatgacaggtttcaagcctggatgacaaggagcatagggatgccagtcagggagctcacaggtctggagaagaaggtagagggagatgatttgtcggccccgccatgttcgtcttaagtcaccagtggagcatccagctggtaatgacaataatcggaggtcacctggagaaggaatgtcggggctggaaacagatttgagctggcagcatcaaaatgatcattgaagtatcagaagcagacaaattgattttgacctgtatattctaccccacaaaactttaggttttcgtctcctcggataatcaaccatttccatactcatgtaatctaggcatactctggagttattacaggtttggttccagaccactacaataaagtgagtcaaagtttttggtttcctcatgcatataaaagttatgtttatattatactttattgtgtgccaataacattatgtctaaataaaaacaatgtatataccttaattaagaaatgctttatggctaaaaaaaaatgctaatgattatctaagcctccagtgagatgtaatcttgttgctggcatagggtcttgcctcaatgttgatggctgtgattgatttatagtggcaattgctgaagattggggtgactgtagcagttttcataaaatgagataccaag

SEQ ID NO: 109699 - DNA, 1072 bp, Homo sapiens
attcaatacctgtttacagatattgttacttgttgccctagaatgtaagcagagactgtgaaggcagggacatcatatgttttgttcctcactatgtccccagtgcctggatcagagcctggcacttaagagatgctcaggaaatggctgttaaatgaatgaaggaatggatgagtgaatgaatgaacccaaagctcagatagctggttttacttttgatcccatttattggtgtatttgggttaattttataccttttaaaatttttgtatcggtatataaaatttggattttattgttggaaagaagctcttttgagggcatttaatcctatcctctccccagtatagcaatccagcttgctgtttgcagtcttcctattctgtggaagtgttctgagcagcaagtcttcgataccttgcaaatgaatttcatttatgtttcttaacatttattatgttcctaacctgagtcaagtaagtgcctcggtatttccagcatcctctttgtcatattaaaatgtaatttttagtgtcaagtccagatggatatagtaatagcggatggacatagtgatagtgagatggtttttttgtgttttttttcctgagaattgtcctgttgccacatggtaccttagtaggttttttatttttcctaagagttgttcacagtagaaaatacttagataaaaagagcagatggttttctgaacatattgttttccccactcagcaggaactgggggtttattctcttcctagattgttggactgcacaccaacattgacttcttactcaacctgtctggccacccagagtttgaagctgggaacgtgcacactgatttcatccctcaacaccacaaacagttgttgctcagtcggaaggctgcagccaaagagtctttatgccaggcagccctgggtctcatcctcaaggagaaagccatgaccgacactttcactcttcaggcacatggtatggaaggcttttctctttcctctgcttgtcaagttttgcaaatcatcattgaacatgcttttctttctgtatggcacactgacctctc

SEQ ID NO: 109700 - DNA, 1023 bp, Homo sapiens
aatagatattaacataaggtttagttgccaaacaatctttcaatgggttaccagcaaaagggctttaaaaagaaattcctaggagcccacaatcagggaaaaaaaagttttctttttctccatggggttagggtgagatgggatgtcatggtatgaggctcccaggatcttggtgctctgaggcagtaacatgtggtccacccttgttctcactgttacaagctgaaacggattcataatttgggcttaccatttgctcacaaccccaaatatacttttccgttgccaaatttcatgcagctctctatttttgactaagattcatatgctgctgcaaatgcgagatgttttcttcatgaaatgcaaagtgttaccattgaatgaagacagcggtaaaacttgatgtgatgcatcatggaagattttggtttgctactgattatacactattgaatatgaccattgttttttaccttttagggactgtggagtttattatggactcaaaacataatttctgtttcatggagatgaatacaaggctgcaagtggaacatcctgttactgagatgatcacaggaactgacttggtggagtggcagcttagagtgagaatattttttctattaaaaatcagccttggctgggtgcggtggctcaagcctgtagtcccagcactttggcaggccaaggcaggtggatcacctgaggtcaggagttcgagaccagcctggccaatgtggtgaaaccctgtctctaccaaaaatacaaaaattagccgggcgtggtgccgggtgcctgtagtccccggtactcaggaggctgaggcaggagaatcactgagcctgggaggcagaggttgcagtaagccgagatcgcgccactgcattccagcctgggtactccatcttaaaaaaaaaaaaaaaaagatcagtcttgatgggagggatgtgagggctgaaaaactacctaaatggtaccgtgttcactgtttgagtgatgggttcatcagaagcccaaatc

SEQ ID NO: 109701 - DNA, 1029 bp, Homo sapiens
aggtcaaaatatcagatcttacttaaaggaagtaaaaatggagaaatcctggtgattgtgcctaacagtttagcttaacgaatgtgatatttatcacccctaacaaatatattaacatacatgtttgcttttatataggcatgtagaagtccaggtgtttggtgatcaccatggcaatgctgtgtacttgtttgaaagagactgtagtgtgcagaggcgacatcagaagatcattgaggaggccccagcggtaaggaccttggaaagaaatttgtaagcttctccgtaatgtgaatcttactctgattttcacatcagaaatctgtgaatctggtgtctctcacccctcaaactcctgctggacaactgttgcctaatagcagtgtagtgaaaagacctcctgtggtattggggatgaggaggagattgatgttctgggggtagacacaacagggtcatgttccttctggataaaatatgggaaaatctactctgattcacctatctgatttacagcgaaaagctgtctagtgaggtttcaacgcacattttaaattgtaatgaatggccaggcgcggtggctcacgcctgtagtcccagccctttgggaggccgaggtgggtggatcacctgaggttgggagttcaagaccagcctgacccacatggagaaacccccatctctactaaaaatacaaaattagccgggcttggtggcgcatgcctataatcccagctacttgggtaggctgaggcaggagaattgcttgaacctgggaggcggaggttgcagtgagccgagatcacgccattgcactccagcctgggcaacaagagcaaaactcttgtctcaaacaaaaaaacagaaaattataatgaactagaattaattactggaatggaatgatctgattaattgaatctattttttgtggaaaagccttttttaattaccatttcagatgttctcaaaatatgtgagagattttcctgccttactggttatattatagagaagagagagtctctc

SEQ ID NO: 109702 - DNA, 1032 bp, Homo sapiens
agtttcttcatctttaaaattgagataacaatgatagtatctatttcattaggattattgtgaaaatttaagtcgatgttgagtctttagcacaggacctgaggcacagaaagtgcttattaaagattagttagtattggccgggtgtggtggctcacacctgtaatcccagcacttcgggaggccaaggcaggtggatcacctgaggtcaggagttcgagaccagcctggccaatgtggtgaaaccccgtctctactaaaaatacaaaaattagccaggcgtggtggcaggcacctgtaatttcagctactcaggaggctgaagcagtagaattgcttgaccctgggaggtagaggttgtagtgagccgagatcacaccattgcactccaacctgggggacgagagcaaaacactgtctcaaaaataaataaataagtaaataaataaatacataaaagagtagttattaatgatgataatttaacactattataatttgatccttggcataacaaagcatcttttaattttattttatgttgctttgtattttaagtttaaaaagctgagtaatttatgttaatgagtaccttgaatttaagagaaaagaagtgcactgtctaatattagttaaagtggtcattttgggctcagttatgctagttttaccaaaaaccttgaacttatcagtcgagtccttatcagccagttaagatcgtattctcattctcattctttgctctccagtaacatttctgtgtgattttcatggtgttttaaacaggaagaaacattaccaaggtcctcattgcaaacagaggagaaattgcctgcagggtgatgcgcacagccaaaaaactgggtgtacagactgtggcggtttatagtgaggctgacagaaattccatgcatgtagatatggtatgtgttaaaaattggaagccacgtcttacgtttattcgtttactgtgtcagtattttcgttctttatgatgacagttgatatttgctagtgttatcagggttgaag

SEQ ID NO: 109703 - DNA, 1046 bp, Homo sapiens
acctgttttaagctcaggtggtttaaagattttcactttagcttatttattttttcatccctgagagcactagagaattgtgtatcctgctgtccatccgcatttggcttcttccccagggttcttctcccagaaggtgacgagagcgaagaaaccccacgggatgcaggaagaaacagtgacaggcaaccaagagggggaggatggagaaaacccttgccttagtcagagcaggccccaggggacgcagaaacaaaggccacacccccacgagcacgtggccagactgcccaatcgtcgctactgaagccgggctctggtctttgattggtgttcgtggagacgccctcacattcttggatcagcccaaaggtaggctcaggctccgacggtggccggcgggggtcacgaggcttcgtagtggaggaacgggtttggcgtgtgggacgcagctgcctctgtactggggagtcacggagtggccgggctccagggacatggcggcggcctctgcggtgtcggtgctgctggtggcggcggagaggaaccggtggcatcgtctcccgagcctgctcctgccgccgaggtgggtggaggggccatggctcagtgggcagaggcgggagcgaggggtgcacggacccgcgtgagcggtgggaggtgcggcggaacccagggtcggtgtggggaggacggtaggaaaaccccaggcactttcggaggggttctgccggcagtcacggcgtcgggaggaagacatccccaccagcccttccctttctccccgcttccgcacatccacgcttcagcgcgcctttggcttctgtttttccatttctgaggactgggcccgccatcctccaggctcccctcgccgtcgctgcagctcgtagccgtttacatcgggctttcgcagcaccccttaggtgggagcgttgttataatccggttccggggaagcccaaagggatcaacgacttcctcaacgaaacacagctagtaagaaatggggccgggatgccctcaaagccatttttcagttcagc

SEQ ID NO: 109704 - DNA, 1093 bp, Homo sapiens
ggccgtgacgccgagagtgcggggcgcgcggctgggagcctcgcgcccccgcccgggcccgcccccatcccgcccgcatacagcccgcatcccgccggggaagcgagcccagtccagcgctgcccgtccagtcctcgcccaagatttaaagcccgcaagttttgttcttgagaccagcgactttagctccgatgcgggaaggaaagccgacctccgatttggacatttaaagagctgggcttgaacttcgtgagtttcgctctaaactgcccttgaaatgaagctggacttggaggtaaagtcactgggaagctggcctggggcggggtttccccctcttctcgtattttagaaacggacagcggcagtgcagccctagtttgctgtaagtttccttactttgttactgaggcccccagagctccacgcataagtggtgtgaccagaaaccttttaacaagacccgcctgagcctgcgttagagctcccgctcggaaagtaaaagaccatcctaatccgcggcgctgcggaaccggtgtcccgtgtgggaggaaccgcggcgttccctgggcgtagggcccgcgaggccagcacagtccgcctcttggcggagcgccctgggccggtggttccgcgcggagttagtctgtggtcagttacgtggtgaaaacacggctgtgccgcggccgcatctttccgcggccgaggcctctctgggtgggagtgttggcttcctttccggatcgctaaatggggaaagttctggccgctcggcgggatacgtctccaggccacggatggttcgttctccgtgccgcggccccgagctgggctccctgggtctccagcgcgggctcccggcattgggggctgcgggccggcccctccgccccgcccccgccccgccgcgcctcctcggccgagcggctcgcggtctccggcgcgggaggctccgagtctgcccactccgggccgagcgaggtctctggaggagaagagtggcgaggaggtgagggcacgccggccctcgcccggcgggtggcgccaggacttcaggtgggaacgcgcgcttgggccgggggcgcgtggctgg

SEQ ID NO: 109705 - DNA, 1001 bp, Homo sapiens
aaagtacatccatcagaattggatttgtgcgtctgtgcctttattttgggaaaccttgcctgttccctgtgggggatgggagaggaatgtgaaaagccgaagttgacccagaaaaggatgattgaaggtagttgtattaagtggtggcaccgaaatgattccaccctgaactttctgaaagggtgattagtgatcagcagcagacgttataactttctcaaaataaatttatggtagattttctatctggtcacaagtgaggaggtgaaagctgctttttggggccaactctttgcttttaaagcaagctaaacgcaataccagaaaggtttccattctgtacttaacctgcttgtccttctcactcttccttatcctcccgcacacgctctgagcattgactgagcactctgaggaggaggctgactcaggctgacccttcccggccctgcaaggctctaaggtagaaccagtgttatcacaggaaaggcccaagccaaagctcagagcagctgttcctgagaaagtgggagatgaggatgagtaggaggtagagatgcttataactgctctgcccagagaaaactcagaaggtgcagaagagttttcaaaataaagtgcaggccccatcaagtaaaaaatgaaacattgtatttcattaaaatggtgatcagttttctcttttcataaaagacattcaaatggtgagattgtaaaaaaaaaaaaaaagaaaaagaaaactttctaattctcaaaaatagaacagcttgaataataactcatgggttttgaaatgggtcatcttttaaaatgggtcactttggctagaatcattgcacttggtgactttcacattgtaaagggtccagttctttctgaggcccaattgcactagaatctgcatttcagaacacaggaggtatcaggaagaaactgggagaaattcagagggaaattgtctcttctcagagtaacaaaatgtcccctattcagggggaatt

SEQ ID NO: 109706 - DNA, 1117 bp, Homo sapiens
ctctgtatggggtataagaaggtgctggggcaatacagatgagatgagaagcatctttcagggaatgggttgatcccaattcaggcttcccagagaaggatgtctgtagacttcatattagcaagggaggaaggtagccaggccacaggactgctggtgtaaagaccagggcatatgaaatggcaagtgtgactgtgctttcagccaataatttggtattgtcaaatgatgggaccaaacagctggagaggcagatcctaaagggtcctgtgggccaggctggacttcatcttgtcactaactaatggagaggctctgaaggagttaaaagagctcagtttgtctcgtggttaaatccaagttttacaaaggtcacgctgactgtaaagtggaaggtgggctggccaggggatcatctagtctgggtgagaagtgatgataacatgaaggggtgaagagagatttagaagaagtgattcacaggattaaacatttaaataatggaagtggagaaaatggggggggcggttccagatttcaggcatagatgaaagaagtgcagttaggcacatgtaaagagaaacaggaacagcaggttttaggggagaagataacagaatgggtgagaaatgacacttgagtaccctagtgtgctaggtaatcatctgtctacttcccttcatttgtcatgtatattcccatttaatttgcataaagacttcgagttaaacggtcttaccccaatttgtcaaatttctgcgcatgatatggtacaagaaaccgtaagtggctaaggcggcattggtgttcaaattgcctgactacaaaggcagtgcttgttggctacattctgttgcttcccagtttagaacatgttacattgaggcgcctgctgcatttccaaataaaaaagtacagaaagaaggtggctgtataaatctggggctcacaaagtaattttgattactgagagtttgctttcaaggagcaaactgtgactccttgattatgaaccttaatttaaaaaaaaagaaaaaagaagtcttactcttattcctgccttgtctggggcaagccttaatggatttttactgctgtgaattttcttttcattgaa

SEQ ID NO: 109707 - DNA, 3888 bp, Homo sapiens
agacagtgtaaagcaattttttcccttttcctgtcctcctttaaaaaaaataaacagccgtatgcctctgctaagtactaactacctcatcaccttttgtgcagacagggcaggttacatttggttttaaggaattaggaatatgtttctttccagcaccttagtaacccacgcgattgtgattcttttctcttcttgactgtgataggtggcatggaatattcacatgggagagccgcatgaggccgcccaccacgcttcctgaaggatgcccgtgtggaagaattttgacgtgccagtgtcctcgttctacagggtgttccattcttccgcaatctcagaaaaatgggactaaaagaaactattttgtaaaataagaagacttccatttttaatgaccaacatgtattaagatggacacctactctacgaaacacgaagttctatggtctcgaagaagcccgtgcctgtttaaaactgatcctaactaaaaacagacttgagtggatatgagaatgttggttagtggcagaagagtcaaaaaatggcagttaattattcagttatttgctacttgttttttagcgagcctcatgtttttttgggaaccaatcgataatcacattgtgagccatatgaagtcatattcttacagatacctcataaatagctatgactttgtgaatgataccctgtctcttaagcacacctcagcggggcctcgctaccaatacttgattaaccacaaggaaaagtgtcaagctcaagacgtcctccttttactgtttgtaaaaactgctcctgaaaactatgatcgacgttccggaattagaaggacgtggggcaatgaaaattatgttcggtctcagctgaatgccaacatcaaaactctgtttgccttaggaactcctaatccactggagggagaagaactacaaagaaaactggcttgggaagatcaaaggtacaatgatataattcagcaagactttgttgattctttctacaatcttactctgaaattacttatgcagttcagttgggcaaatacctattgtccacatgccaaatttcttatgactgctgatgatgacatatttattcacatgccaaatctgattgagtaccttcaaagtttagaacaaattggtgttcaagacttttggattggtcgtgttcatcgtggtgcccctcccattagagataaaagcagcaaatactacgtgtcctatgaaatgtaccagtggccagcttaccctgactacacagccggagctgcctatgtaatctccggtgatgtagctgccaaagtctatgaggcatcacagacactaaattcaagtctttacatagacgatgtgttcatgggcctctgtgccaataaaatagggatagtaccgcaggaccatgtgtttttttctggagagggtaaaactccttatcatccctgcatctatgaaaaaatgatgacatctcatggacacttagaagatctccaggacctttggaagaatgctacagatcctaaagtaaaaaccatttccaaaggtttttttggtcaaatatactgcagattaatgaagataattctcctttgtaaaattagctatgtggacacatacccttgtagggctgcgtttatctaatagtacttgaatgttgtatgttttcactgtcactgagtcaaacctggatgaaaaaaacctttaaatgttcgtctataccctaagtaaaatgaggacgaaagacaaatattttgaaagcctagtccatcagaatgtttctttgattctagaagctgtttaatatcacttatctacttcattgcctaagttcatttcaaagaatttgtatttagaaaaggtttatattattagtgaaaacaaaactaaagggaagttcaagttctcatgtaatgccacatatatacttgaggtgtagagatgttattaagaagttttgatgttagaataattgcttttggaaaataccaaatgaacgtacagtacaacatttcaaggaaatgaatatattgttagaccaggtaagcaagtttatttttgttaaagagcacttggtggaggtagtaggggcagggaaaggtcagcataggagagaaagttcatgaatctggtaaaacagtctcttgttcttaagaggagatgtagaaaaatgtgtacaatgttattataaacagacaaatcacgtcttaccacatccatgtagctactggtgttagagtcattaaaatacctttttttgcatcttttttcaaagtttaatgtgaacttttagaaaagtgattaatgttgccctaatactttatatgtttttaatggatttttttttaagtattagaaaatgacacataacacgggcagctggttgctcatagggtccttctctagggagaaaccattgttaattcaaataagctgattttaatgacgttttcaactggtttttaaatattcaatattggtctgtgtttaagtttgttatttgaatgtaatttacatagaggaatataataatggagagacttcaaatggaaagacagaacattacaagcctaatgtctccataattttataaaatgaaatcttagtgtctaaatccttgtactgattactaaaattaacccactcctccccaacaaggtcttataaaccacagcactttgttccaagttcagagttttaaattgagagcattaaacatcaaagttataatatctaaaacaatttatttttcatcaataactgtcagaggtgatctttattttctaaatatttcaaacttgaaaacagagtaaaaaagtgatagaaaagttgccagtttggggttaaagcatttttaaagctgcatgttccttgtaatcaaagagatgtgtctgagatctaatagagtaagttacatttattttacaaagcaggataaaaatgtggctataatacacactacctcccttcactacagaaagaactaggtggtgtctactgctagggagattatatgaaggccaaaataatgacttcagcaagagtgactgaactcactctaaggcctttgactgcagaggcacctgttagggaaaatcagatgtctcatataataaggtgatgtcggaaacacgcaaaacaaaacgaaaaaagatttctcagtatacacaactgaatgatgatacttacaatttttagcaggtagctttttaatgtttacagaaattttaatttttttctattttgaaatttgaggcttgtttacattgcttagataatttagaatttttaactaatgtcaaaactacagtgtcaaacattctaggttgtagttactttcagagtagatacagggttttagatcattacagtttaagttttctgaccaattaaaaaaacatagagaacaaaagcatatttgaccaagcaacaagcttataattaatttttattagttgattgattaatgatgtattgccttttgcccatatataccctgtgtatctatacttggaagtgtttaaggttgccattggttgaaaacataagtgtctctggccatcaaagtgatcttgtttacagcagtgcttttgtgaaacaattatttatttgctgaaagagctcttctgaactgtgtccttttaatttttgcttagaatagaatggaacaagtttaaatttcaaggaaatatgaaggcacttcctttttttctaagaaggaagttgctagatgattccttcatcacacttacttaaagtactgagaagagtatctgtaaataaaagggttccaaccttttaaaaaagaaggaaaaaactttttggtgctccagtgtagggctatctttttaaaaaatgtcaacaaagggaaaataaactatcagct

SEQ ID NO: 109708 - DNA, 2105 bp, Homo sapiens
catcagactttgtaccctctctcttccatcccttacccttaccgattaggttggtattacctaaaaatccatagaaaatgtccaggtgaattgccttatgctttctaccccataaggtataattctagaccagatcggttatgagaggctctattccagtctgcacctgctaagaatttgaatctattttagtaccaatcttggagttcttgtttggctctactcttagccaaccccacagagtctaaaattggatctgaatccagtatttgccagccagtgacagacataaactaggttctttataaatgtttcatgaattgacctgcatccctgcattgattcaggatcttattgtccattgggaaggaagatttacttagctaggagtaacaattcccaaatttgccctagttgcaatatttttttaccaagggtacatacaagtcaggttcacttctgaaagtaaggaaacacaggatagcattcacttgatgatcataacacagtctgggtatacatatgtgtttgtgtgtatacatttaaaaaaaaggtcgtttatatttggttttggaatcaacttttgaatttgtctaaacttgttaagaatttacaagttctatttaaagatatctgggccagaaaccagaaccacttgtgtttaaatactattgctattctgtacacagctcaaggttctggtattttctcttaagcattcctcttctccccttccaccaaaaaaaaaaaaaaaaaaaaaaaaaaggaattgtgccgaattagttggtttctatggggatatggggattaagtttctacaagattcaaggcagaagaaatatacatttatatattaaaagataaaaaaattatttgctaactcttagaattatttaatggccccaaacttggatgaaacatcaatttccagacactcttcaaatatccaaagtgtattcaaatatcacagagtgtatgttttttcagtgctaccattagcttgctattgacattaattttcttttactcatttttcactcaagaaattttactgcaggataaaactccaggataaaactgtcaagtgccgggcacggtggctcatgcctgtaatcccagcactttgggaggccgaggcgggcggatcacctgaggtcgggagtttgagaccagcctgactaacatggagaaaccctgtctctgctaaaaatacaaaattagctgggcatggcggcacatacgtgtaatcccaactactagggaggctgaggcaggagaatcgcttgaacctgggaggcggaggttgccgtgagccgagattgcgccattgcactccagtctgggcaataagagcaaaactcagtctcaaaaaacaaacaaaaaaactgtcaagtaaggaagttgataaataagaaaaactagttatgtaaaatagcattaagttattaatttactttaaggagatgttattcactaattatttttaaacaaaaacgaacttcagttggaaactagaaattactaaaaactttgttcaacatattagtaaataatgccagctgtacatgaactgacaactatctgatttatatgttgctattctttctttattttaggtgtggaaattaaaagaacacacatattttgactggggctttgatcaaccaaatgctaaaaaggtatatttgtaatatttataaactatctaaatgttgttattagagaatttaaaccatattcctttctttaaccagggatcacttaagccaatcagataacaaggcacaactctatccttaagatcacaaaagatggcagtgtgacaatcatttctgttactaaatatttacccactcttctgtgctttcctgagagcctcattcatgtctgatcaacttatatacattaactcatgtagatataactttaagtcattatgtttgtttggaaagaagcttttcctacttattttgtctagagatgcctacttagttgtttactttttcctgatgggaataattctgctgtgatatttgcaaaaatgttataatggttcaatctgtaatcttacgttttgtttgcttgattatgcatcatgagttcat

SEQ ID NO: 109709 - DNA, 1863 bp, Homo sapiens
tccaaacttggtgacagagtgagaccctgtctcaaaataaaaaagattcttaaaaagaaagataactgttagaattctaactgtagtcaaattgtgtcttacaccattctgacttaactctacagtcaatagtatgaaactcagctctgtaaatggggaggaaacggaaggttattagtaactcacgaagtacatagtatcctttcagctagaaaaggggagcttaaggagtactattgcaaattaccccaatgttctaattgttcaaatgcaaatttttgttgattagtttttattaacatgagatagtgctgtgtaccctatatgaaatatattatgtgattttgttgtagtgtttatattaaaatgaaattatgtgatttgaatactgaattttttgcatattgaaatgttttcctttttttacttttagccacataaagaagatccctaatagtcatttctcaacaattatatagtcaactgatgtaacaatggtactaatattgggacgcagactaaacagagaggatcttggggtgcgtgattccccagcaactaagcgaaaagtttttgaaatggaccccaaatctctgacaggtcatgagttttttgacttctcttcaggatcatcccatgccgaaaacatactccagatatttaatgaatttcgtgatagccgcttattcacagatgttatcatttgtgtggaaggaaaagaatttccttgccatagagctgtgctctcagcctgtagcagctacttcagagctatgttttgtaatgaccacagggaaagccgagaaatgttggttgagatcaatggtattttagctgaagctatggaatgttttttgcagtatgtttatactggaaaggtgaagatcactacagagaatgtacagtatctctttgagacatcaagcctctttcagattagtgttctccgtgatgcatgtgccaagttcttggaggagcaacttgatccttgtaattgcttaggaatccagcgctttgctgatacccattcactcaaaacactcttcacaaaatgcaaaaattttgcgttacagacttttgaggatgtatcccagcacgaagaatttcttgagcttgacaaagatgaacttattgattatatttgtagtgatgaacttgttattggtaaagaggagatggtttttgaagccgtcatgcgttgggtctatcgtgccgttgatctgagaagaccactgttacacgagctcctgacacatgtgagactccctctgttgcatcccaactactttgttcaaacagttgaagtggaccaattgatccagaattctcctgagtgttatcagttgttgcatgaagcaagacggtaccacatacttgggaatgaaatgatgtccccaaggactaggccacgcaggtgagaagactgttttcaaatatagttaacaaaagtttttaatatatctttaaacctcctgaatgcaatctcagtgttgtcatttatatgcactgtctacctgtggctgtatataattttagatttattttggattatatgtcactagaatgtctttcctagtgaattctagattcaacagtagcattttttgttattgttgttttgtgctatcaaacagtgtagcaaagggtctttgcaactgtgcatatctcaacatatttctactaatttctcttaacctttgtagggccccaaaccattccacttttctttccaaagagtctttggatacagggtagctaagattttagtaggctctcttggactgcctctacttataaaaaaacaatttgctcctgggcacaggggctcacacctataatcccagtactttgggaggccaaggt

SEQ ID NO: 109710 - DNA, 1015 bp, Homo sapiens
aaactaatttctgaacaagtacatatacatattcctttaaagggtgcttggattatactatgaattagttttttagaactagcaagctgatgaaagagcaccattttcctacagttagaaaaaaatgcattatcttaccttgtgtggttatgcgtatctgaatcactgcaaaactgcatttgaaagtcatccttaatattgccaggattctgattgggttagataggatctttggacttttttacaattttcaggtcaaaaccaatagaaaaaaatagcaacagaaattttctgtggaataatgatgtcactagctcccctataaacgttctcaaagtaagtaatttccaggctgtaccgtttggcacatgcacagagaagaaacttaactgtttataatagtgcgtggtttgtttttagagttttaagaaaaaatctggagtatattttaatgtaatattattatattatttatgtacgctaataattattattttaggtccactggctattctgaggtgatagttgtcgttggaggatgtgagcgagttggaggatttaatcttccatacactgagtgctacgatcctgtaacaggagaatggaagtctttggctaagcttccagaatttaccaaatcagagtatgcagtctgtgctctaaggaatgacattcttgtttcaggtaaatatagaattattacagtagctacttttaatttggacacagcttcattattttaaacatcaacagtgtcttaaaatagtgaaatgtgaatactcccacttgaggaagatcagtttacaacaaataaaaccaagaatgactttttgctcttaaaaacaggtacaaggccaggcgcggtggctcacgcctgtaatcccagcactttgggaggccgaggcaagcagatcaccgggtcaggagatcgagaccatcctggccaacatggtgaaaccccatctctactaaaaaatacaaaaattagccaggtgtggtagtgggcaactgtagt

SEQ ID NO: 109711 - DNA, 1058 bp, Homo sapiens
gccgagatcgcgccactgcactccagcctggtgacaaagcaagactccgcctcaaaaacaaaaaacaaacaaaaagcaacaacaaaaaaaacacaggtacaagatgacatggaatgatttacaaaagatccaccagaagatacctttaatcatgtcatattttaaatgctctcaaatgcatgtagaatatgctgtaattttttaaactttacctctttgcaagtcagaagtactcatagaattaagcatttctaattcacccatgttttctgaaattctccgcaaagtttatgaaataagatttgctttaaaattcttaacttgaacttctttatgattgtgatatgttacctttaaaattagaaaataaaatgacagacttgtacaaagtataactatagtatctatgatgggaagtctgttaattggtaaaataatttcaccagctttgcagattattatatatattatccacactgagaaatataacaatacatactttattttttacaatagtatgctttttgaaaaatcggtcaattaaaaaaaaaacctttagaataataccattatttgcgtgcttctgatgtcttactcttaaattaacaatcttttatgtttgtaaaattcacatcctatatttaattattttggatctataattatcacttatcaagataacaattggtaaagtttaaattttctctgtagaactatttccattaaatttcaagaggtctttatttattgagctgaattctcaaattcttgaattagatgaatgaattccatgttttctttacctatgccttggtggcacagatctcttggtgacagctatatcatgataaattatcgtgtgtgcattgttttgcatttcaaggtggaagaatcaacagccgtgatgtctggatttataactcacagttaaatatttggatcagagttgcctctctcaataaaggcagatggcgtcacaaaatggctgtcctccttggtaaagtaagagaaaccactttttattactattgctggtacctttccaaagtaaataccac

SEQ ID NO: 109712 - DNA, 1298 bp, Homo sapiens
aagatactaatttgccctacctttctcttatttgtgaaaagaaaatgtacataaaagctctgtgaactttaaagttcattttgtgtcaagtacttttctaggtattgtacggactaaaagaaaggcctgaccagcactctcatagtctagtaattctttcctaatattttagtttcacagctctaatactttataataatcaaatatttcattacccataagtgtgaatatttaagctaaattgtaccattctcagtgtgagcagtattacccccaagggggcaaagattgtttcttagaagatgaaaaaaaatgtaccctttcttgtgtaaagaacagatatacatacattaaggtaaatagatacacaatttctctgtggtattacaattttattgagggaagactattaggaagaaaatacctaaaaaggctccgtggattgtgatggtggtaggggatgatgattttttaaaaggttcagaaactctgagctaaatatattgcaattatatttatttagcaagggcattttaaagagaagagatcccttaattctttagccaactacttcaaaattcagacttttgataattaagatttttccatgtattttacatataggtatatgttgtcggtggctatgatgggcaaaacagacttagcagcgtagaatgttatgattccttttcaaatcgatggactgaagttgctccccttaaggaagccgtgagttctcctgcagtgactagctgtgtaggcaaactgtttgtgattggtggaggacctgatgataatacttgttctgataaggtaagccatgcacttttaaagaaattaccaatattaagtacaagaagggaaatacagaaggcttatcaagtaggtagccaggtcacatagtgtgaggggtcttttaaaaattttctggtactatatgcttttggagaaaaacattgaattctgggttgctaaagtgagactctagtatatctaacaatttgctctaacaaatgtgatccaatctttttgaaatgagactatctgtgtagaagttttctactaaataaattgttctgagcctttgctgtcatctacaaaatctaaaaactatttatacaaaacacagttgagaagtgaattagcaaagggtaagacatagtaactaaatatgctgcttccaactgggtcattttctacatacttttgaagtatttttcagaaaaaaggaaaggaaacctccttagtgtaaatagaggatggctcaaagttgttccggttcagtaaacttctgggac

SEQ ID NO: 109713 - DNA, 2408 bp, Homo sapiens
ttgaccagactggtctcgaactcttgatctcaagtgatccacctgcctcggcctcccaaagtgctgggattacaggcatgagccaccatgcccagccaggttttgtttttgaagaatcactctcatccttgcaagaatatttgttttatatagtaactgtgttattgacagagaataataaaatttagcttagaatcccattgtgtgggaagttaactgtaagatgttatttgagacatttctatggcccagccaaggctcctaataacagtgttttgttaacttagttataaattttttcctcattcattcattcaatttttgggtaatcccatataatgaatattgttcctactccttggtcatgtaaccgccactttctataataaccttcctgtaataggagaagcaagccaggctctttaaagatgcttttgcttaactaccattaagttaaaacccttttatcagtccacatcctacctcccacatcttggccccaattactaacatataatcttttttttttttaacttttattttaagttcaggggcacaagtgcaggtttgttacataggtacactgtgtcatgggggtttgttgtacagattgtttcatcattcagttcttaagccctagtacccattaattttcctgatcctcttcctcccccaactctgcaccttctgaaaggcccgtgtgtgtgttgttcccctctatgtgtccctgtgttgtcatcatttggctcccacttataagtgagaacatgcagtatttggttttctgttcctgtgtaagtttgctaagggtaatggcctccagctccatccacgtccctacaaaggacatgatctcgttatttcttgtggctgctactgacatagcatctatcttgaaattcatttcattcatgcaaagttgtccagcgcttacacagaacacagagagcagagttgggccaaaggaccttagcttttatcatgtctcccttttttttgactgtgctaaagcattattttgcttttctgtttgttaccaaatcctttatcttcaatggttaattttttgtttatatatttggttaaacaggaaaactgtggtatgtctgtgtgtaatggtaaaatatatatcctgggcggaagacgggaaaatggagaagccacagacactattctctgttatgatcctgcaacaagtatcatcacaggggtagctgcaatgcccaggccagtgtcctatcatggctgtgtgactattcatagatacaatgagaaatgctttaaactctgaagacaggatacctcaccgaagaagccacactgatccaagatgggaggttttaaaaactctacagtgggaacttcacatatctcctttgtgccatatgcaaaaaatagtaaaaataataatttggtgcctttctcctcaaaatatcaatctttcaaactataataaagcctttcctataattgaaaaaaaaaacttttttgttaaaggtaatggtggttgttacttggcctttgaagagtgtacctttgtaagtatttgtaagaagtctatgtgaattaggaaatgtctgtctgcataccttttaggagcgtgtgaatggtgtcttcacttattatgtatgtttatctgtatgtatattccttattttgtcatatatgtagagaaaattgcatgacttgaggcatcatttaggttgaagaagttaatgcttaggatgcattctaggagaaaaaatcagttttaaaaacctttgttgttaacaaagtatatccagattggttaattttattgaagggtttttttctgtaattgataaaaatgtaatgacaacaattcaggcatcataaaatactgaactattgtgactttattcttagaattgctgtcttacattaaacatgtttttagggggaagttaggtaggagatagaaaaataagtgcccctacaagggggattaaaattacaagttaattcctaagagaaaaatggaatggcctttgaaggaaaaatgacccactatggctctcaaagtttttatgcatcatctcttcaatcctctaagaaagcctcttttcttaacttgataaagcagtggaaacccattttgcaatattgttttgtgaaaaacagggacagacagccaggtacagagactcacacctgtactcccaactactcagcaggctggggcaggaggattgcttgagcccaggagtctgaggctacagtgagctatgaacgcacacggcaccctagcctgggcaacaggttgcgacactgtctcaagagaaaagaaaaagaaaaatagggataggttttccttcctagcccagtagagtttgacctcattagtatggtgctttgggtgaggacctcttccttgattatcccacttt

SEQ ID NO: 109714 - DNA, 1748 bp, Homo sapiens
gtccatttcatgaatataggacttcacataaaaaaagactttctcaagacaactttatattctagtatttttctgttgtaaaaagtattaactatttacttttattttgttatacatttattttaatatccatgtgtttattatagtaaatttgaaatgaaatcctgaaaaacagaatttttttaaacacagacctcacaccaatattaattttttctctacataatttaaaactacataaattaagtacttaaaatttatattgaaggccaccaagaacttaggttgaatcttagaaaatttaaataactatttttaaagttacccaacttaatattttaattttttaatatttatcttcctttactaattcttgataaataatagcattagacttgataaaataaaaaagaattttagagtagaattaatatatcaaaaggggtatatcaaccaaattggtgtcagattgtattcattctctcatcacataaagatttttcttttgataggtgatgctcatatgaacctttggtttagaatctatatatgtacatgtgtatgtatgtagatagtatggttgtatacacacatatataccaaacaccatgaattttagcagtctgtgatgatcagcaaaaaagcacataaagtaaaaattagttgaccatgctaaattcaattctggaatttttttttatttgggcatttctagaactttttacatttgaaagtacatgatgagtattagtaacgatgacttatgtataatcagaatctttatgacaatttagttttacaaggtcagaagagatgagtttgctaaacccagctgtgatacctcagttggaaagggaattcaaaggtatgctttgtagaacagaaaagtatagtttttttttcatgaactttaatcattttctgtttttcctctatgtgagtcagctacaaaagtggtctaatttttacaacagtagaacttcctccttttctactgtaatcttcccactgactttactgcacaggtatgaaatactagtgtattggatcttcagtaacctttttatttcctagatgattgaaatataggtatttactccatttaaaccaggtgataagatgatgtaaatactcagggagggtattaacttgttacttttgctcgtttggggtgtaaagtgccatgactgaataatcttcaattcatgattctagagtaagtttaatttggaaaaaggggcttcacacatggtggtggttgaacattgattcttttatacttaaaaagatgaaaatgttttgtggactgatacattttatcttactgaatatgaattgtttatgtatctctactgtcaaatagcctttttgaaactcaggaaagacaaaggttcaattacaccacttttgtcaataagcaaaccaggtattttttttttctcctgttgtctggatatggcaatagattttttaaattgctgtgagaacccatatatgaaaagagaggagttgaattgtgtgtgccttttatgtcttgagatttatatgtggaaaagacgacatctacttcaaactgtatttttttcgtttttttttttttttggggaaggggggagaacggggtcttgctctgtcgcccaggctggagtgcagtggcgcgatctcagctgactgcaacctccacctcccgggttcaagggattctgcctcagcctcccgagtagctgagaccacaggtgcgtgccacc

SEQ ID NO: 109715 - DNA, 1075 bp, Homo sapiens
cattcataacttattttatatattgttccaaagaaaagaatttgttttaatggtttcaaaataactgcacctgaatttgtttatgtgccttaagttctctagtgctatttcaacttttttttcaatctaaatgaagcttaccttagataaggttcatatttgtttcctatagagtaaataaacttccccttcttaaattgtgtaataagcaccaacgtgtggttgcttggcagaatgagaatgttaagggagattgttggatgtttggagtttcattatattttttgtttttattttttgatacctaggtgctttttaaaatattcagacaaatatctatcttacattgattaaacccgtgtaaattcatttgcagtatctacatcgaatgtcaaaaaagtatacttatttttgttccatacttatgtacaattttttccctcttcaggctttttcatttacctttttgaaaaagcacttactctccccttccctatcacccctcccccaaggtttctttatttaaatttttattgagagttgttggagctctaagacaatacaaatttagagttgaacaaaagtataatctgctttacaactagtatagacctaaggtcatttgctttcaattagaggctccagagtcttcatagtggaaagaatgctttgtatttaattgttcttagttaagttgtagcacgtgaatacttacttacatgttttgtttaaatatacttcttgcatagtttaattttttaaaagttgtatctaataaaatgtcttttaaccattattacttgactatatggttgtattaaattttgtttacgaaaaatttgttgttctgttttattttaagtatatttaaggggttgtgcaaaaaagagatggggaaaatactggatatattaatatatgtgtgtatttactggtatgtccataaaataactggaaggataaataagaaactgaaaatattagtgtgtaagaggaaaggaaatggtggctgaaggacaagtaaaaatgaaactttactgcatacgtatatgtgtgtaattataaatacatataa

SEQ ID NO: 109716 - DNA, 1056 bp, Homo sapiens
gcaatcttacaggcctgacacatcatttttttttagtttgatgttggctagtattttcatctaagcattcagcagttacagagttgacccacgttttccattcccttttctcgctcacatgtaaaaaatgcggtataatattatatagaattcagcaatatcatttcccctttcttaatgagtagagggtattcagcgtagaaaaatttaaaaatacaagcaaagccagagaaaaatgcccgcagttttacgatctagagatactacccttggatgtatattcctgtttgtgtatactctttaaaagatagggcagatgatgccctgataaggagtttagtttttcccgggaagcctttgaaggttttgagaaggcgagtagcatgatccgactgctatgtagaggaagagggctggggaggaacctacgaggtcagttactgtgctctttgcagtagcttggactaggcccgtggcagggagatggggaagtataaacagatttttaaatgttttaaggtagaatgaacaagacttggattggtgagggaatggtgggaatctttgcttttttgatttttgttttgagcaactgagtaggtggtggtgctgtttactgagatgaagaatggaagagagaaatttgaggtgggaaaaacgaattctattttagatgtattaaattttagatgcatgttagttatgaagtcggtgtgttgaggcagttggatgtagagggctggaactcaaggaggagagaggctagagctagagataaaaatctgggagtggctgggcgcggtgctcacacctgaaatcccagcactttgagagaccgaggcgggtcgcttgagcccagatattctagaccagccttggctacaaggcaggaaggaccccgtctcttaaaaaaaaaaaaaattgggagtgatctgtacgtagatgatattcaaaggtatggtgctgtgtgagatcactgaggggaaagagtgtggagaagtgaaaagggcgcagacactcaaatacctctaggtctggtagaggaagaaggttggg

SEQ ID NO: 109717 - DNA, 1057 bp, Homo sapiens
cttcaggctctgtgtgtaagatatttatgaagcgtaaatgaatttcatgtttagatttgggttccttcccaaagatatcttactatgtatatgcaaatattccaaaatccaaaacagtatgaaatctgaaacagttctggtcccaggcatcttgggtaaggaatactcaacctgaataaaatatttctaagaaaaaagtcttcattcctcttcccagtcagtccctaacaccagcacctccaactatgattctcatttctttcactatagattaatttgtctcttctagaacttaagtgggataatttagcttgtactcttgtgtttgccttctttggcttgccataatgattttgaggttcatttctgttgttgcctgcatcaagagttcattgagtataccacgatttgttcgtccattcctctggtttggacttttgagacatttttgaaatgtcattggctaatggaaaatggattgtagagtcttattcagatatttaataaaggaacactggttgtcttgtttacaaaagagaatgtattttcttttaagactgtagaaaggacagggccaggaactatgaaatcattatcagcatcttaggaatgcctgtctgtatggaagcagatagaaaatgattgtactactccccttccccacctatttttttttttttttttttttttgagacgaagtctcactctgtcacccaggctggagtgcagtggcgcaatctcggatcactgcaacctctgcctcccgggttcaagcaattctcctgccctgagtagctgggataacagtgcatgccaccatgcccagctaattttttgtatttttggtagagacggggtttcaccgtgttgatgaggccggtctcgaactcctgacctcgtgatccacccgccttggcctcccaaagtgctgagattataggcgtgagcagccagcatgcccggcgtccccctccccaactttaaaccagatgggaagtcttgagtgagagccccaagttcagtggttctgatattcaaatgatgtgaggcacataga

SEQ ID NO: 109718 - DNA, 1536 bp, Homo sapiens
ggatttatgggattttttttttttttttgagatggagtctcgctctgtctcccaggctggagtgcagtggcgcgatctcagctcactgcaagctctgcctcctgggttcacgccattttcctgcctcaatctcccgagtagctgggactacaggtgcctgccaccatgcccgtcttttttttttgtatttttagtagagacgggttttcaccgtgttatccaggatggtctcaatctcctgacctcgtgatccgcccacctcggcctcccaaagtgctgggattacaggcgtgagccaccgtgcccggccgggattttttttttaatgggattgttttattcaaagacttgtgtatgtggggcttgtttaccgtattgcagacttgttaattagtttaatataagtctatagatttgtgtttattgtaataatgatcagtaatagtgatacctgctaagtaccagagaaaggatctgtataatcaattatttattgagcctttaactatgttgcttatattttctaatatgctgaatgcttagtgaattctaagacactgtgtgggctaaccatgttttcatcaaagtctggttcctttcctttccttatgagggctcttccatgaaagccaggctccttttgaaaagtctgaacaatgtgctactttgttcaaggatttttctcttgaaagggaaacccatgcttgttaacagatgattatgatttcttttttttttttggtggaaacttttaaacttaggcttttggccttaaaagaaatatgtatatgtgtgtatatacacatacccacagacttgcaagtaccagtattaatgtaatatttatttatttattttgtttgtacacatatatttgtaagtactggtatgcagtgttactacaacccaactatttaactgaataattaaaaattattaatttatcattgcttcacagtgaagaactgaatgtcatcatgtctggaatcaagcgaaccatcaaagaaaccgaccctgattacgaggatgtatctgtggcccttccaaataagcggcataaagcaattgagaattcaggtagaaatcctgccttaggaaattatttctttattgacatatgcctccgctagaaaacttacaggaactagaatgaaatgaatttccactgttatgtataatttgaaggggttcgtgagagagattagctaagggatctgtttaatagtaatacaccatgtgtgctgtaaaaagtggaagaagatctggcaggaacatgatcaagcagacagtgaaagcgagacaaactgtgagttttagcgatcactgtatgttaggtgtaatcataaagtctatgatatgtataaaggtgtgctataatcgtgagatggtcatagatggtacatggattaaggtttttaattttaataggtaacattttaatgtatatagaaaaaagaatgatctcatcaaacttgtagttccatagctacaaggataaagctaaaattatttttaaatgcttgttaattaaatgtg

SEQ ID NO: 109719 - DNA, 1049 bp, Homo sapiens
ctgacctcgtgatcttcccgcctcggcctcccaaagtgctgggattataggcgtgagccactgcgcccagcgggaaaccaaatcttgatttggttttacttgcccaaaagtgtcagaactgcgaattaaacctaagtgtttcttttttttttctgagacggagtctcgctttatcacccaggctggagtgcagtggcgcaatctcggctcattgccacctctgtctcccaggttcaagctattttcctgtctcagcctcccaagtagctgggattagaggcatgtgctaccacgcctggctaattttttgtatttttagtagagacgaggtttcaccctgttggccagactggtctcgaactcctgacttcatgatctgcctgcctcggcctctcaaagtgctgggattacaggcgtgagccaccgcgcccgacttaaacctgagtgtttctaattttacagcctggagattctgtgcacagcacagctcctggatgctgtttacgtaggtgtgaaagaaaccttctagctcggcaattccgtgatcttgctcaaggtctttcaactctgtcgtgtttattctctcgagagcagccgttcttcaacggtttcctctgtgagactttatattctaagatgctttagtactttagtagatggaggaaatttgacaaataaacagaattgaaaaacattgctctttgatcatgccagtttgtaatttgagctcccatctcaagctactctgaacttcttgaaaaatatttggctatagagtcattattggattagagcagcgatttttctcagccaggtgttgactgtgatacagaaaatttccaagttactttccacatacttagatgtcaagggtttgatttatttttgataaaaatatgtttgtatttatttttcagattataaattcatatgtgttcattttttgaaaattgttaaatacagaaaagtaaaaaagaatagaaaagttcattcgtgaggctgccacccccaaaatcagaactcttcactgtttggatttaccttacctt

SEQ ID NO: 109720 - DNA, 1084 bp, Homo sapiens
cccagcaagctgggactacaggtgtgggccaccatgtccagctgagtttaaaattttaggtgggatgattgtagttgtagttcactctttgagattactgtctcactaagcaggcattgtcttcttctatccaattgttaccacactatattagctgattttgctcccctctggaaatagctaaacatggtgatggggtcttgctatgttgcccaggctgatctctaactcctgacctcaagcagtcctcccgtttcagcctcctgaagtgctggcattacagtgtgagccagccactgcatccagccccagctatgttttagaaagaaagaaaaacaaaatgattaacttgcaaagactcattttgcttgtttaggtgatgtagttgttaaatattgcaggaattttaaccttgtttttaagtttaagtaggacttaattatttagttaggtttttgaaggacgaaaagaattcaggtttcttttttcttcttctctaggtatatacctccggataagagggaagaaaatgaccagtcaactcataagtggatggtatatgtccgagggtcccgtagagaacccagcattaatcattttgtcaagaaggtttggttcttccttcatcctagctataaaccaaatgaccttgtggaagttaggtaagcacgcttgaggtatttaacctaaattgaaatgcagacttatttttgaagtggaagaaaagtgatttaacttcaaaacatttcctggaaatgcagtagtaattgagaattggctcttagtcaaaatgtagttggaggccgggtggggtggctcacacctataatccaagcactttgggaggccaaggcaggcggatcatgaggtcaggagattgagaccatcctggctaacacggtgaaacccggtctccactaaagatacaaaaaattagctgggcgtggtggcgggcgcctgtagtcccagccactagggaggctgaggcaggagaatggcgtgaaccagggaggcggagcttgcagtgagctgagatcgcgccactgcactccagcctgggcgacagagcgagactctgtctcaa

SEQ ID NO: 109721 - DNA, 1484 bp, Homo sapiens
accactcagaatcatcataatcccttttctttgtacagttgtttagatacttgaaagcagttattgggtctcatccatatttgtttcagttgtcacttgtgtgactttgttttatgttcctttgccattcaggttgtattctttggtatactccagtttatctatattccttttaaaataacctttttagaactgaacctaaaactccaggtatggtgtaaccaatataaagtaggtgaggactattaacgtatgtcctaggtttaattataactcttagttctttgcaggactcttaagatgtttgttgtgttaggtatctaaagtaatttaacgaataagggaggatttttgcggctgccttcaaacttggggttaatcttatttctggatcaaagcacaaatgtttttcttacacaccctgaatctcttcatcacagcacattacctgacaaagaggtgggtggatgctgctcttgttgaagcactttcttccacgtttgttcagttgtcaggacgacccttagccaacttcctaaaagccgtgattgtgaactttgctttttttttttaggtacaagatagtggtgactagatatgtgctaggctcagggcgtgataaagggactgtgaagatgagcacggggccttggctttgggaaaccaaaaaggtcttcctgcccttggtgtgtgtgaaactggagcgggccagctcgccagaggaatcctagtgagcctcttccaaaccttcgtatctgttttatttcactcaaatgtagaactctctagagcagcattgtccaatagaaatatactgtgagccacatctgtaatttgaaattttcgagtagccacattagagaagtaagtacccagaagaagtgatttgacattccatgccctgcacagtcggacaatgcccagtcatattactgtgcgtactggggagagtggtctgggaactgaggtctgtcaccttggggacatggactagcacacagtggctaaagcatggccctggagcctattgcttgagtttgaattctggttccgttgcttatttgctgtgtgaccttggcaagttagttgttcagcctcactgtgtctcagaggggctatttcatagagtggttgtaaggattaggtaagttaatagttctaaagggcttagaacactgattgggtcatagcaaacagtgaaacgtaggaatgcagtgtttgctgctactgctgttgtgaggaacagagatgttcattccgaaaagacttgagggaatgctttggttcttttaaagggctttcatgtggaggaagaatttactccttgtgattccaaatggcatatctagaattaacatgcaggaggtagaagaagtcattttgtaatagagctgttcagaaatgtaacacagggtctcatgcagtggtgagttcagggtcactcagagtgatgctaaaagaatgattggccatatgaataaatt

SEQ ID NO: 109722 - DNA, 1098 bp, Homo sapiens
agctcctttgcagctgatttcttccatccagggcactctagttttctttgctttcttttctctttggtttataaggtatttattaatttctctgctttctaggctcccctcatatctcagggatttttcctgtcctgggctccgttgttagctgctggctctgtgctcgttaattcacatctgttacactcttttcaggtcgtgttcttgaactctgcactcactcaattcagttttccaaaaacactgtctgttgagtttctttctccttgtcattttcttttttttttgagatggagtcttgctctgtctcaggctggagtgcagtggtgtgatctcagctcactgctgcctccgccccccgggttcaagcgattgtcgtggcctctcaaagtgctgggattacaggcatgagccaccgcacccagcctccttgtaattttgatatcttctctcattactaattctaagccagtattcataacaaatgttttcattttaaaagcattctctctcttccctatgcacttaaaccatattgttttgagtacttaatgatatatcaattaaatttctaaatttttttattatggaaaatttcagacatatatggaagtaaagaacataatgaaccctcatgtgcccatcaccagttattaacaatttgctcttttccatcaattcccgcccctccttttttcttccttcacaaattacattgtgctgagaattctccaatccagttagcatgcacacacattcctttctgcccactaaaatcagtcatagtcactattcagggaaggtcatattgtgaacatatgatctttctttaagtcttcttagcagagagtttcaaataaattgtctcagttgagcatgttcatgattcattttgtttctgcctcagtggaggaataaatacaagggtttagggtagggagcatacctcatggcctgtatctgtcaaatgccaattaaagatcctcgctctctagtgacattcatcagatcaacctagttccctcgtctgtgaaaatgacattggattatatggtctaagtttactctagctgttagcgttcaataattgaaagt

SEQ ID NO: 109723 - DNA, 1051 bp, Homo sapiens
aacttctcttgtggataaaacactgtcaaacagcattgaatgctacagagaaatctttcataaaaggaagtcagtcgaggcagcagaattcattgttgtcttgttttaagaaattgccgtagccacccaaaccttcaacaaacagccatcagcatcaaggcaagaccctccaccaacaaagagattacagttcactcaaggctcaaggtgatcattagcactttttagcaagaaagtatttttaaattaagttatgtagattattttgttaaacataatgctgttacatacttaatagatgacagcatagtataaacataatttttataagcactgggaaacagattcattgtgagttgctttattgcagtattcacttcattgcagtagtctagaattgaatctgcaattatctctgaggtatgtttgtataaaactgtatgtacatgaagtcaaccacgatctttgaaaggtagaaaaataaaacaaaagaaatataccaaaaagttggagcaactgaaataatgacattgtgaactatttctcatgccctgtttttggttggttttctcaaatatttttgcaattttatataaataaacgtttattttttatttttttgagacagagtctcactgttgcccaggctagagtgtggtggcgtgatcacggctcactgcatccttgacctcccccggctcaggtgatcctcttatctcagcgtcccaggtagctggaccacaagcgcatgccactacactcagttaatttttttattttttgtagagatggagttttttttccactgtgttgcccaggctggtctcaaactcctggactaaaacaatctaccctcctcagcctcccaaagtgctggcattagaggcgtgaaccaccttgcctggcccatattcaatttttataatggaaagaccatttcttagtgttcccttagaccctttttatagtattatagttttgtgtacattttctctacatgtgacataatcctgatactgtacatctccaaagcacccttactttgtggttt

SEQ ID NO: 109724 - DNA, 1055 bp, Homo sapiens
ctctgtcgcccagtctggagtgcggtggcgtgatctccactcactgcaagctccgcctcccgggttcacgccattctcctgcttcagcctcccaagtagctgggaccacaggcacccgccaccacgcccggctaattttttgtatttttagtagagatggggtttcaccgagttagaccaggatggtctcgatatcctgaccttgtgatccgcccatctcggcctcccaaagtgctgggattacaggcgtgagccatggcgcccggccggttcatatattttttaaaaattgtgcttaaaaaacacgtaacacaaaatttaccgtcttacccatttttcagtgtacagtctagtggcattaagtatattcacattattatgcagccatgaccttagtccatctttagaactgttttcgtcttgcagagctgaaactctgtacccattaaaaaatgaccacccactcctcccgcccccccagcactggcaactgctgctctactttctgtctgtgtgaatttgactactctagggtacctcatataagtggaatcataacatatgtgtctctttgggattgccttatttcgctttgcataatgtcctcagatttcatccatgttgtagcgtatgtcagaatttccttcctttgtaaaaaaatttatttttatttatttatttttgagaaagagtcttgctctctctcacccagcctggagtgcaatcacggctcactgcagctttgacctcctgggctcaagtaatctgtccttagcctgtcaggtagctgggactgtgggcgtgtgccaccatgaccagctaatttatttacttactcgtttatttatttatttattttttgagatggagtctcgctctgttgcccaggttggagtgcagtggctcgatctcggctcactgcaagctccacctcccgggttcacgccattctcctgcctcagcctcctgagtagctgggactacaggcacctgccaccacgcccggctaatttttttttttttgtatttttagtagagacggggtttcactgtgt

SEQ ID NO: 109725 - DNA, 1026 bp, Homo sapiens
aattcagtgtcatgaagcttttcccttacattttcttctaggagttttattgttttagcttttatgtttcgttctttgatcctgagttaattttggtatatagtgtaaggtaagggtccgattgcattctttggcatatggatatccagtttccctggcaccatttgctgaaaatactgtcttttcccccactgaatggtcttgggacccttgtcaaagatcatttgaccatatatgtgaggatttattctgttccattggtctgtatgtctgtctttatgccagcagcatactgttgattactatggctttgtaataaattttgaaatcaggagtctgagacctccaactttgttcttcaccttctctccctttttttgtattcatcatataataatcagcaatagccatttaatcagagttcactaattaaatcttactctgtctagagaaatctgctgtattatatcagaaggtacttattgagcgctggtccaggtgctgggaatacagaaatgaacacggtagcttcttccttcagagtcaaattcttagtggcattgaaaatggggagggtagacagtaaacacaaaagcaaataaaattacttcagttacaaataagtgctgtgaagataagagtagctgggggataaggaagtagcttattcttgggtggttaggcatggtctctctgagaaggtgctacttcattgagacctgctggtgagaaaggcagccatgcaaagatttggaggaatagcgttgtaaggagtagcaacagcaaaatcaagaggtcccaattttgtgaataatttcactgagatttgtatgttaaaccagattagattttcactgaggtatgtgtctgttaagccagattagattaccttctagaataaatcctttagttcttcagattgaaattgcctttgaagtgtgattagaagttatctctcacatcccggagattacattcttggacgggacttgagctttctgtgacattgatgatggactcatgagc

SEQ ID NO: 109726 - DNA, 1061 bp, Homo sapiens
gtatgtggagttgactggatgttaaaattgttggaacaacaaaacaaaatacttggctttttttctcttaagttcttctaagcagtgttatgtttaacaaaaggaagtttatcactgttgattggcaaagctgtcacaaggcaaaaacaaagctcattcatacggaaatgaatggaggagataaatgaaactcaaatggtcaaatttttgtctgccagaatcagcacaggtaaaatgtttgctaggatatatggctgaaactaaggtgtaggaatcgtgtttggggattatatacatggaaaccacagtgactagtgatagaaaaaatttagaggcctttggcatggagttaaattttaagggttagagttggttgggaattgaaatgctttattctgtctgtaaccacactagaaaattattcattcctattgtcagtaggtagttctgagttgtcttgttcactaagattggattatcttttgccttgtgatagtttcattttatgttaggtaaaatttagtaggaatatatggttttgactgttccaccttagaacaaaacatgtttgttaaaaggcaattggaaataaccaggaagtatgaggacttctgtataatagttaaatgaaggggggaaaaaaagaatgtttggtgttgtaagtagacagctaagtagaaataggatccaaatctttgatgagagataaatagcttctaattggtaggcaattttttttttttgagatggagtttcactcttgtcacctacgctggagtgcaatggcgcgatctcagctcactgcagcctccacctctctcgggttcaagtgattctcctggctcagcctcccaagtagctgggactgcaggcacgtgtcaccactcccagctaattttgtatttttagtagagacggagtttcaccatattggccaggctggtcttgaactcctgacctcaggtgatccacctaccttggcctcccaaagtgctccggttacaggcgtgagccaccgtcccctgtcattggtaggcaattttacctaccaggtagaaaaa

SEQ ID NO: 109727 - DNA, 1027 bp, Homo sapiens
tatcggggaagaccaataaagtcagccaaatgttaggggtagtaagttagaagtctttccagtgtacagcaggacacagatgagtagattcttgccaagttacagcttttctttgcatttgttttctaaaacaatattaaaatgcaggtgtagaggcttggaagaccccaaggaattttaggtttttttctttcttttttttttacggagttttgctcttgtcacccaggctggagtgcagtggcgtgatctcggctcaccacaacctctgcctccctggttcaagtgattctactgcctcagcctcccaagtagctgggattacaggcacccgccaccacacccggctaattttgtatatttagtagagacagggtttctccgtgttggtcaggctggtcttgatctcccgacctcaggcgatccacccacctctgcctcccaaagtgctgggagtacaggcgtgagctaccgcacccagccagtctttttatttctttatattgctagagaatgtcacaggtttgtattaaatataagtgactagatatctgaaatcacccatttctcctgattgtaaaatatgtatttttacacacacagcaggaggattctttgtttgcatctatgccacctctttgcccaattgggagtcaccctaaggttcaaagccccaaacctataacaggaggacttggagctttcacaaaagtgagtatgtattagggcattgtcccacaagtcataatactttttgtggcatgttggagttcattgccactacccctacaacatgttactttttagtgggtctcaactcctcattctgagacgtgcttccatgtatttaatgatgtcctcagggcagcccttggagtccagcaagatggggattcatggagcacagtgtgtttgtttctctctgctgtcatttgccacagtctctaaaacaagtgactgtgttattacaggagcacaggatcaagttcagatcctacttttggtccctttaatagctggtatggac

SEQ ID NO: 109728 - DNA, 1142 bp, Homo sapiens
ctgaaaattatctggtgatacctgagggaagatccatctacttatagaagctggaagtctgtttttggggataggttggcataggattggaatcgagtgtgtctgtttgacttcatttagatcaggggtccccaacccctgggccgcacagcagaagttgagcatggacgaagaagcattactgcctgagctccgcctcctgtcagatcagcagtggcatcagattctcacaggagcgcgaaccctgttgagaactgtgcatgcgagggatctaggttgtgtgctccttatgagaatctaatgcctgatgatctgaggtggaacaatttcttccccaaaccaccccccgcctcctgtcccaattcatggaaaagttgtcttccatgaaactggtccctggtgccacaaagcttggggacagctggtttggatgtattccttacttctgctaggtttggagatggaaagagaaatacagactctacctaggtttgtaagtcttaaagccccatggaaatgaggcagtttatctgcagttaaagaaacttttgctttgacatatagagaaaaaccgtttgggcagtgttgaaaaggataggataaaaggaaattatttccctctgaatcagaagtagaagggtacagcattcagggtcattggaagttaaccgcccttgccaaaatgcagtgtgtcagctcatcatccttgcgttcattgaccatgatgtgtcagttccactctcacttggtgttttttcctcatacctaagcagtggtatgtccaaaagttaaatgtgtaagaaaaggacaatgtaaatatttcagaagtcatccagggagctacttagattcttgtgatatccttggtgcaaaaataaaccattgggaaggaagctattccaataatcactggaatgaaggtggagaaggaaattggaagttagtatttgttgagtgaatattcatagtccaggtagttcaaatgcattatctcaccaaaagagaagtaaaaagacttcaaggctttgaagtgggatttgaaaggcaaagaagaatggggtcctggagtcattgtaaatgaaggaaagtcttcatttttcctgagacagggagacaacatcgagcactgtaaagttacacta

SEQ ID NO: 109729 - DNA, 1018 bp, Homo sapiens
gttagatttgattaggaacaggtttcctcctcgtctcctcttgtcactgaagtcttggctctttttgaaggaaagtaatagaattttggttccagatgttcttattgagaaagatgatatcagtctgaatgattaaatccagttttgaggactaagttgcaaaacatgagttttcaacaggctgctctgtaactacagtgcaaagtttgagaagtggggataactaatggaagtaacacttagagcacaactattcttttgaattattttgcctacattgcagaattaaaggggagagcgttgtagcttgtaacatgggacgttacatgtgatttaagggatcagaacagcccatctgaatttaacaaattaccgattagttctttatatttttttctaacttagggcacatttttagttggccagccatcaccccagacttctggaaaacaactcaccactgggtcagtggtccaaggaacactgggagtcagcacatcttctgcacaaggacaacaaacgctaaaagtcatctctggacagaaaaccacattgtttacacaggtaaatacgcccatgcacacaccccaaatatggggtgattatggcatttatttacatatttacatgtagtttctctcttttcacaaagaaattaaggttacataagaaaatgaacaataaggccaggagtggtcgctcacgtctgtaatcccagcactttgggaagccaaggtgggtggattgcctgaggtcaggagttggagaccagcctggccaacatggccaacatagtgaaaccccgtctctactaaaaatacaaaaattagccaggtgcagtggtgcgtgcctatagtcccagctactcgggaggctaaggcaggagaatcgcttggacccgggaggcggaggttgcagtgagccgagatcgtgccattgcactccatcctgggcgacagagcaagattctgtctcaaaaaaaaaaaaaaaaagaaaaaaaaagaaaaaatgaacaata

SEQ ID NO: 109730 - DNA, 1413 bp, Homo sapiens
agtggtgtagatacaaggaaggtgtccagcaggcacaccagtggaccttttaaaaatactcaactattgcttttttttttaaagaaatattcacataccataaaagtccccattttgtagtatatagttcagtagtgcttgtcattcacatggttgtgcaactgtgattaccatcatctaatcccagagcattttatcatcccagaaagaagcccaatacccatcagcagtcactcccattccatccttctgttctaggcgaccgctgacctactttctttggatttgcctattttagacatttcatataaagggagtcatataacatgcccttttgggtctgcttctgatgcttagcattacagtgcagagttcatccacgttgtgacttgcatcaatactccttttcatggctggataatactcagtttgatggatgtaccatattttgtttatccattcatcagttgatgggcacttggattattttctactttttgactgttgtgaataatgctgcagtgaatatttgtgtacaggtttttgtataaacacgtttttatttctcttggctgtatacctagtgatggaattgctggattataaggtaactttttttgttgttttttgagatggagtcttgctgtgtcaccaggctggagtgcagtgacgagatctcggctcactggaacctccatctcccgggttcaagcgattcccctgcctcagcctcccaagtagctgggactacaggcacgcaccaccatgtccggctaattttttgtattttagtagagatggggtttcaccatgttggccagaatggtctcaatctcctgacctcgtgatccacctgcctcatctcccaaagtgctgggattacaggtgtgagccactgcgcccggcctgtgataactccttttaactttgtgaggaactgctaaactgttttcccaagtggctacattattttagattctcaccagcgatatacaagggttccagtttttccacaaactcacccaaacttgttcttgtcctttttttttaattatagctattgtagtgggtgtaaactagtatctcattgtggttttgatttgcgattccctgttaatgatattgagcatcttttcacgtatttattggctatttgtatatcttttatccatttacatcctttgcccattttttagttggttgtcttttaatcgttgaagtgtaggagtactttatatattctagatatgtctcttaccagatttgcaaaaattttcttgcactctgagctgtcttttcactttcttgatagtattgaaccacaaaagttttaaattttggttttcattcctttttaaattttttaaattaggctgggcgcagtggctcatgcctgtaatcccagcactttgg

SEQ ID NO: 109731 - DNA, 1012 bp, Homo sapiens
taatttttgtatttgttatatccctccctccttttttccctttagtggttcagtcattttctaccagcaagccacctgccattctgcctgtagctgccccaactccagttgtccccagctctgctccagcagctgttgcaaaaggtacgtaggatctcacagagttctcgtccagaagttttgttacttttttattgtcgttcacgttctctcctgatgtccagaagctttatgcgggacattaccataatctgaatcttttgaattttcagcatttgtgaatcagtcacttggcaaatatgtcctaaatgctcatatggtagacttaacattgagggaaacacagagatgtataaaggatcatttctgcccttcagtaatttataatcaggttgaaaacaattgctgtagatagcaagcaatcattgataaacacaagacatttggccagggaaatgattgctgaaatattgcagcttgggatgtctgatcagggttgacggggtgtggagaagggcaagactttgtactgagtatggattataacctggactttaaaagagtagaggttttttagctgtggggagtcaaggggtaggccagattaagggcacaggagagacagactcagcttcccctttggggaagtggctagccagttagagggactcatttggggagtatactcatggtaaaggaggtttaggtaggggccagactttggcgagctgtcagtgggagacatgcctgcccacaagagtagatcaggatagcacggtggattagagcaacacgtgtgacattgataacaccagtgtccaagcataggggatctgatttttgctttctgccttgtgtctcagaacactaagataatgctgaaagttgataaactagctggagagatgatattgaaacggtcccagtattagaacgtagaacaaaccagcattgtactttagagtagcattgttttttttttttttctttttttttttttgttttgagatgg

SEQ ID NO: 109732 - DNA, 1035 bp, Homo sapiens
tagagatacagcccatttgcaagggttttagaattcacatccagttagttttttattgttttcactgtgttgatctgtagaaggaatgttttacatttttcatatgtaaatcatagattgttttgtatgcagttaaaactctgtattagcatttggtgtttatgagtgaggaaagcatttagcgtttgcctgcagtgtaccaggtcctgtgcaggttgggtacgttcactgtctcatataatcccagcctcctgtgtgatagctggtgtcatctccacttacagatgaggaaactgaggataagcagggttgaataacttgctcgagatcacagagccacgggtggtgaaacaggatacaaacctggttctgtttgactctaagaccattcatctttcctctgaaactcagtattgcacagtgtagaaatgcagtttttaagacctcccaaagtgacgtgctgcgtcactgcccatcattagctagattgagtaaattgctgcttagccccagttgttttgacagaatcaatagcccttgctgaggggccagcagcctacggacacaggagcatgctcatgggcaagaccaccatgcacactcagaggggagccacaaggcaacctccacgccactcagatttgtagggctctgaacacatacaccaggtacagaccacctacttattttttccaactgtaatagcaaagcagtaatctctttctgtagggtaaagtttgggggatcattttgatgtctctcagagtaaacttttggtgacagtttcccagcctaacataagaaattcaaacaaaaaaatctctcttatatatgtgtgtgtgtgtgtgtgtgtgtatacatgtatatatatatacacgtgtatatacacacacacatatttttctctctccttaaaaatacagaatgtaagagctggaaggtagttcagaaaccatcttcccagctttctcagtttatagatgagaaaaccgagctgggcttggtggctcacgcctgtaatcccagcactttggg

SEQ ID NO: 109733 - DNA, 1041 bp, Homo sapiens
ccattgcactccatccagcctgggtgacaagaacaagactccattgtctcaaaaaaaaaaaaaaaaaaaagagtctgctctctcgcccaggttggagtgcagtggcacgatctcagctcactgcaacctccgcctcctgggttcaagtgagcacgtctggctaatttttgtatttttagtagagatagggtttcaccatgttgaccaggctggtctcaaactcctgacctcaagtgatccacctgccttggccttccaaagtgctgggattacagacatgagccaccatgcctggcttgctttttatttttaagaactttttctttacagaattattataaaaatgtttacagaaactttagcaagcataaaaaatgtgtttgaaaaactactcataattcctcctctgaaagataatcactgctaacatctctcagtgcctttctttcagtcttatatgcgtattatgtatgtgtgtgagagatgattgatagatagctatgagttgggaccacatggttgagacttgtctgtctcagttgcttcttgggtcacttgctgaacatgttaggcctgattatttagacctaagtgagtgggaaggagtttcagcataacccacatctcctcataaagaggccaggctgggtgcagtggcttacacctgcaatcccagtgctttgtggaggctgaggcaggaggattgcttgagcccaggagttcaggaccagcctgggcaaccatagggagaccctgtttctacaaaatgtacaaaaataaataaaaaatggccgggtgtgatagctcaacgcctgtaatcccagcactttgggaggctgagatgggaggatcatctgaggtcaggagttcgagaccagcccagccaacatgacgccccgtctctacaaaaattagctgggcatggtggtgggcgcctgtaatcccagctactcgggaggctgaggtgggagaatatcgcttgaacgtgggaggcagaggttgcagtgagccgagattgcaccactgcactccagcctgggt

SEQ ID NO: 109734 - DNA, 1034 bp, Homo sapiens
cccttcgtatagttaggaggaagatgacgggaggcatggaagctgggatagccatcctgagtcagtgctaattctgacacttcagaacatcgagtcagtctgacctgcgagtgagctttcattgaccacttagaaactattagcaccttggacaaactactttctttcagacctggttgcttcatgtctgcgatgggaaaactgatacttaacttgcagatagtggtgaatcaaaagtagtatatgtgaagtactcacacactgcggagcattcagccatcgtcccatcctacttctaccttttacatattgtaatatgaaagctaaaccatttctcgatgtgagtcagttttaatcggctacatagtgagtggcattcgattttaaaaatgtcaacttgggatctgtcaccatgctacttaccatttgtatgtcacactgtttgaatgtcggacctggtttgtttttctccagatggtatgttacttacggtcatgaactgatttggaagaacagggagccgctagtgaaaatctggcatgaaataaggactaatggccccaaaaaaggaggtggctctaagtaaaactgggattggacagtagtggtgcatctggtccttgccgcctgagagccccaggagacatcggctagagtgaccatggctatgctcccgtctggaagatgccagcatctggcctcccactgttttcagctgtgtcccccagtccgtgtctttttagaatgtgaatgatgataaagttgtgaaataaaggtttctatctagtttgtaagcagatgtgtgtgttctctctttaaggggccgacacggctctggcattttgctttggttgttgcattgacaggacctggggagagtgcaccctgaaaggcctgatcagaacatgaaggcgctggttgcctgtctttggaccctccagtgcctctgcttagccttcactcttccttgcctccccctcccctgggttggctgcacataaaagtcgagagtatcccctctccagcacaatctg

SEQ ID NO: 109735 - DNA, 1009 bp, Homo sapiens
ggaggttagatattctcatctgcagggagagtacagagaaataacaatccttttttgtggttagcaattacaagggcctttgcctccctcattgtgaatttgccctttctgtttacccgtattagtttcaaactttctgtctctatcccagtgggaggatggaagatggacagtctctctgggtttcttcttgattccaggtagctgtggacccagtccttaattagtttggtggatactgcctaggaaaagaaatgatagccactgtgtgaggccaacaggttgatctttgcacctgcctggttcccagagaacctgaggtaaggatggcttgagcctagttctttggctgctgtggatgtacttgcttgtcagtgtctggactggccaggtctgggttggtatagtagccccttcagataaaggagctttggaggggtgaattggcccacccagaaacagaggggatctgtgaatagctattagaccccaagtggtatggtaagtcctttataggaaaatgagaaaaagggttttactacctttcttgggctgaggaggaagataacctgaggtcattgaaccaagtagtgctttccaaatcagtgcatctgcctttttaaaaattaagatataattcacatataaaattcaccatttaaagcaggggttcccagccctgggcagggactggtaccagaaccgggctgcagagcaggaggtgagcggcaggggaacaagtgaaactttgtttgtggggttttttttgtttttttttttgtttgtttatttttttgagacagagtcttgctctgtcacccaggctagaatgtagtggtgtgatcttggctcactgcaatctctcccggattcaggtgattctcctgccttagcctcccaagtagctgggattacaggcacctgtcatcacgcctgggtaacttttgtatttttagtagagacagggttttgccatgttggccaggctgggatctaggttgtgtactcc

SEQ ID NO: 109736 - DNA, 1097 bp, Homo sapiens
acaaaaaattagcttaggcgtggtggtgcacgcctgttaatcccagctactagggaggctgaagcagaattgcttgaacctggaaggctgaggttgcagtgagctaagattgcgccactgcactccagcctggacgacagagcgagactctgtctcaaaaaaaaaaaaaaaaaaagtaacgaaattaagatttctttagggtggcaaggttttgccttcactattttcaaagcatttcactattagtttatacctcacattctttgaaggtggtcatgattttatgccatttaacatatgaagaagcctagcatcagagtttaaaaccttttctcatgctggtgaatactttcttcaaagaagctagaggtaattaaaaatcagaattctttccccctagtctttttcttttttgaaatcaaatcagccatttggcatgaagagcgtagcagtagagagagatgcttgtgatctgtcttgcaacttgaatgtaagctgctttgaacaacataaatgtgaatggtcatgctgcaggtcttaaatctttattgttagattatccaagtgactttaacctcaggaaatgccatttgaactgtcttgtgtcacctcagacttttcttgtaggaaataattattctagtaatagtgattctagctttacaatgtctgtaagtggtgcttaatcaattacctatatatgagagtctcaagaataaactgtttatttagtatgtcttgtcttcttcctggggtgccaattagtccagctttccttgctgagcactcctgattgcttcttgtagactgcaaagtgaagttggctcagcttctggttttaatcagtgatagatttatggggtgacaggtctactccgtcccactttctttctttggattggagatgttttccgaatgggtttttttttttttcgttttatattttgaaagaacttgacaagtttgacctagagagtttttaaagctttgtgagaccagtgtgcctctctgctttgtagtattcatacctagacaatggcagcatgaaagctctagtcggttaaagatttctcactgctacaccaaacacttcatgt

SEQ ID NO: 109737 - DNA, 1172 bp, Homo sapiens
catggtggggcagaggttgggaagatggcgtggcgaggctgggcgcagagaggctggggctgcggccaggcgtggggtgcgtcggtgggcggccgcagctgcgaggagctcactgcggtcctaaccccgccgcagctcctcggacgcaggtaatagccgccgcgctctggtcttctcgcctcttggtccctgagctctggccgtgtatcctcgggggcggaggccgtctgggcctcttgtgctggccccagctcacccccttcaccttacctgccccttctctctcctctctcgcctccgtccagtcctcgcttctcgctccccttgcccagcccagccccccgcgagcctgcgctttctcctttcccattgggaaggacgtgactggaaggggaactaagctgagggttcattgcgtgccacacttcataatcgcgagtggaaactgttgagccagtttctgaagtgaagaagttagtacagctggcagaatggcggtttttattctttttccatctaattataaaggttgtgttccattacaaccagtcgccttctttagcttgtgatctaagggaggacgaagtctgatggaaggtatcactttgtgtctggcaaagtcgtaggagaggctttattgttgaattgagacagtggaagatttcgtttccggttgatttggaaagaaaactgccgaaccttccgagtagaagtgtgaagcgtatggttgatcagtattgctgatttttgcatcacagtaattcatttctaatttgagagagaagagagaaattcctcacctgtttaagaatctgatgtgcatttggctttgaaaattttcctcctcttttgttcaaaacttcattccttccaatttctgacttggttagatgggtgcctcgaatccacctgattgctgataagaaacattgtttatcaacacgtgggatagtcagtggtaaataatcgaggctctaatgtggcggagccattgcctaatctcaaggatcacctgaagagtttgtatggattttatgtcccaggcctcaccccagtcctcccaaatcacaatcaggagaggggtgggtggagtggaagaacctatatgtccgacaagcattccaggtgaattttatcagggacttgtgaaaactttacatacattgtatctt

SEQ ID NO: 109738 - DNA, 1779 bp, Homo sapiens
cctgcatgacccagagctgtgtcctgacggcgtctccttcttttgcaggtggtggagtttgacaccccatcggtccttctgtccaacgacagttcccgattctatgccatgtttgctgctgcagagaacaaggtcgctgtcaagggctgactcctccctgttgacgaagtctcttttctttagagcattgccattccctgcctggggcgggcccctcatcgcgtcctcctaccgaaaccttgcctttctcgattttatctttcgcacagcagttccggattggcttgtgtgtttcacttttagggagagtcatattttgattattgtatttattccatattcatgtaaacaaaatttagtttttgttcttaattgcactctaaaaggttcagggaaccgttattataattgtatcagaggcctataatgaagctttatacgtgtagctatatctatatataattctgtacatagcctatatttacagtgaaaatgtaagctgtttattttatattaaaataagcactgtgctaataacagtgcatattcctttctatcatttttgtacagtttgctgtactagagatctggttttgctattagactgtaggaagagtagcatttcattcttctctagctggtggtttcacggtgccaggttttctgggtgtccaaaggaagacgtgtggcaatagtgggccctccgacagccccctctgccgcctccccacggccgctccaggggtggctggagacgggtgggcggctggagaccatgcagagcgccgtgagttctcagggctcctgccttctgtcctggtgtcacttactgtttctgtcaggagagcagcggggcgaagcccaggccccttttcactccctccatcaagaatggggatcacagagacattcctccgagccggggagtttctttcctgccttcttctttttgctgttgtttctaaacaagaatcagtctatccacagagagtcccactgcctcaggttcctatggctggccactgcacagagctctccagctccaagacctgttggttccaagccctggagccaactgctgctttttgaggtggcactttttcatttgcctattcccacacctccacagttcagtggcagggctcaggatttcgtgggtctgttttcctttctcaccgcagtcgtcgcacagtctctctctctctctcccctcaaagtctgcaactttaagcagctcttgctaatcagtgtctcacactggcgtagaagtttttgtactgtaaagagacctacctcaggttgctggttgctgtgtggtttggtgtgttcccgcaaaccccctttgtgctgtggggctggtagctcaggtgggcgtggtcactgctgtcatcaattgaatggtcagcgttgcatgtcgtgaccaactagacattctgtcgccttagcatgtttgctgaacaccttgtggaagcaaaaatctgaaaatgtgaataaaattattttggattttgtaaaactcttcgtgtatcaaacaattctctgggaagggagtgagatatccctgaatggctttgggacctgcatatccagcaatggagttgcatctgggaaggactggtagcaaagctggttggttgcaagggccatggggccctgaacacctggaatcatctctgtgggccttagtcccgctgcctgtgttcctggacatggtccccaaataaagctccttggctgcccataagagggtggggagtggaaaggtgagtggttgtggtg

SEQ ID NO: 109739 - DNA, 1128 bp, Homo sapiens
aaggatgtttttacatatatgcgtgctttcttagaaaaaaaaaaaaaaaacaataggctgggcacggtggctcaagcctgtaatcccagcactttgggaggccgaggcaggtggatcgcaaggtcaggaggtcgagaccatcctggctaacatggtgaaaccccgtctctactaaaaatacaaaaaattagctgggcgtggtggcgggcgcctgtagtcccagctactcaggcggctgaggcaggagaatggcgtgaacccgggaggcggagcttgcagtgagccgagattgcgccactgcactccagcctgggcgacagagcaagactccgtctcaaaaaaaaaaaaaaaagaaagaaaagaaaacaatagatagtgtaaaacttaaatgaaatacattttagtaaaatctagattaaccagaatgctaaaggaatttaatcgagtttctttctcctctgcttctctggcagattctgattttagatgaagccacagctgccatggacacagagacagacttattgattcaagagaccatccgagaagcatttgcagactgtaccatgctgaccattgcccatcgcctgcacacggttctaggctccgataggattatggtgctggcccagggacaggtaccgagtccttcaggaactttggcttggcatgtctgggaggaaactggcccctggcagggatggactgattgccatctttgtagggttctgggcattcagataagcacttgcagcagcgctatttacttgctattgggagggatacagcctccgaatcacaagattactcaggcacctctgatggggttctcattttactttactaatttgtccttttgttgcttgtgagtagcgacactgacttaagtcagagagtacatgtacttagtgattcattcacatacacaatgatcacccctggcatacttaggccagagagtatagatacttgtgattcattcacatacacaattatcatccctggtacatgtacttagtgattcattcacatacacaatgattaccgctcccggaggcctactgagaccagccagcacatgtttgcttttttgcaatcacgcagcggcaccaaacttcttaccctgtt

SEQ ID NO: 109740 - DNA, 1050 bp, Homo sapiens
tcctctgctctatcgggattcttctcatttgaagaataagttctgcagcttacaaaaaatgtttcacaggcacgggcctacggctttggacttcagaaggagagtacttttccttactatactatttcctattgcaagaccatattttcagaaccaaaacttaaggcccactatgtgactggattttggggacatgaaagcgttgggatttctgggatgttttaatggtataaagctaacagaatagtctattggaatcagggactgccttggaagtgggtcctagcacgcatgatcagtacacctgcaccttcattccagatgagacaggttcttggctaatagttctttcatcgctttcagaatcatttctttctgtccttggattttcaggaaattcagcttagtttcttacccctctgatctctagtttctttctccctagattgctcagctacctctgaaacttgaatctgaagtgatggagaatggggataacttctcagtgggggaacggcagctcttgtgcatagctagagccctgctccgccactgtaaggtaaggcagtttggggttggcagcagcagagaatgggaatgttttagtgcagccttgccctgacacactggggtccaaaggtattcctggctctgatccctgttggcactttctaagagcatgaccagagataactctaaccctgacacaatttgggtatattggttctggggagggagaacagggttgctttgtttttaccttcatccaagaccaacttttgtttctggccattgagtagttgtacgactgcaaaccatagacatagaagattttttttttttttgagacggagtcttgctctgtctccaggctggagtgtagtggccaaatctcggctcactgcaacctccacctcccaggttcaagtgattctcctgcctcagcctcccgagtagctgggattacaggcgtgcgccaccatgcccagctaatttttgcatttttagtagagatggggtttcaccatgttggccaggatagtctcgatc

SEQ ID NO: 109741 - DNA, 1050 bp, Homo sapiens
agtagctgggattacaggtgcccaccaccacacctggctaatttttgtatttttagtagagacagggattcaccatgttggccaggctggtcctgaactcctgacctcaagtaatccacccgcctcggcctcccaaagtgctgggattacaaacatgagccattgcacccagccgaaagatgtattttaacaaatacacgcacaggaaaaaatctagaaggatatttgccgatatttgcatttataaattgttctataactagtattatttacatagtaaaaatagtaaaagaataaatcaagttttatggagctgaggaggtggcccagtgtgctgtcagagctcccatctgtctggttgtggaatgagccgtctgtgaccatcagggtttggagtcttctctccctatgcatgtgtgttaaacatcttccacagacagcctttgccaatgggtcgcttagggtgggaccactgagaaattcctgtgtttctccctagatcaaatttggaccccttcaaccagtacactgaagaccagatttgggatgccctggagaggacacacatgaaagaatgtgtaagtgaagagcttaggggaagccgtgctgagatggtgagggtggaagcacagcagtgcccttgccacaccccgtctgctctggccgtgcctccaggatgcctgtggacaaaggcttcgtggcagggctctccaagtctttcagatacctgggaaaagctgatccctctcaaccccaccgcccacactgcctacggtcatattggccttgcactatccattgattgaagatagtaatgacaactacttagaattaagtgatgcttttaatttattagtcataacagtgtaacatactttgaagcgtccacatatacgcaaaagatatataacgtggccgggcgcagtggctctcgcctgtaatcccagcactttgggaggccgaggcaggtggatcacctgaggtcaggagttcgagaccagcctgaccaatatgatgaaaccctgtccctactaaaaatacaaaaattag

SEQ ID NO: 109742 - DNA, 1023 bp, Homo sapiens
tagaattagagtctgtgtctcctggattgaccaagacatgccagaatgccaggatccaatcagatgttcagtaaatattagttttcttcctttggatttaagccaatgattatcaaatggtagaatcctatctcaaagaatttcagtaaaaactgctgtggtggaggggtggaaggcctcatgtctgcccgtgttggttttcctttggcccccaaggcagctttgtggaatagttccttgagacaaaaggtagtctgaacaccacttccctccccaggctgctgctagtagccatgacacttagccattgtgctctgtctctgtcgagtttagtgatgataagcatttacttccaagggattctttcctagcaaggtgacagggtggcagctacctctgtgtggctactatggttgtcctggttttatttctctgtgacaaagcctgcagctccccaagaatctgtggtcagtctgaactggccacccttgtctccccagactctgtccttggaagcacctgccagaattaagaacaaggctccctcccctgactggccccaggagggagaggtgacctttgagaacgcagagatgaggtaccgagaaaacctccctctcgtcctaaagaaagtatccttcacgatcaaacctaaagagaagattggcattgtggggcggacaggatcaggtaaggatgtgcaaagccttctttgaatccattggaacgtagcagtttatgaaatatcactttcacccctttaaaccggatccttgtttgtttgatgagcaattagtgtctcagccccctactgaaaccaattttctaggtttattgttgaccccactttgatgacattgagtgcttttcacagtcataaatgtgcacattctcaatgcagaacactggggcacacagccaagtacgaaagaggagcagcacccacaactctgctacccagagagaagcactggtaacattttggtagctatcttgttaggcttcctctagtaatatgtaggt

SEQ ID NO: 109743 - DNA, 1665 bp, Homo sapiens
gttggggaagacaatgcattatatagactgtttttagactccgcagtctatggagcacaggggctccagactcactcatttcccagcattatgtatctgatttgactttcctggaaacattcttactagttgctcataggttgatatctccatttgttgtgactcccacaaacaggctcagatacaagtaggaagtccagaagtgaatcagttgcagatatgtgttattggaaatgtaaagatgaatagaaaggctttgggtacaaggaagtggttccagcagtgccatgatactgcccgcattcactgagcattgcagttgatggggtaacaggtatgccttaaaagccaagagaatgactaggtccctaagaccagctgctgcatgtgctcagttcttagtagtcctctagatgaaggaagttctccagcattggcctggcgtgtattgataatgaattatctctttgattgttgttttccattatcagttaacggggctgttccagtttacggtcagactggcatctgagacagaagctcgattcacctcggtggagaggatcaatcactacattaaggtcagactgctgtaggccttttaccgtgatctgactcctcttggagtcggtttaccctttgctgcctcagctgggtgtacaaggaggaggcttgtgttctctgcctatctaatcccacagaatctccagcaatctctcaaccgtgcttggaatgggaaagagattaccgtaagagtttctaagtatatttgtaaattatgtcgagctgagaacttcattggctaatttccagaatgttcagaaccttgtcagttcagcttaactgactaatggagcattttccttacactgtttaaaaccatgtattgttttaattcttactatgtccaattgttcttaatcagggatggccatcaggaccccctgctgagcttttggcaggacaaacgtggcctcatctctggattctgttgcagtggattggggtgggacccaggcttctatagtttgaaaagctccatagcgaattctaaactgctctcccaacttacaaacgagtaaatttaattgataccagagtatccagctcttcccacctttccccaggaaccccttccgtcttgccgtgggtggcaggcatcttgctgctgtcctaactggcactcttaaacaatttcctacagggatgtcttaatccatttcacactgctgtaaagaactacctgagattgggtaatttatgaagaaagaggtttaagtcactcacagttccgaaggcttaacaggacgcatggctgggaggcctcaggaaacttacaatcatagcgaaaggtgaaggggaaacaagcacatcttcccatggcagagcaggagagagagagaagggggaagtgccacacactttcaaacaaccagatctcctgagaactcactgtcacgggaacagcaagggggaagtccacccccctgattcagtcatctgccaccaggcctctcccctcacacatggggattattatacaattcgagatgagatttgggtgggaacacagagccaaaccacatcaaggggtgtccaatcatttggcttcccagggccacattggaagaagaattgtctcaggccacacataaaataatacta

SEQ ID NO: 109744 - DNA, 1066 bp, Homo sapiens
catggtgcactgagccttcagaggggtctggtctgctctctgggacccctactgatggccgtgccatgctccttcagtagcagcagtaaacattgcctgagtcccttttgctgtggtttagcttgcttctcctggtgcttggctccatagctggggaacaagtgccattctgcatggtggcggcatgtgcacacacttatggtgttcccatattcactctgagtttctttttcctcgccttgaaccatttctgctgttggcgtttgtaacctttccttctttcagaaaatgccttctgacctaagatatttttctaaagtttaacacaagcctctttattcagtctcttttcccatgtttactctgtgctgagatagatgttttccataacatctttaataggatttttttttgtttttaaagagtaactaagattagaaaaacttaatgtcctcctatgcatgcggcctagaatacctccagaattcctagaataccctcctggagtttccagggcattctctcagttagaaacaggaagtatttaaatacgtgccctccatcatctgattcgctgaagctttgtccatgcgcggggttgtgtagtactttctttgcccattaagtgttgtctttctcacagataccaggagctgctggatgacaaccaagctcctttttttttgtttacgtgtgcgatgcggtggctggctgtgcggctggacctcatcagcatcgccctcatcaccaccacggggctgatgatcgttcttatgcacgggcagattcccccagcctatgcgggtctcgccatctcttatgctgtccaggtcagtctctgggataggagcgtcatctttgcttgtttgagcccttcctctgctgacgtaaaagagggatgattgtggggggctccaccctgagccattatttcacctctggacccctagaattgctcatggtctgatttgaccgtaacaatctggatttgactggggcaggtagggataggagagaggtaagtgtggaatccaggaataaaggaatcgaactctgttgcatgtgt

SEQ ID NO: 109745 - DNA, 1467 bp, Homo sapiens
tgaaagttgataactgttgaagggtctgtgctcttcctttaatttttatgtatgtttaaaaattttgcaagacaaaaaatgtcttaaatgttaacagcagttcattggtattggtaagaatatagtttttgttttcttcttcacatatttattttccaaacattttaaaataagcataagttactttgtaaagggggaaaatgtttaaagcagtggggcaggaagggaaccaagaaaagggagtggagtaagaggattttcttgagacgaaaaaaaaaaatcagagcatccaggtttctaaatttttctttgatcagactgtttaaagacaacatcacaaacttcagatagagagtttgtggaacccctttttgtttttttcaattttcagttccatttttccaaaccatctgacacttgctcctttatttgtttccacagttgacgtgcggctgccgttccaggccgagatgttcatccagaacgttatcctggtgttcttctgtgtgggaatgatcgcaggagtcttcccgtggttccttgtggcagtggggccccttgtcatcctcttttcagtcctgcacattgtctccaggtaaataggaagcgttcatgtctgctggggccacggagaagcctcagttgctgggtaggtgctgtgacacggagctcattctctctccagggtcctgattcgggagctgaagcgtctggacaatatcacgcagtcacctttcctctcccacatcacgtccagcatacagggccttgccaccatccacgcctacaataaagggcaggagtttctgcacaggtttgtcctgatgggggctagaggcctcaaaggggagtcagcatcccagcgtttgatacttgtccgggaggctcttcaaggccagagatggggattataaacctcattaccaagggtattcatgatttaatggaataatctctgattaaaatccaattgcttggcgggactcctttctgagcaagtgagaaaacagaaatacagatttgggccgcatgcggcatcacgtgcctatagtcacagctactcaggaggctgaggctggaggatggcttgagcccaggtgttcaagtccagcctgggcaatatagtggaccccatctcaaaacaaaatacaaggaacaaaccccacagattaggagtctattggccttggccctgaaaagctatatttcatagagttttgctttttcttttaagtagtaaaaggtagtcatgacatttgagtagattttatttaagcatcgagtattgtttatttgtgaaacttatgtgcattgtcattgtggagctttgtattaataagagattggaactaaaatgttcttcaatataggacaggttgaataagctatggtatatccatagagtactatgtggcccttaaaaagaatgagggagctctataggtactgatagggaatgatctccag

SEQ ID NO: 109746 - DNA, 1049 bp, Homo sapiens
aacgagacctcggtgagtgacagcatgaaggacaatcctcatatgcagtactatgccagcatctacgccctctccatggcagtcatgctgatcctgaaagccattcgaggagttgtctttgtcaaggtatgcattggtgggtggtctctgccctcctccctggtgacctgtggtcaggctttggtgtggcgtctctcagttcatgctgagtaggggagctcccttaaccaggatggccctggctgagatgactcatattccgttagcctccaccttttctcacttgccacctgtccctcctgacccctcacacctccccgctttgggagtggatgtgctgcggagcggttctctggaccagtaggaacagagccgtccctgggccctgaccactctgtgctctgctcctcagggcacgctgcgagcttcctcccggctgcatgacgagcttttccgaaggatccttcgaagccctatgaagttttttgacacgacccccacagggaggattctcaacaggttttccaaagacatggatgaaggtatttctcactgagcctttttttaatactctggagctcactgtgcttccagccttctagatgattctccaaatgtgcagatctgtctgtctgtagatcctgagagcacagtgactgctggtgttttcaccaggaacattgcaactgcattttctgtcttgtttgacctgaaaataaattcaatgaattgagttagcagaaaggctttgaacagaggcatctgagattctgaaacacacacagattttaaagcaatgcattggtttctggatgcctacaacctggcaggttttctggctgttgtatgggctgtgcctgcaccagaactgaaatactgtacccccacagttcagagtaacagtaaagcccctgacattgacagggggcttcctgtgtagcaagcagcatgctcagtgttttatgcatgttaccttaatccccgcagcaggcctgtcaggcgggtgttgtttcactccttgaataatgagaaagctgctatctggaaag

SEQ ID NO: 109747 - DNA, 1078 bp, Homo sapiens
gttgggtttatcaggatgtaagcccattgtaaattgaggagcatctgtgtacctctcccccgagttgtgacaaccaaaaatgtctccagctgggcgcggtggctcaggcctgtaatcccagcactttgggaggccgagatgggcggattacctgtacggcaaaaccccgtctctactaaaaatacaaaaaaattagccagacatggtgctgcatgcctgtagtcccagctattcgggaggctgaggcaggagaatcgcttgaacccaggaggcggagattgcagtgaaccgagattgcgccaccacgctccagcgtgaacgacagagcaagactctgcctcaaaaaaaaaaatgtctccagatgctgccaaatgtcttctgggagcttaactcgtctcctgtagagaactactgaactaatgtatgggtttttgaatgtatttgcacaaacagcatattgtgttgtctctgcctttgccttcagtacctggttgactgtgatgaagtgatcttcatgaaagagggctgtattacggaaagaggcacccatgaggaactgatgaatttaaatggtgactatgctaccatttttaataacctgttgctgggagagacaccgccagttgaggtaagatctgatggtgtttgcgtgtgtccccttctgtctctgcaagggaaacacagccggagtgagtgatggagagacctcagctgaatccagtgtctgtgtcttattggcaggggccctgttttctggtgaacagactgctgtgccttagttcacacactgattctgctctaggagagcaggattgtggggctggtgagctgaggtcttctgtcactgagaacttactaatatgacaatggcagggagaaggatatgggctcagtgagggcagagaagatgtgtgctgctgttcattcacagcttagtttcctaagctccatccacctgattgaagcattatgaagctcttttttaaataaacaagtgaataaagtgccaaggtagggaaattaaatattgcatacatttgaaagcactcaggtcaggtgctgcggctcttgctggtaa

SEQ ID NO: 109748 - DNA, 1041 bp, Homo sapiens
agcagagtggcagagctgggccagagctgctcctgggagtgcaactgaaatgcttgggagaagagcctcacagggagttaggctgtcattaggcctttgtgttaggaaagcatgtgtccattagggcagggatgttaacactgcttgttttaaggttgtaagtattttctgtgtcttggggattgtaaacaaaatcccattgttgactcagagttgatgttttttattctatccagatatttttaaaactacaagtaagcgtgtgcatgttgagcatcttccttgaacttgattttgccaacctccttaactcagatagtctgtagagagcccttttctattagaaagagcccttagaacaaatccacatttctttgggtctctgccctgcagcagtttccagaggcttgtctttggaactaatttgtgctcttcagtgttaaaacttgtctcccatgaattgccctgaaggtctctgggattggcacctttatttagctgatttcagttaaatccctcaaaccagatttggtgaatggtttaattactttagaggtccttaaatccatgtccccagatcagcagcatcagcatcagcatcatctgggaacttgttagaaacacaaattcttaggctgttctccagacctactgaatcagaaactctaggggtggggcgcaaaggtctgttttaacaaaccctgcaggtaattctgatgcaacttccagtttgaaaacctctgaattaattgaatatttgacaactgatttattcatttaatcatttagtaacatttattaggtgtttattatgtgccagtgacatgtgcagacactgtttggcactaagaatataaaggaataagacaataatctgcacgtaaagaagtgtacagttaagaggatgagatacccaaacaaataggcacaaaataatctgatgaaaagagccccatctctttggggtactagcgggaaagaggttgggggagatttcagaggagatgatgccagaactgagcagacaaagtagaggcaagc

SEQ ID NO: 109749 - DNA, 2603 bp, Homo sapiens
agcgtgaccaacatggcgaaaccctgtctctactaaaaatataaaaattagctgggtgtagtggtgcatgcctgtaaccccaacaggagaattgcttgaacccggaagcggaagctgcagtgagccaagatcgcaccactgtactccagcctggttgacagagcaagactccatctcaaaataataataataataataaaatgatttttaaaagccctaccctgtcttctaaaaaatgacaaaaacaagtaaatgaagaacatgggttagcagcagaataggaaagaggctgggcctaagaatgacggtgggatactggaatgtgtgcggcatatttactttccccaaagggcttccattcctgttatctcaggtgtctccacagaaacccatgagataggcagctaatgagtgagaaaacaggtaagtggcctgctgagtcatcagggtgacagttctgtatgggtagactacagttaatgtgtttttcctcaagtccttagcgatgagtggttagtagtctctaaatgaccctcctctctgtgtgccttgtccagggtaaactggttggaatctgtggcagtgtgggaagtggaaaaacctctctcatttcagccattttaggccaggtaagatttttgttattgtccttttctgctgctttctctggtttgcaagagtctcaggaaaaacgaacaaatttcctggagagtcaggaaaggtggaaacaaatgaaccctcagcctgcattgtatgcccccaatcccccgcagttccccccagttctcccccttcacagccttctgcctggaaggaggcctggtgggcgcctgatggatgactgactgttgtcccagctggaaccatttggtctcatgccttctttcattcagcatgtatctattgagtgccacaggtatgcccgtgtattgaaaatgtcagagataagagatgagcagacaccctacactgcagcgctgccaacagagttaacctgtaaagaagcagggcggccagcactcccagcctctctgtcagacaggactgtcagggtttgatctagaagcaaagcccctctgttttctgcctaatccctgaaagagtcatgcccttggggagttcatggtccagtggggagcaaggccttgagaacacaacaagcacatctccaggcagggagtgaacagcgtgcagggcccagcacacggtggccagtgctgagagtgagggacaggatggggccggagtcatcccactgagacacactatcattgctgtgttttagaatcaaacaatccagaaaaaaaaaaaaaacaaggtgcccacatgcttttacattagaattaaattaacttgacttagatggttgagatgagcataaacttatgattatctctacaccctgatggataaggtccactgaattgaaatgaaacagagggggagcaggggtgcttttgtagcccccagattatggaatgctttcttgtcttgtttggcatcagctgtcacagttggtgagttgtggtcctccttgagggtggtggtgcctggggctgtctgagtcagatcatggcaggcatcacctccaccttctgctttatgacactctccagtggctgggcccagccattggtcttgtaaaaagcaccagacttcctaggtgatttatgatgaccaaccagatttggagggccagtgaggagagacagagatggggggagggggagaaggaaagaaaaggtcaattcgtaagtgctgctctgccatctagcaatgtgctcctttttccagggttgactaggcagtggttaggttgaaaaccaagtcaggctttgcttctggacaaatcctggcaaccctgtctctggcagggaaacgggttgggctggtcagccctgctttaactgtagtttacatctgttgatagcgctgcaatgtgcggtgtttgtgcagcagccagaagtgccggctttccacagtagaccccctggggacttctgaaccctttgaagtgcacatcagaatgctaccagtttgtggtgtacgtaggtacacctgtgtgtgtacacgctgtgtgagggtgtttgagaagaccagcttatatgaacaagtactgcacaggctggttagtgaaactttgcttcaaagctgtagcatccctaaaccaagacaaatgtctactatcagtcccaaacaaaagaaatcatggaagggggtaaaatggataagtcaattcatatcaaaccattgcaactgaacacaaacttcaaagcacatggttcatcactgcttgtgggcaggcaaggtccatcattggtaaatggacactgtgtatatattataaatactaggtgatgtctaacctggactttttttttcccttggtcctcatttcatagaagcaactggtctagccagcatcctaggtaattgccttggatgagttggcctgcccccatgttgaggcagggattagctggaaacccctacagcatcctctccaggagaattctgcaagaacctcttgcttgtgcttctcctaatttaaacagtttgcacacagcaaatgggctgcagagggaagtgtttgccttcaagtt

SEQ ID NO: 109750 - DNA, 1051 bp, Homo sapiens
agctgtacgcctatagttccagctacttgggaggctgaggcaggagaattgcttgagcccaggaggtgtaggttacagtgagctgagatcgcgctactgcactccagcctgggtggcacagtgtgagactcagagtgagtctcaaaaaaaaaaaaaaaggtgggtgaggagagagtgtgctggggcagggagcaggtgtggttacaacttgaataggctgcctgagggaatgccttatttaaaaagtagtatttgggcaaagatcaaaggagatgagggagagagctacctgggtatgggatgggtggggaagaacattccgggccaaaggaacagaaacacagaggccgcaagtggtgagtgtgtctgttattggagtggaatgagcatgggagagagtagtggatgccaagggcagaggtggtgcctgccagagcctctggtgagacttcagctttactccaagtgggaagaggagcctttggaggattcacagcagaatgacatgattggacttatgtatgaagaggatcattctggttgctgcaggggagacaaggaagcaaggagaacagtcaaggctctgttaccacagtaaccgggagaaagatgaggatgtcttagatcaaggttgctggtgggaggtagtaagaaatgtttgtccatgtaactggaagtagggaggaggtttgaatgcagtgtatatgaaaatcagcaactgaccagaggcatggtaagccaatccagaactagactgagaagaggacaaaaagcttccagcccttaaaagctatgagcaagaaggggacacagtctttagtgacaccacttgaaactatgagtgtcattgaagggcatgcaagtcaggtttttacttcagttaactttttttttttttttttttttgagacagagtctggctctgttgcccaggctagagtgcagtagcacgatctcggctcactgcaacctctgcctcccgggttcaagtgattctcctgcctcagcctcccgagtagctgggattataggcacgtgccactgtgcctgg

SEQ ID NO: 109751 - DNA, 1365 bp, Homo sapiens
ttctcagggagatacccttcacttccatgcaagcctgttcctttggttgtttgaactctcaagttccaaggcaaggctttgaagacatgagagtttcttggcaagaagatgttctctgcggtagatgaaactttagatactcttttctgacggtagcaatgtaagcctgtgacagtctctactcctagatacatgcggcgctgtgagtgtgggaagtgggcaggctttggcattctgcaggaggggtctggaaggaaaacacgtagtgagcatctgtactggaggtcagcatgccctttgcttttcctacctgctttttactactccttagaacaaggggctacgtgccagtcagttaaatgtcattaggtccgctttaggctggctgagggggaaaggcagtttagcatgtaatttgtcatgtggaatattgggtcattgataaggcccctggacctcttgaggttgccccacactcccgtgaccccttgatgggcctgagattgggctgcactaatgagctaccttttgcccttcagcttccttccactgtatagcctgatgtgttttgctacgtgagtgtacgccctaggcttgtctccctggtcttgatccagtgtctcatctttgcacctctctcacaactcctatcagagtttgtttctaatggaagaggttcacatgataaagaacaaaccagccagtcctcacatcaagatagagatgaaaaatgccaccttggcatgggactcctcccactccagtatccagaactcgcccaagctgacccccaaaatgaaaaaagacaagagggcttccaggggcaagaaagagaaggtgaggcagctgcagcgcactgagcatcaggcggtgctggcagagcagaaaggccacctcctcctggacagtgacgagcggcccagtcccgaagaggaagaaggcaagcacatccacctgggccacctgcgcttacagaggacactgcacagcatcgatctggagatccaagaggtaagtggtccgccccctgcctccctgcccgcaccccaccaccccatgctgatctgccaccaataggcggctgctgttccttttcacaaagtgctttgtggctaggagtgattttgaactaaagagcaaattagaccagctctaactctaaaaaaaaaccaactaagcatttagcaacagaaatgaataacaactaatcttatgaggtgatcattttataagcaaggaaatgaaacattcaagaggattttccaggatttttccccaaagaggattctattttagttgtatgtgagctgtgacaattatttctgattgttacaagtctgtgagcgcccttgtgcactaggctgt

SEQ ID NO: 109752 - DNA, 1117 bp, Homo sapiens
tgcgccactgcattccagcctgggtgacagagtgagatcctgtctcaaaaaataaataaatacattaattaattaatttaactgggcatcttatatttatctggcaaccctgtgagtagtcccctcttctgttctcaacagattcattctgatttgattcttctagtgaatgaatagtgttttcatggtcagtgtcctgtgataaagttgaggcttatggtttataggtttatatggttataggtttatgttatatctaagattctgttgttctgacaggtgcaaattcaagtagatacaagttcaagtatggggaggcccttctctgcctcttagcacgtcagggcagagtgatctgaagccgaaactctcctggtagaagggagggtaaggctgcggggagtaggaaggaaacatggggctggagctgtgaaaaccagtaggtactggcatgtttcttaatagttcattgaggcctaaaagaccttcatcctttgaataactctttaagggagagaaatgatggaaattctgtcggcatgtggttttactctgtgaaggtgatcaaaatgtttggcatgttactcttagttcaatctctcaggaaggctttgaacaaatgaaagcagcagccatttcagcaagcgggggccacacctaaggttactcgagagtgaagattatctcagaagtttagaatcatgacacttcggggaagataggatcagggatgaatgggagacgggggcttaagggagagcttagaagtttagaatctaagagagaaagggtttgtttttggggagagggattatgtatgatatttaatagcacctgcaaactttaagatagctggggggttctcagtaactaaggagggtcctgaccctaaaagctatcttttctctaaagattttgtaatgtttaaaatttttttaaattaagataaatatattttaaatcatactgtgaatccaactggtatagcattctgtagagaagatcactggcttaagaggattgttagaaggtggctcacacctgtaatcccagcactttgggaggctgaggcgggtggatcacgaggtcaggagatctagacatcctggctaatata

SEQ ID NO: 109753 - DNA, 1729 bp, Homo sapiens
tggaagttgcagtgagccaagatcgtgtcactgcactccagcctgggcgacagagcgagactccgtctcaaaaaaaaaaaaatgtaattgacttgtaataacagctgaccgtgaagttgcagccttcctagcgcctgagaggaaattcatggtgtcaggttacttcagttgcatagcatcattaggcacagtttcttctcttctcctattttcaggctttcacagtggtgacagtcttcaattccatgacttttgctttgaaagtaacaccgttttcagtaaagtccctctcagaagcctcagtggctgttgacagatttaaggtaagtggctccttcccctgcccccgtgtcaggagccctccccacacaactaactgctggctctgttcaaggggccacccaggctggcctcactgggcttaagcttggctttggccttttggcaagttggtaagaaaaagggggcagtggaggagactgaattgagggatgagacttgtcaccttttttaattaatgtgaatttttaccttttgtgaacggccatgatctgggctcccaggattgcagagttcccctttagagctagccccttccacctgggcctgacatggatgtgtcgcaactcactgggccttgaagtggcttaaacctagaagaccagcactgtggggcatcttccccttgatctttgctactgtcactttgattgattgacatgctgaatcctttttgatactttctttttcctgccctgtggtgctactcacgatgcagggaaagcagttacatggaaatagtcataaaactaggtcatgttgagaagtgcagttaagtaagtctcagcttcttttcttgcaggtggttagttgatcataccttggctgtgttctttgttccttcagaatactacacatacatgatacaaaagggagtatatttgggagggtggagagaaatagatatttgatagtggttaatacttaacaaaaaaagggatgccatgtgggctggaattccttgatgttgccactgcatagattagctcctatgtccctgcttgtctttattggccagtgagaggaataagaaagcaattttggtgatgtgaaggcttgaagctcacatgtttgagggatgaatataatcatcttggaggttcaggagaaaacaaattggattttcttcttaagaaacatggaaactcagttcccgagatttgtttgtattctacttgtttacagttgaccgggtgacttttatttggtcaagaaagctagtcctggctgggtgtggtggctcacacctgtaatcccagctctttgggaggctgaggcaggtggctcacttgagcccaggagttcaagaccagcctgggcaacacagcaagaccccgtctctacaaaaaaataaaaaaatagccaggtgcagtggtgtgcgcccacagtcctagctacccggggggctgaggtgggaagattgcttgagcccaggaggtcgagcctgcagtgagttatgatcatggcactgcactccagcctgggcaacagaatgagactcttatctgtgtttttgtttttttttgttgttgtttgtttgtttcttacaaaaagagaagaaagaaaaaggaagggagggagggaagagagagaaggaaggaaggagagaagagagaaaggaagaaagctagtcttcgaatgtgcccctcccccaccccaacgtggccac

SEQ ID NO: 109754 - DNA, 1078 bp, Homo sapiens
aggctggtctcgaacacctgacctcaggtgattccccctgctttgggcctcccaaagtactgggattataggcatgagccaccgcacctggcctcttagtccctccctttttaattctccagtgccattgtgttgtctttcctattaattccttaggcaaaaagtcaacaacaaccaggtaagcaaacacaactgccaattatagatacaattaatgtgttcattccttctcaacctaagaaatttacaagaagaatcagaaaaaggtatcatagaagatgatgattgagttcatacatagtgactgctttctgttagattcattcctgtcacttgatccatttcaaacctcagccttttataccagctttagtggtagagttgatagtcataggtgttgaagggtggctggagacctacagagtcttgtttggaggtggaggaacaacatccctaggcttcttttaacttgctttgaaattggcttgctttttattcatagaaatccgcgaggaggagcgtcggatattggaaaaagctgggtacttccagagcatcactgtgggtgtggctcccattgtggtggtgattgccagcgtggtgaccttctctgttcatatgaccctgggcttcgatctgacagcagcacaggtcagggaaccctcagggatggggaacattttagaaataccacatttgctggaggctgaggcaggaaaatcacttgaacccaggtggtggaggttacagtgagccaagatcatgccattgcactccagcctgggggacagagcaagactccatctcaaaacaaaacaaacaaacaaacaaaaaaaaaataccacatatggagatgatgctgtggtcctctccttactggacctggaggttcccccaagaattagtaggtattttttcattcatgggattaagctgagaagcagaagagtggggagccagcccttatgcacaaatagtgtatgagttgtttttagtcaacataagtttgagtttaattctgaaattacagatcatcctgtggttcatatttactgacaattttaattgaaggtctcaa

SEQ ID NO: 109755 - DNA, 1049 bp, Homo sapiens
tcagctggtgaaccctgtcccacttgacataggagtgtttgagtcactgcgttggagttggtgctaagtgatagggccctcctgcctcccctttggaagcactcagtctctgtggtcactattgagaataaatactttcttgtcttcattgccttataaagagataagaattcagtaatgttttattacaattcaataggtcacttttattaaagacagtacgattacataacatttggcccatcctagcaagcaggattatatgctcattttattgagaatgaccttaagcagattaggtagttctcaagtttgaatgagctttaatttggcgtggcatcgcttttcctttcagatgtttgcatcacggctcacagcatatttcaggagaaaatgcgtggccgccacggatgaacgtgtccagaagatgaatgaagttcttacttacattaaatttatcaaaatgtatgcctgggtcaaagcattttctcagagtgttcaaagtgagtttaaagattttgtatgtgcatgtggtagaaggaccttggattctttgggtcttataattcacacactttgctttctgagcacattacgtactaggactagtgtctagtatcgtaggacataatatcatagaatctttgtgttcaaaagggatcttagaggtttgaacccataacctcatctcactgatgaggaaattgagacctgggaaaatgttgatttttcccagttaaaacacagctagttaggaataatccagtttcgaagccccctgtgtatattctcatcctgcccatgattttccagcctggtcatgaggctttcacagaagacaatatcaaattactactgagagcatcacctttgcccactctactctgtggtttcacgggaaatagtttgtggcccttgaggtaaactgggagtcaggatggctggatgctggtcctagctctgtcaaacgtgtaagtgcccacaaagctaggagaaatggcacagatggggcattcagaaagatctcaacacaaattgaaccagtgtgc

SEQ ID NO: 109756 - DNA, 1917 bp, Homo sapiens
gaaggatgccaccagtttttccttgaggcctaggattttttattctgtcccgagcagaggtaattcctcacaacttagtgcaccagtagcaccagccattttgagcagagtacctctttggggagcttttcgttttgttttgtttttaattctctttccttagcagcaaggtcttttttcctagagaatctactccgttgcagaatcattgcaacctcaggagccctcactgattgagtgctgtcagcctgatatactactttggactctggaaacagatatgggttctattctctatttctactgtgtgtcgttaaacaaccgtcggagaccagatgacctgttagatggctagtcctgtataactcgactctgtatgtttcaatgtatgttactgcaatgcttcacctgctgtacagtgtttgtgagatgctctttgaagatggtacttttatattttttcattttcaataaaagtacattccttcccacttcctggtatttaatactgttgctgaatgtgccttgtgtgagtgtgtgctccggcgttgcaggacctcagctggaggtggcactcggtggttcttgggggctggccgccttccctctgcaggtggtgttagacatatgctacctgaggtaacatgttttcatttttgggagggagtcgggagtggggcgggcccatgggagggtctctggatttttgatagcctgctttgtttgctctcttctgtactattaaactgctgatgtttattttcaggaatgttttgcaaatgcacttctcactcttccccagtacaactgtaggtacactgttcctttttatcaaataagcacgtttgaaacgatccaaaaaaaaggtcttaatttcatgtaaacaaatgtatccatgtgtggagatactggaataaggtcaaagctatacttttgaatgaccatgtgtttagagttaatttcagctcattgataggtttatgttacattagaaagagtaatggttttgatgatgtcctgtaaggaagaaagtttgcaattagacctagctcctgcagaatgccctgagtaagttactgcaggcagcttgtaataattgggtcttccaaagttttgctttgcttgcgcactggtccctgagtggagctgcctactctttctaacttaacataaaactatggcattgtgtgtgagtgccgtggagatgttgacagtggtgtgtgtctctccctgtaggccttcatggtgaaacacctcttggagtatacccaggcaacagagtctaacctgcagtacagcttgttgttagtgctgggcctcctcctgacggaaatcgtgcggtcttggtcgcttgcactgacttgggcattgaattaccgaaccggtgtccgcttgcggggggccatcctaaccatggcatttaagaagatccttaagttaaagaacattaaagagaaatccctgggtgaggtgagtgaggggtgtttgcttcacagcagagagcaacttcctagcttgaggttcattcctctagggccctgccttatcctttatcttcctcctgagacaaatgaaccgtgtccttgcagggtcccctcactactctttgtatcttatagctcatcaacatttgctccaacgatgggcagagaatgtttgaggcagcagccgttggcagcctgctggctggaggacccgttgttgccatcttaggcatgatttataatgtaattattctgggaccaacaggcttcctgggatcagctgtttttatcctcttttacccagcaatggtgagtaagcctcccagctgaatcctggcagcttctccttaggagatgagttacttccattgggttatagtaggcattgctgaggtctcacagctctgattggaaatttcctcaaagcaggttc

SEQ ID NO: 109757 - DNA, 2044 bp, Homo sapiens
aatgcaagaacttcattggctcccctctaaaaaaaattccatggattgctgggatttttattttttattttttgaaaaaaatggtacctatccgtattcagcttggtggcttcacagtccctcccctgaacatccgtatattccttattctctcatttatggtgcagaacactggggtactaacctctaggaaactgttctagctgccagggaaagctaagagccctcctttaacaggaaagcagcagcatgctttttcttctctctgccgtttcagggaagagcaccttaaggccagtgttatttcatgggattctgccctagagctgagaaagtaatggactcatccataatctcttttatagatttgaaagtgtaaacaatacacacttccttttttggaactccaattctaatatgtttctttttcattggaaattgaaaaaccaggctggttttgagattagtactagcagtgagtaaacctcctgtctgtggacttaaatccttttgaggaacatttcgttttagatttttacaagttttctaatctggcacgactttcaaactagcttaatctgttcttacagaaacctgtgtaaggacagactgcccacatacgggctccccaaataaaatggcatttttatttcttgtccctgctcgggtttcaccgaaccttggtagccataatcagaacaaatgaaacacagtcaagttgttgtgttctgtttgtttttacctgccagccagctgatgctgacatttatacaccaagatgatccaaggttttggtgacgccggtggggactgccgctatatgtgcagggtgcccgggggtcatagtaatgttaatggagtaccagaatctctaacagtgtggtcctgtgtagccacattgctacacttacagagatgctttggggcctttttggattaagacagttctaaaagaccaggcctcacctatgatctgtgtataaagaattagcatcgcactgtagatctgcaagagaaggccgcctcctgcagtgctctctcttggtgaatgctaactctgctcgagggccttttggggaaaggacagtgtaaaacccttagagaggtaagtttcccacccttccaacctctctccacctgcagcttgcttggtgctgtcaggatctggatttggggggagtctctctgtagtggaaccagtgacagaagctgttctttagaattttcaggatggctgtattctgcggtcagaatgagagagtcaagctgggcagaatctctcgccaagagttcaggtaaggtaatgtttattcactgggaatgctttccacagccagacagctatgctaacagtctcaagttttcttccagtttgtttagatttaaatgatacatttgtaactttttaaaaactaaattttggttggatttttcatgaaaacctcttttttctttatcccctaaaaaatggtttgaaatgtcattgttatttaaaaacccgatgtgttggaacttctttaatctgctgtttcctctttttccccccctttgaaagtttcgcatagtgtaaacattcactatgtcttttaccttccctgctcctcccatctgggaggcgctgatgctattacccagtgctgaaaaatggcactctaaaggtatgggaaggaaggagcccaaggcaaccacctgctgtcctttcagccttcctttggagactgctccatcagtgccgaggtgtgtgggaacaggcttcactgcaccgccatcttactgagttgcttcacgtgaggaaaagggggctttggccctgtgactcagttccacattttggattgcatactggaaaagaagccaatcttcttgctagtaaaccagcaacccggctgtatacagtggtgacccaagcaatggatataaacctaaaaatctgagggaggggagaggtggaatacagtagttcttggaatctgaagtctcctatttgatcaggttatttcctgggacttggcaaaaatctgattggtggggatctcctaggacc

SEQ ID NO: 109758 - DNA, 2917 bp, Homo sapiens
gactctatctcaaaaaaacccaaaaaaacaaagagcggaccctaatgtaacctatggacttcagttaataatgaatctgtattggctcatcaattgtaacaaaggtaccacactaatggaagatgttaataataggaaaaacagatgaggaggacgggagaggtacagaggtatatgggagcattctgtactatctgattagtttttctgtaaaacctaaagatgctaaaaaaaaaaaaaagaaaactgtttaaaatttttaaatatctagcttaatgttccccaatgggttcaaatcatacaaagttagtgtttaacctcctgacccttgcttggaatttctcagttaagatgagtccagtttgcagtttgagctgtttcatcagttccgtttgcctctcgcctgtgtattaactgtgctcttgcctttctccctatctgctggaacagttggaatgccaagatgccttggaaacagcagcccgagccgagggcctctctcttgatgcctccatgcattctcagctcagaatcctggatgaggagcatcccaagggaaagtaccatcatggcttgagtgctctgaagcccatccggactacttccaagtaagatgccgtgctgagtgatgacagtgaagcatcaaaggcctttttttttttttttttttttttttgagatggagtcttgctctgtcgccagtggcatgatctcggctcactgcaacctccgcctcctgggttcaagtgattctcctgcctctcagcctcctgagtagctgggactacaggcgtgcaccaccaccaagcccagctaatttttttgtatttttagtagagacggggttacaccatattggccaggatagtctcaatctcctgacctcatgatctgcccgcctcggcctcccaaagtgctgggattacaggtgtgagccaccgcgcccggcccatcaaagccgttttagaacattcaggctaagattagatcatctggggagactggtctttagctaagagctgtgttcactaaacagtgtccattaaacacgggctgccctctccgtgcgtgttgatagctttgtgatttcggttttctctccttagacaccagcacccagtggacaatgctgggcttttttcctgtatgactttttcgtggctttcttctctggcccgtgtggcccacaagaagggggagctctcaatggaagacgtgtggtctctgtccaagcacgagtcttctgacgtgaactgcagaaggtaggcgcctctggtccaccctcatctcccccatgccgggtgggcagggcctgagctaggagtgtgaagtccacagctctgtgtctttaaagagccgagctgtccagtggagggcgggcggcctggggatgactttctctttgctcttttgctttatctcctatttcacctttgatcctgttttaaccacgggctttctctctctctctcagccccgcttctcttcctgagtctgcagggagattatgttgctgccttgtgacagaatacatttttgtggtagctgattgtcatgattaaaatgtagtttacaactttacattttaccacaggaaccttcagaaagggttgggggcccctgaaaaagaaagttcttattcacaaattgcattcagggatcattttcctgggtggaaagaaaggcttttgctctcatcattttctgtatcctgggaggctccttatacagggtaaatgtgtagttccctaggaagggtattttttcccagaaggtgaagactatgtacataattttaaaggagagacttgtgtgagtggtggcaaaacctggagacaaaaagtggtggcaggcggggagctaggtgtgcctttcccccgaggagatgtgtaacgaggacgtgtgcccttgttaagactagagagactgtggcaagaagagctgaatgaagttgggccagacgctgcttccctgcgaagggttgtgtggatcttctgccgcaccaggctcatcctgtccatcgtgtgcctgatgatcacgcagctggctggcttcagtggaccagtaagttctaaccatcctttccgacagtctccaggggcccggccacggccagctctaacactcttattctgttgcagaggttgtgctcagctttgggctaggtagcagtcttagagatgccttcaggtctgttgaaaggggtcgatggattttggcaacagctggaaggatgaaagggcagtgttgccagagaagaaatggaactggcttgatttctgggtgggggtgaaatggaactgactccagttctgcacaggactgtgcttctcggttgtgtgttaacatgaactgacagtcggtgcaggcagatgtgtcttgcagtgctatgagtgggtgagagcacgttgtgtggcccgggctggtgagccagcaccgggaacataccaagtgcctggaggcagttatcacatgtttggcaggtctgtggcaaataagccctgagaaaactagaggactgtcgaggattttagagtctgacctggagtccgtttaagtttggcttatagtgtgactgtgtggcaagtgttggggtggcagccgtggttttccccagtctgtactgatgcagagtagacaagagagcctttgacgttcactctgtttcctgggcacctgtttcttacacctgctgtgctgccttacacttgagaccttgattaaatctattctctacacatttgccttgaggcatcggagcagtagtactgcttgtactgtgcgttttccatatgtgggtaagctggaggttcatggttttggtaagtatgtgcctaagatgcatggcaattaggtaaaactaatttgcagttttgtttttgtttttatttttttaacgtttgatgcctcttgttaa

SEQ ID NO: 109759 - DNA, 1021 bp, Homo sapiens
cttactgtgagaatttctactccatgctttgttacatgagaattctgagattagtgctatttcaaccacttttatgggggtttgttaggataaaattgcactgagtgcctgttctaaaaccaaaggcagcaggagagccctgagtctctgccatcagtagtgccactgcagtactcacgagaaacctggggaatgaagacttgcctggcagctttcatttgaatctttttaaaaagagcctttgattttgatgttttccaatataggaagtaacttactacctaggaggtggtgaaacatgacatagttatatatagtaaaaagaacaaaaaccatgcaatcagaggattttaaaaatattaagtccatttagttttctatgaataggttttagtgaaaactgtcactaggcattttagaaatgaagaaaatgaaatcagtgtgttatacacataggaactggcatttttttggttcccaccatctggaatagtcttacagatcggaggcactcggtaagttatttgtggaaagaatggatgaaagctgtgaagattctggtttcctattaatgctaatatgccatgctcatgtaaacatactgatggattgcttgccaagttttcctcttctgatgcttctcaaacatcaaagatgtttatagaacccttctggccggacacggtggcttacacctgtaatcccaacactttgggaggccgaggcaggcggatcatgaggtcaggagatcgagaccagcctggccaacacggtgaaaccccatctctactaaaaatacaaaaaattagccgggcgtggtggcgggtgcctgtaatcccagctactcgggaggctgaggcaggagaatggagtgaacccgggaggcggagcttgcagtgagcttaggtcgcaccactgcactccagcctgggcgacagagtgagactctgtcttaaaaaaaaacaacaacaagaaaaccccttctaactcttgaacttggttcacctggaaaagcaaaaga

SEQ ID NO: 109760 - DNA, 1015 bp, Homo sapiens
ccactgtgcctgggtgacagagcgagactctgtctcaaacaaaaacaaaaacaaaatcaaaaacaacaacaacaaaaaacaactgagttcttccctgtttttcttagcatgtccagagatatacctagtctccagggtataacaattctttttgtcttctaggctgaggtttgagggaaaaaatgtcctttaagttttatccatagtagagttgaaacaggttgggatttttcagaagagactttactcaaaatcctaagggaagagaagggagaaaaaatgaaaataaagtcattaacaataaatacactactttggctgggccctgcctcatgagaggccagagtggcttgtggagtttggcaacaccgccccccctagaggtaattgctgtgctgcgctccaacctctccaacaattgttagactcttcagatccctgttgatacagagcattccaggattgtgaagtgggagccagccacatccatgatgttcatggagcctagaagagccctgtggaaacaaattttacctggttacactgagatccagacatgcacagaccagccctcttgaagagagcttgagcttcctgactggggctggaatggagagagacaatgaagttcctgagagtattgccaggagaaaaaggtgtggctgaatggatcagccgaaacatcaggggcttgaatccagagggaggatggggtctcgctatgttgctcaggctggtctcaaactcctggccttaagcagtcctcctgcctcagcttccaaaagtgctgggattgcaggtgtgagcatctgcacctagccaacaatcatttattgtatatttcacagtagctagaagagaagggttgtaatgttcccaacacaaagaaagatagggctggccacagtggctcacgccggtaatcccaacactttgggaggccgaggcaggtggatcacctgaagtcgggagttcgagaccagcctggccaacatggtgaaaccccatctctact

SEQ ID NO: 109761 - DNA, 1056 bp, Homo sapiens
cttcctgccctctggctgctcgcgtgcgcggcgctcacccgaggctggtccttggagatggggaagaagcggcgatcgaagctatcggccaccagaactgcttgtaggggcggcggcggttcctcctccgcccctctggctcccccgccaccgctgcctcccggccccgcgccgctgcgcttgttagcccgactaaccaccacaccaggcggcgccactacaggggccgccatcttcttctctcacggtcaccacttccgcaaggaagctgccaccgcacgcagtaggggacaaaaaggatccagcacttgaaatgcgatggactaattaacgaagggaaggagacgaggagggagcagtgcgcatgcgtcttccccgggagcccacaggggtctgaggttgatcccggaggcgcgaggagtcggtacgggtcacggttgtcccggcccctgaggcgcagggtaggagtggggtcccatagatgtcagactcggtctgcaagtatcgtcggccttcatttgtaggtgaacaagccgagattcttgtggcgtgataggacttgtggtcgccacgaaggggccagctccatcgggaatctgtaatcgcccagcagtttccccgccccgcgcatgtgaaatatgtagccctccgtattcattctagaaacttctgggaacccagcgccttggggagatagaaccgagccagatgttcccccgctgcgaggaactcagaacctgcataaatagagaaggtggcaggcatatagtagggagaccagtaattccattgagcgctgattttgggccaggcacgatacaagcattatctctgcaaaacatcttattcattcgttcagcaaacgtttcttgaactctcagaaggatgaaggaagtttacccagctagtaagtggaagaactggtattggaacccgatctgtctgactgcagagttccacaatcttgctgccaagttatgtggggataacaatgactattttatgtcatctattcattcttccagcctatcagcctcctgtgtcttaagcagagtg

SEQ ID NO: 109762 - DNA, 3338 bp, Homo sapiens
cgggatcaacctcagacccctgtgggctcccggggaagacgcatgcgcactgctccctcctcgtctccttcccttcgttaattagtccatcgcatttcaagtgctggatcctttttgtcccctactgcgtgcggtggcagcttccttgcggaagtggtgaccgtgagagaagaagatggcggcccctgtagtggcgccgcctggtgtggtggttagtcgggctaacaagcgcagcggcgcggggccgggaggcagcggtggcgggggagccagaggggcggaggaggaaccgccgccgcccctacaagcagttctggtggccgatagcttcgatcgccgcttcttccccatctccaaggaccagcctcgggtgagcgccgcgcacgcgagcagccagagggcaggaagggtggcagggctggagcaagttctcatttcggctaactacaacagcatgcccttgaaggacctgcgtctatgctgttatcctaaaaccggatgcagagggactgtctaaaccctgatgactgctgaccaagttagtggccggcagatttgggcattcgtaatgctgtccacctcgggtttgaaaggaatgaagagagctaaatgtagaaacagcgcttgagagaagccttcacgcggggattcagtgcccctagaagaggctgcgccgcttttaaccttgccgatgacggttgcttaggtgaaaagaaacgaccttttgcctctgaaagggcggtaatatgccttaaaaagagcgggctagatctcaggcagtgtattttttttttccttccaggttctaatgatagccggtgctatctgtcgaaaggacaaaatgggtttagtggttgattgccatcagcccccgagttgtctagacaatggggtattggactcagctgggtcgttcagcagtcagttcagaaagagggaactgcattggatttaaggaaaatcctctctaattccctcgaaaaagcctaatggctgttcatttttgacaagtgacgggagatggctaacctctgacacttagaaagggatcaaggaaggaaatcttatggggaagaaggccttagcaatgcttaaatttatggaaatatgattgatttccagtattatcctttgccagcagtgaactgccattctgtcacagctctgtgtctgatacaaggcacatagattctgtacttaccatccccaaattgcaatgtctcagactcaggcttagagcatggcatgaacatcaaaggcaggaacctgtttatctttgaattggaaagatacagcaaaattacactgtttggaaatacgaatagaggagtgaaaattgttgcagtggggtacccaaagggattcgagacctcaagttttttttcatcttgtatccttcaggtcctcttgcccctggccaatgtggcattaattgactacactctggaattcctgactgccacaggtgtacaggaaacatttgtcttttgttgctggaaagctgctcaaatcaaagaacatttactgtaaggccctgcaacttttctttccatgtttcgccatctttttccagttttttcaggatgaatgtaactaaggggaaatgtgagaggggaaaaatgtgtctacttagatgtcattgtaagttctaagggtattttctacacttatcaggaggtgagcagctgaaactttgtatctgtctgtcttgggttttctgtgacaaagattaaagaataaacttgggttttttctgaatctcattataaagtttggtgccagtggactttgcttttatttaatggcttcagtatggaagttacaatgataacatctttgttttcccactgagtttctaaatcttgtttgttctcaccttcaaggatataaatgagctccttgtcatctttgtattcccactgcctagctcagtcccaagcatatagtgagcacttacatgtttgttgaaatcttgaaaactagggaatcgcattgcttatggaagtccaggatgtaaagactaggacattagcatggtctccatcagacagttcctaaatgttatatggattgcagaaggggaaagctgacgtgaagcgtgttcccaggctactttgtgtaccctaggcttcagcaggattttgagttcaaattgatgtttagggacaaggggtcaaggtatggagaggaaataaccatgtttcctaacccataaaacaagactggtgacacaggatgctgaaagcattcattatagttcataatactctttgaagttgaagacgctggcaagaacccaaaaaagccatcgagaaggactgtgagtgctgaaagggggtgaaaaatggggaaggctcaaatgatctttatgcttgatacactcattcccctcaccctcccttcctttaggaagtcaaagtggtgccgccctacatctctcaatgtggttcgaataattacatcagagctctatcgatcactgggagatgtcctccgtgatgttgatgccaaggctttggtgcgctctgactttcttctggtgtatggggatgtcatctcaaacatcaatatcaccagagcccttgaggaacacaggtcaggatgggaaaatgacaggaacaagggttaaagaccagcagagccctgagactgcttttttgcagttctgtccctcctgtcctttataggttgagacggaagctagaaaaaaatgtttctgtgatgacgatgatcttcaaggagtcatcccccagccacccaactcgttgccacgaagacaatgtggtagtggctgtggatagtaccacaaacagggttctccattttcagaagacccagggtctccggcgttttgcatttcctctggtgtgtggatatctggggtcctttgagatggggaagtgacaggcttcagtgggagaaacaaattaaagtccttgtaacttctccccacagagcctgtttcagggcagtagtgatggagtggaggttcgatatgatttactggattgtcatatcagcatctgttctcctcaggtgagctctttagggctggggctgcacacccaaagagtagaactctgtgggtctgttattgtccccttagaaggccagggtatatttcttctccctgtttattttcattatttttacttttattttttgagacagagtctcgctctgttgcccaggctggagtgcagtggtgtgatcccagctcactgcagactctgcctcctaggttcaagtgattctcctgcctcagcctcctgagtagcagggattacaggcacaccaccatgcctggctaatttttgtatttttagtagagatggggt

SEQ ID NO: 109763 - DNA, 2698 bp, Homo sapiens
ctggcactgtcattggcagcaattgctttatcaccaacagtgtcattggccccggctgccacattggtgagcacaggtggggaatcaagccaactatcctaggaacaggaacctgggggggccacgtctccagaaacacaagggatggctacacaagggacagtccctgggaataaggaactatagagcggctacctcaggaaaggaggaaacagggatttgaaaacagcgataccttaatttgtagcctgtgggcctctcattggatgactcttcacattccagggtaccctgtagtcacattcaggagcaagtagataattaacatgcagtaacaacatctatttagcacattacagtttacaaagggcttttatatacattgttacatttaatcttcataatttacaaataaacaggctcaacaagattttcttgcccaaggtcattggtaataatggtgggacctgaatctgggtattctgaatgtaagtccagtgttcttttgagtctaccataactgcctggttggcctcttggtatctcattttggttgcaggagtgtgatgcgtctaatagtactgcccctttccaagaacaacagtaaggctcagattctaggggctgagcgtggtggctcatgcttgtaatcctagcacactgggaagccatggtgggaggatcgcttgagcccaggagttcaagaccagcctgggcaacatagcgacaccccttctccacaaatgatacaaaaattagctgggcatgatggcgcgtgcctgtaatctcagctattcgggaggctgaggcaggaggattacctgagcccagaggtcgagggtgcagtgagtcatgatcatactactgcactccagcctgggtgatggaatgagaccgtgtctcaaaagaaaaaaaagacttggtttctaaaatgtaccagaagaggtggaattatttggttctgcttgtaggcgtggatatgattctaataaggttttttgagttcagagggtccccagaaatcctgaaggttctcgggttcttaagctctgtgtgtagtctataattgttgtaaacttggtgaagtatcttctcaggcctgggcttagggggtgagtgggtgtttctggtgacttgcgggatggggaatgagagctaggtgggagctgtgctggtgtcagtcagccctgtcctctatgaagggctctgctctgcggttggaaccctgagttacccagaggtcttcccatcctgagccaggtgataacgtggtgctggaccagacctacctgtggcagggtgttcgagtggcggctggagcacagatccatcagtctctgctttgtgacaatgctgaggtcaaggaacgagtgacactgaaaccacgctctgtcctcacttcccaggtgagacctgatctatactgtgcacaggccctgaattgcatggcagtcacactgagccagaaggggcattatttccacccataatcctgtctaaaaaagttgctctcattatcaggatgcacttttcctccacaccctaatggttctgtgttttttttccccttaggtggtcgtgggcccaaatatcacgctgcctgagggctcggtgatctctttgcaccctccagatgcagaggaagatgaagatgatggcgagttcagtgatgattctggggctgaccaagaaaaggacaaagtgaagatgaaaggtgtgagactcaacaggtgtggggcatctgtgtgtctcgctgcctcatagaagaaccagtgtttcctcctggagggattggtgcttccgccgggccctctctatagatcattgccttttccaggttacaatccagcagaagtaggagctgctggcaagggctacctctggaaagctgcaggcatgaacatggaggaagaggaggaactgcagcagaatctgtggggtgagctaggcctgatgcctgcccttctcctcctgaatcggaatattttgaaggataatgaatacttcagagtcacattacttattcactcctttattcaggcagacagggcaggtatattgctctctgtcaatgactctttttttctttttcctcacccattatggcttctcaggactcaagatcaacatggaagaagagagtgaaagtgaaagtgagcaaagtatggattctgaggagccggacagccggggaggctcccctcagatggatgacatcaaaggtgagtggcaggggagaaatgcgctggaccagtttattctctgcctggatcaactagccagaggcttacgttcctcagaaagggtttggtatcgagtcaagactagatgacttagagcattctgaatgatgttggcccatgaacttatccttgctttgatttcagtgttccagaatgaagttttaggaacactacagcggggcaaagaggagaacatttcttgtgacaatctcgtcctggaaatcaactctctcaagtaagagcagcccctccctgttctcctcggggtgatcccgggaaggtagaggctttctcgtaagtgttttgtctccaaataggaacctattccttcgacatcccaaatggaaagaccagtagtatttggagcaaggagagcattattaagttctagcctcagcatagactttctccttcctaaaccctccccttccatattgttccatccagattcctct

SEQ ID NO: 109764 - DNA, 2517 bp, Homo sapiens
tgcctctggaagctggttgggctctagagcagccttggctggttcagaggggtcagattgagttcaatactgactggcctttgagactccaggatttcataccatcctaggcccacaaaggtatattcagaatggacctggacattcagactctatggcagcaatttgacccaacacaagatcagcctctggggtgggaataggtattttgaggcagcctatagcatctgatcccctttcaccttccctaaggaatctctttttcccaaaccctgtcaacaactcccaagtccctctgacataattccacagaacctgtatcatctcccttttgtccacccatgtcatcagtatggatttgcttggatgtccaggtataggtgaatgcttaggaatatactgcagctcccttctttcttccatagctgctaaaggcctggagccctgtttttaggaactacataaagcgcgcagccgaccatttggaagcgttagcagccattgaggacttcttcctagagcatgaagctcttggtatttccatggccaaggtgaatatgacctcaagccccattcttctgcacttgctttcaaacgagggttggtgacccccttgggagacataaaatagaagctaatgtgaatccagtatggaccatccactcccaatatgcttattgctagaatagtacagcttggagccggactaataaggtagccatctggggggtggtctggaaatgtgcaaagctctccccagcaatagttccagaagttagacctgccccaggagcagagcgaacagctcactcttgtccgttttggaggaggctactcagtgcatagagggatctgagggcctggtagagtatcctgctggactttccaaggcccctgaggtcccctttattggccttttgcaggtactgatggctttctaccagctggagatcctggctgaggaaacaattctgagctggttcagccaaagagatacaactgacaagggccagcagttgcgcaagaatcaacaggtgcgtcaggctgtcctcctctcgccaagatggttatctcattcccaggtcctggcccctagactctagggtggttggtttctggggctctggttgttagagctgtttatctgccgaggggagcaggagagttatgtgcacctcccccagccgatctctcctctgcttctttacagctgcagaggttcatccagtggctaaaagaggcagaagaggagtcatctgaagatgactgaagtcacactgcctgctcctttgggtgtgattgagtgccctcctggctcctgggctgggacaagtgaggaactagctgcagagggatgagtgaccaccatccaggctgagactgaaaggagcagaggctggaactacagtattctttcccctgctagcaaccatgtgcctcccatcctgactgtggagttgggatgtggaagtggggctggaacaaagcttctgcctagggaggagctaagcaggcccggcagttggaggaaggccagaggaacagctttgtgctccggctttccctcagggaacagcagagagcagttggctctttctgctgcttgtatatgttaatattaaaagagagagtggtgtatttggtttgtctccatccctgactaatcagccagtgaagtatgtgaccagaatcacatgatagcctttccttaacacctgggggagagggaggacgggtgtgccagccactaggtggtactgtggtaccttgctaattaacctttcccatggctcatgggtagtggagggcggaggttcttttccagcctctgtggaccaacttgtgatcctggggtggtgtgcctaagcccgtttccatagagtcccattttgaacacttttctgccagaggattatgttgccaaccatatgtaaagcccattagacatgccagttcctttcacatgccttttccagttgatctggtactcgttctgtcaggaagctgggccacgcttcatcagaaataaggaaatcagctcaaggtcacatgactcttgaggggtaaagctaaggacttgaccctcagaatccagaactctgtccttcagcgtattgtgtttcagtgaagggaaaattggccccacagacaaatataacccagagccagtaatggaggtcccaagaacacaggaaggccatgtgaagggtgctttcccttgagagtgtttactatgtgacaggcaagcagttttcacatattgtttcatttaatcctcacatgagccccatgaagtcttatccccattttcagataaggtgcctgaagctcacagagcttccctagctagtaactgacagagccaggtgtgatattggactcttgacctggagcttgttactttgctgtattgctttaaccttaaccaaaagagacatgcctttctgtcttttctttttgagttccttgtcttcatatagagtgagtcaacaattctggccgcgtgcagtggctcac

SEQ ID NO: 109765 - DNA, 1616 bp, Homo sapiens
cctggccaacatgatgaaacccccatctctactaaaaatagaaaaattagctgggcctggtggcaggtgcctgtaatcccagctactcaggaggctgaggaaggagaatcgcttgaatctgggaggtggaggttgcagtgagccgagatcgcgccattgcactccagcctgggggacaagagcgagacttcatctcaaaaaaaaaaccaaaaaacacaaaagtttagccgggcatggtggggggcacctgtaatcccagctactcaggaggctgaggaaggagaattgcttgaacccaggaggcggaggttgcagtgagccgagatcatgccattgcactccaacctgggtgacaagagcgaaactctcaaaaaatataataataaagccacatgacccagtgataaggaaaataggaggtgacaatgaatgagagatgccaacattttggaagatgaaaaacagaacagtcaacagtcacttaacagagtagaatgagttgggttctacctgctgagggagttaatggcaagaagtaagccaatgtgcccttctgaacccataaaaggttcagcacctcagaggagggtatggactgacgctgagaactaggggtggggtggaaggagattacacgatgatctgtataagaaaaagccccaccaagtcccaacctcatctgatccagccaagtgattacccctactcccttgcataaaatgggagattccgtctctggagaaatggtagggaggaagttagcaaagatagacttaaggtttcctaagcccaaaggtcacaagtttccagaccaactgtccatgagtgcccagcataatgaatgaaaaagcccatgaaatttcagaatgtccaggggaacttaaactatcagagcctctgcattcagcagcaggcatagtggggatagaggtgaggtattagattgaaaatgaagaattaagtgaaaatatatgagcggtgagactcaacatcagcacacactgacagaacctccagtatgaaaagaaacaactgcagggaaaaaaatgcctatgcatactgacactgacatttttggtttcttcaacaacaaaatgtcagctttccccccacatgatcaccctacagtgaagcctattcattaataataaagcttgtaaatagactgagcttccaatccactttttggtatctcactgttaaatatgaatagacagcaaaggaccattaaacatctgagtaaccttccaatatgaaagaccaaaacaaacaaatagaaaattgaaaccaaggaaacaataacaaagtagggagctttctgaaaacttcatggggaaaaagctacaataactattctcaaaactcaaagaaaagatattgtgtctatgaagtactttaaaaaggaagaattggagaagaaagagttcttagaaattaaaaataagtaaactaattccttctcttgagaattggaggattcgaggaccaaatagcagggtaacgtttcactgtatttccattcttacatacttcttgaatcttgaatcatgaatatattatctatccaaaaaaaaaaaaaaagtagtaaaggatcaatccataaggcccaaaatcat

SEQ ID NO: 109766 - DNA, 1602 bp, Homo sapiens
agccaagggtggtggtgtgtgcctgtagtcccagctactcgggagactgaggtgggaggatcacttgtgcccagttcgaggctgcagtgagctatgatcacaccactgcactccagccaggaagacagagcaagaccttgcctccaaaaaaaaaaaaaaaaggctgggtgtgatgtgactcacacctgtaatcccagcactttgggaggccaaggttggcagaggataacttaagcccaggagtttgataccagactggccaatgtggtgaaaccctgtgtctattaaaaatacaaaattaggcctttcctttcagtggagcgtggcggcaagatggctgtgcaaatttccaagaagaggatgtttgtcactgatgacatcttcaaagctgaactgaatgagtttcttactcaggagctggctgaagatggctactctggagttgagatgcaagttacaccaaccaggacagaaatcattatcttagccaccagaacacagaatattcctggtgagaagggctgacggattcgggaactgactgctatagttcagaagaggtttggctttccagagggcagtgtagagctttatgctgaaaaggttgccactagaggtctgtgtgccattgcccaggcagagtctctgcgttacaaactcctaggagggcttgctgtgtggagggcctgctatggtgtgctgcggttcatcatggagagtggggccaaaggctgcaaggtcatggcgtctgggaaactccgaggacagagggctaaatccatgaagtttgtggatggcctgacgatccacagtggagaccctattaactactacgttggcactgctgtgtgccacgtgttgctcagacagggtgtgctgggcatcaaggtgaagatcatgctgccctgggacccaactggtaagactggccctaagaagcccctgcctgaccacgtgagcatcgtggaacccaaagatgagatactgcccaccacccccatctcagaacagaagggtgggaagccagagccatctgccatgccccagccagtccctacagcataacagggtctccttagcagctgtattctggagtctggatgttgctctgtaaagacctttaataaaatctcatacaaagacaaaaaaatatatacaaaattagggctgggcatggtggctcacacctgtaatcccagcactttgggaggctgaggcgggcagatcacctgaggtcaggagtttgagacaatcctggccaacatggtggaaccctgtctctactaaaaatacaaaatattagctgggcatggtggtgcatgcctgtaatcccagctactcaggaggctgaggcaggagaatcgcctgagcccaggaggcagaggttgcagtgagccgagatagctccactgcactccagcctggatgatagggtgagactccttctcaaaaaaaaaaaaaaagaaaaaaaaagttagccgcatgtggtggtgtgcacctgtaatcccagctactcaggaggctgaggcacgagaatcacttgaacccaggaggtggagattgcagtgagctgagaccacaccactgcactccagcctgagt

SEQ ID NO: 109767 - DNA, 1050 bp, Homo sapiens
actgtccgcacctcacaccctcccctcactttccacccagctacccaccttcttgccctacttcccgagctcaggatatgcctggccccagtgcagcccctggcttgcctctctccctccttcacccctgcactgggcactgtgtaaacccaactgcttccatcccctgcagcaacccggctaaatggaactgcgaagggggaacggcggcgagaaccagggggttatgatagctcatccacccttatgagcagtgagctggagaccaccagcttctttgactcagatgaggatgactccaccagcaggtggggcttgagtttcatgggtattgtggggcaggtgaccctggaggagccctaaaccctgaggatgcggggcccctgggaggcttatgggctttgtgttggggacccaggccctgcagtgcctcccctcatgggggcagggctgggccagcctggtggggaacgactgtgggccccacaggttcagcagctccacagaacagagcagtgcctcacgcctgatgagaagacacaagcggcggcggcggaagcagaaggtttctcggattgagcgggtatggggtctgggaggctagggatgggtggaggcagattgtgagcccttcctacgcagggccaaggcttgttcttccttagatcccatccccctagtgcagtgttgagaaccttggggctgggggctgcaccggggactcaccttgaggaggagtcaggtgggagtgaattcctgccacctccacctgctgctcagggcctctgtctattccagtcctcgtccttcagcagcatcacggactccaccatgtcactcaacatcatcacggtcactctcaacatgggtgagtctgaggaaacagcactctcaagcacctgctatatgccagacactgggcagacttgagttcagagagcgtagaatatgttccctgccctcaaggagctctctttcgtaaacatcagctgatacataaactgatcattttagtatctcaccatcagggctatgacagagataagcaca

SEQ ID NO: 109768 - DNA, 1038 bp, Homo sapiens
cggctcattccagcaaccccacactgcaactcccccacagcgggcactccaaccctcactaaacagtgtttgcttctgaacttgtatgagcacccagggcgcctcagtttcctcttacaaaatgggactcacgatataaactttaccaggttcctgtgggtttaatgagaggatataagtgaagcaccattgcgatgtgtggtgtaaagtaagcattcagtaaacggcagccatttcgattatcatcacatgcacatcgtacactggccaagcacctgcatttacattatttaatcctttattcaaatagccttgtaaagtagatattaaaatccccattttttacagaaggggaaactgagtgtccaagaaatcagtaattttcccagcattgatcccataattactagatggtagagctagaatgcaaactcttgtttacctaactccaaagcccctttctgcctcaccattctgcctcccacccccaggcctagacgacttccacttgtccatccacagtgacatggctgccatcgtaaaagccatggcctcccctgaatcagggttggaggtccgtgaccgcatgtggctcaagattaccatccctaatgctttcatcggtgagagagccccatggtgggatgcagggtgggtggggagtgatggggcagggcaggccggagggcccaggacttgccttggacccttcctttgatctggagccagccccagcctcatagcttctgtgaggccagatgagtccaagtcagatgggcctccccatcaactggcagccttgtccccaggctcagatgtggtggactggctgtaccacaatgtggaaggcttcacggaccggagggaggcccgcaagtatgccagcaacctgctgaaagctggcttcatccgccataccgtcaacaagatcaccttctccgagcagtgctactacatcttcggtgacctctgcggcagtatgtgcctccctcatcttcttgccctgtctcctggctgggagtggggaggtagccaggg

SEQ ID NO: 109769 - DNA, 1596 bp, Homo sapiens
ttaagcctctgctataaattctcctggctctcctgggcttccatattttgggggctggggtgtcaaaagtgagatgaagttcttagctccaggttttggggtaaaccaaggtaggaacattttggcatttatttcaattaacaatacttccttggacgggtgcggtggctcacgtctgtaatcccagcactttgggaggctgagacaggtggatcacttgaggtcgggagttcgagaccagcctggccaacatagcaaaaccctgtctctactaaaaatacaaaaattagatgggtgttttggcacctgcctgtaatctcagctactcaggaggctgaggcacaagaatcgcttgaatccaggaagcaagcggaggttgcagtgagttgagatcgcactccagcctgggtgacagagtgagattctgtctcaaaagcaaactaacaaagaaaaacaatacttcctggggttttggtgtgcagagggctttgttggaagtgtgactcaatcttgcctgccttctgggagctctagaattgttcccaacccagtccatggcttctagccaccactacagggctgtttcatgtacttctctctctgactctgtcttgtccgactctcttgagaatttctcaacgattgctcatgcctgtcagtatcagtgcttccatcgttccatctttgattcacttctctttcctttctatttactcccaaaatggagtcattcatcctgatgtcctcaattgctgctgatatgctggtgattcccaaatacatagctccaacccccaacttcccccagactttagatctgtattggtattacctactggacatctctatggacagttccgtatagactcaactcatctgcccaaccaagtatgttcctcctgaattcctctcctggttacttcatcacaatctacataggctcaccagctagaaacatttatgagcttacattccttcttcccatatcttatcagcatatcatatccatttcactccaacactctgtcttgaatttggccctccctctcccctctctactttaattcattggagcatgggatttggagttaggtggttttgggtttgaattccagctctactatttttggttgtgtgatagagttatttaacctctctgagcctcagttccctcgtatgtaaaatgatgataataatacctacctcacagggttgttgtgaggatttaaattagatattgtacgaaaagtgcctagcacagtgcctggcacacagtagagtaggtgctcaataaatggtagctattattattattattttatcattattattatttactctaaattggtagcagtttagggtatttttggaagataaagcttttgcaaaggtagaagtgaagccttgagtgctggttcaaaaattagaagtgcctgtattcagtcacttaatgacttcaggccgtgactatgatgtgagagaggtcagatcttcatcctgccacatcgtggcttctggctggaggctgggaaggactgtaacatttgcaaccagatctgtcctttcttgcccttccttcctcccatgacaggcgta

SEQ ID NO: 109770 - DNA, 2858 bp, Homo sapiens
acaggaggttcagccaccaaacctgagtcaggttcctagccccttggaagatcacctgctggcctatttctgtgttctacttcagaccagccttcaggtctggatgtgaactggccttctgaggggcatagagatcctagcccaagagaccaaatactcaggaaagaaagttcagagtgtaccagagcctcggacctacacccaccttcaggccaggcccagcctggttttttcccaccctacgcccgctgccgtgccagcccgccagcctcaccatccagcagctcatatatgagcacaaaattgttcttgatgttttcctcgctgatcttgccaaagtaggcagccatcacgtcacacatcttatagaggaattcgaagaccatggcagcgttgacattctgcttggtgactgctgccagccaaatgttggaccgcttaacgtggaagaagctggtgcgagcaatgttggtgacggggctgcgcacctgctgccgggcatggataacattgacccgaaaggcatccactgcgttcctcctgagggaaaagagtgcatagggcctgctcagcacccaggtgaaccttaccccataaggatcaaccacagctgctaacagccccaccctcctttctgcagaagtctgacacacacactccaaagaaagccaatgcctaaaccactggagtggttcccttcttatgactccctgtggaggcatgggaagagtgcctgagctgggctagtgtctaaaggccacaagaaatagggaagtcaactattaaggctgatgtaaccttaataaagtgaggttcatcaggtttagagacagatattccttactcccagggctggccctaatttcccagctttatctagcttccctgtaagctcccaggtccaggacagaaagagacactgcttcttcagtcctcccgctagtgatcccaccagtggggagggccgactcctccagatgttagacaaagccagcatggcttcagaagtcacaaaggagggagaagtaccaaggggccatggaattgtgctacccattcttgcccaggatccaactccagagcaagttgagggaatgaaaaaggatgcaggaaaacgatgggggcaggcccccacccacctgtacctgggcagcagcttgagaggccgcttacctattgctacggcagccaatgagatgggatgagagaaatgacgccagcaagaagaggagagtgatagcaacgagagagagggttagacacacaacacaccgggagggcggcacacaccgtgaggcagaagcagacaagacaggcaaggcggcgtgtgacctggccttggcttgcccagtccatccaaggcaggagggggtctggggtggggggtgtagccagccaggttcagacaggccaggccttgccacagctgcagctctagctcatgccacaccaccagccaatggacaaacgcccgcaagggccaagccagcccatcagccagggagccaaatgaagagcactgccacaggcccattctgtgactttatctcaagctctctgaggaagaaaaacaggcagcaggaaccagaggagcctactctttagcgcctcggaggctaggataggtcccttcagtcgcaaagaacaagggcgtgcaagggggcgcagaatgagaaggcaggctgtggctctgtgtgaaggcccaggatatggagctgctctgggtctactgagagggtagcatggcttccctgccctcccacagtgacccagagagtgcctcacgcttccagccactccccagggaatgggccagaggaactgaagacagctgagtcagcagcctgacgactcctgagaaagggagcaggagaggattgggcagcctggaggggctttcaacagaatccagtgaaggcgtttgatatgggaagggcttctgagagcaaggcttagatggattagtgcctccagcgtggccactaaccccacccactggagacatttctcctcctcctcctcaaagaaggaattcaccagcctgggcaaaggcactgtaactagagaaacaggatgcaggaagggaaggagttcctaaagctgtgggaccatgccattccacaggtcccacctaggggctggcaggctggctgccgggccaataccaccagacctaatgggagccaggctacactagctgagcttccagggtgcagccaggggtcagggtggcccaagtcaagccaatggtgggaaaagacctaatcctgtatgctggggctggggggctggagtggtggggcacagctggctccgccaggggactcacccgatgtcatctcggtagactcgggagatgagcacctcccccttgtgattatagatgaataagcctccaatcatggcggcagatcagtctccgcggcccatcgctctgagaacagacctaggacaggcgggggcagggtaaaagaagacctcagaatcgctgccaacatcccctgtggagctgtgcaggtcactggagcttctttcctgactcaaccctttagtaagtgaccctgcagccctcccagacatgcccctcccctcagccaggctccagttcctgtttattccacactagatgggagaaagaaacagagagagattaggcccaggattctaaggccattttgaccctccctttcctggggctgagcatcagtaacccccgccccctctccccagcactgagctcaggaatgatccttttcggccccctcctgtgcagactctcgggctcccgccagtgactcactaaggcttgcctgcctgcctgcggctgcaggaatggcggtaggcattactccagttgg

SEQ ID NO: 109771 - DNA, 1038 bp, Homo sapiens
gagggcagggaagccatgctaccctctcagtagacccagagcagctccatatcctgggccttcacacagagccacagcctgccttctcattctgcgcccccttgcacgcccttgttctttgcgactgaagggacctatcctagcctccgaggcgctaaagagtaggctcctctggttcctgctgcctgtttttcttcctcagagagcttgagataaagtcacagaatgggcctgtggcagtgctcttcatttggctccctggctgatgggctggcttggcccttgcgggcgtttgtccattggctggtggtgtggcatgagctagagctgcagctgtggcaaggcctggcctgtctgaacctggctggctacaccccccaccccagaccccctcctgccttggatggactgggcaagccaaggccaggtcacacgccgccttgcctgtcttgtctgcttctgcctcacggtgtgtgccgccctcccggtgtgttgtgtgtctaaccctctctctcgttgctatcactctcctcttcttgctggcgtcatttctctcatcccatctcattggctgccgtagcaataggtaagcggcctctcaagctgctgcccaggtacaggtgggtgggggcctgcccccatcgttttcctgcatcctttttcattccctcaacttgctctggagttggatcctgggcaagaatgggtagcacaattccatggccccttggtacttctccctcctttgtgacttctgaagccatgctggctttgtctaacatctggaggagtcggccctccccactggtgggatcactagcgggaggactgaagaagcagtgtctctttctgtcctggacctgggagcttacagggaagctagataaagctgggaaattagggccagccctgggagtaaggaatatctgtctctaaacctgatgaacctcactttattaaggttacatcagccttaatagttgacttccctatttcttgtggcctttagacactagcccagctcaggcactcttccca

SEQ ID NO: 109772 - DNA, 1047 bp, Homo sapiens
ccaccatgcttggctcatttttactactttttgtagagctgggtctcgctatgttgcccaggctggtcttgaactcctgggctcaagtgattctcccaccttggcctcccgaagtgttgggattacaggcatgagccactgcacctggccttgatttctctatttgaaaaaaatcaaacatttgaattgttttcctgtaaagcacaaatcacagaataaatgctacaaagctagaagactttcttgcggatgatcccacatgggctttgggagctgtgccggtcagatgtgtaggcccaagtaggggctggaatgaagaagctctgtccaggggctgatggttcccttctttttgcagagattctagactttggctacccacagaattccgagacaggcgcgctgaaaaccttcatcacgcagcagggcatcaagagtcaggtacttgaattgtgcagactatagtcagggtggagtccaatctcccttcatctcagctggcccctgagccttgtctgagctgactcatgagccctcccatgacaggaagtgctggcctgagcctcctgccatgattgcaggccgattttgctctgtgtggtcctcccactgcaggagcagccaattcagcatctctattaccaggaatacagctcaagcagtttccttttgcactgaggggtgggggaggaggcctggtcttgaggcctggtattcctcaggaggagcgagcttgggccctctcctctaggatccaagcctcatagctttctcctccttttctgcctcccttgctgcttcatgtgggcacctcgttggccctgcggcctccagcatcaggtaagctcttccctcagcttccacccttgcagctttgctttgtttctccaggccctgccctttggggcttataggggaaaatggattacaggtggggactagaagggatggggaatgagggtggagtggggatagagacaggatgattaaagggacagaggagtgaggccattgctgtttgtttctgccctcatgtagacaaaagaa

SEQ ID NO: 109773 - DNA, 1044 bp, Homo sapiens
tttaattcatagatccattcttcccctttcaagcctcttagtagaaattactatttgtgatgaggcaaatcttttacttctctcggcttgtcctaacacagttctttcaaaaaacttagattgtttaaatgccaggtaagacacaaagtttacttacagacaggataatgggctgactttgctttgcgcatgttagacataattttctccaccttatttttaagttcataatattgagcaggataagtatgttctaaagcagttctttggttgctgtctcctgctgattaaaggaactgattcaaggtgtcacaggtagggctttcttctttagtcacctcttagaaggtcccacgccgccccagcttctttcaggaccccagccatacaaacacctgtagtagcgatgaagtagggcagggcaacgggacttcccagaggagagcggctgtaagaggaaggccacatttctaactagctctccttgcccaggtgccattcgcgccctctggcctcaaggtgcgctacttgaaggtgtttgaaccgaagctgaactacagcgaccatgatgtcatcaaatgggtgcgctacattggccgcagtggcatttatgaaactcgctgctagctgccactaggcagctagcccacctccccagccaccctcctccacaggtccaggtgccgctccctcccccaccacacatcagtgtctcctccctcctgctttgctgccttccctttgcaccagcccgagtctaggtctgggccaagcacattacaagtgggaccggtggagcagcccctgggctccctgggcaggggagttctgaggctcctgctctcccatccacctgtctgtcctggcctaatgccaggctctgagttctgtgaccaaagccaggtgggttccctttccttcccacccctgtggccacagctctggagtgggagggttggttgcccctcacctcagagctcccccaaaggccagtaatggatccccggcctcagtccctactctgctttgggatagtgtgagctt

SEQ ID NO: 109774 - DNA, 1173 bp, Homo sapiens
ttagaggacaatttggagaggtgaaacggggctataaacaatgttaggtttgtcattaaacttgctgtgcacctatttctagagcatctttggtctcctttctccactcctgcagagtactgctggctggagcggatgtgaacctggcatggggccgccgttacgggctggtggggcggaatgggttggggaagacaacgttactgaagatgctggccacccggagtctgcgggttccagcccacatttccctgctgcacgttgagcaagaggttgctggagatgacactcctgccctgcagagtgtgctggagagtgacagtgtgcgagaggatttgctacggagggagcgggagctcactgcccagattgctgctggcaggtgaggactcccggctagggagtaactagcagccgctgtcgcttacagagcgcctgccgtcctggaacaatccataatttgcatgtacatcctagtaatcagcagagcttagaacttggcactctgggactcagaagcccttgttctttccacagtgcccattgccctttcttgttctttccacagtgcccatttccatagtgcccaaggtaatgagcactgtgcaaacccttcctgtattctcttcctcttccagccacaaggtagccaatggcctttccaacggtatagggtgcaggacatcctcctagactgcccctgcttaggccaattgctgtttctcctccctccagggcggagggctctgaagctgcagagctggcagaaatctatgccaaactggaggagattgaggctgacaaggcacctgccaggtatttaaagctccccctccctccttcagatttcctttcccttctgtggactgttccaactgagttcttcgatttcttctctactagggcatcagtcattctcgctgggcttggctttacccctaaaatgcagcagcagcccacccggtgagtgacccttgccattcttggctttgaaccctgttgtctcagccccttcctgccctgatgaacacccacccataatgtgactccatcattctttagggagttctcaggtggctggaggatgaggctggccctggcccgggccctctttgctaggtgagtctcctgggccagtgtatgaagccctatggaagattggtcttagctctt

SEQ ID NO: 109775 - DNA, 1723 bp, Homo sapiens
gtgacttcctcctctgctgggaagcagagtattccacactgttcttggagggctaatcttgactagcacatggcaaccactaatttactttctgtttctgcttctacgtatctgcttattctgggcatttcatataaatggaatcatacaatatgacctttgtgcctggtgtcttttacctggcgtcatgtgtgaggctcatccatattgtagcgtgcgtcagagcttcatttcttttcgtggctggataatattctgttgtgtggatatacagcattttgtttattgagtcatgaggggccatttgggttgtttccattttggttattatgaataatgttgctgtgaacattggtgtacaaatttttgtgtggacatatgttttcagcttgcttgggtgtatacctaggcgcagaattgctgggttacctggtaattccaaattaatgttttgaggaactgtcaaactgttttctaaagcaacaacatcattttacattcctaccaacaagggatgagagttccaatttctccatgtctttggcagcactgttattgacttttttttttttagttttagccatcctagtggctgtgaagtgatagctcattgtggttttgatttgcattgccttaataactaatgataatgtgcattgggagtttaattttgaagtgccctttctataagtgctggcaggaagcttaaaatcataaagcttagatgtttgcgacgtggaaacatatcacaatatagtaactggggataaaaagtcacaaaaagcctaattctattttttagcatacagtaaatgagaagaatggactctaaagtaatgatacctgagtggtaggagtacaagccctttctaagttttctctgaacatatattactcgtgtaggaagttatttttttaagtaataaatctagtctacctcatctcttctcccaggcctgagctgaagcctgtggacaaggaatcagaggtcgtaatgaagtaagtgctgggccagtggggctggtggggaattgcttgcttccagctgcccccacatcctcacccctacctcctgcaggttccctgatgggtttgagaagttctcgccgccaattctgcagctagatgaggtggatttctactacgatccgaagcacgtcatcttcagtcgcctctctgtgtctgctgatctcgagtctcgcatctgtgtggtaaggctgctgtttctctgtgctgcgagctgggactctcctgtctaagtgtgtggtgtggattggcccagatcctcaggctgtaaagggacgaggtctgtggaacaggagtgagggcccgggctaaggattttgcaggacttacactagccctgtcctctggccgcacagcgctgctcttcagggaggaagagcctagtgtatagtgttttaaaaatacttaaaaatacttaaagcagtgctttaccttattggtctcggttctgagttttctaaacctggagacattgaggagagagcatgggcttcagggtcagacttcggatcttgactatgccatttcctagcttggttaccaagcagcttcctaactcttaagatggcgctgacatctacctcacttggttcttgggaaaagtaagtccccagcacttagcaaatactcaagtattgctcaccttagtatatgcatttttctgtagagttagagttccttttttttttttttcgga

SEQ ID NO: 109776 - DNA, 1033 bp, Homo sapiens
gactatgccctggtgaggcctcattttccagagctcttcccctcccatttccccttcttgcccagtagaaaactgtatcagaaggctttattttctctcaccgcaccccttcactgcccaccttcctggttctgccttccagccccaacttctacattctggatgaacccacaaaccacctggacatggagaccattgaggctctgggccgtgccctcaacaatttcagggtgagtgtgccttcaccctgaccactcctcccaggcctcggtgcctcttgtgtccccctgagcacctcctgccctcctgtctttcagggtggtgtgattctggtgtcccacgatgagcgctttatcaggctggtgtgccgggagttgtgggtatgcgaaggaggcggcgtcacccgtgtggaaggaggatttgaccagtaccgcgccctcctccaggaacagttccgccgcgaaggcttcctctagggccaccaggctgaggactcgcccaggacatggactggtctctcagacccctgggccaccatgtaggccaccactccaggccgtggacttcccccaacttggggacagccttattcccaaatgtctctatccttttgactggagcatcttctgcacaaccttgggagcccatccaagggttggtgaggactggtctcccgggggtgggggtctggggggtaccctctggggttatagattcccccactgccccagctctgactggaccccaagtggctgctatgtaaattaaatctctccccgcgtctcctttgcctcatgtctgctgctccctgggcagtggttgcctcctactgagggctgtggactctcggattggcgttttcctatggcacttgtatccctcacgtgtaggaagcaatagcagcaccagccttgcctctagaagagacattgtcaagctactggggcatggaggtcatctgcctgcctgaccttggggtgggctgagccagtggaatgaagggcagtgtattggcatcattgcggtgctgtta

SEQ ID NO: 109777 - DNA, 1385 bp, Homo sapiens
ggtactatcataagagatttacatatgttctaatattgaaagctcacaagagaccccgagacagggaggtacacttacatttactattctcattttacagatggaaaaattaagacttcatgaggttaagtaacttaccaaggtcacacagccagtaagttaggggttcaaacccacaagaccttatggccctaggtattactctctccatattccatatttggttgaggagcaggtccagagaggttaataaacttgcccaaaggcatgcatcaaggaatggcagagccagagggctatgtgacctaaaaactattgcccctctgttttgggatagtcccccccacacacactcctgcccttggccttgaccaccgcatacagatcgtttctaccctcttcacctccaacttcattggcatctgcttcagccgctccctccactaccagttctacgtctggtatttccacacactgccctacctcctgtgggccatgcctgcacgctggctcacacacctgctcaggtaccagctgggacaacctgggggagtgggaagggatagggagttcctgttgggggtttatgtctagggcatgaggagctgcaggtctgcaggccttgcaactggatgaaacgtggaacctgtttctcatctccaggttgttggtgctggggctcatcgagctctcctggaacacatacccttccacatcctgcagctctgctgccctgcacatatgccatgccgtcatcctgctgcagctctggctgggcccgcagcctttccccaagagcacccaacacagcaagaaagcccactgaagtccacccctttccctcaggacctgagtctaccctcaggacctggggttggttggactctgcccttccaaataaaccttgctaagtccaactctgtgcaacctacatggaggtgggggcagccgatgcctggtccaggctgtgagggacacgtatggagcagataaagaattcactcaagcagtcctaagaggcactttattgcataggatttggggactgtggctctctacccttccactgtgttgcagggagctcagaggatggaggggagtgtgagtggggtgggaggagagggagagagcacaggcaggcactttttgtgggggcaagagggctctagggagggagtaagaagcagtgggggacaggctggcaccagcctacactttcccagcaccaagaggccagccctgggcggcagtgacttgagtgtgttgggtggggcgccagcccaagcagcagggggcagccttcacacgttcgctgggctgtagcacagcaggtgtagctgcaggttttggtcccagtggcgcagtagcaggaagagccctcgggc

SEQ ID NO: 109778 - DNA, 1053 bp, Homo sapiens
gagcctttttgctttttttaattttaagttttgagatgggctcttgctgggttgcccaggctggtctcaaactcctgggctcaagcaatcctcctgccttggcctcccaaagcgctaggattttgggcatgagccaccctgcctggcttctgagagccttccttgctctgcccagttatgacttggtgaatccacaccttaaagcattgttatgacctgcctcctgagcttctttggccccaggcactggcctgggccggggggtggggaacgtggttttcctgctatttctagtgggaattggggaacctctgaggcctacatccccgtcccacacccctcaatgagtagcatgaaggctggtcattgggaatgagccttggcagctctgctgacatcacaccaatcctcaggtggtgctggggctgcccttcctgctggagaaccccagcggctacctgtcccgctcctttgaccttggccgccagtttctgttccactggacagtgaactggcgcttcctcccagaggcgctcttcctgcatcgagccttccacctggccctgttgactgcccacctcaccctgctcctgctgtttgccctctgcaggtggcacaggtgagaaaaggcagtagtgccatgggcagagttgggggaaggagtgaagggcctaagccttaggggctgcttgggggaagtgtcagttaagctcatggggtgagtctagagtttgactcacaaaaggggcttgataactgtctgaatggcttttctccaggacaggggaaagtatcttgtcgctgctgagggatccctccaaaaggaaggttccaccccagccccttacacccaaccatatcctttaaattgtgggaaggtaagtcttgccctctctaggtgctgacagagtcctggtcaggtatcccttgacagctggtgacctgggcgaggaaaggggaccccaatcatagaagtcctattctgcaccactgtgctgagcacttcacatattgaaggatatttgattcttaattctaaatacgagctactct

SEQ ID NO: 109779 - DNA, 1033 bp, Homo sapiens
tcctgttagccttgactaaatacagccgggactctgaaggagctggatctcgcgtcccaacgcaggcgtcctccaagagggatagacaggcgggaggaaagcggaccaggccaagcccatgcggcgccggtcctgccagctctacctggcggggccgcgccgggattacccacctagcacaaggatacggtcctcgggccgcagctccggctctaggagggcacggaaggaggagaagtccccgaaccaatcgtagggggcagaatcggctgcgccttggtagcgctgatcccagtactcgacttcgcggtacccgcagttccgctccggtaactccggaggcgccctacctgcccctggagaggccatgctctcaaccgccgggcagccagagccgccggcccttcagccaatacggaaggcaggatgcagaaggcggggcgctggtgtctccgcccaccacctgcagttgctcaacacaaacacgtggaacttccgtcctttactaagcgctcttcgaagaatcctccggctgggaaaactatcgtccagaccctgaatcctccggctgtactgccaagtcatttcctagggccgcactcaaggtgtcagactcacgtgggctcatcactgcgtcctctcatattttcaatatgaatgacttttatcaggaaatctgaaaattagtgaaaggttcatttttctcagcatccggaaggctcgaagggcaggcaggaggggcgcgaacaggggctttgccctcctggagagacagcatgaacacagatgttcccagcgcaggcgaaggagaatgctggcttcagcggttgtgggggaggtaggcaggaatgttgcttttctggacattcgttctaaattagcgcctgtgtacccagggctgggtataaactgaggagtaagacattgtccctgctcctatggagcgtggagtgcatcagaggagacaaatgcagaaaaattacattttagtggagtaaatgaagactggctactcggatcggcgcttagcctg

SEQ ID NO: 109780 - DNA, 1023 bp, Homo sapiens
cgcctgcgctgggaacatctgtgttcatgctgtctctccaggagggcaaagcccctgttcgcgcccctcctgcctgcccttcgagccttccggatgctgagaaaaatgaacctttcactaattttcagatttcctgataaaagtcattcatattgaaaatatgagaggacgcagtgatgagcccacgtgagtctgacaccttgagtgcggccctaggaaatgacttggcagtacagccggaggattcagggtctggacgatagttttcccagccggaggattcttcgaagagcgcttagtaaaggacggaagttccacgtgtttgtgttgagcaactgcaggtggtgggcggagacaccagcgccccgccttctgcatcctgccttccgtattggctgaagggccggcggctctggctgcccggcggttgagagcatggcctctccaggggcaggtagggcgcctccggagttaccggagcggaactgcgggtaccgcgaagtcgagtactgggatcagcgctaccaaggcgcagccgattctgccccctacgattggttcggggacttctcctccttccgtgccctcctagagccggagctgcggcccgaggaccgtatccttgtgctaggtgggtaatcccggcgcggccccgccaggtagagctggcaggaccggcgccgcatgggcttggcctggtccgctttcctcccgcctgtctatccctcttggaggacgcctgcgttgggacgcgagatccagctccttcagagtcccggctgtatttagtcaaggctaacaggagtaagagattgttggtcccggggccctctggagaaagacagtccctcagagtttgagcgttgggggtacccaagaccctgtccggaccctcgggaggcaggcagccttggggaccggattgctcagaggaccgagatcaagtcctagcgctaattgacttgtaaaacttaggacaagtcatgaacccgttctgagctttagattcagttctagaaatgg

SEQ ID NO: 109781 - DNA, 1053 bp, Homo sapiens
gctgggatctagagaaagatgcaacacaaaaggttaagataggatgaaaactaagagtaggctgggtgcagtggctcacgcctgtggccccagcactttgggaggctgaggtgggcagattacctgaggtcaggagttcgagaccagcttggccaacatggcgaaacactgtctctactaaaaatacaaaaattagccatgcgtggtggcccgcgcctgtaatcccagccactggggaggctgaggcaggagaatcgcttgaacccgggaggcggaggttgcagtgagccgagatcacacacctgcacttcagcctgggcgacagagggagacgccatctcaaacaaacaacaacaaaaaaactaagagtaaagcagggttcaggagagtctcaaaagtaagcactaagctgaaggtgaggaggtagggagagaaggggtaaggtgagatcactggtttagctaaccatccccctcaggagctgggatgactgggattggtactcaaacctcttcctctgatgccagcagcaagtaagaggagaggtgagagacaggaggaatttgaaatacacagaatgaatattaagggatctaaaacttcttggtaagtagaagaagagatggcctttggcgattagtggagcccaggtgggccttcaggttgagtgggaagtggtttctgggaggagggttaagggaattggcacagagcagtgttgagtgtctgtttgcaggttttcgccctgttattcaacagatatttattgagcacctactctgtggcagacagctgcgcttgggtctgaaattacagtggtgaacaaagcaaacccagccctgctttcatggagcctcagggccagcaggggtgaggccacatgagtttgtactggacccgagcagggccagggccgccatggccctggggtcatcaggcctgggccacattctcactctgccatctgctagtttgtgatggaagtcaagccgtgtcatcttcccaagcttctgccctggggtgtgaaatgggactcatcttcacttcatgaag

SEQ ID NO: 109782 - DNA, 1048 bp, Homo sapiens
tcccagctacttgggaggctgaggcaggagaatcacttgaacccaggaggcggaggttgcagtgagccgagatcgcgccagtgcactccagcctgggcgacagagcaaaactctgtctcaaaaaaaaaaaaaaaaaaaaaagaaaagaaaagaaaaacaactggatgtaaattgatgaacaaatgaagtagtgctgctttgggcagtgggattataagagtcctttaaagttgtctatgtgtttatgtttaactatataactagaagaaatatttatttattaggatatgataatggatgtgcttaaagtattacctgtaaggatgtttatggtttttatggcaatgttgtttataatagcagaaaatgagaacaggttaaatgtccaactatagggtaaaggaaaaataaattgtggttaggatgggttgtgaggatccttaaatggctgatatatctttcagcaaaaaaagtaggttacaaaaaatatataccctatacaacataattccatattttatatgcatatcaggggagggaaaaactctagaagtgggtaatcaaaatgttaaaagaacttatctatgaatgagtgctttataactggtctgttcttcaattctcaattttccaaattttctgtgaatgtcctcttttcataatcagataaaaatcattgcactaggctgggcgtggtggttcacgcttgtaatcccagcactttgggaggctgaggcgggtggatcacgtggtcaggagttcaagaccaacctggccaagatggtgaaaccccagctctactaaaaatacaaaaattacccgggcatgatggcgggagcctgtaatcctagctacttgggaggctgaggcaggagaatcgcttgaactcgggaggcggaggttgcagtgagccgagattgcgccactgcactccatcctaggtaacacagccagactctgtctcaaaaaaaaaaaaaaatcattgcactatattaaattataatataatttgatgaacttattgtcaattaaaatgtgtacttaatta

SEQ ID NO: 109783 - DNA, 1049 bp, Homo sapiens
tagaaattggggctcaagcactgggaaagaggtgcttgtcggtttcttttagaggcagatggaggtaaccagcattgttaaaatgttggctctgtgacaggctgcaggccaaacagcagtgaaatatagtgctaacgagccaagatttggagtcaagcctaatcaaattctgtttctacctctaactttgtaaccttaacaaaatctctctaggccttggtttcattttctgtaaaatgggggtcctactagtgccttcctcatagggttgttgtgagataaatgaatacagtatgtaaaaaaacagcacccataacataaatggcctttaaatattgccaattatggtttactagatattttacagttgaggaaactgaggtttggagagatactaatgagtagccaaactggcgctattatcttctccaatggattctcttgctctctttctacttcccacctttcccacagtacgaaatttctgaagattctttcttccaaaacatgttgaatttgtacaacttctctgccaaggttatggctgaccagctccgcaagcctcccagccgagaccagtgagaatgacggggtggacatagacactaggggtggcaggagaggtgggggaaggttcctgggatgggggaaaagggtggcaagactggtcccagaccggcggccccatacccttgcaggaggtagggcagggctgttgggaggggagcagtgtcaggagagtcgggagcctcagcccctcactcttcctccgccaggtggagcatgaccccccagacagtgaatgcctactaccttccaactaagaatgagatcgtcttccccgctggcatcctgcaggcccccttctatgcccgcaaccaccccaagtgtgtctgaagcaggaggggctgggtgctggggcctgggcctgtggttgagctgggagcagggctggaggtgggattcagaagtacccccgccatgtcctcacttgctattcctcacccaccagggccctgaacttcggtggcatcggtgtggtcatgggc

SEQ ID NO: 109784 - DNA, 1096 bp, Homo sapiens
aggtcaatggggagaggctcaacggccgccagacgctgggggagaacattgctgacaacggggggctgaaggctgcctacaatgtgagtggcctgaccagccctccagcggctgaggcctgctggcctggggtgaaaggtgccgggtgggtgggggcaggcctggatgggcttgttgcccactgttctgtccccaggcttacaaagcatggctgagaaagcatggggaggagcagcaactgccagccgtggggctcaccaaccaccagctcttcttcgtgggatttgcccaggtatcaccctctcggaaggcctggggtctgcccctttgtcctgctccctcctgagtatgtcattaggagaactctggggcacgtgtcaaacgggctggtgaatggggctgaggctggggcatgaaaggtgggctgggaaggcccatgcccagagcctccggccagccagggcccacaaaggcagcctgaagaggcctgagcgggagaatgccttggtaggatttcgcatagttcaaagggcaaggttgtcgtgcttgcggggcacagggtggcgaagggggcaaacgttcatcctcacgctgttcctgtgagggagacatgcaggaaacgaaagctcgggacgcagagtggcctgtccagggctgcccaggaatagagtaagtggcagagcaaggacccaggcagagcctccgctgggcagccacagcaggcagcttctggggctccgctttttcccctcgtcatgtccatgctgggcaacccgatgtccagggcagttttggaaggaacttgggaggggctgcagcggtggtggtttgtgcccctgggatggctgtagctgactctaaggcccggctccacactagacaccatatgcccccatgtctgtcctggcccgcaggtgtggtgctcggtccgcacaccagagagctctcacgaggggctggtgaccgacccccacagccctgcccgcttccgcgtgctgggcactctctccaactcccgtgacttcctgcggcacttcggctgccctgtcggctcccccatgaacccagggcagctgtgtgaggtgtggtagacctg

SEQ ID NO: 109785 - DNA, 1475 bp, Homo sapiens
gtggcggagtaaaactcggtaactccgctcgcagaccgcccatctacagcagtgagcgaacccaaaccccacacggccaagtcccgcgggtttcaggaaactccgaagaggtcgggggccaggggcgactatggcgcgggggaggctgggaattgtagtctccacctgcctccgagggcggggtccgagggcggggctctcaggccgagggggtgggtgggtcgccgagcgccccggctcgccccggcgtttccggtcgcaggcgggctctggaggaggaggggcgccgcgaccgacgcgcgcgagttggtctgggaaaaagggcggtgcgagcgggtgcgcgcgcagcgggccggcagtggcggcggagatggaggagggaggccgggacaaggcgccggtgcagccccagcagtctccagcggcggcccccggcggcacggacgagaagccgagcggcaaggagcggcgggatgccggggacaaggacaaagaacaggagctggtgaggcgcgaccccgagagtcggcgaaggaggctgcggggctgagtcacggcggctccgcaggcctcaggcccgacacccaactaccccaccgcgccagggagagggcggttggggcgaccctcgggactcccggcaccttgcctctctgctcctcattctccgttccgcgctgtcacctccgccgtccccaccaaccctcaccaccgccgcgtgaagtggactcgggcaggtcattgtcacctccgtttcctagagtggcattcaagtagagcctgattcagaacccaggctgatttctcaccagggcttcccattcccactcggtttccttgtccacctggcccctcctaaggaggcaggcttattcttcacctgccccgggtaagtgggaggaggacgtctttgggattccttctcttcatgagctgcttctcccaaccctccagtctgaagaggataaacagcttcaagatgaactggagatgctcgtggaacgactaggggtgagtcacgatgttaacatgattcggtgcatgtttggatctttcccacttgttttattcttttttgaggcaactgctatgtacggtggactgtattttagggtcagtgttatgatgatgttgggaggcaggagagttacaaagggtatttgtacagttttgcagctttctcttgtgggagaagcagagttcttacctcttaacttgggtcatttgtttttgtgccaggcagggtgcagggagttgaggaatcacagatgaatgaataagacacagcatttccttggaggagttgttaagttaaatatctctgtattatgacttgaaggggtgtgactcctttttgtctgagccctgtcgtctcttgatcaggagaaggatacatccctgtatcgaccagcgctggaggaattgcgaaggcagattcgttcttctacaacttccatgacttcagtgcccaagcc

SEQ ID NO: 109786 - DNA, 1055 bp, Homo sapiens
ggagctggatgacgcagagaaggtccagcgggagcctctgctcactctggtgaaggaaatcgtcccctataacatggcccacaatgcagagcatgaggcttgcgacctgcttatggaaattgagcaggtggacatgctggagaaggacattgatgaaaatgcatatgcaaaggtctgcctttatctcaccaggtgagtgaacatggtagggaagggtggcaggcatgccctcctcagcacctctctctcaattgcgcctcctctattttcccagagcatttgctcaagcatagcatcacgctgtagttaatcttttgatgtgtgtgagtttcttgaggacagagactttgtgtcttcttagtagttctaacatctagcacagtgcctggtgtatatagtagatatttattatttattttgggtaagtgaattcatggggaaaatgagtgcctgggactttctgaattctttgttacttttacttttgtagttgtgtgaattacgtgcctgagcctgagaactcagccctactgcgttgtgccctgggtgtgttccgaaagtttagccgcttccctgaagctctgagattggcattgatgctcaatgacatggagttggtagaagacatcttcacctcctgcaaggatgtgtatgtagggaagaagctggcaaagagataagcttacgaataggacacttgcataaagagctgggacttgtagtttctggttagggcttgaggggttttcctgtgcccttagtggacagtgatgagcagatgtacgggctctctccacagggtagtacagaaacagatggcattcatgctaggccggcatggggtgttcctggagctgagtgaagatgtcgaggagtatgaggacctgacagagatcatgtccaatgtacagctcaacagcaacttcttggccttagctcgggaggtgagactgcccttttttcatcaaggccttttcgtcataattctacctgccatttcacctccctgactctacctctgactagactctccttgattagaattgccattcagt

SEQ ID NO: 109787 - DNA, 1691 bp, Homo sapiens
cttgggggggtataggtagaggatactaagggactagctcagaaccagagaccagttgccatgctgtgtttctttcctgtcctacctgaaaccttctttccttacttttcctctccctcctgttgcagggtttgggggcagtggctctcaggtggactctgcccgcatgaacctggcctcctcttttgtgaatggctttgtgaatgcagcttttggccaagacaagctgctaacagatgatggcaacaaatggctttacaagaacaaggaccacggtataattctgttcctgctttgtcttttgttttgctttgatcacttcttttgtcctcttggagtcataagttatctgacaagggatccaccatgcagttctttggagagctctttataataacaggatcctcaggatagggccattttaagactaatagattcttccctggtataggaatgttgagtgcagctgcatctcttgggatgattctgctgtgggatgtggatggtggcctcacccagattgacaagtacctgtactcctctgaggactacattaaggttggtctgcatacagcctgctcatggggacttccccgttccatattctagtgcctagcagtgcctctctttcactgatgaggtctgcccagtttttaactctagttaataagggtgctgcagtgaggcccatgttgcatcctttgcggtgaggaagatagagtatcctgagtgaagaatctgtttgctctttgtagtcaggagctcttcttgcctgtggcatagtgaactctggggtccggaatgagtgtgaccctgctctggcactgctctcagactatgttctccacaacagcaacaccatgagacttggttccatctttgggtaaggttcctcgcttgtctttctggtagtgctcagcctgtacactctggagaacaggaactgggcccttttcacccatattgccaagggctaccactgtgcctattgggtatctggctcttggtgaatgtttgttgaaatggtgaatgaatgaccgattctccttttgttcttttcttgctgcatcgttgggtatgtgttggggaccgcctttccatggcttttgcaggctaggcttggcttatgctggctcaaatcgtgaagatgtcctaacactgctgctgcctgtgatgggagattcaaagtccagcatggaggtgagtagaggctattgagcatttagagtaagtagggaaggtgctttgagtcttactttctgtgataaataatgaaaaagaagtaagtgtgtgcatgtgtgcatacatgtacatgcctgttggtgtgtattgaggggcgtcacctcagtgaaaccccttgatctgggattctaagcctctggtggttttaaggctaaagagttaacattttaggcctggcacggtggctcgtgcctataatcccagcactttgggaggctgcagtgggcggatcacttgagcccaggagttcgagaccaacctgggcaagattgtgaaaccccatttctaccaaaaaataaacagaaaaattagccgggtgtggtggtgctcgcctgtagtgccagctactagggaagctgaggtgggagaattgcttgaacccagaggtggaggttgcagtgagctgagatcgcgccactgcactccagtctgggttacagagtgagacc

SEQ ID NO: 109788 - DNA, 1029 bp, Homo sapiens
gaggctgaggcaggagaatcgctcgaacccaggaggtggaggttgcggtgagccaaaatcgcgacactgcactccagcctagcgatagagcgagactctgtctcaaaaaaaaaaaaaaaaaagcagtgcaggggataacctcaggatctgtgaccttggggctgtcacaagggttaaatgtcaatagtatgtaaaacagttggcctagtggctggcatatagtatatactcaatgaataatgactactattgttattttgatattatgaactaatgttattagggagaatatcttgcagtggactgtaggaataggctatcttgaatcaagacataaatattttaataacttactctgtgtaatactgattttcctacctctaggtggcaggtgtcacagctttagcctgtggaatgatagcagtagggtcctgcaatggagatgtaacttccactatccttcagaccatcatggagaagtcagagactgagctcaaggatacttatgctcgttggcttcctcttggactgggtctcaaccacctgggtgaggggatgtttctatttgggcaaagagctgacagtaactggatacaacagggagggtttatgtgtcaggctgtgctggatggaggcaagtatcctctgaccccttgaatctgtcctgtagggaagggtgaggccatcgaggcaatcctggctgcactggaggttgtgtcagagccattccgcagttttgccaacacactggtggatgtgtgtgcatatgcaggtctgtgtctttatgagtctgtcttgtgcttccccagtgactcctcacttctttcttggtccttattttcaggttgtttctcctttctccttcattctgatctgctctagattctttagacttctcctgttttccaaagcttttccttggtaacttctcatttctgtccattctccctcaccaccctgacgcaggctctgggaatgtgctgaaggtgcagcagctgctccacatttgtagcgaacactttgactcca

SEQ ID NO: 109789 - DNA, 3648 bp, Homo sapiens
ctgggactacgggtgcgccaccacgcccggctaatttttgtatttttagtaaagacggggtttcaccatgttggccaggatggtctcgatctcttgacctcgtgatccgcccacctcggcctcccaaagtactgggattaaggtgtgagccaccgcgccccgcttattttttttttttttttgccgagactttgatttcagtttctcagccctcaaccagcacttcgccttgtacttagcatgcactcaataaatggttgcttaaaatatgaatgaactaaagaatcgcggaacagagagaaacacagaggggaatcggtctgggagtttcaaagttcgggaggggacacgggggcgggctgtggctgtcacgtgacggggcgggggcaaatcccatgtgctcggcggcgcagatcgcccggcgcggctccgccccctgcgccggtcacgtgggggcgccggctgcgcctgcggagaagcggtggccgccgagcgggatctgtgcggggagccggaaatggttgtggactacgtctgtgcggctgcgtggggctcggccgcgcggactgaaggagactgaaggtaaagccgccatgtccgggcccgacccggcccccccaccccctccccccgcatccgccgccatccgggccgggaccggccaccctgcgccgccgccccggcgccctggccccgcggcccgacccagggccccggcccgccagggtcccgatccccggcccacgtgtgcctggcccggccgggcctggctgctgggtgggggtggggagcgcagggccggactatgcgggccccgcgggctggtagggcgccgggttcgtcgccgcgaaatgccacctcggcctgacccgaggaggcccggcagcccacgggcgcaggcaccacggctcccggcccgccgccccctccccccttcgcggccaggccgccgggaagtgacacgttgttctttggcactggcccgcgctgcgcagggagggcgcaggggagggaggcggtggcggcgggcagggaggagcccccggccccgcccgccctccgggccgaccctcacttgcctgaaaccggctcctcgacggccgccgcccgcctggccttttagggcctgactcccgcccttcctggcctacactcctgggcggcggcaggcctagcttctggcccagtgcgggttccccggcggcaggcgtatcctgtgtgcccctgggccaggcccgaacccggtgtccccgggtggggggtggggacgccacggccgaagcagctagctccgttcgtgatccgggagcctggtgccagcgagacctggaatttccggtctggttggtctggggccccgcggagccaggttgataccctcacctcccaaccccaggccctcggatgcccagaacctgtaggccgcaccgtggacttgttcttaatcgagggggtgagtgaggggtctgtttcagtaggtcaggggttggttggaagtgatgcgggtttgacagcatgttggtggggacaggctgtatcttttctgcttcaccctcttggcatctctgggactccgtatgggacccagcccttgcatcaaccctttcaccgccccatttgccttaagcttgggtcccttcctcttcctgagcgccactctttcccaacaggtgctggggggaccctgatgtggcaccaaatgaaatgaacaaagctccacagtccacaggccccccacccgccccatcccccggactcccacaggtaattagggaggaattagcaggggtgggggtgggggagaccaggcagtctccagcctctggatcttcctacccccatctgtgtcagggcaaagtgcagccgcctgctgccaaattgagacagggcccctgggctgtccccgggggctgtcacggggagggggtatgtggattgttaaggctcttgccgcagatctgctccccttatttcaccagcttgggtttctgccccacctgggcttcccctcttgctgaactctggtctcccctcttcagccagcgtttcccccggggcagacagcgccggtggtgttcagtacgccacaagcgacacaaatgaacacgccttctcagccccgccaggtgaggggctgtggggaggggagtaggggacctgggtgggagcagtggaaagctttggccagtttaggtctaggatggaaactggaggccccatacctggccttaatcctctgtgttctttcatgcggctctgcgccttgccctgttgattactcacggtggctggtcccttggatagtatgttgtcaatgagggtggcattactgggatcctagtgcctctgagaattgggggcagtgctttgggccctgctgccagctcttgctttcctatttgctccttttaccggaggctgctattgctctattgctctctctgctttctctttggactgtggtgaggtaaacactccagctggtccttgcctttctctgttccccagcttcttccttactaagtgggaggattcttgtcctgtcttattgccttcattccctccccccgccatcaccttgggggtaattctcttctttcctatccccatgtgctctcagggaggattcaggtctctgcaggtaatatccctttcccaaccctggacagtcttctggtctcatccttaccctccaccctagtcaggggctagacacagggaatggggatcttcagggtagtgacttgtttggtgtccaggttctcagttggaggccgagtgatgcatgttaggggctacatcttgaagaacgcgcatctggggactgggatgctgttgcatgttatggttagctcctcattacatgctggtggagcagtgcatgctggggatatgttgcccgaaagggccttacttaggcatgatgcatctcggtgttaggaagcctctgcagaggggtagtttggtagaggtgacgtgtgtatgcatggcagtgagagagtaaatctctgcaggatgcaaagtgtacatctgaatttggaggtttggagggcatgtgtgtgtacaagaagccgcttagccatttggtcaagtggtcttggaaggattggtcgccatgttctgaagcccacagtacttctttccaggctatagagacattgtggagtggcaattttttgtccacttccttctctttacaatgccaactgctttcctccctcctgacagcacttctaccctagccgggcccagcccccgagcagtgcagcctcccgagtgcagagtgcagcccctgcccgccctggcccagctgcccatgtctaccctgctggatcccaagtaatgatgatcccttcccagatctcctacccagcctcccagggggcctactacatccctggacaggtgaggctgggggcttggagcctagaagccacagacccctatacctctcacttaactcaccctgaccctccagttccattgcttttccagaggtgggacttccttctggtcattgcccagagttggcttgtcttgtcttgacctatgttctttttggagtctgatatggaactcatagctccctcaactccttctctccctctcccccttccccaccaggggcgttccacatacgttgtcccg

SEQ ID NO: 109790 - DNA, 8197 bp, Homo sapiens
gggtgggaggtgtcaggcaggcattagtatatggttgggccctgacgctaccaccattcttctccgtcccccctcccccaagctggcgcctactatccagcccaaggggtgcagcagtttcccactggcgtggcccccaccccagttttgatgaaccagccaccccagattgctcccaagagggagcgtaagacggtgagtagcagtgaggggctccgggacatctgggaaggggagaatcaaggtcaggtgctgctgggacattgtgccggaaagagcagtgacttgaggaggaaggagctgagagtgggcagagaatggtgtctgtggagggctcaggttctttgtaagatgctaagatttcagcatagaagcaggtcatgggaagactgaagtgcctagcgaggaagttcctgcgagacctgggtgctggggggttggaagaactatgcttggttttgggtttctagtggcttgccttggaaatggtttgttttctgtggccccagcccccattcccccctgcccccccagtcctggaagctctcaaggcctccgcctctgctcagtcctcaagccctgggcgtggtgcccagaatagggtgccagagctggggaagccgctgagtcaccctggctccacctactggatctgggccctgcccccagagatcaggcacactagccacaagtgagccgattgggttctagatgggggtcctgggccccagggtgtgcagccactgacttggggactgctggtggggtagggatgagggagggaggggcattgtgatgtacagggctgctctgtgagatcaagggtctcttaagggtgggagctggggcagggactacgagagcagccagatgggctgaaagtggaactcaaggggtttctggcacctacctacctgcttcccgctggggggtggggagttggcccagagtcttaagattggggcagggtggagaggtgggctcttcctgcttcccactcatcttatagctttctttccccagatccgaattcgagatccaaaccaaggaggaaaggatatcacagaggagatcatgtctggggcccgcactgcctccacacccacccctccccaggtactgtctgcttttcgagtgataccctggctgggatgtctgttctgccctggactcccaagtccctggatcttttctttcaactaagggatttatttccctgctttcctggatttctaggcagagctaaagtagaaatggctctagtaaagaagggttgtgggactcttcagtgcaaacttggtaaccctttgtgtcctgcagacgggaggcggtctggagcctcaagctaatggggagacgccccaggttgctgtcattgtccggccaggtaagtaagccggtgggacggagcttttatggggaaagggaatgttaacagttaaatgctgaggtggtggagtgacttgaactgggtaccagagaatgatgacttagatttcaggttgtgggattttgagggtgaattgggttttggatgaaagtggaagtatagcttaggtggggagaagatgatgcggggttattaagttgggaatgcctgggctggaggatggggaggaacaacagcagttaagcacttgcctttagttgctcattcttccttcctatggtgcagatgaccggtcacagggagcaatcattgctgaccggccagggctgcctggcccagagcatagcccttcagaatcccagccttcgtcgccttctccgaccccatcaccatccccagtcttggaaccggggtctgagcctaatctcgcagtcctctctattcctggggacactatgacaactatacaaatgtctgtagaagaatcaacccccatctcccgtgaaactggggagccatatcgcctctctccagaacccactcctctcgccgaacccatactggaagtagaagtgacacttagcaaaccggttccagaatctgagttttcttccagtcctctccaggctcccacccctttggcatctcacacagtggaaattcatgagcctaatggcatggtcccatctgaagatctggaaccagaggtggagtcaagcccagagcttgctcctcccccagcttgcccctccgaatcccctgtgcccattgctccaactgcccaacctgaggaactgctcaacggagccccctcgccaccagctgtggacttaagcccagtcagtgagccagaggagcaggccaaggaggtgacagcatcaatggcgccccccaccatcccctctgctactccagctacggctccttcagctacttccccagctcaggaggaggaaatggaagaagaagaagaagaggaagaaggagaagcaggagaagcaggagaagctgagagtgagaaaggaggagaggaactgctccccccagagagtacccctattccagccaacttgtctcagaatttggaggcagcagcagccactcaaggtaaggtgtggttggacggtagaggtagggcgggctaggggatatcgttccttgccctccttgatgaccgcccatttttgacatgtttctgggtccctgcaatggaatctaagaactagattaaggacttttaagcctaaaaagggtgatgcaaaggggaaatactgttctttggctgctttctatttcccagggattaagggtactccttaaattattggcaaagatccatgcttttatttatttatttttaattagtggcagtatctgtgccaaagaggagacggaaaattaaggagctaaataagaaggaggctgttggagaccttctggatgccttcaaggaggtaagggagcagaaaatgggaggggagagggccaagttgaggtatggagcagtggtcattctgcaaccaaaactggatgttctgttgttctaggcgaacccggcagtaccagaggtggaaaatcagcctcctgcaggcagcaatccaggcccagagtctgagggcagtggtgtgcccccacgtcctgaggaagcagatgagacctgggactcaaaggaagacaaaattcacaatgctgagaacatccagcccggggaacagaagtatgaatataagtcaggtatgctgaagaaagggttgagaatggcttgagttttcttattagggccagaggaggcagtatgattgcttcattctgttttccttgcagatcagtggaagcctctaaacctagaggagaaaaaacgttacgaccgtgagttcctgcttggttttcagttcatctttgccagtatgcagaagccagagggattgccacatatcagtgacgtggtgctggacaaggttagtggcttcagttggggaggggacgataagtttgtgctggatggattggggaggagcctgaggtcctgaaagagtagtcaaccgctctagcctgcttctgagaccttttcctgtcctctttgcaggccaataaaacaccactgcggccactggatcccactagactacaaggcataaattgtggcccagacttcactccatcctttgccaaccttggccggacaacccttagcacccgtgggcccccaaggggtgggccaggtggggagctgccccgtgggccggtgagtggggctgggtaaagtggcaggtgggcaaggagtgggagtggatgattccgtgtctcagtgcccgcggggaggggtttgccctggaggcgtgtagtagtggtgtcacatattgtgctgactagttccatgtcccctcttgtcttcatcccttgcttagcaggctggcctgggaccccggcgctctcagcagggaccccgaaaagaaccacgcaagatcattgccacagtgttaatgaccgaagatataaaactgaacaaagcagagaaagcctggaaacccagcagcaagcggacggcggctgataaggatcgaggggaagaagatgctgatggcagcaaaacccaggtactggcaagtcctgcttttggtctctctccatttcttctccaggtctgccatctgtgccctctttgcttctttttgtccttatcactagcatctgtcatgcctaagtccccaccaccctctcctgtccctcccaacagcctgttctgagaccctcactggaactcttgtctcttctccctccaggacctattccgcagggtgcgctccatcctgaataaactgacaccccagatgttccagcagctgatgaagcaagtgacgcagctggccatcgacaccgaggaacgcctcaaaggggtcattgacctcatttttgagaaggccatttcagagcccaacttctctgtggcctatgccaacatgtgccgctgcctcatggcggttagtttccagtgggttctaaatctaatggtctggttgcccattcctattcccaagactccttgagtccagcttcttggttcccctccaacttgtgcctcttccagctggaaggaggcagagctggggccagagatcttcctgggtcaggtagttaaaggctcttggagggccttccctgcccaggactagtcttgagtgtgacattctctctgacctacagctgaaagtgcccactacggaaaagccaacagtgactgtgaacttccgaaagctgttgttgaatcgatgtcagaaggagtttgagaaagacaaagatgatgatgaggtttttgagaagaagcaaaaagagatggatgaagctgctacggtgagagaaaacccactatcgattccactcaccacttacctccttcccttacccagatgctactcagctgtagaatttggaatggaggtagtggtgtcttggggatttctctggctcaggacgttttttttcctttttgagacagtcttgctctgtcacccaggctggagtgcagtggtgtgatcttggctagcctccacctcctgagttcaagcgattctcctgcctcagcctcccaagtagctgggattacaggcatgtgccaccatacctggctaatttttttgtatttttaatagagacggggttttaccatgttggccaagctggtctcaaactcctcctgacctcaagtgatccgcctgcctcagcctcccaaattgatgggattacaggcatgagccactatgcccagccagccggcctcaggactgagtgcttattgctaggtttggatatccaggtagaaaagggttttagccgagtggctggttatctttttgacacaatccctgtcctgtgaatggcaggcagaggaacgaggacgcctgaaggaagagctggaagaggctcgggacatagcccggcggcgctctttagggaatatcaagtttattggagagttgttcaaactgaagatgttaacagaggcaataatgcatgactgtgtggtcaaactgcttaagaaccatgatgaagagtcccttgagtgcctttgtcgtctgctcaccaccattggcaaagacctggactttgaaaaagccaaggtagaggtccttgcatctggagggggatgggctgaagcatatgtggggctcactgagcccacaatgatggggcggaaggcctgaggaggggtggggcctgcagttataggtgggacatgagaagttcctggtctgatgcctttctccttcctagccccgaatggatcagtatttcaaccagatggaaaaaatcattaaagaaaagaagacgtcatcccgcatccgctttatgctgcaggacgtgctggatctgcgaggggtgtgtgtccccctcctccccactgccagcctgctgcctccagtttctgacactgccttgtcttgccttccctgacatcatcgtgactggccctctgtctccacagagcaattgggtgccacgccgaggggatcagggtcccaagaccattgaccagatccataaggaggctgagatggaagaacatcgagagcacatcaaagtgcagcagctcatggccaagggcagtgacaagcgtcggggcggtcctccaggccctcccatcagtgagttccaagctgggattgagaagggagcagtgaagggaccgggaggttatactttcctctgatgacttcctgttagtgccacgtgtctgggccactgagacaccatgatggaactgaggatctgaggaagggaggctgggggtggcccaaggggaaggggctgctaggatttattcattattccagtatgcccctctttttgtgtcaggccgtggacttccccttgtggatgatggtggctggaacacagttcccatcagcaaaggtagccgccccattgacacctcacgactcaccaagatcaccaaggtaggggtgtgtgtgggagtgggtgattcagctcaggtttagatcttagtcccttcacttttctaaagttgagaaggtgacagctgaatgtttcctcttagactaactggttggattgctggagacaggactgccagctgtagagggagggtggtactcccattagtctggaccagtgtttggcaaacacacacacacacacacacacacacacacacgtgccagatccagcccattcatacatcccaggacccagtagtggtttttacattttaaagttgcgaaaaatcaaaaagtgaatggtaatttatgctgtggaaattaaataaaatgtaaatgtcagtgtccatgaagttttattggaacacagtcacagcatgcctttatcatctacagctggtttcatgctactgtggcagaattgagtagttgcaatagagactggccctttattaaaaaagattttctgacccctggactgggccattcactacctgtttggttgcatatggtggtgctggccaagggactcagccgggttggacctatgattctactccccttttcttcttcagcctggctccatcgattctaacaaccagctctttgcacctggagggcgactgagctggggcaagggcagcagcggaggctcaggagccaagccctcagacgcaggtatggaggcagtgtcaggagctgggtggttacccgtcagagctcccttgaggacagagccttttctgttagggaggccttcagtacaaggtggttaggcaatgcgggcaatagaggaggtttgtgttgtggttccagggattgaactgctttacttttgggactgggaccaagtgtcctaaactggcaagtaggggataaaatgcaggaaaggagaaaaagattttaatacggattttctgcatccccagcatcagaagctgctcgcccagctactagtactttgaatcgcttctcagcccttcaacaagcggtacccacagaaagcacagataatagacgtgtggtgcagaggtgaggtttcctggacatctttgttattcacactgggggtaccgtgattgggttctggttgttgccataggttggaaatttcttcatacctgtcctggttggagcccttgggttagattggggcatactcattatgctaagaacaaggcccaacagttgctcagcatgttgtgtaattacatgagtgcctgggcagtgcaagtgagtgaaaatttgtctgtctgtcttccaggagtagcttgagccgagaacgaggcgagaaagctggagaccgaggagaccgcctagagcggagtgaacggggaggggaccgtggggaccggcttgatcgtgcgcggacacctgctaccaagcggagcttcagcaaggaagtggaggagcggagtagagaacggccctcccagcctgaggggctgcgcaaggcagctagcctcacggaggatcgggaccgtgggcgggatgccggtgagagtctgggagaggaatggagggaaaggcattggctgccttgggactagctggtccccagctttttgagagctccaaatcttgtttgctgggaagactgaaaagtccctctaatctgtgttctcttcccacagtgaagcgagaagctgccctacccccagtgagccccctgaaggcggctctctctgaggaggagttagagaagaaatccaaggctatcattgaggaatatctccatctcaatgacatgaaagtaggcagtgggagcggcgtgtgattgaggagtgggcagggagggatcatgctggcaggcataggggtccggggtctgggtcagacagtgactggtctc

SEQ ID NO: 109791 - DNA, 1124 bp, Homo sapiens
ctatctcctttttgggacccttggaaccttgcataagagtgtaggttccctggccgggtgtggtggcttatgcctgtaatccctgcactttgggaggccaaggtgggttggattccttagaggatcacgtgaggttgggagttctagaccagcctggccaacatggtgaaaccctgtctctactaataatacaaaaattagccaggcgtggtggcacagtaatcccagctactcggaggctgaggcaggagaactgcttgaacccgggaggtggaggttgcagtgagccgagatcgtgccattgcactccagcctgggtgacaaaagcaaaactgtctcaaaaaaaaaaccaaaaaacagtatgggttccttgaccatcctggtcagcataactttagggggttaagcggggtgaaaaccatctaaggacacagaggtggccttagcttgaaataattgtccccatgtctagaaaatgttcctgggggttccatagttgatgccctagccatgccacgttgccccagaaggagagtggggacctggcctagaatgtcttgactttgaattcccttggcaggttgtatgaaatcttggaattggctgaggacatggaaattgacatcccccacgtgtggctctacctagcggaactggtaacacccattctgcaggaaggtggggtgcccatgggggagctgttcaggtaagtccccctgggtggaattcaggggaggtaaagaccagaggaaaggtggtagggaaatggctgggttggataccctggtttggagggagatggagtagtggtgagagaactgtggaggctgtcagcattaggtttttctcttcttgtagggagattacaaagcctctgagaccgttgggcaaagctgcttccctgttgctggagatcctgggcctcctgtgcaaaagcatggtgagtgagggccaggagtccagagatgcctcccacggtgtggttttggctgtttgctgtggccctgaagcttcatggtccattggtggagtggagtgatggtgatgacaggattgtgttggtacctgggagaggaaatactgaggtgggccatctcccgcacaccagttcctatcatgagttc

SEQ ID NO: 109792 - DNA, 1038 bp, Homo sapiens
atgaataaaacacaagaaacaagttggtagagaaaaaggaagaaatgggccgggcgcagtggctcacgcctgtaatcccagcactttgagaggccgacgtgggtggatcacgaggtcaggagttcaagaccagcttggccaatatggtgaaaccccatctctactaaaaacacaaaaattagccgtgttgtggcaggtgcctgtaattccacctactcaggaggctgaggcaggagaatcacttgacccgggaggcggaggtagcagtgagccgagattgtgccactgcactccagcctgggaaacagagcaagactctgtctccaaaaaagaaaaaagaaatgacagcttgataaaaacaacagtaaagcgtgacataaaacagttgaaatagagtggagtatcttaagtactgtggggttgcaaaggaatatttgacaatatttgtgacaggaggctttcagggtgctgaagcggctttgtgaaagttaattggtaactagcgaatataaaggtaaagagatggggaaaggtaagttgaatgtggtacttagtggaagtgagaagttggggtgagtgtgtgcagtttcaagggttcagccatctggaacctggaggaatcacacttgggatttaaaggaattgttatgtcaacatcatttaattcttttaaatagacgtgtaccaggacaagttgttttttaacaacaaataagcatattgaactatttgtgtatttcatcaactccaaggtgccatagattataagacattctttatgcgctgttaagaaagaaaagactgggccgggcgtggtaatcccagcactttgggaggcagaggtgggtggatcacgtgaggtcaggagttggaaaccagcctggccaacatgatgaaaccctgtatctactaaaaatacaaaaaaattagctggacatggtggtgcgcacctgtagtcccagctacttgggaggctgaggcaggagaattgcttgaacccaggagggggaggttgcagtaagccaagattgtgccact

SEQ ID NO: 109793 - DNA, 2608 bp, Homo sapiens
ctcagactgctggttttatgaggattttttatttgtgttagggatggggtatatttgtgtcttaagattttctgggtttaggaaacaagcatacttgttagaagttgtcccttcctagaggcccttacatcatttttcctaccctagtgtcatagcactttggtggacaagttctcttttattttattttattattattatttttttgagacagagtctcgctgtgtcgcccaggctggagtgcagtggcgtgatctcagctcattgcaaccctcgccttgggttcaagcgattctcctgcctcagcctcccgagtagctgggattacaggcacccaccaccacgcctggctaatttttgtattttctgtagagacggggtttcaccatgttggtcaggctggtctccgactcctgacctcaggtgatccgcccacctcgacctttcagagtgctaggattacaggcgtgagccaccgcccgctcctgggacgagttcttatttatttgggtggttatttgactgacatctgtgccctgcaccagaccgtaggaatggaagggctttgcctattagtatttctatagcatccttaatgcctagcaagtacctagtaggctttcagtaaatatttgttggattaatgtggtagagctgttgggtccttggagagagagagctttggtaagctgggttggtcttgtgttttccagggtcctaaaaaggtggggacgctgtggcgagaagccgggcttagctggaaggaatttctacctgaaggccaggacattggtgcattcgtcgctgaacaggtttggggatggagttgggttaattctagcatttgaggctggccagtcttctttcttgtctcctgttggcaaccttacctcttaactgcgggccttttccattgcagaaggtggagtataccctgggagaggagtcggaagcccctggccagagggcactcccctccgaggagctgaacaggcagctggagaagctgctgaaggagggcagcagtaaccagcgggtgttcgactggatagaggtaggtttctcctggatatcgataaaggaaaggtagttcttagggtgggggtgggggcagcaagaatgaagactgaagggcccaattcagaatctggggatcatttgtttctcccatacaggccaacctgagtgagcagcagatagtatccaacacgttagttcgagccctcatgacggctgtctgctattctgcaattatttgtaagaggaaccagggagatggaggggcaagggtgggcctgacagacaagtggagggaggtgggtgtcagccttggcctcccagttctgaaccggggtaagggtatattgctccactcatccctgtcttcttgtagttgagactcccctccgagtggacgttgcagtgctgaaagcgcgagcgaagctgctgcagaaatacctgtgtgacgagcagaaggagctacaggcgctctacgccctccaggcccttgtagtgaccttagaacagcctcccagtaagagccaggccatggggacaggggtggggtggagggactgccagatagcagggcatgagacccttcatggaagggtcttaatccaagaaaggtaggtagtcattagagagcaaaatgccctctgggtttcattctttccttttacgtttgtgttgtgttgttcctacaagtggaaggagttagacacagccttgaagggtaattgcctgttttgtgcctagccatgtgtttgatgccaacagtgcagaggtgataaatgataggatcttcccagtaccgtgtgcccccacggcgtggcacagggctgaaatgctttgcttaccttgcctcatgtagtcctcacaaatgttgtttagggtggatggtattacccctattttccacatgaggagactgaggtctcagtgaacatgtctcaggttatgcattcagaacataggtatgtgtcagggcattggcatgctcacagagaggaagccgagcaatttcctgtgctggcctggagttagtactggcgtgagcaatgagcctgggaagacgggtgctctcggagggaggacacctggtctgaggggtaatgagtggtaattcactccacaacaactgggaaggggagggggagaatgtttgaagcgaaggcactatgtgtgttctttctacctatggtaggaagaacttgacacagggaaaagaactattaaagaaaggccagtgtgggagagcacagcaaccagtcctaagtgaggcaagatggggccgaagagagggatgtgggcctgaccacacagggccgggtgtaagccatggccagagtctggggctttagcctgggggcaagaaaacgcctttgtgggattttaagcaaggaataaaggaatttgattttagtttttagatcatcttggcaatagagggaagagtggtttggaatggggtgagagtggatgtggcagtgttagcaccagtggctcagccttgctggtgatggtggagaggagtaggcagatcaagagatacttaggaaatggagttggcagcttttggttacactggtctggggagggggccgtg

SEQ ID NO: 109794 - DNA, 1593 bp, Homo sapiens
gacacgaggaagtttccggcaaaggatatagcatccacaaaagtgtcaaggccagagaaggtgtgtatgtacaggaaatgtgtggggaaggaagggaaattgagatcaggagttgtcaggatctgtttggggggcagtgaatgttcaggttacatgtaggatatatataggactttatgtatgatatatataggacttttagcgatttcctgaattcaggagtaccaattctgaatatagttttctccattaaatacatcatgggcagagaggtttcaggctgccaaggtgaggccaagcaagtttgtaaggtttttctgatggccaagtgactcattgctgtgcagcagtctcagatcatgagattagcatcctgtcagaggcctagtcactctggaatggccacaaatgtcaggctggtgcatcagggccttgtttgaacagtggaacttgggagggttccctggggtgggctggggtggcggtggccagtcacctctaactgctgtcccgcctgcttgcagacctgctgcggatgttctttgacgcactgtatgacgaggacgtggtgaaggaggatgccttctacagttgggagagtagcaaggaccccgctgagcagcagggcaagggtgtggcccttaaatctgtcacagccttcttcaagtggctccgtgaagcagaggaggagtctgaccacaactgagggctggtggggccggggacctggagccccatggacacacagatggcccggctagccgcctggactgcaggggggcggcagcagcggcggtggcagtgggtgcctgtagtgtgatgtgtctgaactaataaagtggctgaagaggcaggatggcttggggctgcctgggcccccctccaggatgccgccaggtgtccctctcctccccctggggcacagagatatattatatataaagtcttgaaatttggtgtgtcttggggtggggaggggcaccaacgcctgcccctggggtccttttttttattttctgaaaatcactctcgggactgccgtcctcgctgctgggggcatatgccccagcccctgtaccacccctgctgttgcctgggcagggggaagggggggcacggtgcctgtaattattaaacatgaattcaattaagctcactgcctttctgctttatgccctgctccctctagagaaggtgtttataggtggggatccttcccagagctggtactgtagcgctgttccctgtaacctggcacccctcctgcctcttcccctgtccatgattgcagggatctgaggtttcctggaaggttgggccctcagatgggcttgataggtgccttcctggtccggagaaaagggagattagtgataggacatccttgctaggctctgctctcctaccagaatgattcaagcccctgtgtggggaaggcttttgggtttcgggttgtttatagctggagaatccctttatggcttgaaggtgtcatctgtaaaatgaaggggctggatgcatgaagggaggttttgcgaccccgtgtagtgtgactgggctggcttagtgagtgttcgccgcccctgccttcag

SEQ ID NO: 109795 - DNA, 1118 bp, Homo sapiens
caccaaccttgtcctgggcccctgtggcctgtcatttagagctgcccctcgtccatcaagtccaatcgcttttctccccacactgcagactcacactatcttctcactgctgggagtggaccatgcttatgtcaccagtattggcagactcattggaatcgttactctaaaggaggtgaggtgatggtggcctccaaagctgctccacttccaaaaagtcatggaggcttatgtccagctcacctggggaggaaggcggggaggagtctgacatctgggtccagacatctgtccctctcacctttccagctccggaaggccatcgagggctctgtcacagcacagggtgtgaaagtccggccgcccctcgccagcttccgagacagtgccaccagcagcagtgacacggagaccactgaggtgcatgcactctgggggccccactcccgtcatggcctcccccgggagggcagcccttccgacagcgacgacaaatgccaatgagcccctcgtgggtggcctaggatggtgctagccatgcccgtcagcccagaatgtgcatctttcattccttctgccttcggaaggcaggaggcagctacagctggaggctgcaccccagccccctccagacctggggtgccagcttctcccagttcatcctacctggaatctgacccactacccacctgcaacaagtcttccagaggcaggaagataggccctgccctggcaggatgggttggggtcacttgacccctgctccccctttgaggggaaaggggtggaactaagatgggtttataactggaacctccaatgaccagatgtatatagagatttacaaagatttttatattaatttaataaaacaaattcttaaatagaacaaaataaacacctaatgagccacttatatatagaatgcttgtgcccgttggctctcgttcttaccttgggccctcttacctgccaaagcctacaaggcccttaattctaaagccacccacccttcccacaaccataaaaacgtacagtccagtgaccttggaatgcaggatctgccagaggcctccactacgtgggcattaacaccctggctggggtggggccctgta

SEQ ID NO: 109796 - DNA, 1067 bp, Homo sapiens
cttcctgcctatgcaggtgaacacagaagactcagccttcccagcagcccggggggagacccacaagcccctaaagcctgcactcaagagggggcccagtgtcaccaggaacctcggagagagtcccacaggtaagcccatgtctcctgtgtccacagagcctcagccaagctactgagatccattagagtccctgcccagccctgttgctggggtacatcccagctggaagaggctgcccacatgggccagggctggaactgggatacctctccctgtgtcttccttacctttcctggtcctctccccaaaagatgacattgccccctggggccttatgtttgggaacacagggagcgcagagtcggcaggcatcgccctccggagcctcttctgtggcagtccaccccctgaggctgcttcggaggtgagtggctggagcctgtcctcctagcttgctttttccccagctccctctccaatgctgagaccacgtcattaaccctgcagtgcctgcctctattctccctgcccttcggccctccctgctgtcagctcaggtcctgtggcgtgccctttcccctgggctccaccacttcccctcacctcccctctccctataacctcaactcctcatctttctggtttggctctaacaaaactgaagaagttggaatcctgtgagaagcgcaagctgaagcgtgtccgaatctccctggcagtaagtatgcctgctcttctagcatctcggcggcaccgggcagggagggcagggtctaggctggataaactccagagcccctagctgccagcctccctccctctctactagagtgacgcggacctggaaggcgagatgagccctgaagaggtaaggtgccactggactctggaccctgtttcttcctggttgtgttcaatcatcatgttggctgctgtccccatgggagggaccacggggttggaaaaagggcaggccagctttcagggaggtgaggtcagctacaggcaccttctccctaaacctcatagtctcttcccctcagattctggagtgggaggagcag

SEQ ID NO: 109797 - DNA, 2032 bp, Homo sapiens
tgggactgacatccttcagagagagggcagccagctgaacctgctccctacgcacctctggtcaactttacaagtgaccccagcttcccccaacattgaccttcactctaagtcactgcagagagacaaagagaggcagaaacttctccaccccatcacacaatatgccctgatgggcttctgagggtggagggtggaataacaactcggagggccccaagggagggcttggaggatggactttctgctgctgctacccacctacagagtcaggggctgacagaaaggtctttgggtcagacccctgctcttagaataaccccagtccaccatcagccttggggctatcgtatcataaacagcaaaggagaccttctgtcaggactgagtgttttcatgaaagagccaaggctctgctctgacctcagccctgagatatgcgaggccacccagcccttggccacccacgactgatgtgaaacctacgactctagacgcctgctcttcccggctctggtgaccctgctcatctccacgctgaccttcccccctggctttggacagttcatggctggacaggtaaccacaggcagaacaggagttttgtgctttcccttggaaggcattcctccaaagccaacagccccagtgtgactgtgggaccccttgttccccgtgggatcccatggcctcttcccttcatcctgtcggtttcccagcctgaggcaccctgttcactctagctctcacagaaagagacgctggtcaccctgtttgacaatcggacgtgggtccgccagggcctggtggaggagctagaaccacccagcacctcacaggcctggaacccaccacgtgccaacgtcttcctcaccctggtcatcttcattctcatgaaggtgggctcctcacgtgtacactgctaacctttacatagcttgcccttctaagcacctgccacgcagtgctcactcctcgaagcctctccacagtgccatgggaaaggcactattatcacccccgtttgaaagatgggggagtcgaaacacaagtagctggcccaaagtcacacagctagagggcagagcgatgatctgaacccaagccatctgcttccagagtccttccccttgccatcacctgggaggcctgggggtcccagggtagctaggagggttacggggtggctgggagggttacgcccacctgatcagcgaggtagacttctcctgggtggcgctgtgggctgcctggggccaggtggagcctcttcgcctttgaaccaccccctgcctgcagttctggatgtctgcactggccaccaccatcccagttccctgtggggccttcatgcctgtctttgtcattggtgagttctcagctgcctgctcacccagcctgcaccttcctcagcctctggccacccccccagccaaccctctgcccaagagcgggtttttggtccagccctagcccgaaccctgaccccacagggctgtgccctacactgaatgacccgttggcccctccctcaccctctgaccctctctcttcctagtgccccctgccctccccctccactgcctctttctcttcccacccccctccctgaaggagcagcatttgggcgtctggtgggtgaaagcatggctgcctggttcccagatggaattcatacggacagcagcacctaccggattgtgcctgggggctacgctgtggtcggtgagtgcctcaggtcccatcggccttgggagacccccccacccacgccccagccacagggtccgagactctggtgccccctgctggcagaaaccaggcttccctcagatgcacaggtccaatcccaggactgtattgggcagccctgagggacccactcaggacctgccctggttgtggagggtcttctgggacctgggcaccctgaggagactgagtgtgactgtccccaggggcagctgcgctggcaggagcggtgacacacacagtgtccacggctgtgatcgtgttcgagctcacaggccag

SEQ ID NO: 109798 - DNA, 1022 bp, Homo sapiens
ggactaaatgacatcatgtttgtaatgtgcctgttgttataatgctggcatttagttaccagtaaccatttttttttttttttttgagacggagtcttgctctgtggcccaggctggagtgcagtggcgcgatctcagttcactgcaagctccgcctcccgggttcacgccattctcctacctcagcctcctgagtagctgggactacaggagcccactaccacgcccggctaatttttttgtatttttagtagagatggggtttcactgtgttagccaggatggtctcgatctcctgacctcgtgatctgcccgccttggcctcccaaagtgctggggttacaggcttgagccaccacgcccggctgaccagtaaccatttttaaatgggatcttttatattgttaattactgttaagaataactttgctgctattgctccatagggctgaccagtttgagtatgtaatgtatggaaaagtgtacaggattgagggagatgaaacttctactgaagcagcaacacgcctgtaagttacgtaatcttgtgaggattcttttcctcttccatgttctgagactttgagctatgctcctgcttcctctgttgagtccctctcctcaggcacctcagaccgaggtgggaactagaaagaaatagttctgggagcagtttccagtctgaaatgtagactgccctttgtcaggccctcctggcccagtggtccacatgagaaactgattatctcactgtgtaaagtgcaaaggagacttgcttccccaggaataaatgcagcattaagtgattagactgttaggctttgtgtgtgtgtgtgtgtgtgtgtgtgtgtgtgttttgctactctgtaaaaggctgtgtgtgtgtgtgtgtgtgtgtgtggctactctgtaacccaatccctagttccttggttttcctgtccagctattttttcttttctttaaagtcttattaaaacaatatgtgctttttgtaagtaatttgaaatgcagaagagtaa

SEQ ID NO: 109799 - DNA, 1118 bp, Homo sapiens
catttgaacattcccctgatttggggcatctaggtgttttccaccctcgataatataaagaacagtgccttgcacatatctgtgcattgatgtttgtcagaattttggttcctagtgacaaaacagtaggaagatgcctcttctgtttcttaggctgagatggaacagtgccttgcacatacctgtgcattgatctttgtcagaattttggttcctagtgacacaacagtaggaagatgcctcttctctttcttaggctgagattgagagctgctgagtggcagtgctccagaatcacgggatggggccttctgtttcagctctgcgtacgtgtcctatgggggcctgctcatgaggctgcagggggatgccaacaacctgcatggattcgaggtggactccagagtttatctcctgatgaagaagctagccttctgaacctcgcctgaagccagcctctctgccaagtcactcaggtcatgggcattgttcaagcctgagtggcagccgctcttgctcacctgttgaggaagggctggctcactgtccaccgtggcggcatctttaactggcctccactcaatgggaaactgactcgcctgtgaaagacacagtgggagagctgaaaatgaatcagaagctttatgtatatgatttttaaattaaactttactttttcagactgcccctcccctttttgtaaaaagtccatttactgtaaaatcgttttttccagtttgtctgtggtgtattgtttctggcccacagccagctgatcacttgtcaatgtaggatctattccagccttttggtatctgggttcagggttatctcagtctcctggctgactgttctcaacatttatcctccagtgtggttttcagtctgggagagagttgtgcttttggctcctgagggtaccccaggcccagaagataccacccatttggcgcagaattttgaattggcaaggagccctgctcatgtccttccaacactttcagtctcttaggaagtcagttcatgctgacttgaatgagtcacttgcatagtctagaaatgttcattatttttatggaagctttgggtagaggcttttagctacaggcatgggagat

SEQ ID NO: 109800 - DNA, 1026 bp, Homo sapiens
acatggtgaaaccccatcggtactaaaaatacaaaaattagctaggtgcggtggcacacgcctgtaatcccagcactttgggaggccaagccaggcggatcatgaggtcaggaattctagaccagcctggccaacatggtgaaaccccatctctactaaaaataaaaaaatcagctgggcatggtggcaggcacctgtaatcccagctactcgggaggctgaggcaggagaatcacttgaacccaggaggcggaggttgcagtgagctgagattgcgccactgcactccagcccggatgacagagtgagactccgtctcaaaaaagaaaaagaaaaaacagagcctaacatgagacccctacaactggggagcggggtggcctggggtctagtttcacctgggaaatctggaaggtgacaggagggctcaccagctgctctggtggggctgctgccacctcactgggaccagcctgcaccctcagagttttttctggggtagggaggcaggagagtttcttctgaacagacgtaggtcctgtggcagagagagcctgcaaggactccctgtcttgagtctatgtagagggatcctagcgggagaaggttggaactgaatgcccatgggctgaggatggggtctcagatgaccacccgaaatgagattggacttgagacacatccatagataaaagaggattttgggagaaaggctgaggcggcactcagccggtaacttgagtggagggggtgtaaaatcactccatgaaaaagaggcaaaatttaacatctgcctgccaagacagtctgaagccaattctatggtaactggctcggggaggccaagtggaacgagagagaagacaaagccctctccattgtgtccactggaggttcccagctggccaggcacaagctgggggaagagagaaggatgtaaggtaaaaataagctcagagttttgatgaatacctcacattaaagttccaatttctggcttgagactgcgtttgcaactaaaagcaa

SEQ ID NO: 109801 - DNA, 1134 bp, Homo sapiens
tgacagatcgagtcccacgggtggacacatgcaaattcagactgacacaccgaggtctcgcccacactcgcacacactcacccacatgtgtgtgataggatcgcaggcgtgagaacccagtgtggggctttgttgttgattgccttgagggtgtgagccagggagcctgttctagttgccagatctgtgtctgggtctctgtgtcgtagtccaggagaggcgacactggtacacacacactcatacacttacggggctatgtgtcacctgtgtgtgtcgggccacaaggcccttgttgtgggtgtggtgggtgctggtgctgagtgtggagtgggagtgtggtttgggtcaggtgcacaggggctacctgaggaggctcacttctccctccccccttcccttcctttctgtctttcaaccctcatcacctactggaccctcaggagtccaggccctagcaggagcccaagcttccaagcctccaggccaagcagctggggggctgtccagaaggccgagtcctgatgtgctggggcggcccgggaagagggggcagcaggacctttcgttccccattcccggcctgcccacctcccctccactgtgaagtgggagctagggctactccctggctgtgaggccaggccagcatgggatgcctctgggaagcagcggtgcctacaagggtggtttcaccaattccttcacttttgcaatacctcagactctctggtctccagttcgtgcgtgggagaatgtgagggaacaaatgcaaggtgctgaccccagcgcagacattgcacctacccaccctctggctctccctcactgggagacaggataggaaccgcaccgacctcgcagagttcttctgagtactgaattcttaatgtgtgcaaagtgcttagcataggcattgttattcaaggattagctgttattattattgttaccctagggtctgctccttggggagcttcaggagtgaaacgagtgtgtgcccttatcctgctggagggaggttagagggaggaaagatgaaagggaaggttggtgcagggggctgggggtggggctgtctgccccacatctccctgcagctccagagagggaaggaatggggagagagctggc

SEQ ID NO: 109802 - DNA, 1044 bp, Homo sapiens
ctgccctcctgccccgctgcacactctgcgggcccagccctggtgctgacctttccttccacctctaagtccctagtctggaatttgggctgaagccttgctgcttctgtctttagttgttttgtgtttctgttttttgttttggcttgtttttttctgttgtttgtttgttttctgggtctcaatgacacttttgctcccagggtgctatggggcctggccctccaccagggcaggtggtaggccctcagctggtgcccctcccacaggccagggtgcccatgatgtcctcctcatgccctgctcaaggtcctcgacctgcaagcggaagagccttgcccagagcttctgaagccaaatctcttcagggagctaccctctaccaagggctcaggggccctggagacagtgccattgtgctggcagggaagtggcttgttacttgggcagcggctatacctggggaggccgcacccagccacacccagaatcatcttcatgcccctgctccaccccagcctcgtgacctgactgacagctcctgcccaagccaggacaacaggaagcagggctggggctgtttccctacacctctggctaaggctgccccagcacctctgcttcccttgcaagagtggcccatgtggctgccctgcctgagcgagaggcaccagagtgttgggggcaggatgaggggtaccaccctctcccagtaactcttcctctaccccactggaagacatcccataaacagaaccatgcttgcagggtgtgtgtgtgtgtgtgtgtgtgtgtgtgtgtgttgcgggtgcatggaggatgcacctctgaggctttacacaaatctaggtattgatacttacaccatgtcagggtgctcctttgcaggggctgtggcatatttcagtgtcattggacatctgtgactttgcagctgattgtagtttgtgtgactaaaagcatgtcgccaagtctatacagggaaactggtgtttgtgtttgcactttacaccgaagactgtgtgacttgcagctggtgatagc

SEQ ID NO: 109803 - DNA, 1036 bp, Homo sapiens
ggctgagcgatggccaagggccgatcccctccctccctccctctctcgctccccagaaattaaacagaaatgaagagcctccctgcctccctcgctccctccctccttcccgccgccgcctctccgccgtcccctccctccgctccctcctcccggagccagcgcagggcttgttttaaactgtggaggaatctggctggagggggagggggctgaatatttgggtttaaacagttccagatgggtttggcacaggctgagcagaaggaagtgagggagagggaggagggaggcggcgcgagggagcggctggagccccggcctgctccggcgggcggaccggcgggcggaccggcgggaggactggctgcgggggcagggcgcgcttgctctgccggctcccgggactgacactcgcgctgccggctggggacgaggccgcctggcaacctccctctgtccctgtctcctcgggcctccgcgtctctcggtctccctgtctttgtagtcagccgccggccatcccggctgtcggatccccgccagccggctccgcacatccctccggctccgtgccgcccaccgcccgccagctccagtcgctgccccgcccgcctccctccccgcctgtctctgtgggccccggcttctgagcatctcggcttccctcgagtaccccccaggccgaatgtctgtgtctgtctgtctgtctgtctgtctgccagaggccaggatcgctccccttacagccgggccctcaggggaccaggggctgcggcagcgggaggagcctccctccctgcagtgaatggctgctgcctgcagcccctttgcctgacatggcggggggctggggtcacagctgccttgtccacccacggggtcctccgccgtcctcggctcagacccagcctccgggaaaccactgaaggctgcaagcctgtggccgcggggtttgggcttttccccacttgggcacccagaggggatgatgtagaggcctccagaggtcctggggcaaccctgccccattcca

SEQ ID NO: 109804 - DNA, 2467 bp, Homo sapiens
gggaggcagatgacttgtctcaggcctgccctccaccctgccaccctacaggaagcagcgacacggctctgattcggagtacacggagaagctgcagcagtacagtgagtttgtccccgccgccctccccaagctctcccagccccctgcagggctctcagacacccttctccctgcctgggacttcattccttagagataaaccctgaatgccccctcccacttccagtcaagtggcatttcctgacccctatctcactccgggtaccctgggcccctactcactcctgctagccccagaaatgactgagacgtgacctctccccctaaaggcagttagtcctgtgggaaagacaagatgcaaacacacaggaaacaatttgagaacaattaagggttgagctgggtgctcctgttgtaaagggcactaagagtttagagaagaggaaggcttcctcgaggaggtggacttgagctgagccaggcgggatgagcagggtgttgggaggtgagggagagcattcctggccagaggagcctctggaaggtagtgggcggggtggggaaggagcccaactgtgggggcagcgagaagactggtttgacagctgctgggaagccaggctgggtagctgtggccagccctcggagggtcctgaaaggcaggcagaggagtctggacttgactccaccataggtaattggaaaggctctcaagctggggagtaatacaatgaaaggattgttttaggaagacagcggtatgcaggatagctcggtgggaaaagtccagaggcagagagcccagctgggaggctattggaatagtgtgagtgttgaaggcctggacaaggtcggggcagtgggaaccaggggaggcatgaatctgagagaggtctggatgtgatgagagatgagagagaaaaactaggagtagaatcctaggtgtctagcctttatggtcaccaggagttctcatgggagctggaggattagggcagcaacacagaggaatatggggctgggctcagcagggagcctgctggagctgtgcccatcgcagggagaggctggcttgacgttaccctctcacgcccacctcttctccctccagttgctcctggaatgaaggtttatattgacccttttacctacgaggaccctaatgaggctgttcgggagtttgccaaggagatcgacgtgtcctgcgtcaagatcgaggaggtgatcggagctggtgagtctcccggggcacagtagagatgagaagctgaggcgggctgggtacaggagtgagtcatagcttgtgccctgtgccctgcaggggaatttggggaagtgtgccgtggtcgactgaaacagcctggccgccgagaggtgtttgtggccatcaagacgctgaaggtgggctacaccgagaggcagcggcgggacttcctaagcgaggcctccatcatgggtcagtttgatcaccccaatataatccggctcgagggcgtggtcaccaaaagtcggccagttatgatcctcactgagttcatggaaaactgcgccctggactccttcctccgggtaagagccagcccccaggccctctccctcccccagagagttggattgggctcaccatcccctcccacaagtcagacagcccctattcaagtccataagcatttactgaggtggcttggtgcagggaaatggcagggccttcatagccataagtatgggagttcacatcttgactgttccttactgcctgtgtgacctcaggcaagtgacttaacctctttgagtctcagctgcctggttgtagaatggcagtggtaagagctagtgggtcctcatggggattaactgggatgttgtctataagatacttgacacatagtagggcagctcacttaccctcagggcactctggacatggttgcaggagagacgaggtagagtctgagtactcggagagggaaggcaggtgggcaggccatgggctgatgggagcaatgggctcacctgagcctgcttgttgcctgcagctcaacgatgggcagttcacggtcatccagctggtgggcatgttgcggggcattgctgccggcatgaagtacctgtccgagatgaactatgtgcaccgcgacctggctgctcgcaacatccttgtcaacagcaacctggtctgcaaagtctcagactttggcctctcccgcttcctggaggatgacccctccgatcctacctacaccagttccctggtacaggaagccgctgggagggagactgggggcggggcctatcagccaggggctcgggcctggggggcagcccggagtcacagggtgaagggcctgtgcccccctcaccagggcgggaagatccccatccgctggactgccccagaggccatagcctatcggaagttcacttctgctagtgatgtctggagctacggaattgtcatgtggga

SEQ ID NO: 109805 - DNA, 1054 bp, Homo sapiens
tattgaagatggattaggagagggggtgatgacccctccccaagcccctcagggcccagaccttcctgctctccagcaggggatccccacaacctcacacttgtctgttcttcagtgctggaggtcctggcagggtcaggctggggtaagccggggttccacagggcccagccctggcaggggtctggccccccaggtaggcggagagcagtccctccctcaggaactggaggaggggactccaggaatggggaaatgtgacaccaccatcctgaagccagcttgcacctccagtttgcacagggatttgttctgggggctgagggccctgtccccacccccgcccttggtgctgtcataaaagggcaggcaggggcaggctgaggagttgccctttgccccccagagactgactctcagagccagagatgggatgtgtgagtgtgtgtgtgtgtgtgtgtgtgtgcgcgcgcgcgcgcgtgtgtgtgtgcacgcactggcctgcacagagagcatgggtgagcgtgtaaaagcttggccctgtgccctacaatggggccagctgggccgacagcagaataaaggcaataagatgattctcttgccccttcttattcctcctcccaaagcaagattccctgattcagagttcacagtccctggctgccaacccttcgcaactccctggaggcattgggaaaccagatctgggcccatccaggctcagtttcccctttgtgcttggccctcactgctttgaacacctaacgcacttcttggaagtgggtcagtggcaacggagagctaactaccccagagctccttccttctaaggcagagaccttcctggggtgggggcaggctcttgtgtctggatggtgttttactgagtcggttcccagcctttgtctttaagggagctgagggtagagggggttgatcagttcccagggtcacatgaccaaggacaaagggaaggagagccactggtgttcagaggctgaggcccggaagttcggctgctcctcactgaggcttcctatgcccaggcgct

SEQ ID NO: 109806 - DNA, 1085 bp, Homo sapiens
acaaaatgggggtgctttacaggaggatagggtgggaggaggtaggatcggtgagaggttccatggccgtgggttatcaggaatagctagctggggagccttctttaaataagcaggccccctccacttcttagattcttgttagaatgaataggaaggcttctggcctctgcaccatccaccctctaccatactctactttcccctactgaaaaaccccaaaacccaagcaaaacaagcatggatgttagcttgtggtgctaaaccttactccaaatgtctgcatttgggagacaattacatgttaattgtctgtgtatgtctatgtctgcctgtgtgggtttgaggtatatctaatataaatgtggatggagaatctgcatatgtttgtgtaagacgtgggtttgctcatggttaaatttaagcacagaataggtattgaatcctctggcaatagctggcctgttccatagaatatgcaataaagataaatggaaaaaaaattcgttgaactactgggctttatatggtcaaagaggcatttgtgagaaaattctttccagagctctaacagagtaatatgttgattttttctttatatttaatatatttgcttcgtatctggaccattgtcagcagatggatgttttctgtcttccagaatattgggacatgttggtgattcttagctgtatctcactattccattgacatttcaaccagtgtgacacaaaatgtcagttatgtatgtgaatgagaagtaagatcttttgaatttaatgaagtatgtttaactttggatctattgatagctttcatagagtttagatcgtatgttctcttgatccacagctgtaggtgtcatcggtacatagtggtaagatcaaactgttgtattcttaactgaatcttgaatgaatatttgacttatcttcacgctgtatgacattattaaatgtgttctgtgttttagcaaggaaatatagctttgcgttggatttttcactgttatgaatttcttaggtttactgtaatagcaattatacttttttagtcaaagatatttctgttgcaagtgacagaaa

SEQ ID NO: 109807 - DNA, 1022 bp, Homo sapiens
tgaggtcaggagtccaagaccagcctggccttatgatgaaaccccatctctactaaaaatacaaaaaagattagctgcttgtggtggcacgtgcctgtactcctagctccttgggggactgaggcagaattgcttgaacccgggaggtggaggttgcagtgagctgagatcacaccattgcactccagcctgggcatcacagcaagactctgtctcaaaaaaaaaaaaaaagtgttctggaaagggctgtcaggatagtgcagttagtgcatatatgtccttgatggtaactgaacgtgtagataggaaaggaaaccactctgtagtcttgacttgattattactgtggatttttgagttgatcattttggtggtaagtttgtcttttaattgatggtggttttaatcaactaaaacccctcacaattataagcagaaaggcatcattttgtgagcactattttttttctttatttagattgatgacaaggagtttgatattcctcaagttgatactcctccaacactggaaagcatactaaatgaggtaagtgaatattaatgattactgtcattttgtgtgtggcattcatcttaatactttttggattagttatcatacatgcacctagatgcgcactttccagtagggtagccactagtcgtgtgtgtcagtttaaaatttaaattaattataatcaaataaaaatttaattccttggctgcacaaggcacatttcaagtgctcaatagccacgtgtggctagtggctactatatggctaggggacagcatagataaagagtatttccgtcatcacagaaagttctcttggacagcagtagtctagattgtgagcttctcaagggcataaaccatctcttgttcatctttagggtctctgtgcccagaacaatgcctaatacttggcagactttaaaatatattttattaagtgaattgagatgcaaaatttatgtcacttttgaggtttgtattatgtgttgctaatggttaagttg

SEQ ID NO: 109808 - DNA, 1057 bp, Homo sapiens
tagtattctattaaatggattcttcctaatttacttaatcatttcctactataagacatttaagttgtttgtaaacatatagtactgtgatgaacatcttcgttactacatttctgtgtccatgattacttttttaggacagatgttcctaaaggtggaattgcttggattaggagatgaacattaaggacttttgatatgtatcatctaatggccccctagaaaagttctgtcagcctgctctcctatcaggtgttcagaatggtggtcttcctgtggggcataattaatgttagataaatagaattttgggaaagaaacttacgaggtcatttagttcagtccccttattttacatctgaggctgctgaggatcagagaggttaagtgagatgcacagagccaagttcagccaagttcattgaggaatgctgaatcctgtataagtgtatttccactattctaagcaattctgctatcctgagagaaaaggaggcaaattctaagataggaagaaaagaataaaagaactaaggtgaatgagaatagatgataatacatatatttgtcagcagattgcatgttgatttttggttcccatttaccagtactcacttctcctcacctctatctgctttaacatccctttcttgtcaatgttataagaatatgtggaatggcgtgaacccgggaggcggagcttgcagtgagccgagatcgcgccactgcactccagcctgggtgacagagcgagactccgtctcaaaaaaaaaaaaaaaaaaaaaaagaatatgtgactgcttatcatcaaactcaagtatagcttactgcaaacaatttaaaatgaatactttacaaataaaaactagcagaggaaaagagaacattgtcttttgatactgtctttttaatttccttgggcctggttcctggttttttttttttttagaccccagtagctttcttgtagatatgaggaaataatctttcattacagtctcatggaaaagaaagtatgtctaagtgaacattttgagaaagaatcataatattctgg

SEQ ID NO: 109809 - DNA, 1085 bp, Homo sapiens
aagtattttttagagtctttattctttaaaactgggcaggtgtaaatgtaaccaaaggatctcatttacttagtaatagcaagttacaaaaagttattgtaagaacccaaatagagaactttagggtttttaatcaatcatagtttgtatttttcttttatcgtgatgaaaggtggttttgctttttgaaagcctctgtttttttaaagatattggaccattattactctaaataaaggtaagtttgtaagtttagagtgatgagcactgaatctagtttaggttatttcaaaagctattaaatgtgtatattgtagtttttcaaaattgtataattttttcctccttaatacttgactgtttaaaaatgtacaagaaaataaattccttctctgtttagtttacagatgatccaactcttgcaatttgcaacgacagcggaggctctgtttttgaattgacatttaagtaagagactagtggacatttgttgacaaatgaaaagactagctctgttttaatgatttgaaattgaacatgaagaggactagaaagcccctgtaattgagagtagattatgactgtgtattacaattacctgggaaggcttatattaatagaacaaacagagttctgggcctggtcctcccgagttttatctcagtaggtctgagttgagattctagactcctactccccagaagattcttatatgctgtcaagcttgggaccactcttctggaatagctcactaattttggtttaggctcaaggcccagttgattttaatcataatgggcaggtgtaaacaggtttttaattatcttagaattgccatgtttgctctttaagagcaaagactgtctagatacatcaaagaacatttaggaagcagagttttttgaaaagtagaacataatattcattgaatattatgtctccataagttcttcaaggttaacaactatctttgtttcttgtgtttctcatagcttctaacaatgctaagtacaaagtaatttctgaaaaaaacatacttcttattcagttaatgtttattgagcatctcctatgtgtaggtattt

SEQ ID NO: 109810 - DNA, 1030 bp, Homo sapiens
ggaataggaattctgactggtgactggtcagacaaaggggcctggtttctctcatttttccgttttagagagtggatcatctcctgaaacaagattgtcttacagaagcgttggctcttgcgtggtctttccatgaaggaaaagcaaaagcagtagtgggtgagtaggcagaattccagtgtagtagacgtggttctcctggagtagagggaatggttagtactaaccactcataggacacttttagctgagtgtcgaagtgtttataaacaggatgctaattaaaccttatagactttcagttaagaaggttaatgtgacaaataatgtgacaaatagagggtatagaaattaaaatgtcgcttttaaaattattttgtaaggaaattactattggaatgaaagagaagtacattgatatgctatccggtccagtagatttgaggtgttcctattatggtgtattatccaacattttgatagctaagaattgttacaattatacctgttgtttcacatcttataaatatgaaaccagacatagtttcactcctaaagatgtggactaacttttgtttttttgttggattttccttctctgcaggattatcaggggatgccagtaagcgaaaggctattgttgcagaccgggtgagtattttaagagggtctttactagaatacagtgcagatttgcttttgtcatttgccagtatctttgggcatgagtagataaatggctacaatctagaagagagtgtattaaaaaacacacacacacacagacacacacttggggtcaggggttcaagactagcatgggcaacatagcaagaccccgtctctaaaaaaaaatagaaagattagccaggtatggtggtgtgcacctgtagtcctagctacttgggaggcgaggccagaggatcacttgagcctaggagtttgaggctacagtgagctatgattgcggcactgcactccagcctgggcaacagagtgagacctgtatctaaaaaaacagtcaggttat

SEQ ID NO: 109811 - DNA, 1056 bp, Homo sapiens
taggtcttcagtgggaaagcatggaaagttcttttgggctttttgatgctaatggcagctgaatttgcatttcctggtgctaaggatcagttttttcccaaataggaatctccctctgaagggggagctaaatatttgggagactctgcttaagtttagatgatatttctttctgtggctgctgattggatgttttcagtttaaaatcatctctattaccactttagtgggaaatcctttcacttgcttactagtttttaaaagaataaagcgtttaagaaccaaaggatactttatatcaaaattataatctcagataagccctttatataactggtatttattaaatgatttttttcggtgaggaatatgacaacagtgattgtttctcagtgagccttctaaacatttcatgtacagattaaaggttttcatatttaatcttaatggtaaatgactaattccattagcgaatggtgatgaatagcataagattcttattttttaaataatatcatttgagatgatgatgattgttttcctattaattttaatgcagaaacttttcagagtcattgctcctcctctgaatgcaggaaaaacactaacaggtatttattttctaagccttaattttttgctttcctgtatttaaggtattatttaaatgttacaaaattggccaattatatgtgtgcagtgtgaatgttggtaatcatgtacagtcatgtaacaccaccataatcaagctgcagaaggagccatagcttctcacactaaaaagtttcctccttcccctttgtacttgatcctttccccacagccctgctctgggcagtcactgatctactttctgtcactatacttcatgtaaatggaattatgtgctatgtaacctttggtgttttatttctttcactttacgtggatgaagcataatatttttgagagtcatccatgttgttttatgtatattaatattttgttcccttttaccactgaatgatagtccatggattgaatataccataagctgtttaatcattcaccacttca

SEQ ID NO: 109812 - DNA, 1104 bp, Homo sapiens
ttaattgtcatggaaattgtgaaagttatttttatgacagttaataaaatgtgtcttagttatttccaaataacagactgaatgatggctgaacatgtagtattttatccttctgttctcaaacctttgctcccaaattacctcttttcattagtgttatcgctctcttttttttgcttatggactttgccttccttcctttctcaaattcttatttgtgatttttttttaagtctcagaatactgtgcaatattaaatgccatagctttctacttgactcactaaaaataatgtcacgcaaggtgtataagacaaaacctaatgaggaatagttatcttatttgagaaattacttggattttattaacaagaatttaataacttgttttcttctacatgtgcaaataataattactttaaaaaatttatttctcccttttagacttttgaagattttaaaaatgacaagcaagctgtggaatatcaacagcgaattgtggatattttgttgaaagtaagtattcaaagaatacatgtctttatattgatatttatattaagatagttgagctgttttatagcaggttataaaataatcttgttaagtggtttcttggaatcatatcgtaaaattttattacggtgtctttgttctcaagagctgaattaagtactaattatttattttaaaaaatttttagtgtatgttggctttagactggggaccggaatagagggcactactgtgagaaaggcatatggtgataattgctatgttagtatgattacgtgtaataatagagactaacttcagagtgctttgagaaaacaattaatatggagaatcttcctgtgtctcatgccaacttcactttgttgctaaggcagtgccgtattctatcatggcactgagatgctggatgacacttaagaatgatttgaggcacacagaaatgatcatcccagtataaatctaattagattcaggagaaagctgtcttgagattgatgctgttgctaatgaagaatgcagggaaaggttctttgcttttccatctgcatgacttcaggcaggccagtttcctcttgtagttgaaagctta

SEQ ID NO: 109813 - DNA, 1021 bp, Homo sapiens
atccagaaaattagctggacatggtggtgggtgccttttgtcccagctgtacgggaggctgaggtgggatgatcacctgaacccaggaggttgaggccgcagtgagctgtgatcatgtcagtgcactccagcctgggtgacagagtgagaccctgtctcaaaaaaaaaaaaaaaaaaaggtctgtttgtggagtcttagacatttcttttaaagaaatgaagtatttactttattgcatagctttataaattgtgcaagaatcccacatagatcttacaaagtacctttacttttgatggcaagaaatatgcctctgaccaattgttttcagaattcttaaaatgaaaaattgccagaatgttatgttataactgagaagaaagtcatgtaaaataacacaaagtgatagtgaaaaaatagaaaatcagactgataaaaataaatatatttttaaatcatattttatattaatctttttcatctttaagagtcccccattttttacagataaagtgtgaatttgtcaaaaaataaaaaaacaaagaaaaactaaacaataacaatttttgcataggtttcccaagaatttagaaatattcatatttttgtagtatttgaaggtttatctcatttaaccctcactactacccaatgtggaaggcagagaagatattgctgtcctctttttttttttttttttccacataaggaaattgaattgctcagaggataagtaacttacagaaagtcacgtaagtgagtaaatggcaaaaacagaacccagattttatggcatgttgattgctaacatgttgcagtttgattggcatctcttctgtagttgttgatattcatgaacttttttggtggtggttgttaacttggacctcaaactcccaccctccctggatgaactatctcacagcaacccattgccacaggaggaccaggttaaggcaaggtgaaactgatcagtgcatccagagctcagcatccacagagcagttccaagcacctgcc

SEQ ID NO: 109814 - DNA, 1151 bp, Homo sapiens
gtatatatcttcttgtgtgcccatatgagggttctctgaataatatacttgcaaatggaattgtttagacaaccaagtagtgtagttctactgattgccaagttgatttccagattgtttctattctcatcagcagtgtctgatatttgctgtttttcacatccttgctgatacctagtatttttagtcttcttaatttttgccatggtgggtattagtgattactcatgacattaaacatctttccatatgtttgatgaccattggaattttcttttctctgaattatttattcatgtcatttgcccattttttctgttgagtttctgtgtttctcttattgagttcaagaagttttttctgatttcccagtctctaatcctttgctaattttatgtgttggaggtactttcttccaatttattatggcacatcatttaacttggcttttagtgacttctgttttagtttaccattctttaaggcttaagtgtgtgtgtgtgtgtgtgtgtgtgtgtgtgtgtgtgtgtgtcttatttcctttcctattttaatggaataaaggacattctcttttatatataaattttatagttcagcttcttacatttaggcttttaatccatctggagttaatttttgcaagctgatcaaaagaaggatttttatcttccacatgatggccagtggtccatgtggcattttattatccattcctcactgatttttaatgccatactgccatatactaaactcccaaatatacatgactctgtgggttccattctcttcctttggttgtctttccctatatccataccacatattttaattaatacagcttttcaatagatttattatttggaaaaagaatcctccctccttattctttttctttaaaatgctttggctatttttagtgtcctacatctcctagtattccacatgaatttggagatcacattctcaagtttctttaaaagatacaaactctctggaattttgatttatgaatacattgaatttatagactaattcagagagaactgacatctctgtagtgttgattcttctctttcaggaaaatgtatgccttttaaactgccttttctgctctttggtgaggttttatagcttttatataaggttcc

SEQ ID NO: 109815 - DNA, 1769 bp, Homo sapiens
aaccattgtggctttgtgatgttaattttcggtggagttaaatatacagaaaattatgcactgtttgttggttatctttttttttttttgacaggctttcgctctgttgcccaggatggagtgcagtggcacaatcttggctcactgcaacctccatcttccaggcttaagcagtccttctgcctcaccctcccaagtagctgggactacaggcgtatgccatcacattggctaatttctgtattttttgtagagatggggtttcacctgtcacccaggctggtctcgaactcttggctgaagtgatctgcacacctcagcctccaaaggtggtgagattgtagacataagccaccacgctaggctggttatctttttgtttatacttttgctataacaaaagtatggtttagttatgtttaaatgaggtatataactaacatcctaaaaattaatgtgccaaacaacagcaaatcagagcttctaattagtaggacattgaacatagccaatgtttccaaaccgaatttatacagttttaacccaaagcagtaaaagttgacaatttagtatcttgagtggttttgtcctcagcaaatacaaaattttcatcatattccttgatatttcaaaaaaaattattttaataaattgtggtggccaggcatggtggctcacacctgtaatcccagcactttaggaggccgaggcaggtggatcacctgaggtcaggagttcgagatcagcctggccaacatagtgaaccccgtctctactaaaaatacaaaaattagtcgggtgtggtggcacacacctgtagtcccagctacttgggaggctgaggcaggacaattgcttgaacctgggaggcggaggttgcaatgagcggagattgcaccactgcggtccagcctgggtgtcgcaacagagcaaaactccatctcaaaaaaaaaaaaaaaattaaattatgggtaaaatataccctaacataaaatttaccattttaactatttttgagtatacagttcagtagcattaagtatattcacgtaattatataatcattacccccatccacctccaaattttttaatctcccaaactgaaaatctgtacctataaagcaacagctcccctattcccctctcctcccagcccctggcaaataccgtcttactttcttttttcaccattctttttctgaatttgattactcaagtatctcatatgaatgaaattatatagtgtttgtcgttttgtgacttgcttatttaacttaccataaggttcataaatgttgtagcatgtgtcagaattttcttcctttttaaggctgaataaatgccattgtatgtatagaccacatttcatttattcattcatccttcaatggacacttgggccacttccactttttgtctattatgactaatgcctctatgagcatgaatgtacagtgtctcttcaagagctggctctcaattcttttgggtatataaccacaagtgggattgctggatcaagcattaattctgttaattttttgaggaatggccatactgttttccctagttgctgcttcattttacattcccaccaacagtacacaagggttccaatttctccacatcctttccgacatttatattctcttttttttaatagtagctatccatatgtgtgtgaggtagtatctaattatggatttgatttgcatttctctaatgattagtgatgattttcctgagtattttggctatttatctacc

SEQ ID NO: 109816 - DNA, 1074 bp, Homo sapiens
actgaatcccaggacctgagtttcttcacctgtaaaataacaataagaaaagtacctacctcgtagggtttttgagatcattaaatgagatgatccatgctaagtacctgtaacagtgactggcacatggttattacacgatcgataaagtgagccgctgcagcaggggagggagggttgtcgcatctgagaaaacgtaaaccagtgtttttcccctgtgctgtgaacggtcaccatgttgtttctttttaattgtggtatcgaagggcttgggtttttaaggttatttttcactgagcctttcagtctgtctctgtggcctcaagcactcgcctcccttagaactgctcattctagggtcatgactactactctaaatgaatctcctgcagagactttctgccacattttcccctcctctctctaggcagcttagcaacttgtctgcctgttgtagtatttcattacctaattcattattagctgggacctactgagagttttgaggcattggagaatgagggtctatgaagagtcaggttcaatctgagagcaaactgtgttgtggatgggaatttagaaaaggtatttcctggttgcagaggggaaggaggtgtgtggcttttcctttatctctgaagccaaactttgatttaggcaaaacttttaactattaaggacctccagtgtgaaacagcttaggtggtggcaaaagactggctgaggctataagagatacaaggaaagatttgaaagtgaggtggagggcaggcagggagaaaaggtggaaatatgcttctcagtccactcgtcctactccatctccaccttcattgccaccagtgtcaatacaaagtggcccgtgtctctcgcaaactaggtttgatcttctcatgtgttagtgtagaaagataattaggaaaggaagtgttagggttttgatttcaggatcttagtaattgtagagagtaagaaacgaacaagccgagctcaggcttctgtgactgtccgtgtcttcaagtatgatttggaaggcttcgtgtccagtatccctaggagtagtaccatccctgt

SEQ ID NO: 109817 - DNA, 1093 bp, Homo sapiens
ggggcagaatgaagggccaggccacaaaaaatattggctataataaatactaagttcatttgcttttggtttgtgatatgctattcagtgaaaaatgaaccttccagaaatttctaaattagaatatttagcattactttcaaaataatgaatgcccttgggaataaaataaacataattataattcaaaatataaagtcaaagaactgaactgtgcatgcaatttacctcaggccactcattttttttcagtagatttacctttctaattatattttgcttgcacaaatatttaaattactttgcattccctgagagcagtatacttcttgtgtcaaggaggacacacatttaacaaccataaaactatctgcaaaagcaaaaagctcattttccccccaaaggagctttttaagaatcaaagcgtacaactgatcaaatagttgagcaaggtacacacagtagcttagcagggcttatacatttattttattttctatatttgtttgggtttattttttctttttcattccctttgtgctctacaaccaagagaaagaaacatcttcaaggaattatatctgctatgtaattatacagtgctgcaaattgcaatgttagctgaagttaagggcagagaatgacagggtaactaatagagcatgatctaaacctcattaagtaatgggtatcttcctgaggaaagaatacagggttgtctcaaggctgagtctaagaattgactcctatcttgttataagagtttgagaatgtaataactctttgtttcttttttcaaccaaagagccaggatgagaatataaatctttgttagtgtttcattgaggcattgtgaaaaggcatattattgccaaacagcaaagaaggaaaacatcataaatattatgaatcaaaactttaatagtggaagttacttatttgtggtttgattggcctttgaaaaacaactgacagtattgattcatgtacctccaccctcaaaaaattttatttttcattttctggtcacagttggtttttgtgttagtcatgttgtatgatcacttccattattgagaaagtgatttcagct

SEQ ID NO: 109818 - DNA, 1064 bp, Homo sapiens
agaaatcattaggcgagtttgttgttatgtgaccatcatggtttacttacacaaacctagatggtatagcctattacacacctaggctatatggtatggcctcttgttcctaggctacaaacctgtgcagcatgttactgtactgaatactgtaggcatttgtaacacaatggaaagtatttatgtatctaaacacatctaacatagaaaaggtacagtaaatatatgatatcgtaatcatatgggaccaccatcatatatgtgttgttgacagaaatgttattatatggcatatgactgtacttggaatcccattgactctgttagaatagtagtggtactcttccaattttgtgaaatccaagccagaagaaatcattacagctagagaaatttttagtctatctgggagtagctcacattctccctgcttagttgacctcaaaatccttttataataatatccaggtttccatgtcccattttgtgtttgcttggttcccttaacctgggtaggctgattcactctctccttaccaaagtgattttatacacaggatacttatgtacagaaaccatttatgtacctcttaccctactccttactccagaaggagatctgaaagcctgttttcagagatacttccagaaaactgcccaaatactgcttttcaaagagagacctaccaaaaaaaaatcactgaactttctatccaatcaagaaaactcatttgtagttctctgaagcaataataagaaccaggaatggagggtttgtctccgatggcatccaccaacactgtaagtgcagtgaagactgtgggactgttgccaccaagatggatttgatggttgcttttcagaaggcaagatggtactggcaagaaagcaagcgatgtgtcactgtcttcttccttctgaccctggggtaggggatgctgatgtcccctacctcttacctcagaatatgcagatcaaattgcatatttacaactggtgaagaactgtcaaggcaaatttaggaacggtgcaaaccctcatcaaacttctatatctcctattgc

SEQ ID NO: 109819 - DNA, 1040 bp, Homo sapiens
cattttttagatgtaaaaatctaagatgttcttaaaataggctgaaaactccaaaaagttgacatgtaaatatattattgcactatttaaattttaagtttacatacccttaaaccttgtgttcccgatttctggaaagtgcccagaatcatgcccatttgtgtatactgttaccgtggtgccacccttagaatacataaaattatggtacaaagtcatgttttgagatcctgtagatttatgttaatattattgtcttacttaaaaatgcagtctaattttgctacctcagtctcctgttcagtgtcaatctgctgttcaatgtgatgtccactaaattttggacatctaaatgtctgtgtagtataacttttattcataatgagttggtatctcagtggtaccttaggtctgtacattgacattcttgaggtttttagttttgcagaacactgaaatctatggactctaaaatggacttcatttaaagaaacccacggaccattaatggacaaaaacatgagtcaatatgtattgtggcattcaaatcctagcactctgggagaggtaagtagttgactgtgttttatgtttggtgagatggtagaccaatcttaaatttgcctaggaaattataggattgtaattgaaaagtacagttcttaatctctttatgttttaatcaggaccttccaaagagaggtttgttttgtatatatgaagcaattgttcttattttcctgtaaagttgataagaaatttaagattggcaagctatatttatattgttcctggaaggctactgctctgctttctttttttaggggggagcttcctttcaacactttacatccgggtagaaataatttaatctgtggatcccgtgtagaaatgaggcctcaaatagtcatttaaattatcttgcatccaagtttcgctgtgtaatagtatatgtatcaaatctactgattagttttatcttgtgcctcaggtttaagcaagaaaagaggccaaaaaatgtcttcgtttctttattctgc

SEQ ID NO: 109820 - DNA, 1017 bp, Homo sapiens
ttttgaaccataatacttccacatcagtttatttccctaccccacaaagtgaacatcattttatgctatctcttccaacaagcattttggctatgctttcagagatcaaaagctctttaagacaatttgatatcatggatagagatcaaagacatacaataaattatcatcaaatcagtgtatctgactacagccccagggagattctgtaagaactttaaattctgttgcaattttcagtgaagggtattaatcaaagagataagccaatgaacatattcagccattttgtctactgtaccttttcaaaaaaatttttttccttttctttgtttttgattttctccttttgttctttcagcatggtatctagtaatctgattaattactgacccaaaagtagtttttaatttcccttaaaaaaattattagacttgtagtagaatttttttgtgttttgttttgttttcaagcatcaagtaccacgtttttgaagaccatggcctatcatcattatgcattcaagatttgagtttgaataacctcatcaagacttagatcttcttcagaagcttcaagtctcatctgcattaaagctctccattgaaccctctcacaaaagtacaagcttaaaggggctaaaatccattaatacattccattttatatcccttcctctgacttctcttcaatttccttggcctctagggtccttcatattgcttacgttcctttagactagagccaaggagacagtgctttccaaaaaaaaaaaaaaaaaaaatgtgttctgtggccataagttttcattgatagagaagcataaatttggtgaatttagaattaggtcttttatcatatcctataaaaagttgagttaacaggctgggcacggtggctcatgcctgtaatcccagcactttgggaggccaaggcagctggatgccccaaggtcaggcatttgagaccagcctggccaacatggcgaaaccccatctctactaaaaatacaaaaat

SEQ ID NO: 109821 - DNA, 1027 bp, Homo sapiens
cttcattctttttactttttgttgaattatcaagcaggagctggataattcttaatgggtttgctgattttgtcttctgtttgatcaagtttgctgttgaatctgcttagtgtaatttttaattcagttttatattcttcagctctataatttccatttggtgcaccaccccctcccccgccaccccgagatgcagtcttactctgtcgcccagagctgtagtgcaatggtgtgatctcggctccctgcaacctccgcctcccaggttaaagcaattctcctgcctctgctgcccaagtagctgggattacaggcgcatgccaccacacccagctaatttttgtatttttagtagagatggggtttcaccatgttggccaggctggtcttgaactcctgaccttgtgatctgcccgcctcggcctcccaaagtgctgggattacaggcatgagccaccacacccagcctttaaaatagtttttatctctttgttggtattttcattttgttcatgtatcattttcctgacttcctttatttgtctatctgtcctcttgtagtgcattgagtttctttaagacaactattttgagttctttgtctggtgattcatagactttcatttctttggggtctttttttttttttttttttttttgagacttactttgttcccttggtcgggcccttatttctttgtattcttgattattttttgctgggatttgcacatttttaaaaaacagccacgctcccagtcttctggactggcttcatacagggaggaagagatgttaagactctctttagcccagctatagagtcttagggcctctcaaacctttaatggggttgtatctcctctgaactgtgcctgtaatttcccaattacagaagtttgctggtttcttttttaggcacttgctccctctggtgtctttccatggtactgctggttttctggtgttcctacaagctgcctaggtctcttttgttctcagcagttcccaggcatgcaaaagttgc

SEQ ID NO: 109822 - DNA, 1644 bp, Homo sapiens
tgaaaagacaagaacatgcttttcctgtggcagcagccgggctgagaggagcgtggctgtctcctctctccgccatggcgtgtgctcgcccaatgatatcggtgtactccgaaaagggggagtcatctggcaaaaatgtcacttagcctgctgtattcaaggctcctattcgaccagatattgtgaactttgttcacaccaacttgcgcaaaaacaacagacagccctacgctgccagtgaattagcaggtcatcagaccagtgctgagtcttggggtactggcagagctatggctcgaattcccagagttcgaggtggtgggactcaccgctctggccagggtgcttttggaaacatgtgtcgtggaggccgaaggtttgcaccaaccaaaacctggcgccgttggcatcgtagagtgaacacaacccaaaaacgatatgccatctgttctgccctggctgcctcagccctaccagcactggtcatgtctaaaggtcatcgtattgaggaagttcctgaacttcctttggtatttgaagataaagttgaaggctacaagaagaccaaggaagctgttttgctccttaagaaacttaaagcctggaatgatatcgaaaaggtctatgcctctcagcgaatgagagctggcaaaggcaaaatgagaaaccgtcgccgtatccagcgcaggggcctgtgcatcatctataatgaggataatggtatcatcaaggccttcagaaacatccctggaattactctgcttaatgtaagcaagctgaacattttgaagcttgctcctggtgggcatgtgggacgtttctgcatttggactgaaagtgctttccggaagttagatgaattgtatggcacttggcgtaaagccgcttccctcaagagtaactacaatcttcccatgcacaagttgattaatacagatcttagcagaatcttgaaaagcccagagatccaaagagccctttgagcaccacgcaagaagattcatcgcagagtcctaaagaagaacccactgaaaaacttgagaatcatgttgaagctaaacccatatgcaaagaccatgcgccggaacaccattcttcgccaggccaggaatcacaagctccgggtggataaggcagctgctgcagcagcagcactaccagccaaatcagatgaaaaggcggcggttgcaggcaagaagcctgtggtaggtaagaaaggaaagaaggctgctgttggtgttaagaagcagaagaagcctctggtgggaaaaaaggcagcagctaccaagaaaccagcccctgaaaagaagcctgcagaaaagaaacctactacagaggaaaagaagcctgctgcataaactcttaaatttgattattccataaaggtcaaatcattttggacagcttcttttgaataaagacctgattatacaggcagtgaggaaaaaaagaaaagaaaagaaaagaaaagaacatatatcagtgttttgattatttccaagttctaaggtccagatgaattacatgtgaaggcatcaaaactcttgcatttaggattacaaaaacaacctttggtaaataattatcttcaggaactatgagcaagacagttgttcatggaaaagtagaagataaagaaatacc

SEQ ID NO: 109823 - DNA, 2149 bp, Homo sapiens
tcagcctcctgagtagctaggattacaggcacatgccaccacacccggctaatttttgtgtttttagtagagacggggtttcaccatgttggccaggctgatctcgaactcctgacctcaggtgatccacctcggcctcccaaagtgctgggattacaagcataagccaccattcctggccctattttaaaattgtcttatagtagcatgtattatttgtgtaaatatctcaagttcttttgttgaacaagacaggcatatatgggaagtgaggaaaggagggaaaataatagaaaagaaggaaagaagggaaagagttaatatgtataagggtcaagagtcaagcaaaaaaaaaccgtagtcactgttcctggtgacattctgaattattattttcttaattttgctgctgcttgtaacaggtgctttgtccttttcttcttccaggtttgatcccatataatttcatctgtgtgcagacagggtccatcctgtcaaccctaacctctctggatgctcttttctcctgggacactgtctttaagctgttggccattgccatggtggcattaattcctggaaccctcattaaaaaatttagtcagaaacatctgcaattgaatgaaacaagtactgctaatcatatacacagtagaaaagacacatgatctggattttctgtttgccacatccctggactcagttgcttatttgtgtaatggatgtggtcctctaaagcccctcattgtttttgattgccttctataggtgatgtggacactgtgcatcaatgtgcagtgtcttttcagaaaggacactctgctcttgaaggtgtattacatcaggttttcaaaccagccctggtgtagcagacactgcaacagatgcctcctagaaaatgctgtttgtggccgggcgcggtggctcacgcctgtaatcccagcactttgggaggccgaggccggtgattcacaaggtcaggagttcaagaccagcctggccaagatggtgaaatcctgtctctaataaaaatacaaaaattagccaggcgtggtggcaggcacctgtaatcccagctactcgggaggctgaggcaggagaattgcttgaaccaaggtggcagaggttgcagtaagccaagatcacaccactgcactccagcctgggtgatagagtgagacactgtcttgacaaaaaaaaaaaaaaaaagagaaaaaaagaaaatgctgtttgtattttgtggtctaataaggagttcgggatagcctgttgtatttgcctcatgccagcccctgagctgccttgggagaagatgctgattgtccttgtccagagtactgcttttgcagagtgacaggctgctgggacagatgtcctcctgttgcatctttgtggatgtttagtaccaatgatgacacgggaactcacatcactgacaccgctcttcatcttctgttagtctcttgaagagcatttttttgtacttctttgctgatgacctacctcttcataagccaagtgaaacaagttgacgaactgcctaggacttccacgtgttgctcacatacatgatgatttctgtcacgctcttgtgttcagacacactgacattaccatgtatgtcagacctccttatgatcgcatgtcctgacagttaagctgattgcaaacagactattaaatatgaatggagcaaacgctgtatgtcatggatatgttctggagaaattcttacccatctggatggggcagggcccttgactcacctgaatcatgaccaggcaaacattttatctgtcctttctgcaggaatccgttctgtgtcatgctaggagaatgggttcagtatatggggccatcaggcagtataccctctgaatgtttttcattgttgtatttgcttagagtaactaaacaattgtatcttttaatttatcttttaattcaaagaggaaaccttggcttctgataactttgttgtgttgtatcttaatggcctatagctgtcattacttcctgtagctgcagtacagaattgttacagacctggattaatgcttccaaagacagaaggaccttggcacctaaactgaccagccctgtgatcctgcaccccacaggagtaactcatcaggacttaccagactgc

SEQ ID NO: 109824 - DNA, 1063 bp, Homo sapiens
caattatatgacctgcagcgagctacttagtctgaacgggctactcgtccagataaggggctgggactagagcagtgtttcttgaagtatgggccttggaccacctttatcagagtggtaaagtgctaacatcctataaaatcagtgtttgctactttctccatactggaagaaaaccaccctccttaagcctaaggcaaggatctcttctcttaaacctcccttagatcctagagggaaagacgattcagggcttctaggtcaaacagagcaaatctgtggttgagcagctgctattcataggagatacctgagagaaatggagatcttaaatagaagcaagatctaccacggccaattttggtcatattggctttcagacaaagtgcctcaggccctcagctagtgggggtttgctgcttctaattacctaggtggcatgaggcttggcaagattctggagaccaggcttcctgtcctctgtctcacaagctgtgtgaccctgaggggtctgggatcttcatctcctgtatacttcctctcctatagaagagaaatggactatcagagtgttccaaaccaatcggaatctcagggtgggagtggagaaggggcttttaaaatacaggttcctgggcactaccccagaaccaagtacccagaatttctggggtggagcccaaggatgtggttttttaacaatgtcaccagctgattgttctgcagccagcctgttcagccagccagacttttggaatccagtggatttgatgacatctttgagacagtacagaatgtgaatagtacttcttttaaaaaactgtttgtcaacaatggcacttctctctttactttggctgttgggtactcagaaccaaatttggggcccacttttggcaaacaggtgaaccttatgcatttttttactaactgtactccctgatgtcttgtattcttctgcacgcattttgcttttcctatttaaaattttatttatttatttatttatttttgagacagagtctagctctatcgcctgggctgaagtgcagtggtaagatct

SEQ ID NO: 109825 - DNA, 1174 bp, Homo sapiens
gttggtggtgtcctactttcctgataaagtggccctgctgcagagaaaggtaaggggaggggtcacatctgagagctgggaccccagacagtcgctacgtgcatggccttgagagaagcgagtggcagggatttcccacagtactcttccacgctgtttcaggaggtcctaggggttcttttgatgtcttcaggagacatagacctgggatcaaatcccagctccatcattaccagctctgtgactttgggcaagttcttgacttctctgatcctcagcatgtctattttaaaatgaggaaaacagtctttccctggagggttgttggaagaattgggaacagattatgtaaagtgtctagaacagtgcctggcaccagcaggttttcaacacctggagaccctttctgcttcttaacagctttcttctctttggctacaggtggaggagaacagaaacagcttgttttttttcttattgtttttgagacttttccccatgacaccaaactggttcttgaacctctcggccccaattctgaacattcccatcgtgcagttcttcttctcagttcttatcggtaagatgctagtggggtaggtttgagtcttcagagctgtcacgctgggggtctgccctgggttattggccacgtgagcatgtgcctgcttctgagaacacaggctcacaaagtgtgacttcaagccttatgatctaaagaaatgattcctgatttcagatctgctcaggcttcaacatgaaaacccataaaaatacttttggactaaataaagattgtccattgcatggctgtatgcactaggcactgggattagaagagatggtctgtgtaaagtatacaaattggcccatagtaagtactcagtaaatgctagcaggaagagcagggttggaatgagggtgtgtgtccatgagttttgagtggggacagaagaaaggagcagagcaagggacttcctgtctggtttttggcccctgttttgattaagttctgccttaggaattgctggcatcagtgtggttccttcctgccttttgacaattgcacaacctgcagcaagctacttaccctcaatggaccacctggctaggaatagagcagtgtttctcaaagtgtgggctttgggccaccttcatcagattgttagggtca

SEQ ID NO: 109826 - DNA, 1535 bp, Homo sapiens
tcaccgtgcctggccaccgtaagtgttttctatattaaaaacaattgctaaataattttgtatcttaaggatataatattatttactagaccattgcatttttataaattcatttacaaggatattttgtcttattttcccaggcctcagctgtgtcggtatgatcttgtcctgatggaaaacgttgaaacagtcttccaacctattctttgcccagagttgcagttgtaactgttgccaggacacatggccataaataatagaaagaaagctacaaccacaggctgtttgaaagcttcacctcacctttctgcaaggcagaaaaagtatgaaaaaaaccaaggcttttttcagtagcgtcctatggatgtcacattgtacatcaaacaaccttgtgattataaaacgatcctgggaaggagcccctaactagggcaagtcagaaatagccaggctcgcagcagcgcagcgctgtgtctgctgtgtcctggggcctcccttgttccgacctgtcaattctgctgcctgtcacgcgggtggttctgcccatcgcggctgcgggtcaagcatcttcaagggaaggacggactggaggcctcaccgtggactcaactctgcattctccgtgccacattcctccagttcccacacgtagaagggaacgaaactgacgtctacctcatggggctgctgtgtgggtttgggaggcaaaaatctatgaagggttttttgaaatcccataggtgccacatctatgagatgtttgataaatgtgaatatgcttttacatttgggcttatctaatttgcaataagagagcctctctctatcaacaccagcttctctctcgggctgtttgctcagggaaggcaagaaagccacgtgctggccctctgccttctctaaagtgctgttggagcatggaggagctggaggagatggggatggactgacagctaagagggcggctgctgggactagatagtggatgaagaaagaaggacgaggaagccgtggggcagcctcttcacatggggacaggggatggagcatgaggcaagggaaggaaaagcagagcttatttttcacctaaggtggagaaggatcactttacaggcaacgctcattttaagcaacccttaagaaatgtttatgtttctttattaccaatgtaatctatgattattgaaggaaatttagaaaatgcgtagatacaaaattaaaaaaaaatactgtccacgatcctattagaggtaattaatgttagccttttggaacaaggctgtcacctattttgccaacacgtgaattcaaaacatgaaccggtttgcttttggagaatctgaagactccagtttgaggaatcctttgcttccctggaggtagatgctgtctgcaaatctagaatgacagcaggagtccagtcaagaggtcctgtcaggccaaggccagaaagaagggaggacaatccctggggccagatgcccagtgtgaggggaggcatgatctgtcccatggctgtggccactgcagga

SEQ ID NO: 109827 - DNA, 1034 bp, Homo sapiens
tctgcctgcctcggcctcccaaagtgctgggattacaggtgtgagccactgcgcccaggctgctcttttctctttaatgtgccctttggtgcttttttcctggggaccgcccgtttatccccaccccttgaacctcatacacgtgtacgttccctactgttgagctctgcatgacacatgcccctgatggagtctggatgccattctcaggggcacagccagggtaaccgtctccactgtgggaacaagctgcagagccatggaaaggagtcctggccaagtgggacgggagtgtgagcgctcacccacctgagggtgccctgcagcctgggagccaccctcatccagaaggatcaaaggcccggctgcaggtgactcatggtgtggggctgccaagtgactctgttttccttccaggcctcgaccctgcaggccctttattcaacgggaaacctcaccaagacagattagatcccagtgatgcgcagtttgttgatgtcatccattccgacactgatggtaacgctcctttccttgtgggtcagtgacaccgccaggctcctaaagagtgtcccctggggagagataatcatgtaggagcagatcaggttcctctagattctaacttttttttccaggcagggttccaaatccaccgaaatattgaagggaagctggtttaatgtaggcacccaggaccttgtgctagagcgtggatgattatcccacggtctcttcatatttttatttttttaattttttttgagacagagtctcgctctgtcgcccaggctggagtgcagtggcgcaatctcgactcactgcaagctctgcctcccaggttctcgccatcctcccgcctcagcctcccgagtatctgggattataggcacacgccgccacgcctggctaattttttgtatttttagtagagacggggtttcaccgtgttagccaggatggtctctatctcctgaccttgtgatccgcccgcctcggcctcccaaagtgctgggattacaggcgtgagccac

SEQ ID NO: 109828 - DNA, 1584 bp, Homo sapiens
gtttcaccatgttggccaggatggtcttgatctcctgacctcgtgatccacctgccttggccttccaaagtgctgggattacaggcgtgagccactgcgcccggctaattttgtatttttagtaaagacggggtttctccatgttggtcaggctggcctcgaactcccgacctcaggtgatctgcccgcctcggcctcccacggggctgggattacaagcgtgggccactgggcccagcagacagactattttgaatcctgctctgctctctccccagctgcctgatctggggcagatgacttcagcttagggcctcagtttcctcatctgcataatcaaaagaatagtatttactttgcatggatgttgtgacttttaaatgagataatagatgtaaggtgcttagaattacttctccaaagtcaacagccaggaaatttctacaaatgttaattccttggccccttacaatttacaatgatggacctcttgaaattccaggcagaaggagcttctcttgatgacatttacatgatcggagtaagtctaggagcccacatatctgggtttgttggagagatgtacgatggatggctggggagaattacaggtaagtgcctgtgaatgggcatgggttggtagcctgggcagggtgttcactgggggagtattatgtaggccaatccaactccttgggttcaaagccagctccaattacctaacctctctgagtgtgggtcattgcatgcaaaaggaagatcaaaataatattgacctcaggctattatgtaataaaacataagtaaagcattttgtaaattgtgtatactatagaaaagatgagtagtgactttatttctattatggctggaaaaacagctatgtcccattcaaatctgtgtgccgcaaacagttagtcctcttccttttatttaatccaggagaccctgaactataaacctaatacgcttcagtccccaggcacagctggagtctcataagaaaacgagatgggaattttgatggctggggcttattctctaaatatcagctttcgggccaacactgaatgaaaaccttcagaaatgcagtaggtcagatcccaaacaaagactcctttgctggaatctcctgcctagggcttagtagctttccacagcggctctctctttcagagtctcaaagcctctcccatttctcctttcccagaatccatcctcatacctagatggctattttaaatctatggaaactgaaaaggtagaagtggatggaaaaaggggagaggtaaatgattaaaactacatttaggaggtaaacttttagggccacaagtttttaattttatttttaatttaaattttattttattttattatttatttatttttgagaaagagtctcactctgtcacccaggctggagtgcagtggtgcaatctcgggtcactgcaacctccacctcccgggttcaagcgattctcctgcctcagcctcctcaggagctgggattacaggcatgcgccaccactcttggctaatttttgtatttttagtagagacattgtttcgccatgttggcca

SEQ ID NO: 109829 - DNA, 1015 bp, Homo sapiens
cagctggggagagagcagagcaggattcaaaatagtctgtctgctgggcccagtggcccacgcttgtaatcccagccccgtgggaggccgaggcgggcagatcacctgaggtcgggagttcgaggccagcctgaccaacatggagaaaccccgtctttactaaaaatacaaaattagccgggcgcagtggctcacgcctgtaatcccagcactttggaaggccaaggcaggtggatcacgaggtcaggagatcaagaccatcctggccaacatggtgaaaccccgtctctactaaaaatacaaaaattagctgggcatggtggcgtgtacctgtagtcccagctactcggggggctgaggcaagagaatcgcttgaacccggtaggcaaaggttgcggtgagctgaaatcacaccactgcactccagcctggtgacagaacgagattccgtctcaaaaaaaaaaaaagaagttgaggaagctctaggcatttaaaccaagaaatcctagacagaacctctcctacctgtaagacacctttattgtgagctagaaaaaaatgccccttcctcaagacactttgtcatcatctggtggaaatttatcataataaatatataaatctataatgtcacaatgacaagggtgctccctcagatgggtgccctgtgcagtgcacagcctaacaaacatacctatggacattttgcacagcccctcatcccaccttccctggggcttattcacatttgcaaaatgttgcaatataggcctcctgctcactgtagctatctcttggctttaagccctcagataatgggccagtttcaacttagctctgaatcatctaagagaattctcttaccaacatctggtcaataaattccttcaagaccatggctacttttctggtcttactagaggcatgggtatatattaaagttgtagctcctcgattccaatcaacaacaactacgttcatgtcttcaacagagagcaaaccctttactaagtca

SEQ ID NO: 109830 - DNA, 1161 bp, Homo sapiens
tttttttttttttttttttttttttgaggcggagtctcgctctgtcgcccaggctggagtgcaatggcgcgatctcggctcactgcaacctccgccttccaggttcacgcctttctcctgcctcagcctcccgagtagctgggactacaggcgcccgccaccacgcccagctaattttttgtatttttagtagagacggggtttcaccgtggtctcgatctcctgacctcaggatccgcccgtctcggtctcccagagtgctgggattacaggcgtgagccaccgcgcccggccctcgcccgactaattttttgtattttttagtagagacggggtttcaccgtgttagccaggatggtctggatctcctgacctcgtgatccacccgcctcggcctcccaaaatgctgggactacagacgtgagccaccgggcccggccgttaatttcattttttaaattaagcctcaatatcaagaaaagtggaagaagtgttcatttgtgggagcttgagagaacaagatgtctaatacattagtctgagaatgcaggttattgatgagattggttgttggctaaattgcatcgtgtgttccagagatacatggttttgccttatttttctctcctatctttccgttgggttgatataaggatcatttgagaacgtggtgtaaagtgcctaaactgatgcttaatgtatataagggtagtatttgtctgtcctactctggggccttttgcagagtctggtgcatgataagcacttggtccctatttatggaataagggaaagctaatttcctctcccttgtcctctccttgatgtgaatccctgctagtcagtggaacatggtttggcgatcaaaaccttgatctttactatactttaggtgttcacatccttaatccaaaacaacacttctcagtgtaaaccaattttcagtcaaaatgaagcccggcagggcttgttggaatgtataaagttatgagctgaatggaatcctgggatctcattctattcattttttttttttgcatgtgtgaatataattgatcataagggttcagagagatgatgagtaatatactatgaccctttagcattcttgacatctgggtcctgaaactttcctcaattccaaagttctttattaccatc

SEQ ID NO: 109831 - DNA, 1723 bp, Homo sapiens
ccgcacccaacccaagaaagtctctttcctatccctttcttatcttttctagaggtaactactgttaccagggacttgtctaatccttgcaggtaaataagcctaggtgtagactgtgcattttaaaattctaaatcattctacaaagaaaagatacttcttatttatttattttttgagatggagtctcgctctgtcacccaggctggagtgtagtggtgcaatctcgactcactgcaacctccacctcccgggttcacaccattctcctgcctcagcctcctgagtagctgggactacaggcgcccgccatcatgcccggctaattttttgtatttttagtagagacggggtttcaccatgttagccaggatagtctcagtctcctgacttcgtgatccacctgcctcagcctcccaaagtgctgggattacaggcgtgagcccccgcgcctggccctacttatttttaaggaggaaatgttgtaaatgtttcaaactgaggtgactctagttcagatggctgagggaacccatcttttctatttttttttttcgagacagggtctcattctgtcacccaggctgggatgcagtggcataatcatggctcactgcagcctccacctccctgggcccaggtgatccttccatctcagcctcccaagtagttggttgggcctacaggcacgttatcacacctagctgatttttgtattttttttgtagaaacagggtcttgccacattgtccaggctgaaaataggcagcagtggcattttgaaagaatactcctgtctttaagaaccggtaatatttctttttttttttttttttttttttgagacaggatcttgctctgtcttgatcttgtcatcaacaatttttttttttaattttgtaagaggcaagggtatcactgtgttgcccaggcttcagtgcagtggcacgatcgtagctcactgcagtctcaaactcctgggctcacacaatcctcctgcctcagtctcctgagtagctgggactataggcccataccaccacacctggcaaattattttgtatgtggatactgagtctccatatgttgcccaggctgatcttggaactcctgcccttccaaagtgccgggattatggatatgagccactgtgcccagccaagtcttttacttcagtatatctgaatggataaagaaaataaaagtagattaaaggaaaaaggcatagtaaaatgctataataatatattcctctttctcaaaaatgattataaatttgggtctacctccagatgtggtaattgagtgtggacatatttgtgttaatatttcgtttaaattcagtgagtacttattgagcatgtctcagtgctaaccaatgtgttaggttttacagaaaatacaaaaattagtaagacagggtctcctttttttttttttttgagatggagtcttgctctgttgctcaggctggagtgcaatggcacattctcggcccactgcaacctccgcctcccaggttcaagtgattcccctgcctcagcttcccaagtagctgggactacaggtgcccaccaccacacccggctaatttttgtatttttagtagagacagggtttcgccatgttggccaggctggtctcaagctcctgacctcaagtgatccacctgccttggcctcccaaagtgctggaattacaggcgtgagccaccgtgcccggc

SEQ ID NO: 109832 - DNA, 1216 bp, Homo sapiens
ttgttgcaacctccacctcccaggttcaagtgattctcctgcctcagcctcccgagtagctgggattacaggcgcccaccactatgcccggctaatttttgtgtttttaatagagacagggtttcaccatgttggccagactggtctcgaattcctgacctcaagtgatcgcccgcctcggcttcccaaagtgttggtattacaggcgtgagccacctcacccggctgtgttttcatttctttataaggcaggtgatgttggctttacatatacagtagtaatttaaaattatcttttttttttaagccaaaaaaggaagtcagttttaaagaaaaatataaatagcttgtacttggatgtggttaaaaaaaaaaaacacacacaaacgttggtattacagaaggtttctgacttaattatttaggacaatcatctgttttatggattctatgttaaggatcacttattgcatcattcccattaaatatgtagtatgattttctgaatggcaaattgtagaagggaatctaaaccaaagggtaagcggtgggtagcagagtttgtaaaggcctgtaaagtgctgcccaagagaacttcctgcagtgataactgttgagcactcgaaatgtggctagttcaactgaggaactgaattttaaactttatttgattctaataaaactttaagttaggtaaccatatctggctactagctactgtgttggacagtacaactccattggttgcttttgagagaaaaaaaagcaaagcaagggtaaaagaaaagaaagaagacctcagaatttcaggctcatgatctttttttttttttttttgggacagagtctcgctgtgtcacccaggctggagtgcagtggcacaatctcggttcactgcaacctccacctcccaggttcaagcgattctcctgcctcagtctcctgagtagctgggattacaggtgtgcaccaccatgcccagctaatttttatattttagtagagacggagtttcaccatattggccaggctggtctcgaactcctgacctcaagtgatccaccctccttggcctcccaaagtgcagctaatttttgtattttagtagagacagggtttcaccgtgttggccaggctggtcttgaactcctgacctcaagtgatccacccaccttggcctcccaaagtgctgggattacaggtgtgagccaccgta

SEQ ID NO: 109833 - DNA, 1050 bp, Homo sapiens
gaagcccaggtattcctagggcaggtttcttgtgtaaagaggtccataatcggttatctgcaacccctgggagccagatgtgtttaggaattcagaatttttcatattttaggtatgttaccggccaaacatacggctggtttgaatttgaataatttactccaattgattagattacagagagttataatctttgagttcttcatggcctcttaacagtcccatcaagcaaaacaagcaaagcctgccagtgaattctgttattacctatctgagatcaaaaacaaactaagccctattgctttcctttaacgtctacaaaatttgtgctagactcctgtgctattaatagaaattgaaaaacaagatgttgatttagctctatgatgtaggttgctcacagattttttttctttccttatgcagactgtttgcaagtgatttttcattttacaattacaaatgcattttttaaataggtaataaatctcctaatggaataagtgactatccaaagatcagagtgacagttacccgagatcagccacgcagagtcctgccttcctttgggtaagtgttaaattctttctgtaaatggaaacttagcatttattaggtgctcactcttgctaggcagtctcacttttgttgtattatgtagtcctgctaagcgctctgaggttagtaacttgctgaatgtcatgcagccagtgagagacttgaacttaggggtgtgttatattttcttttcttgtcttttttttttttttttttttgcgatggagttttgctctgtttcccaggctggagtgcattggtgcgatcttggctcactgtgacctctgccttccaggttcaagcaattctcctgcctcagcctcctgagtagctgggattacaggcacccccacaccatgcccggctaatttttgtatttttagtagatatggggtttcgctatgttggccaggctggtctcgaactcctgacctcaggtaatccacccaccttggcctcccaaagtgctgggattacaggcatgagccaccg

SEQ ID NO: 109834 - DNA, 1061 bp, Homo sapiens
taattttcatacactggtcatatccatcagttgtaaaatgttattattaatagttttcttactttcctttgtagaatttttattgcttggacattagaccttctagattgatctaattttcccatacattctctccttttgttgttcttgctttttttttttttttttttgagatggggtcttgctctgtcacccaggcagtttggtggcacagtcttggctcactgcagcctccgcctcctgggttcaagcaattttcccacctcagcctcttgagtagctgggcttacaggggcgtgccaccatgcccagctattttttgcatttttagtagacacaaggtttcaccatgttggccaggccagtctcaaactcctgacctcaggtaatccacccacctcagcctctcaaagtgctgggattacaggcgtgagccactgcgtgcggccttcttgctctttttaaaaacattttttactaattcttttttgactgtcagtttttaagttagaaaagttctccccctgcctattcccagtgttttttttctttctctaagcatcttgttcttataaggatgcaaaatctttccttatctctctaaagctgtttattattttaaaatatgttttgagtgctcccttctggtttatgccgtctccctccatgtttgtttattttggtctgatctttgaagttagagtctttattcaagtacttggtactccttggctatccacttatatttaggaatgagaaactaaaaactagcgccctctggaattgaataaatggctgattgtagggctaggaaagaaagtataaagtgagtctgaacatcttgtgccagaaagtaaaggagtgttcaaaaactgggcatgccaccctgacagaggaggagatttcaaaggggctttcactggccagatgggataatttaaacatcaaaatgaataaagacagggactcagatgctaataaataaatatatagtgtcgaggagggaaagatctttatagtagaatgccaactagtaagtgtggaaggaatgataaaattag

SEQ ID NO: 109835 - DNA, 1149 bp, Homo sapiens
taatttagcattcagcagatatttattgagggccttttggcttagaccctgtactaagataacagtggtgaaaggatgtaatctcttttcatggaatttaaagtttagtgtggaatatagacattaaacaaataatcataccagtaatgaatttcagtggttccaggtgactaaaggaaaaatgcagtatcagaaggggtatatgcaataggagagctaaatctagagttggggttggaaatgggcatgaagaggaaggcagagactctctttgtgtggcagctctagtttagaaacagacattccatagtggaatgctgcggtgccctgtgctctagggatagatctaacttttgcataattgtacttgtctgacttgccaggagtaagcttgacctaaagcaacttaatcacaggatggtctgggagcttagattccagcaatttaagcagcttggtgatactttttttctttttttttctgttgctcagttttactttgaactcagaaggctgtaatagaagaccaggtggccgtcgccatagcaaaggtaatccagagagttctttaatgtggaaacctcaggaacaggctgtaacagagatgatttctgaagagagtggcaagggtctgaggcgtccccattgtactgtggaggaggtaagccttttcagcttgatttctttaaaaaaaattttacagctcttcccaaggatgctgcctagagacactcagaatggttcaacgtttgacataccattgtaggttttcctacaatacagcctccaacaaaatgaggctgtcttaaacccagatgcaccaaaaatctgcatgcagcatgtgcccaggcagactttgaggggttcatgctatgagacctaaagttcttatgagattgtccagatcacattagcaaggcctatagcggccacgtgtgctcagtgagtctgtgacaggatcaagcatgttgcttatcgaggagcagaaaatcgttgtgaaagtattgaaggcacagacacagagtcagacagctaaatttaaaaatgaaacttttttcagaaataaaaattaaaagactaaaaagaatttttaatgaatatttttgggagcaaataatatatctactatgttatatatttcttttttcc

SEQ ID NO: 109836 - DNA, 1737 bp, Homo sapiens
tctcctgcctcagcctcccaagtagctgggattacaggcatgtgccaccacgcctggctaattttttgtatttttagtagagatgagttttcaccacgttggccagtctggtctcaaactcccgacctcaggtgatccacctacctcagcctcccaaagtgctgggattacaggcatgagccactgagcctggccaagattagattctttttgggtacctgaattagtctaacttgcttttttaaaaaaatttaccaagtttttttttatatatagagatgggatctcgctatgttgtccaggctagtttcaaactcgtgggctcaagcgatcctccagcgtcagcctcccagagtgctgggattacaggcgtgagccaccgcgtccagtcataacttgtttctttttataaactttagtaactgtgactaaggaagggaagtaaatggtgtgcatctctgctttttccttcacctttcagaacactcagcatgatgaagagtcaatctttttactttccttttgaggttttcttttattccaggaaaatttagaattattcctgtacctggcactcccgaggaccatctgctatttcacttgccaacagttttctgagccacttgtttaatttagttcatcaaagaaatatttattggggtcccaggtactgtgctagttgtactgtgctagcaattcaagattaaatgaaatgtggtttctgccctctacgagcttatacataaatagttgctatttgataaggaggcagagagtaatggaccatatccctgaaaggggttttaagatgaggtgttaaatatttcagtctcttagatgagaaatcagaaatgggactgagccagtatctacaggggaatatgcagaagatatactctagaaatattggtaggtagtattagcaaggacgttatctgttgattaagtgtgatctaaagtagatagaagggtctgagtcccagatttcagttttgggaatcactatgtgtcacttacaaagataaccctatgtttatggggaagatgatgactccagtcttggacattgtttaaactccctgtgaaacccacaagaaaacctctcctggaagctcgtggatatatgtgatggaaattttgaggagacacatttctgaatctttaacctgttggtgttatttaaatcaagggagctgatgagattattcagggaaggaatgtagtgcaagaagagatacgggcaaaccatcagtatgatgtaggcagaaggaataatctccagtggagacagagaaaaaagaatcagaagagcttattgtctaggaaagcaaggcaggtcagcagggtgaaatgctgaagagagatcaagtaacataaggactggaaaagtgtctattaaatgtagccatagaggttactggtgatgttggtgaggccaattcattttggaaactgtatattctcgttatgcaagcagatgatttctgctgagtttttttgtagttaacctaattctgttcaacccagttctgtcaaaaacctagatgccatcagaatttagcagataacatgaataaagtgggctggagagcagtggcccatctaaatgggatagccctacatatagattgtggattcagttgatcaaaggaggctagattatttttaaaaaatgtataaagttagtaattaattcaaagaaatattaaaaacatagtgctggcaaataaaacacac

SEQ ID NO: 109837 - DNA, 1961 bp, Homo sapiens
gctacttgggaggctgaggcaggagaaccacttgaacctgagaggtagagatttcagtgaggccatgatcacaccactgcactccagcctgggcgacagtgcgagactccgtctcaaaaaacaaaaagttcttgcttttaatgtattgtttcaggatccatttaaatacatagcttaaaaagttttttatcttttaatctgagttttatcacactgagatttttcagttagtgcatcactggggattcagaacctctgattttacaaacagagaaactggaggttaggtgacctggctgaaatattattagaatcatgattagactccttttatcctagtcccacatagttgcttcctttctgttgtaatttgatataatagtgtaatcaatcacccctatttggagaagcttgctggacagagataatgcatattaatggtagactttgcttttgtatctgatctccctcactttttgtgtttctaagttctcaaagaagtcagatggacacattaaagaccaaaggctggggggaagagcaaaatcacggagtcaaaacaactcagtttgttccaaaacaatgtgagttcccagatttagccttgtcttaatatattgaccttagttcatgctacagtgttcatatgaggtagaaaattgacattcaagtgtagatggtgtaccaaaatactgtcaaatctcacagcattgggccgggcgcggtggcttacgcctgcaatcccagcactttgggaggccaaggcagatggatcacctgaggtcaggagttcaagaccagcctggcgaacatggtaaaaccccatctctactaaaaatacaaaaattagccaggcatggtggcacttgcctgtaatcccagctactcaggaggctgaggaagtagaattgcctgaacctgggaggtggaggttgcagtgagccaagatcacgccactgcactccagcctgggtgacagtgagactctgtctcaaaaaaaaaaaaaaaacctcacagcattgactggggcttatctaggaatttagtagaaaagctgtttcagggtgaagtagattcataacatggctctggattattattcctaagctgctagatagtagcaactattttgtgagctgaaattttattatattccttatataacaatttccttatacttctccacttactgtccactaaatgacagcttaccagataagcagatatcactcagtttatagtaaagattatatttaaacagcaaagatatgtatgcatttttttaggcaacttagtatatagggaggctagtgtctttggaattcactgtagcatttcaatgtagaggaatgtcttgatgttgtggaaactctgtaagctgaaattctaactatattattcatcgatgaaggaaacatttaatcttttctttaccatcctcacagatagacttgttgaaacaaggggacctctatgttcattgagaagtgaaaagaggtacgtacattcagttcattctacactttcttttaatatatattttcttactttataagctgtatttatgagtaagcagttctgaggaattgtgaactctcttgagttctggtagttggtcagcatatagggtagataggtagctagctgttgtgtcagatgcccaccctagcctggtgggttgaggggggtgccccttatctcccaggcgtcaggggttgggagaaacacatgcttcttagatgggagtttggttggagtggggatgtctagtgtcagtgtctttaggataggaacagtaaaggcagctctgcatgctttaggattttgggatgatggtttatagcagagtttgtaaactatggcccatgggccaaatctggtctacttgcctatttttgtatagtaaatttctattggaacatgcgaattcatttacatactgtctggctgcttttaaatta

SEQ ID NO: 109838 - DNA, 1126 bp, Homo sapiens
cattcaaattaagtggtacattaatgttttgtgcattttctgtaatatcaaatgacttttttcaaggataaactagaaccaagttgagttactataaagatagtagggatttattctgagtgatgggattgtgggtcatattttttgctgtttaaaactttcataatatcttttaaacatactaattttaattgtgataggagaactgaaaatacttttcttgctacttccagggaaggtggtgagtgttctgtttgatggttcataactgagggtcctgtgaggcctaggtctggagctttttttgctcccccttgcagggacagacagatagggtaaatctactcacttgggggatttgctaattctcttttctttcacattagtggcagttttatatttcatgtgtaatctgtgtttatatttgcaagtatcaaacatgtcagtagaatttagataattttttgatcagaggaggggataccaactggagcctgacctatcagaagaagtgtcggcccgactccgcctgggcagtggaagcaatggcttactcaggaggaaagtgtcaataattgagacaaaggaaaagaattgctcaggcaaagagagggacagaagaacggacgatctccttgaacttacagaggtattgttctttgtattgatcctaaaaagaggcatgtctttaaataacctcagttattctaacttgaatgttttgttttgaggactttctccaggctaggggtgaatatatgaaaacatgtcaggtccatggtctgttgattcactttgactacattgatctttagtgaggcatgatcattagtggcctaagggatcagattgatattcagcaaatggggagtcgacacagtcatctcatatcttggaatacaacagattctttgtaaattctaaccttcaaatatgttgagttatatagtatgggtttggcattaagaataagttcattgcattttttttttgaaagttattatagtttactaaaatgccccctttgttgattattgcatttgaaaatagtaaaaacttacagaacataaagaatgaaggtagttaaaattcttattttaaagatgtgcccacatcttggcttcct

SEQ ID NO: 109839 - DNA, 1096 bp, Homo sapiens
tattattattaaattattgtttccacaagctaataagtgaaccaggatttgttgtaagtattacttacaacaattaagtaaggctgctttgtagttataagttaaaatattttcagggctggtgcagtggctcatgcctataatctcagcactttgggaggccaaggcaggtattgcttgagcccaggagtttgcaaccaacttgggcaatataatgaggccccatctctatcactaaaaataagaaaaaaatgttttcctactgtagtttagtaggtctttgatagtatatttttctcaagagtcaggtgttgccgagatgaaaaacttttttcagtctcggagttttcaataactgataatgaatggttctatattaaaatagcaacttctgaactttctaattcaggacatggaaaaggaaatcagtaatgccctaggccatggcccacaggatgaaatcctaagtagtgctttcaaattgcgaattactcgaggagatattcagacattaaagaactatcactggctcaatgatgaagtaagttgtattccctcccccttttggctatcattaagtttatttatttattatctataatcaaagtgactcctacccagttataatgggttggtaatgcaactcttagttataattaaaacaaaaacattttaaatcttaaaaagatggttagttctgattttctgcctttgattagcgatgtttcccttttctgcgtctgtattttattgcatccaccacttcatttactggtcttcaataaaccctgggtacagctgataaacgggaggaagcagcaagtgatactgtattttaggtgaattcttatagtagctatttttttgtttttgttttttggttttgtttttgagacagagttttgctcttgttgtccaggctggagtgcaatggcgcaatcttggctcagcgcaacctccacctcctgggttcaagcaattctcctacctcagcctcccaagtagctgggattacaggcatgcgccaccatgcccggctaattttgtatttttagtagagacagggtttctccatgttggtcaggttggtctcaaa

SEQ ID NO: 109840 - DNA, 1106 bp, Homo sapiens
ctccatctttccaaatatataaataaataaaattaggcaagcatggtggaccatgcctgtagtcctagtcactcaggaggctgaggcaggaggatcacctgagtccaggacttccaggctgcaatgagctatgatcacaccagttcactccagcctgggcaacagagcgagacctggtctgtaattttaaaaaatagtaaaataaaataaacataaaattttttaaagaataaataaataaaaagaactaaaagggttgggtgaaggatgggacattaaaaaaaaaactaaaaagagactctgcagagtatgcttataatatatactattggcctctatacacagggcagaaaaaggcagcattatttttaaaaaatggcctttatccaagtccaacaattaaccattaaccctctctactcaccaccaggctccaatgtaccttccgatgaataggcaccagaataatttcttgttcaaagagatttacccctttggtccatcgtttcactgcttggtaacccccagactttaatttaggatagaagaaagtactgaatacatgaagtgctggatagccttgctttttatttctttccaccagaagattcatgtaaaaattaatgacctacaaaataccaagggagcaaaagctggaacatggcaaacatattatcaaaactaaatttctacctgaataaggatgaattcgaaggtaaggtactaaagaagaggataaaaagactgtctatagtagaagacagggaaaaaagtgatcagtgcaaaatgggacacatgaaaatgaaatgaaactgtacttttaaggcatgtgagtaacacttaacagccagaagaaggaatccaggaagaaagtctgtgcaataatggaaagatctacataactgtatcacaccaaaaatacgcagaaatattaacagtaagtgaattttactacatataaattagacttcaattttaaaatattaacttgaaggacatacaccaaaataatattttatttatctctgagtggtgatactttttttttgagacggagtcttgccctgtcgcccaggctggagtccactggcgtgatctcggctcac

SEQ ID NO: 109841 - DNA, 1711 bp, Homo sapiens
ccatctcatagttagggtttccaatcaaatgcagagccatggagaattaaacagaagaacagaacagaaaggaaaagcagtattcacaagttacatcttagacctgtggcttcagttctcacaaggcctgtttttcccttgctatgatctatgttttataccacatagagtaagaataattgtgttttttgtatatgactgtgtgtttaggtaatacctgatttaatatttacctttataatattgtttacagcaatatttagaaaaagtccaaggaatttgtatttaatgatgttttaccctttcctctcttcttttttctttgtaattttaggagattcctcaacagctgaatgggagtgattgtggaatgtttacttgtaaatatgcagattatatttctagggacaaacctatcacatttactcaggtgagtgaagaccctcttcatccatttacttgttactaagcaagataaggcacttggccagtgcctggcacacattcagctctcaatagtagtagctggccaggcgtggtggctcacacctgtaatcccagcactttgggaggccgaggcgggtggaccacctgaggtcaggagttcaagaccagcctggccaacatggtgaaaccccatctctactaaaaatacaaaaattagccaggcgtggtggtgcatgcctataatcccagctactcaggagactgaggcaggagaatcacttgaacccaggaggtggaggttgcagtgagccgaggtcgcaccagtgcactccagcctgggtgacagagcgagactctgtctcaaaaataaataaataaaataaatagtagtagctgggctcatgcctgtaatcccagcactttgggaggccgaggcaggtggatcacctgaggtcaggagttcgagaccagcctgaccaacatggagaaaccatgtctctactaaaaatacaaaaaattagccacgtggtggtgcatgcctgtaatcccagctactagggaggcaggctgaggcaggagaattgcttgaacccgggaggtggaggttgtggtgagccgagatcgtgccattgcacttcagccgcctggggcaacaggagagaaaccctgtctcaaaaaaaaaaaaaaaaaaaaaaaatagtagtagctgtgctattcttattgctgtaaatcttggttttagccctactcctgccagaatcagggttattttatctgctctcaggtttatcctagtctttggtgacacaatgggcacaatttgcaaatctctgaactgtggcattcattggttcctgtgtattattatttctagccaaagaaagaggtatgtcagtgtttaatagcaagggaaaaatcggcctgtgagaactgaagccacaggtctaagatgtaacttgtgaatactgcttttcctttctgttctgctcttttgtgtttgttttgttttgttttgtttttgagatggagtctcgctttgttgcccaggctggagtgcagtggcacgatctcagctcactacaacctctgccttctgggttcaagcaatactcctgcctcagcctccccagtagctgggactacaggcatgcgccaccatgcccagctaatttttgtatttttagcagagatggggtttcaccgtgttggccaggctggtctcgaactcctgacctcgtgatccacctgcctcagcctcccaaag

SEQ ID NO: 109842 - DNA, 1036 bp, Homo sapiens
tccacctgccttggccttccaaagtgctgggattacaggcatgtgccaccacgcccggtgacatcactagtttatagtaagggacatccaactatttataatgatacatcaggagtgcctcaataatgtgaacttctttttttgtttgagacggagtttcgttcttgttgcccaggctggagtgcaatggcgcaatctcagctcactgcaacctccgcctcccgggttcaagcaagtcttccgcttcagcctcccaagtaaccgtgattacaggaatgcgccaccacccctggctaattttgtatttttagtagagacggggtttctccatgttggtcaggctggtttcgaactcctggcctcaggtgatatgcccaccttggcctcccaaagtgctgggattacaggcgtgagccaccgcgcctggccaagaatgtgaacttccgtatacactagaaggactagttgtactacgggtaattttggagttgctttttgtgttgctgctttgcaaattgcccatgtagtgattctcagttaaagcagaatcatttattaagcaaaacatctcattgtttcatgttgccaaatagcaaagcagttggctgttctctgaacctaataagatgagattttaaagggagaagttgctgtttgaacagaattggcaatgtacaacgcctggtagagcagaaagaaacttgtagattttgttgttttttatttaaataaatacgtttttctcataaaaaaacagaatatgttcattttagaatgttttgaaaattcatataagtagaaaagttgcctattgtgccaccacgtggatatttgcaggactgtgaagttgtactatactgtataattctacatcctgctttggttttccttaacatataaaaatgcttatggtaggccgcctgtggtggcttttgcctataaataatctcagcactttgggatgctgaggcgggcggatcacctgcagttaggaggtcaagaccagcctggccaacatggtgaaaccctgtctcta

SEQ ID NO: 109843 - DNA, 1469 bp, Homo sapiens
ctatgaatgtgggaaatgcaggatttattctgtgaattgtttgtttctgtgtgtttgttcagcgtattcattcactcactcgtttgcaaacataatgggcagtggtcatttactgctgctcttttacagttagctctaaattacttgtttgaactatttatttctgaaaggaatgttactcaagctgccactccctgctgaagagcaggagggaactctcactgggggcggaaggaagtggagctggagcagtaactgccaacatgaagctggagggtttgggattttttttgtttttgtttttttgaggctcaaaaaatgctgggagaaatgaaaatgctgtgggatagggctcctgttgcctttcagaggaagtctgacactacagcgttggcacagtgccgtgaacagtggaactgtgcccaagggactctgattatccaagcatcttccgaagagtgttgtggtcaccttaaagagacttccccttctggaaatgtggtgacttggcttagtcttcaaactggattcatggatttgaagtaactgtaaaccctaaatcttcattttcatcccagatctggttgagtataaacctcagaattgtaggggctggcctgagctgtttatttcaaaagatactattcaatttaaagctatttttcctcagagtttttgttttctatatattaagtctaaattaagttttctactcattaagactaacatctccccactccatccccactgaaatttgtggaagaaaatttagtacttggctctgaggttgccagttatacaataatctattttgcatatgaaagtttgtatttaacttttttgttcattaaaaaccttactgatatggttataacttcagacagtttagagttggtcagaacatattttgcaagatctagtgcctagtgttgcttttctgatgtaataaaaggtggtctggcagaacctaaaaaagtatatgctgaaatgatttctaaccctctccctacttaaacctcccagacttgttctggttcataaaagcaagaggtaaaactggaaaaattgtgcacgtgttacctatgaatctacacgcctgccatttgcagtgctccggctgctggtcccagaggtatactggttacagctattgcagccagttccctgagacttgtaaaactcctggtttaggacatggggcctgtggtgtggatggaaaatgctgggcctactggatggtcagccagaggccatgtggtgggtgatgactgaagcgggagcaggttgtaccacacctctcccccccccctcccactccccctccctccctctcccctccccctccctccctcccccctccctccctcccccccctccccctccctccccctccctctctccctaacacccaccctccccctttcccccaccctccccccttctcccctttccccaccctccctcccccc

SEQ ID NO: 109844 - DNA, 1555 bp, Homo sapiens
cataggtgaacgtgttcaaagccaagcaaaatgcacaccctttttctgtggcaaatcgtctctgtacatgtgtgtacatattagaaagggaagatgttaagatatgtggcctgtgggttacacagggtgcctgcagcggtaatatattttagaaataatatatcaaataactcaactaactccaatttttaatcaattattaatttttttttctttttaaagagaaagcaggcttttctagactttaaagaataaagtctttgggaggtctcacggtgtagagaggagctttgaggccacccgcacaaaattcacccagagggaaatctcgtcggaaggacactcacggcagttctggatcacctgtgtatgtcaacagaagggataccgtctccttgaagaggaaactctgtcactcctcatgcctgtctagctcatacacccatttctctttgcttcacaggttttaaactggttttttgcatactgctatataattctctgtctctctctgtttatctctcccctccctcccctccccttcttctccatctccattcttttgaatttcctcatccctccatctcaatcccgtatctacgcacccccccccccccaggcaaagcagtgctctgagtatcacatcacacaaaaggaacaaaagcgaaacacacaaaccagcctcaacttacacttggttactcaaaagaacaagagtcaatggtacttgtcctagcgttttggaagaggaaaacaggaacccaccaaaccaaccaatcaaccaaacaaagaaaaaattccacaatgaaagaatgtattttgtctttttgcattttggtgtataagccatcaatattcagcaaaatgattcctttctttaaaaaaaaaaaatgtggaggaaagtagaaatttaccaaggttgttggcccagggcgttaaattcacagatttttttaacgagaaaaacacacagaagaagctacctcaggtgtttttacctcagcaccttgctcttgtgtttcccttagagattttgtaaagctgatagttggagcatttttttatttttttaataaaaatgagttggaaaaaaaataagatatcaactgccagcctggagaaggtgacagtccaagtgtgcaacagctgttctgaattgtcttccgctagccaagaacctatatggccttcttttggacaaaccttgaaaatgtttatttaaaaaaaaaaaagatgacaaagaaaaacagagagagagaatattggagatgtcctgaattttaatagggtacgcgccattagggctttttgcgctaaaggatgaacatgtactggtttatgtggacaagccattataccaccagactgcaatgccagtttcctctactgcaaacagtgttctgtgacaaaaaaaaaaaaaaaaaaaagaaaaaaaaagaaaaaacagaaatatatccagctaacaagatcctggtgtcttggtgttttattttactaggcattgcctcatcccaggtgtcagctgagtcctagctctgagggacctgggcagaca

SEQ ID NO: 109845 - DNA, 1033 bp, Homo sapiens
tcttgactccatggtcagtgaaggcctccactccctgaaaacagagaggctgtcttctgccccctttatacccacatgtagcagccattaaaattggaaaggggggattcccaccgagagagatgctaacccacttggcagaccaccaccttccctggatttcactcaggcctgtgccctgcactctcttctgactctcagccctcctgacagatgcctccagtccctaactccccctccacaggctctatcttctggctgtttcccaaacatggctctaggggagctagtttagcagtaggagggtgggcaaggaggagattgttttttgaaagatcatctgcattttctactggaaggtgcaggaacaaacacagtgtagtttgaaaagtgccagagcgttaactttgaagcttgttggaatgagccaggtggtctgtagacccaggtatgttctggaatgtgacttactgacctgggtggggagatgaccactgagaagttccagtagagcctagtgcaggcttgctggcaaagtagcagtgttgggtggcaggaacttggcggggaggcgggggtctcttgagtcctgagtgtgtatgtgtatatatgtatatgtgtgttatttgctgtttttgtaaagcttttttttttttttttttgagacagagtttcgctcttgtcacccaggctggagtgcagtggtgccatctgtgctcactgcaacctccacctccctggttcaggtgattctccttcctcggcctcctgagtagctgggactgcaggcgcccgccaccatgcccagctaattttttatatttttagtatagacggggtttcaccattttggtcaggtcaggctggtctcgaactcccgacctcaggtgatccgcccgcctcggcctcccaaagtgctgggattacaggcgtgagccaccacacccagctgttgtaaagctctttacatagaaactcttaaacggaattcaaaaccaagttctagatgtaatgagtcagctttatacgaaag

SEQ ID NO: 109846 - DNA, 2033 bp, Homo sapiens
tttagctgaagttttttttaataaagcagggcatgcagaaacaaatatgtaacaaagatctctctaacaaaaatgcctgctcagcccagggtttgagtcgtgttacaagagaacctgaactcacagaaactgagagaaggaagctgggcgcagtggctcacacctgtaatcccagcactttggaaggccaaggtgggcggatcacttgaggtcacttgagctcttctttggaggactttgagaccagcctggccaacatggtgaaaccccatctcactaaaaatgcaaaaattagctgggtgtggtggcagatacctgtagtcctagctacttgggaggctgtggcaggagactcgcttgaacccaggaggtagaggttgtagtgagctgagatcgcgccactgcactccagcctgggcaagaaagtgagaggagatttggagcttggtgggcccagcccctatgtttcacagatgagggaatggaggcacagcgaggggaggaattttcagagccaggactagaaccaacgtgcctccatttctgctctgctgctgttttacttatgacccacttgccgtggaggaagcggtcttgaccacacatactctaactcaattgtcacttccagctgactacccttgtgagctgagaattagaaccagagatacctttgctgcaagctcgactccaatttaacaccttggtggacctgcccttccttccctttgggccctaggtgggttggcagagcctacacatccctcttcctagagcttttgactccctggttatttcctaaaacttggctcaatgagaggaggcccatcacagctggtgctcaggacagggacaggcagtaactactggcctgtgtctgactgtccctgggtggccaaaaacccaaatttgatactgggcattacagtcatgacttcctaagaccagggtggaggcagcatggcatcagacagaaccaggggtaacggcagaagcaagacctggaacctcctgctggtatgcttgccgtccacttagacaagaaagaggggctggggaatgcagccgagcatcagcgttttcctctcctgtgaaccacagattgcccctgcggaaggcccagacgtcagcgaaaggatggtcatcatcaccgggccaccggaagcccagttcaaggttagtgccaagggacacctcagccctgcaggctctgggcacagagcagccacctcagaggcacattcaaggctcttctttggaggcccagcctccatttccctccctgctgctgcccaccaagctcaggctcaccctgtcatccctggctgttcttctgcatgtttgccctctgctgggaagccctctttcccttccctctcatggaaaagtagatcatctgttggtgcccagttcgagtggcccctgctctggcacctctgatcccttagccctggttttgaggatggatgtctccggctcatttagtcatgtctacccttcaagctatggaggactaacacaggtgtaaggggaagtagcatggtttgttggaaggttttttggtgaggtgtgttttgctttgttttgtttttgcctttttttcttccctaggaaaattataactcgagctttctaaaagtgagaaacacatatttatttatttataaaagtacaatccttatcattaaaaatatttaaaatttagctgagaagaggaaattcacacatgtggaaccactcaaaagcaatagcctcagccaggggcagcaggtggtggtatgctcctgtagctctagctactggggaggcagaggcaggaggatcccttgagcccaggagtttgagaacaggctgggcaatagagcaagacctcatctctaacgaaaaggaaaagataacaaaaaacagtaacccttcaactcagtattggacaacatgtggaatatccatttaacagaatgttattcagccacagaaaggaatgaagtactgatgcatggtgcaacatgggtgaccatcacacgaagtaaaag

SEQ ID NO: 109847 - DNA, 1026 bp, Homo sapiens
aggagaaagcctggttggaatgatgtcttctttcttgtctcgccctcccagtatccagagcaggagattgtgaatctcttcatcccaacccaggctgtgggcgccatcatcgggaagaagggggcacacatcaaacagctggcgagattcgccggagcctctatcaaggtgaggctgctcctgacggccctgtggcccttctaccacctcctctcatcccacggcccttgttccctctcagtcccaggcagcgccacaccatgcagagacagagtcccacagagatctagaacatttgccccatgactattcccgtccgctctcatctttccttttcttattcctttactgttcagctaaccactgaattagaaaaaaatagtagcagacaacccaacccagtcctttttgttttatcattgttgtcctcaagaagataaagaaaggttgaggattttcccaagctaagggaagggactgcggtgaagtgataacttagcaggtaccagtatgcggtgctttaatgagtctccacttcacaggccctgaactaccagaaaataatgtggataaaaaactctttgaaaagcaatgataaaatcataaacaaaagctgagggtctaacccgatatgcaacccagcctgagcatagcaactcaggaaggacggtccttgacttatggaaaggctgcgaatgcagacgtggctgcagctccaggcccacatcctgcctccttgagcacagtgtggagaatcatcagagaagctgaaaggggaggattatttgcccctggtcctgctccaagaccagctatcagctctgactcacgggcagaatgctgagcacgtcccaagcctcatgaaacattttcggaaacagagtttttgttgttacgcaaaataatttgctaccatgggacaacccagaattccaaatgagaagtctcatgacttggagagaaagaatgcttacactttctccccaggaagagctggaatttctcccacagcaagtgtgctagagg

SEQ ID NO: 109848 - DNA, 1556 bp, Homo sapiens
ctgggcgaaagagtgaaatgccgtctcaaaaataaagaaataaaataaaagcagctactttctaaatttctattttcttaatagctctactttttttctgtccatatctgccctcctgttccctgctcctctctctccacattcattttctttctctcctctctcagtcactctctctcttttttttttcttatggagacagggccttgctctgtcgcccaggcatagcaccagtgcagtggtgcaatcatagctcactgcagcctcaaattcctaggctcaagtgatcctcccacttcagcctcctgagtaactgggaccagagtgcacactaccacacccagctaattttttatttttattttttatacagatgggatctctctgtgtcacccaggctagtctcaagttcctgaacccaagtgatcctcccatttcagattcccaaagctcagtctcctttgacatttctcccttctcaggattctttccattccttctagaattctctgatggagctgactgatctatctgcccaggaacacatttgcttgttctgaataactcttgggtattgtccagcacactctgttctttttcatctacgactcatcattctccagaaaacggaaggcactggccccgcctctccacccgagggcaggttaagagtgtatgggtgcaagtgccagtgggtgtatgtgtgtatgtgtgtgttcacacccatggtatgttcctaggacgcctcaggcatgactcagcttagaaatgatgaacatttagcccagagagctactgcaaccaggggacatcttgccaagcattccgtggtctgagtgggagaagtggagcagagatctgagacacagagggacaggcgtgtagacacgacagtggagccagctgatgccacagagagcctgtgtcgcatgttgggaatctggcctccctgaggccagtgacagtccctgagagcacccgcccactgactctttctctcatgctgcagacccactccggatacttctccagcctgtacccccatcaccagtttggcccgttcccgcatcatcactctgtaagtgccccctcagttcagccgcacctgccacttctcctggggctaggcccacttggcccttggtggccagtgaatgttcacaatgcagatcttgtctcctgtggttctggtttgtcctgggagtgacacacctcaaagcctgagcacgccaaactccccagcacccgagtgctcttgaggttctgcagaggcctaggccgttgctgttgcacctgtggatgctcgcacacctcacaggtcgcaggaactgctgcagatgggcaagcagaaggccagatgagcacgtgctgttggcactgaatagcagagtttccaaagatctttgaacaaagtctagcaaatgagaatgtcatttgcacagaccccacttgcaaggacccctggcagccttgcccaagagcctctgccttttgtcacagggtcccaggagggatggttcaccccatcttcctggagccagtcaccgtgcagctgg

SEQ ID NO: 109849 - DNA, 1034 bp, Homo sapiens
tttttttttttgagatggagtcttgctctgtcgccaggctggagtgcagtggcgcgatcttgtctcactgcaacctccacctcctgggttcgagctattctcgtgcctcagcatcccaagtagctgggattacaggcatgcatcaccacacccagctaattttagtagagaaggggtttcaccatgttggccaggatggtctccatctcctgacctcgtgatctgcctgcctcggccttccaaagtgctgggattataggcaggagccactacgcccagccccctgagtcatttctaaatctcttcataccacctctttagttatatcatttccccttaaactgaaggaggggactgacactgagccttgtgtgttgagtagcctgaagatgcagtatgagggattgtggcagctgtcagtcacatggctgcgccaagcagtaagaatagcttgggagtttcacatctctgtatttttgctgtcagatctgagaatggcccaatgaggtacaaccaagtggcattgaggcacatcatcatttcttgggagagaggctgtacatacagccccacagaagataacctcaaacgttaggctaccctcttagtataggtaatataagtggggagagaaaaagggcataataaattagaccaattctaaaatcggtaatctaggccgggcatgatggctcacgcctgtaatcccagcactttgggaggctgaagcaggtggatctcctgaggtcaggagttcaagactgacctagccagcatggtgaaaccccgtctctactaaaactacaagaattagccaggtgtggtggtgcacgcctgtaatcccagctacttgggaggctgaggcaaggagaatcacttgaaccctggaggcggaggttacggtgagctgagatcgtggcactgcactccagcctgggcaacagagtgagactttgtctcaaaataaataaataaataaataaattggtaatctcaaatataggagtcagcatgctacaacctgagggccaaat

SEQ ID NO: 109850 - DNA, 1062 bp, Homo sapiens
caagatatgtagacatgcccaagtgtggcagagaagccttgaaggaacaccatggtcaggttaagatgtggcacccacctctgatacagggtaggaagagcctgggcagagctgattaggagacgctggtgccattaagacaagagagggaggttgacccaggcgtgcgggcctctctggtctcctcccttcatcttttttctccatttctattcccagcaacaagccaatctgatcccagggttgaacctcagcgcacttggcatcttttcaacaggactgtccgtgctatctccaccagcagggccccgcggagctccccccgctgccccctaccaccccttcactgtaagtagctcagcttgtggaggtttgcttatgcgctgggcacctccaggcagcagcatgcctctgctgtgtggaatcagaacggaagctttcatttaaaggccatgctcgagtagagatgaatccaatgtaggttgaactcaacatttcttaggacttcttcctaatgggcaacttaatattaaaccaatcctctaaacacgtgttcttaaatatagtatgtcataactagcaaagaaagaaactcatagcaaattcatcaactagaagctaatttattatagaaaagaacttgttagctcaaataagaacatttcatgagtgatggtaatttattaaaatatatagggtacctggatgattcttgaagagagatatatatctacatacatacatgtgcagtttctacctatgtttacaagtcaaatgtattgtcttattaataggcaatttttaaaagaaaatattacatacattgtttatgtctaaacacttagcacaatgcctggtatttagtaagttctcaataagtatttgttcacaacagaagaagaaatgtgaattttgtgagtgttttacttattgctttcattcacaagcattattcaagatcagtacattaccaaattgggggctcaggatacttgacagctttttttcattcctaatttttctctacgcagactgcttatttttaaaagcaaactttccccc

SEQ ID NO: 109851 - DNA, 1082 bp, Homo sapiens
ggcattcaaaaaacaaacaaacaaacaaaaacctttaaaataattggccatcagcaaaagtccagctcagctcagaggagtaaatttttttcactttttaattagatttttttggatgtatacaaaagtgaatggatgctccaataagtcctcatatacccataatccaccttttgcagttatcaactcaccacctgttttgtttcctctaaaccctcatccacatccactttccatacctgttggatgaccttgaagcaaatctcagacctgataatatttcttagagaaataaatgtcgacaaagcactctttagattaaacccaggtccctcactgcagcactttctgttgtaccctctatactccaggcagtaatctgtccccatctcaccccgacccccaccttagcagcccacgtcacatgacaattatgaggtgtgatgagaagagctagagcaggagactgcagtggtgtcttctccccatgtttggatatatttgtggaagtatcatctgacaatctcattttcttcctgtgggttcttgacatcttgtggtaaacatctctttctgtgaacacctggaaaagctacagaagggcctgagtgattcatacatcttcacctgagcttaccacttaggttcattcatgtctgtgccaaagtcacgcactggtaggtgaataacaaaattactacatcttatagacaaaatgaggtaaagatgaaggatacgagcactgctattccaaaagttctaaaaaaaagaaaaaggcaagttacagtgtgaatgtagacaaagattagaaaatgttaggaaattgcttcatgttcagggagacaaagatggaagcaggttggacacagcctggaatgggtgaccacgttcctctgcctctgaagagctgtgtggctaaacccacccccagtctgtgtgaccatccccatgtagaaatgtaagataagcaagcaagcaagatgatcacaaagccgacaactaaatagtaaagagacaaagttgtaaaccatcccgaacctggctaatggagtttacgtatgtgggaatttacatcatgtgaa

SEQ ID NO: 109852 - DNA, 1020 bp, Homo sapiens
gctgatctttagagttctcacagaggtgttctggtctatctcttgttaatttgaggtgtgtgtgagggggaaagagacctgtggcttcctagtctgccatcttgctaacgtcactctcccttgtacctttttttaagagcaaggagaacattcttcacccaatagagttcttgtaataccctcattggccagatcagcctcatggatccacttccaaccagctactacgagggagtagaattaccatggtttggcttatgttaatcaaaattcatgaactggggtcggtgagggacctgacctctcccaaatcccatcatcacttggtacctgaacaaaatgacttccatttataagaaaaaagcaaggtaatggtttttgggagacaaccgttatacgtatctgaagtgttaacttgctgcttgtctcttttagagccgaagagattcctctgaaaatcttggcacacaatggcttggttggaagactgattggaaaagaaggcagaaatttgaagaaaattgaacatgaaacagggaccaagataacaatctcatcgtaagccacttactcagattactcatgcccaataatggaacacctgagcatttcgatacgtctagttcattcatctacttttccctaaaatgggaatataatcataagtgatgcaattatctccatcatcttttaaaaaaatacataaatacttaccaggtagacatttttcactatggatgtgatctaaatcactggtaagatttgaaataagatggcagggattctccaccacagtgtgttgggagggaattgagtcttctctctctccgccaaaacttgtttgtgatttttttattttttgggcattttatttttcccgttgaaaacaaaatttctcttttcttctcatgggtcagtttgcaggatttgagcatatacaacccggaaagaaccatcactgtgaagggcacagttgaggcctgtgccagtgctgagatagagattatgaagaagctgcgt

SEQ ID NO: 109853 - DNA, 1033 bp, Homo sapiens
ggcgcatgcctgtaatcccagctactcgggaggctgaggcaagagaatcacttgaacttgggaggcagaggttgcagtgagctgagatcgcgccattgcactccagcctggtcaataagggcgaaactctgtctcgaaaaaaataaaaaaaaagaaaaaggtaatagttcatttagtgttaactttaccttgtacacatttgtaagtggagatacaccaacaactcaactccacagcccttatctagctgctgcttgggtggacctctctacatgatattactctattgcttttattaaattcaaaaggtgctgctttgtaataaatttacaagtcctagacattaacctagtaaaattgggttaatgctactaaaaatatgtgaaaaggatagtgtatttcgtgtgtcattttaagaatataatagtggtatatcatttatcccctatcaaattgataaatatctttaaataacagcgctctgtgcatttgaagattcaaggacacaaatgctctctcctaaactgctatgggatcataaatgttgaaaccattccaggggcccactgggcaatagttaacaattctactaggaatttgtcctgtgtgcaaagttgtagttgcaaagatgccaatggtgacagtgtgtgtaactgtaaaaggttggatacaacagatatctaactataaaggatcagttgcaaaaactatggtaaatcaatagaatgttaaacagtcattaaaaattatactgatactgcagttgagtcatgtgtaaattatactgaaaggtacttagtgacattgaaaaatgttttagaatattaactgtttttttaaaggttagaacatagtatgtacaatattaacccatttttataagcaataatatgtttatatttaagaaagacagtaaagatagtggattaggattttatttgcacttacatatttctgaattttcaataatatgtatgatgattaaaatgagaaaaaaatgagtcataattttatactgatatttataagagtt

SEQ ID NO: 109854 - DNA, 1049 bp, Homo sapiens
tatttgaattccattgagttctgtgtttttaaatgttttctaaaaagatgcagatctttgagctggatatgtgccacctttgacatacccatggagctccacggcatctgagccacctttgacatattggtagagctccagggtgttcctgccatctttgacatgtcagtggagctccaggacattcacaccgggatatttgtggattgtgtagagacttgaaaaatgttgagccttggcatcaaaaccaagatgggagctgtgtcttgacatgatcgggaatagagggcaccatacctgtgacactgtgtctcctagactctgctttgccaaacacttgggaccacttttacctagagcttcctccatgcactgtgaagaggcagcacaagcctataccaaaacatcaattttgtgtgtgtaacattaggagggaatccacctcagtgagagcagcagccgagagaattgtctgagagtggttactcaatagcacctggtttgggttcttttctccaatccccatcctctttccagtgcccattcattacttcagggatggttaattttgagcttagctgttaatggacatgagatcaagtctcttaaaaaacaatgaggccaggcatggtggctcatgcctgtaatcccagcattttgggcaaggccggaggattgcttgagcccaggagtttgagaccaacctggacaacatagggagacccagtctctacaaaaaaacaatttaaaaattagctgggaatggtggcttgcacctgtagttccagctacttgggaggctgaggcaggaggatcacttgagcccaggatggtaaggctgcagtaagctgtgattgcaccactaccatccagcctgggcaacagagcaagaccctgcctctcaaaacaacaacagccggatgtggtggcacatgcttataatcccagctacttgggagggtgaggattacttgaagccaggagtttgagaccagcctgggcaaaataatgagacccccatctttaaaagaacaacaaaaacaagttcc

SEQ ID NO: 109855 - DNA, 1020 bp, Homo sapiens
ctgtctcaggagcagtgctgcaaatgcccagaagatacttttcttcctgccaacctcttttttatcttctaaagcatgaaatactatgatttttaaaaggaaaacagtggtacctaaagctgatatcttatctagctctttaagagtcccagaaaagtagattccaaactcctgatgtgacaggcaataatacatgataaagattatttttgccttgacctagaaaacagaatgtaaattcagtcatttactgactgcgaacccttgaaaaagtcaaataacctcactgactcagtatgcacaagtgtcaaattgagagagaaatttctacccttcctctgtcactggatagttgtgttacccaaagagaacctgtataaggcatttgtagacagcagagtcatacgtaagctgaagggattgttcaagttcacttaggaaaaattgcaaacaacccattttcttgtatatgatctattctgctagtttaattaatagttttaaagcagtaattattcagatattattcagtttatgctgctgcctgcccatgcccaaaggtgaagggaaagagctcagaaagaagacatgatttataaggattctatttcttagttcttatttccttcgacatggaaagaagactccccctgcttttttttttgaggcggagtctcactctgtcgcccaggctggagtgcaggagcatgatctctactccctgcaacctccacctcccgggttcaagcaattcttgtgcctcagcctccctagtagctgggattataggtgagcgccaccatgcctggctaatttttgtagttttagtagagacagggtttcaccgtgttggccaggctggcatcaaactcccggcctcaagtgatccacccaccttggcctcccagagtgctgggatcacaggtgtgagccaccgtgcccggcagaaaagaagacattctaatgattgggtgttgtaggcaagatggtcttgcagacatgaacctgtaaaagttacta

SEQ ID NO: 109856 - DNA, 1094 bp, Homo sapiens
agtctgtggaaacagtgactctatgataccatttcctagctgctattacattataaaggtactgtgcagaaataggcatttaaagatattaggttcacttttagcaaaaaaaaaaaaaaaaaaaaaaatctaaaactacgagctaggaaaaggcaaggagttggattgagtaaccaactctaattttattgttttattgaaattaagttctcagaattgctgagatcaatattgtcctatttttgttctgttcactactgtaccccaacacctaacataagtgcttagcctataatgggtccttagtaaacatttattgaatgaatttggaaaagcttttagtttaatcttagagatcatcccattctccagaatccaggtgaaatgtctgttaacctccagtcgaaaaatttgggtagagggggtttggattgttcattccacctgaccctcagttaggtgagatggtgctctcttgtgtgaaatgggagatactctttgatttacatggaaagagggaggagttcctctttgagggaggagcaagtgatttggccaaccctctcctgtgtttcctgctctcttggtagatttagggctatattatagatgaatttaattttccttcatcaccatgacgatcatgaataagatcaacatctgttataactggtgggaatagtttcttcttttcagaagtaaactgctgtcactttaacactcataaactggaaatgaaagaaattggcttgtttgaagaccagtgtctttagtaagcacgtgttcctcttacagtcgaaagacagaatgtgggatggagtgggccaggaaaaagaagccagcgcccagcagcaagtgcccctggggagcttgctgattgctgcgcacatgctgtgctccagacactgcttgggctgaagaggaaggaaaaaacagacacaggtagtaggggaggaaggaaagggacagattcaagtgctgtttggagaaccaaagagaacaattttttggaaactaattgacaagatgctgaaaggatggcacagttggtgtttgggcatgtgaccctcttggcctttacaaagatggttttg

SEQ ID NO: 109857 - DNA, 1043 bp, Homo sapiens
agtgcagtatacagaaaagaacaagagctctggaatgaggcatgtcagggctggaatcctggctccatcatagactagctgcatggccttgggtaaaagatttatcctttctaagtctctgtttagtctgtgtaaaatgggctgccagtatctcatgaggggattctaaatattgagagggcatatgatagacattcagtaaatgcctcttgccttccctgtgccaactttgtttatcctccactccatctaatttataatattcaaacagtgtcatgattgcatttttagttttattaagaaattgaatttttaggaaaaaagtaaatataggaagaggaaggattatgatgctactgcttctccagggatttcaagtaaagtctttttcacaaaaccattactcttcctcttcactgtttctggggccccctgaggtgttctcatccacagcactacctttttgttcacctgttcaacctgtgagtaatccaattactgttctgtctttgaggccaagagcctcagtccaagccagccatgttcatgctgtgtctgccccaagtgaggaggctaaggctggtgcatagcccgctctgtgaggcccctccccacagcctctggatctgcccagactaaccttccggagggctctgcgtctcccttgctgttcttaacgatctccattgctcctgtgatttctttttctttttcttttactttttttttttttttttgagacggagtctctctctgtcgcccaggctggagttcagtggcatgatctcagctcactgcaacctctgcctcccaggttcaagcgattctcctgcctcagcctcctgagtagctgggattacaggtgcctgccaccacacccagctagttttgtatttttagtagagatggggtttcacgatgttggccaggctggtttcaaactcctgacctccggtgatccacccgccttggcctcccaaagtgctgggattacaggcgtgagccaccgtgctcggcctcctgtaatttcttctgttgtttcc

SEQ ID NO: 109858 - DNA, 1108 bp, Homo sapiens
gtaattggcaaagagtattttaatagccttttcagataattatggatattcttctttgatactacaacaaaatttgacaagcagtagtttcttaaaggttagttgccatgtagtatctgaaagcatatgaacgttaatattctgttacattaaaattttttactaatgcagggttttgtagcattatacattagtcatttggaaaatattgagtcactgggttattcagatcttccggatgttgatgttgcaccatacaataccaaaaaattacattcatcactatcatgacgagtattgggaagctgcaagctcataatagtaaataaaagtattccaaaattctagttcttaagaggtcaaattttatcattggcaacaaatactgtgagttgttttatttgcagtgacaggcggactttattcatttcaagaaaaatgtgtgagagctacccagatctgaatggtcatcactgtctgtctgttctgtcaagtacaaatgacatacccaggaagaaagtggccatttcagctcccaattcaaatgatcacacagttgcctttcctgagacatcttacttcaggatgcagcaatagtgttttctgcatactttccattttgtcacaccaaatattttaaaagatctgcattccagggtcaaaatttttgtggaaaaaaaaaaagcagtaatctttactgctttgtcaaggacagttttaagtgaagctggctttccctcctccactaagagtacacaacagtgagcgtacgacttggtgcagtgtggagccactgccttcatgcagcctcaggcactggcagttttacccgccattgcttttgcaccatgagtgaaaatactaacacgataaacaaggcaaataacatcttggtatgattaggaaaatgggttttacctaataacccctgaaagggtcttgaggattccaagggtgtgcaggtcacgctttgagaactcgtggcgtagtggttaagagcatgactcggggttttgattgcctgcgtttgaatcctgctcctgctgcttatgagctgtgagcctttgggaggttattggaccttttcgtgactgtgtactctctgtaa

SEQ ID NO: 109859 - DNA, 1028 bp, Homo sapiens
aggtgagtgaattatttagtccttacccagtttttaatttttcttcatgtctttcctgttccattcatagagagacttgctaaacttttcattttcctaaactactgtttgtttgtttttaatgtgcttgttgcatttactttatttttggctctaatttatttatttattattattattattattgaggcggagtttcgctcttgttgcccaggctggagtgcaatggtgcaatcttggctcaccacaacctccgcctcccgggttcaagcgattctccttcctcaccctcctgagtagctgggattacaggcatgcgccaccacacccagctagttttgtatttttagtagacatggggtttctccatgttggtcaggctggtctcgaactcccgacctcaggtgatccgcctgcctcggcctcccaaagtgttgggattacaggcgtgagccaccgcgcccagtctggctctgatttattatctgttaaattttaaacacatagggctttctttgtctgcctttgctaacataggacttctggtgcttagcatctagtaaatgctcagtaaatgatgatgagtgggtactgacagtcttaaccattcctcagtttccttctccctttgactgtggagcaccctcttttccttgggatcaagcttcctgaaatatacggaaatggattgagaaaatatggcttatcaatcactttacattttctcaggttcctctttagtaaaataagaatgagaatagatgatttccaagattcttactttgtagggacaagggaatcagatgattgtgttctttggcagagcctagtctgtgaaatgtcttatgactatcagctttattgtatcctcccctagttcctagatgaatagggtggggaagcaggagaatgcagtatagtggaaggaagggaagtggggtgatgaacaacaggataagagaacattgtggtgggcaggttgggggagggattaacaggacagtagcaacattccagaaagaagctgt

SEQ ID NO: 109860 - DNA, 1073 bp, Homo sapiens
gggatgttccccacagaaaggtaagcattctctgacctttgttcacactacataatagataagccaggacagtgattctcagtgtggtcctctcactgtcaatggggaccttgttagaaatgcaaattctaaggccccaccccagattcacccagaaatactggaagtggttcctgcaacttgcttgttaacaagtcttccagggacttcttaagtgtgctaaagttcaaaacaactgagctaggagatagtccttacctacaaagagcttctattcttgcagtaagtccgcgtgggtgataaatgcccagatatcattgtatttttggtgtacttttaatttttgttaaagatgtgtgtttgcctgatttttctcaggcacaggctcatttctttctgggccaacctaattcatgctcttggcttggtgtcaaggacgttttttaacacactgcaactttgttaattgaaatagtgcctttcaatgagagatcatatcctggctaattccaagtctgattgcaggtcctatttaactttttacactgggtagtaaaacaagttttttctcaaaattacccagcggaagaagttatgtccagaaaagagaagcttatattagtgctgctgcacctgggaggaaatgtcatgggagttaccagagagattcagggatagatttggggatagactgacacagtgtgaggactagaggccagttcctactcagaagagcaattagctcattcatgaattgtttatacttcttgtatcaactttaattgcttgtttgaacttggactttagcattcattataattgttactgtctaatcaacaattgattgtgtattttaattcctctaagtgagttgaatcttcaagtgatgaccccaacttctcagtttttttctgcctctagacatttatctttaaggccaggagcctgataaataaactagtagacaattatcctttacaacagagccttgacatgtatatgtgtaggttaaattactgttctcagtaaaatcaagccagaaaagagagaatttttttttcttttttttcttt

SEQ ID NO: 109861 - DNA, 1024 bp, Homo sapiens
ttttttgtagagatggggtttcaacatgttgcccagggtggtctcgaactcctgagctcaagtgatccatctgtctcagcctcccaaagtgctgggattacaggtgtgagccactgcacctggcatcagactcttttaaacaaccagatcttgcatgcactaactgagtgagaactcacttatcaccaaggggatggtgccaagcaatttgtgagggatccacccccatgatccaatacctcccaccaggccccacctccaacattgggaatcacatttcaacatgagctttggaggggacacacatccaagccatatcagatcctgaaatgcagatcttgggagaaggatgctgctattgttttattaaatgtaaatggaaatcagaagggggaggtgggtttgaagagattttaaatttgagatactgggacatcaagaggaaatgtctacttagccgcaggaagtgatggctgtggcctgctggtctctttggattgcgcagttgccttatcttcgtgtgacacagaggcagactcggccaccccaggtatgacttgttttgggaagtgataaataatatttcacagggatatatgagttgattttttccctgtatgtcatatatcatcttttctgcatctttccctgtaacgttggttctcccaagatgaaagaccacatgctttgaggtgagaaacgagaagcagaagacacagacttggaggggctgagtagagggggcagaaggtttccttacaggcagagagcaccccgttccgcaagtacagttcccaggagttatatcacctctaacaccagagaaagcagtggaggccacaattgtatgtgtttctagaggtgaatgcttggtattggaaaggtaattctgacactcacagtagttggttttatgagaatcctttgagaagcacagcgtaaaatggaaagatttgaacttgatctcacacaaggtctttgattctttaacaatattaactaattaaaatgtatcttgtaaggc

SEQ ID NO: 109862 - DNA, 1001 bp, Homo sapiens
acttttgctaggatagagatacggctagaaccatggagtatcgtgagtgttggaagaacacattaagattttattctgtagtctcctgagtttcttttatttatttatttagagacaggatctcactctgttgcctagactggagttcagtggtgtgatcatagattagtaaacttcaaactcctgggctcaccttcccacctcagtctctagactagctaagactacagatgctcaccaccatgcctggctaatttttgttttaattttgtagagatggagttttgctgtgtttcccaaactggtctcaaactcctggactcaagcaatcttcccacctcagccttctaaagtgtcggattacaggcatgagccaccacgcccggccacctcctgagtttctgatcagcagagaaagattatcaaaacacgtggccatagatggaatggattgatgtgtatgggaggccagttaagagcttatagatatgtttaggtgttgggtaataagagcctgaactaggatattggttgaggaagccaaaaaaaaagaggcagatgggagaaatattgtgcagagagaagaaacatgatttgttgagttagtgactggatattgaagcctggcaaaggtaagaggaataatcaaagatcattcagtgatcctgtgttactctgtttttgtattgctataaaagaacacccgagactgggtaatttataaggaaatgaggtttaattggctcacggttctgcaggccatacaggaagtgtggtgctagcatctgcctggcttctggtgaggcttcaggaagcttccaatgatggcagaaggtgaagggagagcaggcgtgtcatatggcaagagcatgagcaagagtgagaagggggaggtcccagactcccttaaacaaccagatcttgcataaaccatatgagaactcactcttcagtaagggtatggcactaagccattcatgaaggatccacctccatgatct

SEQ ID NO: 109863 - DNA, 1782 bp, Homo sapiens
gtctaaatagttttattgctattcactggacctggtagtagcttcctctttgatagtagaattaaatatgcttagtggccgtgtatagcaccttgggctttatttaggtgaaagcatcccgagaaggatgagtttgctacccagccatcgggttcttagaacctccacattttctcccatcttcatgtgtgcctttggttttggaaaagggatggggcagtcagatacttcttttatgggaaaagttgcatttggagacattcccatacccatgcccacaaactctcctccgtaaacctgcctcattcccttctttggcatgttccgtatttagctttacagctttgctgccttgtggacaagaattttccccccaaaatcttgttaccattataatatcttcatccctattagaaaaccagaatcagagtgtcttccttgcacccaagtcccatagaatttctttcagccaatgaaagtcaaagataagtttgacatcagtcactggagatgaagatgtggggtgaagctgctgcagtggtgtgctttggagcagcctggtctacactcccttggtcctcgagcacttctgcgtgcctttcatgtattaatagatggacctttctcaattctcctcttttccctctaggtgcaggtggagtgtagagtgtgatgtaggtacactggcatctagaaatggagagcatagaggtgggggtggcactgaaggagggcagtgtgggatcaaggggggaaggagtggtctgagattaaggaggggaggtggtgtgtttgcctttctaggcgcacctgctacttggtgtgagacaggtgaggctgtgagctgtctttggaggaggagagtacttcttagtatatgaatgtttgtatgagctttaactcaggtttactgattgaaagaaactatatttaattttgctttgtatgtatcccttttatttgggctttactaaatatagctggatgggagggacggagggggaaacagtgtgtagagcagaagttaaaacacgccagagctttggcagctttgggacagaaaaataaaactttaaacttgctttctattttgaggccatcacaagatgttttgtgcttacattcattcctaagtcataaacgggtaggaggggctgggaattaagtaaattatctcttgaaaaatactaatttgaaattgagataaaattagcaaagggaagaagggggaagaaagtaaaacactggacccagcctgtttgcaagcaaaataataaacacctcgtgggggtagaagaggcgtgccagtgtccttccagattttggcctctgctcctacacagagccccattgtctcagagctgggggcaaggctgagtgctgtgagaactgacttgacaaataaagcctgtcaggggattttgacacaggtcaaccccttcttgaagctgtgatctcagaggcaacacgatttcttactcacaggcagtagctgtcatactatgagctgttttatcgtaatataattatcacatacaagatgtggtaattgcctatttttaggaatctccccactgggaatcatggtgaagatgatctctagaaaagctctctgcggtcctgtgaaacaacctcccttctcaagacaagactccccttcctgataacctgttgctgctctgcagattggtctcttcacctccatcaagggcttcttgtctgtttcactgaatattaggaatgcttctccctaggcttcagccttgggctttcccctcaggt

SEQ ID NO: 109864 - DNA, 1282 bp, Homo sapiens
aaatttagcaagatctcagaaccagtacatatgttttaaatggttatgggaaatatgccttctatttgaagtgagctgtgcttgattcatattttttaaacaatatatatattctgcccaattctaaaaaaaaatatttcaagtagctaattcacttcttagtcatactatgaactcccaggaccttatcccacaaatgcagccctggttagaactattcaaagagcctttgatgcttcaaacccactaaccccattttgcacatttccccaaagcaaacgcactcatgcatacacacacacacacacacacaaacacaaacaacttatgacccaacttttgggaacaatgttaaagcaaacaaacaaaattcttagaaagttgtgaggtgcttaaaatagtttgatttttaaatgattgaggagcttttcccataagacttggtgcttgctgctataaataaaggcatgcatatatgtccagagttgtatctctctagtcacaatgcttaaaccgacttcaagaagtcagttgtattattttaatattattatttaatatccaggatccactgtaaccttttaaccctgttaacgccaaacctttaaaaagagtttaacttcacaaagcctataagtcagattgagaatatttcacatgaaaagcttccaggtgtcacttacctttagaaatggaatttttcagcctattattcgggacagacaactagattcttcctttcctcccagctcctcaaacactgttgacattctcactatgacatttctaatggattatcattgctgaagctgggagatggatacatagtatttgtctgcttttgtatttgttgagttttttccacaataaaaacagacaatttttttaaaaatgcagaatagctggaattcatccttaatctactttatgttgaggatagggtagtagtatttttttgcagccttatttccttgggttgttcaaggcaaggtattggaaaagttaaaaaactcaaataactagatttgagagccccaaagtgtacatattatttgaattctaatgtttctcctgagaatttccaacctgaagctgccaaaaaactgccttaaaatgtggataggtattatatttaaatatgacagtgtggcaaatgtggtgtaattgaaatgatagaggacttggaatcacaagatgtgagccaaggtctagctttgccacttactggttagatagtccgtagacatatcatgcaacctttctgagctggtttcttcggcta

SEQ ID NO: 109865 - DNA, 1091 bp, Homo sapiens
tttcaaataaagtcttatagtaacttgagatatttttgaaaggtaacactcttttttgaatattctgctactaaattattaattttctgagttttctattaaggcaaacatcaagtttccttgtggctggtgactaattcagatgcatactgtttctattcatagctccccaatcttaggtagaattgagcagatttaacatgaatagcttcctctagtttcacacggaaaaaacaattttaggaaggaaaggtaggaacatgataatacagaaatcagcgaagtaaagggtgattggctggtggctggggttggaagaaagtgaaatttttcttgttattctctttgtgatggaagatttctttccatagattagtataatttacgtgggctgtttgaagagattaccttcttagtggttcccttaaagctctttgttatgtatatcctgaagcccagtcacttcttcccacttgtttttgagtgtttgatctagacaatgtaaaggcacttttaagataaaaattattgtatttgggggactttgggagactcacttcccaatcattttgtttagaagcaaaaatgattaaacagtactttatgtcagatctgcctgtttaagggatttgagcacacctggtagcaaagaggtttaacctagtttctcagatgaaaactagaggtggaggaaggacgaggaagcagtccagggtgagctgaggagctggttacctttagcctacttctgggatgatgcacattgtcgtctaggtcagtcagcctcctcagcccatgcattaagattcctggttgcagctgggcacagtggctcacacctgtaatctcagcactttgggaagctgaggtgggcaggtaacctgagttcaggagttcaagactggcctggccaacatggtgaaacctcatctctactagaaatacaaaaattagccagatgtggtggcggacgcctgtaatcccagctacttgggaggctgaggcaggagaatcactcgaacctgggtgttggaggttgcagtgagccaggattgtgccactgcattacagcctgggtgacaaagtgagat

SEQ ID NO: 109866 - DNA, 1051 bp, Homo sapiens
tttgtttgtttgtttgtttctttctttctttctttcttttttttttttttttttaaaagaaacgaggtcttggcatcttgtccaggctggactcgaactcccaggctcaagctattctcctacctcagccttctgaatagctgggactgtaggcatgcaccactacacccagctaattaaaacaaaaacatttattatctcacatgtttcctgaggatcaggacaatgtcagcactttagctggattgttctgactcatcatctttcaggagatggcagtcaagctgccatctgtggctacagtcatccgatggctcagctggggctggaaggttggctactaagcttactcatgtggttgttggctggaggccttagttcttcacagcatgacaatagtcttcccccagagtgaataaaacaagaaagccaaggagagtgacatcaccttttcttttatgatgcagtcactgagtctgccttattttgttcattaaacatgagacatgaagtccagcccatactctatgggaaaggattactcaataagttgaataccaggagatgagaatcttcgggagccatcttggtttttaataattaggaaaagtcaacaaattgaaacgatacttaatttggggcatatactgaaaagtaataatccccttacatttataattaacctcttttggagtaaaactggaatttcttataacagtagtaataattactgattactgaattcttttatgatccttactgaattttcacaacattttgtagaatgaggaaggaagatactgttatccccatttcataaattagagaactaaggcctaaattgttctcagtgctttaggtggggtcacatttttagcattcaacctcaggttttttttctttttcttcacctttctttcccctgaagagtgattcaattacttcaccttttataaaatacagtttaattgttccctttctgtattatctcagaaacctgatttttttcagtgcctaattgaaaattttaaaacactgcccttctagtatc

SEQ ID NO: 109867 - DNA, 4545 bp, Homo sapiens
aaaatggttcaccttattaacagaacattttaaacctctttgacacgtgaaaaagtcagtgaaagcactttttgatacaatacttaagtatcttatgcatttgttacttttatctcatgcattttgttacttttttggtttagtaacataggacttaagatacagttaaaccaccaatgaaatgagatatataagaggttttcttctagatagacgccatgctttttgacaagaacataattttatataatttatgagataaaataattactttcctcagtcaagaacctctaatagagctttaaaaattaccaggaaagacatttttattactatatcttttctttctctttgaaaaatgaaacaaaaaatcgagtggtgattctttggacaggttaacctcataccaattcattaaatagagggtgtttttgaaaaagctcatgtgaggataggctatatagtatttttggattacatggagaccttttactttggtccctactgatccttgtgatttttaacaatgcatacttcgaaatttcagtggatgtttttctttatcattgtatgaataaggttttgaagtacaatgttttgtgcccctttatttaagagagtcagaggtagatgataaaagcagtttaacactgaaaaaatgcagttgagcctcttaaattattaagaaagaaggaagggaggagggaaagggagggaggagaggagaaaggaggagaccatagaagtgtaggtgactaaaccatgtgtacatcttctgcattttctttctatacttccagagcacgtggcaaagactggtcctcactgatagtgtgtggaagatagtaagtgattccaacggtgacagcaggactgggagtctcacacaacatattcttttctttgacacttaaaaactctgagtatgtggttgccctgccccaaaaaaggttttgcatttctttctctaaggcctcacaccggccacttcctctctcattctccttctcctttgcatttccttggggatggctggaaagggctggcagtgtggtgcctggtgtgtaggcctgcctgcagccccattgccccctggttggccgagggttggggaagctggggaggcatgtgtgtgcttgctcaatgtgttggaatgtatgggttctgtggcatacacttacttggaatgtgcagcagacacatgagcttcgatggttgtaggggtctaacgttgtaggcttttgtaagtggttgaaaatttgggttacttttttcccctgaagtgcagttgtatttattctttggaaagggaaaacatctttattttttgtttttcaaccattgacggatagaaaataatgttgtggatacataaataatctggcctgtctcctggatccagctgtactactgtttacccctttcttttcgagctgatagtgatgtcttcaagtcatggacactgaatttgtaaactaagccttgtaaaactccctgagttgtgccaccactaaagatgatgaaatcaaggatctgagaaaccaaattttaagctcagatattgaaaaatgtggaattgattctcccttttaaggaatagagaacaagatactagttgcttaatatttaaaatttttggctgtttattattttttaaaatgtttatatatttttcttcttaaaatatttgagatgacaaaggtactggttactcaattatttgaattaaagaagacagagatttagatttgtaaagtaggtaagtcgaaaaggcattttaagagttacaaagggcccaggaacaggtgattggttctaatataattatttctacatcacgagagtgttgccagggaagagttagctctttgttcactgatttgcatattaatggtatgttgtgtctatttcaataatggtttcaagaaaatgatttagatattgaaattgatcagtggctttagttcacaagtatcgattgtggtcacggtgttaatacctgccttataaatttctaggccaacattgtatcttttattctctatggcagtttttattaaacactgttccatagagccttaggattccaaggagatgccaaatttatgggaaggacgaatggatgtacgtacatgggaatcctggcttcttacccactgcccaatacgaagacaactgcatttgttgctgttttatatacagaattggagttgagtctaagatttggtttagaaaaggggtttgctgctttaaaacacagtttgtaagcacccaccctacagtgtgtaaagtgtgtaattctgagtcttcagttcattccttgatttgacccaaagccctttcttgaggaaagtttagaccctgcccttgttactcctacatctgctttccatggaatagccctctatttcctgtcactttcattttggtaacaagtatctgctttgccagctgcatgccagactactaaatctatggatttttctatagtcaacaacatagaatgcgtgcccttcaggaactttccagggagctccttggccagtgattgcgctctggctcttggcagagccattagagtcaactgcctttgaagagtgatgggcatggtgacacgggacccattcattcatcgaaaacaagtttttgcttcaggaggtggaagcagggttggcttgctaatccttcttgaggcagagcagccctcctcttatctgttgtgtaaggtggggctccacgaacacaggagtgatcttcaaaacattttcagttggttagaacgaacaaatgtgctaggtcacaagccatgatactttaatacacaccccctcagtatcagtcctacatacatgatttttgttcaaaaacaggatattactttaaaacagtaaaaatactgttttctcagtgatttcttcccctatggccaaggactcttggaaagtcctgaaagtccttggaatttagctacgtgttgttaaagatcccctgagaggttctgatgcccaggcagggagagggggagagagagagagagagagagagagagagagagagagagagagagagacaccctactctgagcaccgtcccctgccatgtgctccatcactgtagcctcccacagactggccttcagagacccatggtttcgtattttgcacacaacttttgtagtaagatttttgtaagagatcaccgtatgtttacaggggtagatgatgtaagtggtggcaagggtgttctggatagtgcaggagggacagctattagttagctccagccaactgctgccatttggaaatgtagggccagtgttcccaaatctgatttttcaagaggaggtggaagtcagagttcttatgttaaatatctgaagttttaaatattggcaacaattcaaaattttttatggacactgaaggtcaaaaaaagacagctgtgggttgaatctggcccacgggttgccagtttgcagtctctgccacatgaaaatctgtatcttctataaaacattgttgaagacactgtcctttatgtttagtatcccttacacataggcttgtctatgagtgagagggaaaagtccttttcttgataggcaggattaactcgtatggatcttatctaatgatgatagctgtttggaaactcaaaatcaaattaggtcttagttgcagtagccatttttcatcagttattattttacctattaataaaataataattattttttccattataaagtaccctacatttttatctttatgtgatgatcttattgtgtttctgttatatcaaaccatctgaaattcttttgtaaatgtagaatatgtatatatatgctgaatatgtgactgtcctataagtttatgtagtatttcataatacatgtttatgaaaaaaataagcctctattttcatataattggaggagcaggtttccacatcaatctaaattataccctctccaattaaacactaagccaactatagataatgttttaagccactttctaagaaaatttgattctcatatgtccagaaaacatgttgtaaagtaaaaacttgagtagttctgttttttttgtttgttttttagtttttgttttttgttgtttttttttttgagacagagtctcgctgttgcctaggctggagtgcagtggcacgatcttggctcactgcaacctccgcctcctgggttcaagcaattctcctgcctcagcctcctgagtaactgggcttacaggtgtccgccaccacgcttggctaatttttgtatttttagtagagatggggtttcgccatgttggccaggctgatcttgaactcctgacctcaggtgatctgcctgccttggccccctaaagtgctgggattacaggcatgagccattgcacctggccattctgcctgttaaatgtctgatataaggcaaatggttttaaaagcacacagtgtgccataggaaaatatagtggtgaaaagtggtgcttttaaatagtttgaaaagtgttttggttactgctgcacttttctgta

SEQ ID NO: 109868 - DNA, 1027 bp, Homo sapiens
ctgttccagcctctttgacacattatttcatttattccaaataataattttgtgaaaaataggacaattgatactatctctttttttggatgaggaaactcagccccagacaagcttaataatttgtttaggccacatgactgttaattaagtagtagggctagaacccaggtcttttgaggtccctgagtctcgctccactgtacttcctccccatttaacgttttacattaaagaagtcagctgaatgtgttgtaaagttcgaagaatgctgttcgagggtggtagaaatatatgaaaatacatttgtgaattgaacctttgcaatgatgctacatcagtctgagtgatctgtactttgctatagtttttagaaaaaaatagttagaaatagaggtaattttaaaggtagcattgcacgtcttcccatctctgtgcttgcccacagacagaagtggggaatatacctaagcaggttgtggggttgttgttgttgttatgttgcttttttcggcagttgtgttcctgacataacaagacaaacatttctttcaacatctgagccacacagattagacagcgaactgtcacccgggtcaagactatgtgccatgtggtgaatgaaagtctagctcaaggaatctcctgggtgggttcttcacggggttcagacagcctgttgcaaaggtcagggctgtgttgtggtttacgtgtttccctggtaggaactgccaggtctttcccagaggtggtatctttctctacgtcactttctgtactgaataaggccttgggcctctcatactgtcttgactatggggtgagtgttaatagggatagtatccataaagttctgagttctttattaattttataatcgcacaaaaaaatatgctaaataatgaagcatgtgaagtacagttcatttcccctcaactgtaaacttttcctgcatttatcttcgtttcctttaactcttatggactgtttatggtgctggtgggagggagagaggaattatcaagga

SEQ ID NO: 109869 - DNA, 2317 bp, Homo sapiens
gtttgcttgctttttttcaattcaccaaatacataaaaattttaaattgtaatataacaatttataaaactgtttaatggctaaacacctaaacattaattccaaaaggtgatttgtgatatgtagtgcagctgtcaaatggtgcttttcatgtgtttccttatacttatggccaggtataagatgaccagtaagagatgttctaagcattttgttttttattatgttaacctgagattatcgtttggtagacagaagatgagaggatattagtaatatttgtacaaagccttttatacttgatgatctaaagtgcaatatgttttctttaagagaaaaagcatttaacttttaaaatatttttaaaagaagatttagaacaaattgcatatcagaattatcatttcacaattattttgagtaaacacatggtttttgtgtttttttaatgtgtggaggttgctccagattttcaagtactgtgttgaggaaatgtaaatgattttgaattatgcataaaaggatagtgacttaggcacatttattaaaagtcagaaaagctatgaaaaccagatttctacaggaactgtttatatatttgatactttcaagcttttctaaatatttgctgtctgtagctgaatcactcttccaagtcctctatgaaaccctcaaaagtagatgagcaattggtcagaattgttagaggatattatttgagctaaatgtttcctctctctgtttcagtggtgtatgtgcaagtgtgtgtatatgttttttgttggggacagtttcaggtagatggtatgaagaggcagcaggagatctttaattgaacaacagttgctctggaattcagtcttgacaaggctcaagaaagttgcttggtgattgaaacctgtggcaaagggaatccagtgcagtgatatttgccttgagtgatgaataactcttgtaggtggttaaccttgtgaaagccaagtcacaggtacctggagtaggttttacagtgagcatgctactgaaaggaccatcagtgcagcatcttccctccttccttttcacttggctatcccctgtcacaaaagattctgtgaaggctttgatgatgttataagccatttttttaagtgtcagaaaattcaagatttgaatatgcacttccatttagaaattctatactttgaaaagcaatatggtattttgcataacacaagtgctctcagtgagtaaacttcattagaagaagcgttatattgaaatagtttctttggagacttaaaaatgttgaattatacatttcaaaatatatttttaaaaattatatttaaacatcacaaaagtcttcagtgttcttttcagtgttagaaattagtgggcttggctaagctaatttttaaagagttcatgctctaaaactttcagtcaaaagcattatctctcaaaagctatgattaacttcttaaattgagagatgggagtgttctgtttaacaaaacatgcccccagaatttattagtaaagttttatccttcttatattcaaattcatgttcaaattattttgggtattcattcaaaagcagtatcattgaacaaataatagcaaataaacagcaaacacctaccaatgaagataagtctttcctcccatttatcatcaccattaaaacattttaaatcttttactttataatttgacttcatgcttacaaacttataattttcatttggtggcatggactctatgggttctattttaggcagcaaaattgcagagtgctcagagcattatttttaaggttttacttttcctgttttgatcatggactttagtctggtctctccataaaatagtgaagaaaaattattttcttttgtagaaaacttcagattctgttgcttggctgccaaagggaagaaggaatacaataattatttctttaatttggtttagagtttgatggtatattgagatagaataagtacaacagtgaaaatggatgcttttgcattaataggaggcattcaagcccaaaagctagccctgttccatcatttgatagttatgtctcctccccaagcctctgcttttcactaaataatatctgtatttttgagatacattttgtttattcctcattatttatctgttctacactttatttcttaaaatgtgaacattcagataggattttcccattctgtttagtgtcaaggacatttcataaataaagcagatattttaataagtctgataaatgaaaattaagagttctgatgtatgttttgagctttctcttatttacccatatcaa

SEQ ID NO: 109870 - DNA, 3874 bp, Homo sapiens
caccctcctcgccttgtcccgagacacggggcgcccacctttctttctactgggaaccaagttcgcccagctcgatccgggtaggagaccccttgggggcgcccgaaggcggagcccgagcgtggagttccgtgcgtgccccccctagacccccgcgggcttgatctaagcaaggttctgagtgctttaatttctgttttaaaggtaaagtggaattgcatgggaaaatcatggaagttgattactcagtctctaaaaagctaaggtaaatatactttgcttagttttttttttgcgattggccttacgtataagtaaaaaacgtacacacagctttaaaaaacgtgctcttggtagtttttaaaggggcttttgtttgttttgttagtggagatacatagtttagaaagctactttttttttttttactttcattatataaggtgtttactgttcttggaaaatatctggtgcctaattgggggtcggggtggcgaacaccagctatgttcagttcgctgggaccctgtaacttgtttatcaaaaattgcctcccacccccacctcccgcccctacccccagcagaatagcagcaaatgcttgtcaagacttcctgtgagatgtgaagagtaaatatttactatgtcagctaaattgcttaactaaacttagcgattaattacttttctcttttagatagtttaatgttgaatagtaaaataattcagtaaggggtcaatattttgcatagctttctaaagaagtgggttgtttggattggatggcagttaaaagccggactttttcagtcactgagactactgagtatagcttctgagcattttgttgttgttgcttgtaagaaatgtttgcggctaaaataaatacccttgtgaaatctatagttatatttaagtgcactgttgttaatgacggagtaacaagttttgtggaggttggatttctccacagtgatttgctaacatgagaagagaagagaaaacatctttgtttaaagtttattgtggactttaaatttgggccctttattactcattctaaatttttttcttctgctgtgtgtcgaaacttagtttatatcccattcacatacatttcttcaccattagtcattaagtagctggactggagctgttcaatgaagtttttgatgaccacctttacagtttatcagtcaatagtttaaccacctgatttttgtcaggattgagtagattttaaaacaaactaccctaattttataaatacttagatgtgttgctgaagggatttttaaaaattgtgtgccacatttccagatatgttttattttaagtaagcaacagaataacttttgtttgcaaataatctctgtggcatatgagaaaattacttaaatcctgttttttttttaatttaaaaaaggtgagttatgatttgcagtttcatgtgtaatattaagctagttctttcctctattgggaaagatgtaacgtgtaaccaattggttttcaataaggtattctaaatttgtatacttttctttaaaataatattttttgcttgagaaatccaagttgaagctttctgatatattaactatttacaacaaatataaattactatctcacaacacttgaaaatttgcagaatgaatatattgaacagtgaaataactaccccaagtatttgatacagtatgtttctataaatgtctaattctgttggctgtttgcggttgtgaatacttttgggggttataattagtaaaaaaaaaaattactagaattttatcttagttggtgtctcatttcatgttgcagtgtgcattatttaattttgtggtatatgtgaaatactggtttatctaaagttattaacagctcctaaaacttctcacaaatgtactactttttatcttttttctttcaaaatgcagattatttgctgttagccggagtgtcatttaagtaattttgttctgtttaagagttcagaattgaaggcatgtccccagtttttagtataagttaaataaagagcaatctaggatttatacagccctattagttgatgatttctttgaacatgtgggcgatgtgaaatacccaggaggtagattaaaatgcgctgtgtatgattcactacactgaaaatgtttaacattccaaatgtatgcataagctgctgctctagaggagttacatcatttctgattggatggttttaatttttttttcctttcctttattagtttaaatgcagaaattagctacttgtactgcaggctaagggagagatagctaatgaccggtattgtgtactgagatcagacttcagggatgaagcagctgtatgttctcatgtcctggacactaccacgttgatggctttctaaatccagggtactgtgacatttgaaaccaaagcttttatgttatatggagactattttggtgttcttgtgttgcatttctgtgaatattaacaagttagaagtaaatttggcagtgttaagtcaattctatatgtggtttttgtgttagttgaaatgaaaatgggaagaaaatagttcatcctcattgcttgcttacttaaaaatcattcaacaattgagtgcattttctttgtattgtagtgatttctttgatttctcaagaattagtttgattatctgtatctcaaatagattttttaaggttaatgatagtttgggaggagatgtttttatcttatgaaattattggcatgccatttgcttaccagttgtatcttttgttaaatattctggcatcattttataatagcataatagactagatgccattattttctcagggtcacttagaaatagaaaactcttttctttttgcagcgtatgttttattcttattaaatgcaaattattctaatgtcaaccgcacataaagcatttatttctctttgtaagttggtttcaggctctgttgaataaaagtgtttgaatctttttttctctattaatatttcttggtagtacatatggtcaaatgtttattaaagaggaaaaaactggtaagctttaaaatgctgttaaaagttttggaaacttccttgacagaaatttcatttttggtgttgttgaaggttaacttaaaaattatgtgtgtgtgtgtgtgtgtgtgtgtgtgtgtgtgtgtgtatgtgtatatatacacatacacacacacacatactgcatgccttgttttgaactaagacatgctaacttgaatgtgcttttgtacctcaagttgaatgattctgtgagaaacaaaactttgaaaaatgcagtttctgcccacctctaggaagtaactaagtggttctagacattctttcactgagatggtgtgaatagtatgagatagtgtaggaaaaagctatgaatttgtctttcatgagttaaaaatcagtaattgtgttcactccaatgcaaatgaatttggtctcctataggaatgttaaagaaaacagtatctcaattgtattttgcttgtatgtactacattgtgtatggttgaattaaataccaaaaagaagaaaaaaacatccaatctcaggccctccctgctgcagtcttttgctgcatcaatttttaattttctagaaacagaaatgacttttattaggttaaaattgtgtggtaccttcctacttcaagaatttgttgacttagaaattaatacctgcatttacttacatagattccatgtgtagatataacatatattaacacagaatatatattaaactgtaaggttacttttgatttggctttggagttaaacttttagtttcccaggaaaaaaaaaagttagtaattttttcacatggtgctaggtaataccctag

SEQ ID NO: 109871 - DNA, 1026 bp, Homo sapiens
cgcctggcgcggggccggagcccgagcagccactgccgagcgcggtgggcgcgaggcgaggggcgcagcggcgcggggcggggagggggcgctcgctcgctccctctcggctgcgcacacgcccgtacaaactctcacacagacacacgcggggtgcgctgccgccgcccgccgctgctcctcctcccgccaccgccttgagagggagagagagggaggcagagagagcgctttgtccgcgcgccgccgcccggcccgggactctgccccgaggaggcagccgcgccgagtccccgcctccgcctctgcccccgggcgggccgggccggccgcggtggggggagccaggctgagggtgggggtgggtggcgggcgggcggagggcggggagggggggcggaggaggaggagagacgagggcagcggaggaggcgaggagcgccgggtaccgggccgggggagccgcgggctctcggggaagagacggatgatgaacaagctttacatcgggaacctgagccccgccgtcaccgccgacgacctccggcagctctttggggacaggaagctgcccctggcgggacaggtcctgctgaagtccggctacgccttcgtggactaccccgaccagaactgggccatccgcgccatcgagaccctctcgggtgagcactcagcgcggccccctccccccgcctcgccccgctcaggccgggacggcgccgggagggaggccgagtccggcgggcggcgcccggcggcggctcccgcgcccgcacgctcacttccacgcaccagaccctcaactctcgccgccggcccgctcctgggacggcccgctcccctccccccacagctctggactctgccctcgccctcggggccgcagccttggggcgccccccgtgccgctccgaaggctcccgaggctcgccggctccttaggggcacccctcgttcgcctggcgccccgggctgctctgagcttccccgccccccaccctttgagcgtcccctgtctcactt

SEQ ID NO: 109872 - DNA, 1154 bp, Homo sapiens
tgtctgtgtgagagtttgtacgggcgtgtgcgcagccgagagggagcgagcgagcgccccctccccgccccgcgccgctgcgcccctcgcctcgcgcccaccgcgctcggcagtggctgctcgggctccggccccgcgccaggcgggcggaagcgggtcgcggccccgggctggggctccgggcgccggaaccccgggcgggcgcggcgccgaggccgggcgagcggcggggcggggaaggcgcgccccgggcgcgggtgggagcgcgcgagggggcgacggggagccgcgggcgtgggagggagaggggctgcgagtgagcgcggagaggggtgtgcgcaaggtggaccggatgtgagtgcgctgctgccagggcaagcgggaaggtgtgtcccggaggtgagaggcgagggcaggctgggagacaacaactttcgcagcgacttggccggggctggcgccctgcgcgttcccgggccgtgcgctcgctctgagacccgctccccgccacgctctctgaggtgaccgagcggcgcgtgtggtcgaaggatcgcgcgcgggagtcgggacgcctaggaccggggttggccgggccctcgcggaccgtgctcgcggggaagtggttcccggtcccgggcctcagtttcccgaccggggagggaaggcggaaggccagcgcggagtcacgtcctctccgcccagaccccgcgtgtccggaaccccgcggcaggcggcagcctgacgttggcagctgctctctattctgggaagtgccgagggcttcccgggcggcggcggcgaaagccaggtggcgggtggggaaacgaacgccgaggggccagggactgcggcgaggccggagcgctggggtcagcggccgggggacggatggtcgccgcccggctgcgcggccggttcagctccaaagccagggtggtgggaggcgagggtggctggaagcggaggagcgcaggctgtgtaggagttccccgagcactgggaagggcccggagaggaaagaggtccttccaagcggaggaaacaacgtgaccgacggaagaggcagggttgggatgagagcaggctggagccgaggggctcgggcaggagccagacaggctagagcgggctgcaagttccggggcccggctgga

SEQ ID NO: 109873 - DNA, 1383 bp, Homo sapiens
gtggatcacatgaggtcaggagtttgagaccagcctggccaacatggtgaaaccctgtctctactaaaaatacaaaaattagccggatgttaaattagccagatgtggtgatgcgcacctgtaatcccagctactcaagaggctgagcatgaaaatcgcttgaatctgggaggcagaggttgcaatgagccgagattgcgccactgcactctagcctatgtgacagagcaagatttcacctcaaaaaataaataaataaataaataaaataaaataaacatctacatgcaaaaaaagtacccttattacacaattcaatgagttctgacaagtgtatagtcacataactacctctgaaactcatgatttagaatattttcatcactctccaaaattaaaaatatgaaagctgaaaggcaagtatttacacttcaagccatgacagaaactgatactcaaccagctctccctcagtaaacagctataaagctggacaaaatacatgaaataactgttgtacctcaggcaacacagcaccatgattcttcagcaaagggaacaaacaaaacgagcccgcatgccatggctttctctctggagccaatttctggactgtggtgtctgaggggtagcccaaccagaggacaaaagtctccctgacttaagaacacggaaatcagagttcaggactaccttgtgtctggaatgtgtagggcagattaccaaagagaaagaaccaatgccaaggaggacctccaaaaatctgcgtcgggaccctgttgagtcttcgtctaaatactaaactatgcatgcacagaacaagtctccaagaggctgggcaatgaacaattaccagagaaataacaactatcatttagctgagagctaaataactaccgaatctcatacaggtctgaaagatgttcaagtttcaaccagccagagtggaaatactttataaaaaatgagaccacagcagacatctcagaaagaccccatcttaggagaaagactaatctagccctagagttaaaggtttctctagacccaccctaacaaagctaaaaaataagtttcaaaagtattaagctaattcccaagtaaattaagtccctgaaaaagaaaatctaaaaatctatcaaggaagttaaaaaaaatttggacactcaacaatttagcatccataatgtctagcatataatttaaaaattactagatacagaaagaagcaggaaagtatgatctataatgaggaagaaagttagtaaatagaaatacaccccaacatgatggaaatgatgttattatcaacaaggactttaaacctgcattataaacacattaaactattttaaggaaaagatgaacacaatgagagaacaa

SEQ ID NO: 109874 - DNA, 3525 bp, Homo sapiens
ttgataatggtattgaggtatatggatgtctattttgtgcattatttggcaatgtttaagaagttaacagttgtcagtcattgtctgaaagtgagtctgtaagtgtattgttcagcattttatcacccatgaaaaccctttttttatttaaagcatcactctattgaatggtactaaaggtacaaatttgttggggctgagatttttttcttagtttgatttttttttttaagagcatttacttaggaatgttctgtgttctaatactacttatttcagccaccagagagaaccctatgccagtttctaaaaagggtggcaaatcacttgacctgcaagaaacatctcattcatgctctatgaaagtttttattttactaaatgaatgacataattttttaaaacttacaaactgaatgcgtgttgtgttgcctttctgtcttcacagaggaggaggtggaggaggaggaggatggagagctgcccaagacagggatcagatttataggtatgccaggagaggacttagcatctgtacaacagtataaagcttcacataaagatgtttgcctagtaatgttttggtaaattataagtggaatacccaaaatcagactgtttgaagctcatgaaaatattctaacggaaactaaatgtataaagtctttgtatatttataaaaattaattggttttgcaatagattatttagtgataccattttataccgtgatgaggtacagtgatgttagtcactgataactcattttttttgtcattatgttcttgtattacattttccttgctttttaaaagtaagcatctcaaatagcacaagaacattcaagccagcctttttaacacaaagctaaatcctgaagcacttgtgaaattagttttgggtgttcaagagggtgctgttgggattatttaatggtatgggaattttctcatttttatttttaatttttggagacagagtgttgctctgttgcctaggctggagtacagtggagcaatttgagctcactgcagtctctgcatcccgagtagctgggattacaagcatgcaccaccgcacagagctaattttttttttttagtagagacaggttttcaccatgttggtcaggctggtcaaactcctggcctcaagtgatcctcctgccttggcctcccaaagtgctgggattataggcgttgagccaccgcacccagccaggaattttcttttacaaaactctcttaacatagttcacaaaatttaaaaagtaagtagattaaaatatagcaaggattatttgaccttaaagttattaagagtgcttatttgacacttgggcctgataatgtgcttcattctcaagatttaaacagaccttgaaggttcatgcagctttccttttttggggaactgatgaaagggcagtatatatagtcataaatttatatgtttggtctaattgtgatctattgagacttagacaatcttgacatttgtttatagaaggcggtcaccttctccttactatagtcgtggaggatacagatcacgttccagatctcgatcatactcacctcgtaagtttttatcttaatatgattgtttatattgtagtatggcttgctctgatgacagtgtattccctttatcagataatggattggtttcaggtagtttcatacctaatgattctccacacatcctgaacattttttggttcaagaaagtttgtggaaacaacccttagaatcctattattttttaagaaggaaaaattggacagcctcctgagccagagtaggctcggagactcctgttgtttctaactgaaatagtaaataatgtatttccaccatttacccagagtaggctcagagactcctgttgtttctaattgaaacagtaaataatgtatttccaccatttagtagcttttcaagagtccttaaaaatttttggacagcacagaaacatggattacttagccctttagttctcagattgagttatatacttcccagcaatttctgttatttaagattgctatctcatttctggtgtaatacttacatggaagtctttctctatttgggggtggtggggttctggcacataggaatttcttaatggcagaatattctgaaattctcggcattaaagtatacttgataattagttcacttaatattaaagcatgttcattcttttcttcccaggtcgctattaaagcatgaagactttctgaaacctgccctagagctgggatattgtttgtgggcaatattttttattgtctcttgtttaaaaagtgaacagtgcctagtgaagttaggtgacttttacaccttttacgatgactacttttggtggagttgaaatgctgttttcattctgcatttgtgtagtttggtgctttgttccaagttaagtgttttcagaaaagtatgttttgcatgtatttttttacagtctaaattttgactgctgagaagtttctattgtacaaaacttcatttaaaaggtttttctactgaatccagggtattctgaagatcgaagcctgtgtaaaatgctaccaaatggcaaaaagcaacaataaacagtttgatttttacttttctttctaacatatcaatgcttagcagaactattcagattgtcagtagtaaatttaaagacaaatgcccgttttcctccagtccatgaaacataccatacttatatacctgcaactaagtgtttaaaattatgctctgtaactctgtactgctagtattagaactaaaaatcttaaaatacagccagtgcttaatgcttatatcaatgtggatttgtcggcttttatgtaatctgtaatatgtatagcaggaaatacgaagagttacacagtgtatgccttaaaaggctgtttcttaaaggtgttacaaggggataatggtatttcaactagttatcagcaagtgacaatacattccaccacaaatacactcttgttcttctagcttttagactatatgaaaaaaccgggtgcttcaaagtacatgataagggaacactatacctgtcatggatgaactgaagactttgcctgttcattttttaaatattattttcaggtcctttgcttaccaaaggaggcccaatttcactcaaatgttttgagaactgtgtttaaataaacgcaaatgaaaagaaaaatgttggtgcagctgttcacaaagaagtgttcttgttctattataattagagttcttctgtagtttaatcgttagggcagtgtgttccttgggctgaggtgtatctttgctattttgggctgggttgagggggggatgaatttctgtattcctggaaaattcagagtgcataactaggtattagagtgatctccatttggggatggagttacagtaaataactagactgcgggtactttaatacatgttcttattattttgcatttaagtaattttcatgaccaattgtagggatgttgctacaggtgggttattttgttgcctt

SEQ ID NO: 109875 - DNA, 2358 bp, Homo sapiens
atagctctcggaaaatagcataaattttatcttaatctctagtgccagaaactgcctgggcgtaaacactagcttgaacatctgaactagaagatagcatagtattggaattagaaacttaaattctatttaggtgaaaggatgtttcctcaaattatgaacaaactttaatgtgtttgaaacggggtatttttattttttaaatgtatgctgttaatacatactttgggaaaaggaactatatgtacttaaggctgtgcttcagtcttagcttttggcttccagagaagggctaagaaaacttccaagggttaaataatgtgttcaggtttcagtcataggatctcagtcgcaactatttaactctgttgttttaacccaacagcagccagatgaatgagttggggccctattccaataaaagattattttggggcattggaatttggattttgtgtgtttcttcacttgtcatgaaatactgtttttccccctagttatttaaatttttagcttatgggttatacagaaacagccagctggccagatttgacctacaggctatagtttgccaattgtgtgctgctttggagctggaaatactgtcaggatcatagttaggtaaaataattgtttcaagtttttatgagtagcttttacaaatgaacatttagtagagggaacaacacatttgtaagttgtagaccttacgttctggctaacattaagataacttaatgcacctaactgaaatgtccagtgggatcttactcatagccacaggataattagtggctttgttcaggatgtatgtaacaatttatttaccttttgaaggctaaagaacgtgccaatggaatggagcttgatgggcgtaggatcagagttgatttctctataacaaaaagaccacatacgccaacaccaggaatttacatggggagacctacctagtaagtttattttcaaaataaatataattggcagtttttcacttgtcaaagaaacacttgtattagtggaaagtcttcagcacttaggtttgtgccataaacttgactgttgattgattaaatgctcctcattagggcatttttctcatagtagaagttcaaccattacaggtaaaactaaatcttagtcaagtccatttttaaattttttgtttgttgttgtttggttttgtttttgttttgttttgagacggagtcttgctctgtcgcccaggctggagtgcgatggtgcaatctcagttcactgcaaccttcgcctcctgggttcaagcagttctcctgcctcagcctcccgagtagctgggactacaggcgcgtgtcgcaacgtccggctaattttttgcatttttagtagaggcaggttttcaccatgttagccaggatgttctcgatctcctgacctcatgatctgcccgcctcggcctcccaaagagctgggattacaggcgtgagttgctgcacccggcctaaattttcttaaatagagcaaagtgatactatttttgtttcctcttagaaatatgtgggatatgcagattgacctctggcaggatctgtgtgcctccttaaccaaagatttttaaaaataggtttatatatattgaaacaagggaaagggcaatgtttgctcaatataggtgagaattttaacaggaataattttcattttccagttaatgtgtcagaaaaggcctactagtagatataaaaactcatgtccagaaagataagggaggtcacctgaatatttttttcttcatagtggcagctctcgccgtcgggattactatgacagaggatatgatcggggctatgatgatcgggactactatagcagatcatacaggtaagttatgaggtagaaaggtcaacgtctgaatctcagtacagtgtacagagcagcactatgcttaagttttagcctttgttaaaagctttgctttagtacttttactcgagaaatgcagagtagaaagttaaatcagattctaaggttctgtgtcttaatcaatttaatgtgtaactggatttctgttcaaatattctagaatataaatgggatttaaatgataacttggaatattaataataaaatgtgttttatttttaaacattgaatgaggccaggcgcagtagctcacgcctgtaatcccaacacttcaggaggccaaggcaggcagatcacctgagatccagcctggccaacatggtgaaccccgtctctaccagaaataaaaatttagccggttgtggtggtgcacgcctgtagtcccagctactggcaggtgaattgcttgaacccggcaggcagaggttgcagtgaatttagattgcaccactgcac

SEQ ID NO: 109876 - DNA, 1068 bp, Homo sapiens
ttttttctagctgatagacacagtgtggttccagttatccttgtatgtcatgttatgaatatgtgaatttttcttagaataaattcatagaaggaaagatgccaagttgcttttcgccagcacgagtgcttgtttacctacttaattctaaggttgaaattttttcttttgcattctttcctacccattcccaaaaatacttgtagtacttgctgtaattttgtaatttctaagcagtgtttggtctaatcattatgtacttttcttgttagtgacattttggctagtatacagctccctttttaaacaactttgattttatgacaacttttccaaagtttaaaacttttttttttccctaggcaaatcctgatcctaactgttgtcttggagtatttgggctgagcttgtacaccacagaaagagatctaagagaagtgttctctaaatatggtcccattgccgatgtgtctattgtatatgaccagcagtctaggcgttcaagaggatttgcctttgtatattttgaaaatgtagatgatgccaaggaagtaagtaaaagcccgttcctttgtaaaccatcagttctattgttaacgccaagttatcagtgaccaattgctaggataaggacaaggacaagtcagtaatacttcgaactttttctccaacctcttgtggagactcaagatacatgcagaataacaaaattttgtataacttggggaagttggtcctaccacctgctttattagttgccacctattggggtcaactataccccaattccgccaggatatgtagtcagtgtttacactgggttcacattctagagtcaaaaataaccaaaagcaaagttatgatgcagaaggaaaacattgttccttttttggctagtgaatgatgtcatatttggattttgatttgttttgaggcagaatatagagtcaagatttgaaatgtggggctagaccccatttaagaaattcagattttaggtacattaaggatggtagctaaagtcatctccaagtatagagaagaggaagaactgagaaacacttaatg

SEQ ID NO: 109877 - DNA, 1010 bp, Homo sapiens
ccagaagaagctcccgaaggcattatacccggtcacggtctcgctcccgctcccatagacgatcacgtagcaggtcttacagtcgagattatcgtagacggcacagccacagccattctcccatgtctactcgcaggcgtcatgttgggaatcgggtaagatgaaaaactggttttgaagcagtcaactgcctaaatttactttttcttaaagttagagctgattttgacaatagagctttagcagttggtgcgtgagtgaaatcttcagaggcttttttagtgttttgagagagtcttttaagttaatcttccatgacggggtctgcatttgggctgcctgtcaattaagcataatactgacacaatggtgtaactccttagcccatcaaaaaaaaaaacttccgactgcattactatactgtagtatagtattagtacattagttcaaaatatagttctatgctaacattaactctttccaggctgcataaacctagttagatgctctcctgactttcccatttaatttgaagctaatttcttttgggtgttgttaaggcattttttacatttcatgaaaggcttcaaatgagatgatatttattgtgatttcactgtataatccaagtggtttaggaggagggtgcagggggggacttaatgtttttagagtagagtagaatttttccctagtaaattgttagtttatgaaataaatggaatctttaggtaaattcatcacagcatctggaatgttagcaacatatggctcactctttattctttcctcttgtcatctttttttgagacagggcctcactctgtcgcccagtctggagtgcagtggtgcaatctcagcttactgcagcttctaccttgcaggcttaagcgatccgcccacctcagcctcctgagtagctaggactagaggcatgccaccacacccagtaatttgttatatttttgtagagacatggggtctcactgtgttgcccaggctagtctcaa

SEQ ID NO: 109878 - DNA, 2720 bp, Homo sapiens
tcctttatactcagattcctgggctgactgatttctgttaactacagttactttattggtagtcttaactgttactgtgaaacacccatattctgctttcacttctggagaaaattgtttcatttccatagaggtaatctttctagtgttggagtaaacaggcttttagcaacttttgggttccccatttctatattctcacctatgttaatttttgcctgtggtaaaaatagcaaaaactacaccctcatttttgagacttcctcctttgtccatggagagaagggaagtgtccgttcagaatacttgatagggaattccaagggattgttgttaattggaagccccagagcatcactacatcctttaaccatttcttgatgttaaaggcagctgttcatatatttttcttttaatctttttacagtcagtcatggagggaggtagaggggaaaggctgtcacatttcatgtcaccccaccatgttttataatggctttgaagtcatttgaacgtttctagagtcgtctggggcctagagacctgaactcattttactggatgagttagcctttccttctgtgttaaacctcaaaccttaatttgtctattctgtgttacattataaatgttttccctgagcatcaaaggatcatccaaattttctccattatgttgtaaaccacaaaactatcttctaaagtgttttgagctgtaatttagaataatcctctactgtcctttcaagaatgtccagaatactctgaagatgtatcacacaaggaaatctcttgtgattttatctgaaagcttcacctttgattcatgccatatagtgacttactgtaatactgcttccttttgagtcttgccatttctgctctctggagtagaaaggcttaccaggctttactttgtctaagtttgataacctaaaataaaggttgccttgataattttacctagctatcagactgactaggagtaggttctgtcctttcctcatctactgttttggtgccttggcagaacttttccttggtttcattacttagtatacccttttgttgattatgtgtctttagctcgttggtgacctagttatcctggttaccattcctttgctatttttcattacaaatccccccttaacctgccagccaatcccagttttggttgggaaagctatgagtacacaatgtttacctaaactttggcttttgtatgtagtttctgtactcttttgcttcctgggccctaggttaggagctcctgatttagctgcctggttttgatgtgtacttaagtaactaggtaagttaggttaattcctggttttccataagtttgccctggctcatctccatttagctggagaagctgtggaggatctctgacaccctctctactcttatttgtgtgtagttcgctgttctgttgtagctccatctggttgctttcagttttttagggggcctcccaccatggttagatgcaatagggttttacagggtttagtgtccttcaagctagcctttgctttccactaggtttctgcttttctctaggatttgaaactgagatcatcatctttatctcttatcactgaattataagtagtaacttgaaaggtcaaggtctttttaaaaatcaagcatttttttaagtaaattatataaattatataggattttgttttattgattgcaacttgattgaaataggtataaagtataggtgtcatagttaataaggttccgcctcaccctagtctttatggagtaacattctgaaacacagtccttggacagttcccttaactgcttgactttggcacccctttctgaaggaagtggggtcaaataactcttatccctgctccaaaaaggtggaagaaaggacaagttaattgacttatgtcatttggagcaatgaaactattaacaccaggtatattcagttcctgcccttacctatattttcttatcttggaaggggattgctgtccctcaccatttatctcacagcagcttatttgtttttaaagttgcccagaaagtgtgcaaattaaacttttaacatctacgtgtaggaatcccgttctgcttccagaagtggaagtgctcacggatcggggaaatctgcaaggcatacccctgcaaggtctcgctccaaggaagattccaggcgttccagatcaaagtccaggtcccgatctgaatctaggtaagaaagactgtcttgagatttcctcgttactcttagctctgaaattggtgcgtgttttgtaaaccaggaaggtagagagggttagattatttgttggcctattaaatattggtactagaagtgaacttaagttctgggaggcaagactaaaagcggttaagagcctgggcttttggagtcagggttttctatttttgctggtttgggcagattaacctttcagctttagcttctttataaaaggcaaattagtaatacagtaccagttcttcagggttgttgtgaggatttactaaatgtaagtaaactgcttactagtatggcaaatatactgcagaacattggctttcagtaattagaattcttgataaataagtatatatatggtgcgcttttttttttttaatgttggtcaaaagtaggctatatatacatcctggtttgcctggggcgataccatttatgcctgtggtcaggcataattaacagca

SEQ ID NO: 109879 - DNA, 6258 bp, Homo sapiens
aagaactggtgtgtccctcatccctcgttggtctgtgggatttattttttcccccctctcaaaggtaatagattaacactaaaatctgtctataggggtctaattagcaggcttaacctgatctggccaaaccactttcaaaagtaagatctcgttttcatctccggattcaagactcttcccccaaaattgcttgcattttgtaaaggggttgactagcaccatttctttgtaaaaagaggcactcctggcctttaagtcacaattacaagaagttgaataaaaagttgatgaagtgcagggtaatctttagagcccaataatggtcacagcgtataggttgtgtgagatttgtatgttggtcttgcacgcagtgtaatgttctgagcctctcaatattgtaatgagtttctacgagtgagtctttactaaaggaatccagaaactaaggagacactgatgtatggaccagatgttaaagaaaatgttttgacccagcagatactctgatagaatactggctattatttttgtaaagccgatgtgattgcaacataggcacgtaatctttatcattagagatgaatagcagcatctggacaccaacccatcaaactgcttttcaaattctgcagtttttctcatcttctgctgaatcttgggatgtctttttatattccttggttttagctcctaaactctaaattctaattttcaaaactgaaacatctctgaatctacttctttctaaagaattgcagccatctcaccaaatttcctttaaaaaaggattgaattgtcaaataggaggaaattgttttgtattgtgagtctggttaggtttatcagtctcttgaaacccggttgaaatatttttttcttggttttaaacaagaatgctttaatattgtggatattgtctggaactagaacgtgacattttcaagctgacattacaggtgattttataaggtaagtactactggttttgccaaaaggttgaaaaggaattcaggtggtgggggaagtgttaatgggatttgccttacatagcgttttttcctcctttctctacaataaaatccgaacgtaggtggtaaatattaatgctttcatagctattttgcccaggacaagggcagagctacagctgtgtatatttcttgagccttagcattttatgttgatcagtgtttttacatatgcgactgtttttttaacaaggcatggtgactgatgtttaggaattttaagtgttttgacccaggttagtattgggggtgtgggctatgtagaattagatattgaaatcacttagtcttgtttttaaactgcaaaccaaaagaagttcttcactgtagcaaattacagtcttgaaattcccccaaaatctttgctttgaattgggttttggaggttacattgagattgatgttatcaacatagattgttacctgacagtttggataaggggcccctttttctctaatttttgtggttagaaattaggttaaaaggtagtcttctgaaaagtcaaaagatatttatatttgcttttgttggggagtactgactgttttatgaatgtaaatttaacagtctgtgctatatttacaagagagtttttataagcacaggcctacaactaatttcagatgatgtttttttccagacactattctccagtttttgaggatttacttatccatttactcttctggtagacagtttggctgccagaaaaaaatatagtccttattatattgatatgagcattgacctttccataacaggattaatgaggttttctttgcccctgtccctcccaatttttaaaatattgccttgtcagtcaacttaatgagtttgtgcatgtttaatgttaaatggattctagttgtatcccctagaaacattttaacaaaaattgtgttgataggacaagtttctgtttatttctaactagggtctcttaactaaatgtacataacattagcccaagagttgatcttctggttttataaagtagccacttgaacttagctgagttgaattaaatctaatatttataataatttagtaatggttttgttcttagactataagagaaggaaccaggttaggaaggggtaatgaagtaacagcaggaaggtatccacattgaaaacagttgtgatagctagagctatggcctctattcttgtatcttctgcatctaagtgccctgtctgtatcgaagttttaggaggccctaaggaaacctgcttgggcattctgattccatgattacatttgtgctgccagaaaacatttcccattgcattttagtgatggagatttaaagaaagccaattactgtaactcccttaaataaaaacatatttaaaaattttcggattaaataaacaataattgactctaaaactagactggaaattatccttttgttaggaaagacatcacagcacttgccagattaacgatggttgtctttatgcccagataggtataaagacttgcaatttttttaaacaaagccttacatttttttcaggaggaaaaaccaggagaggaagtaattgacaataaaatgaaagatcatcaaagtgaaatgtaggataacaagaaaaactagcatgttttatgtaggcagtattttattttgtttagtatgttcaacagacatttacagatcaactaaattcaatctttttaattatttgaggaggtgagctgtaatttaaatagtgccaccttttaaagtagtatttctcctttggacatccagaagacttaatattttctaaattgagggggaaaatgtacaacaaaactctttgaaaataccagtgttggattcaagtttgttctgctttccttcatagctactggcatattgtaggtggttgacttgattttgtctttttatgattcatactataaaatctcactagagcagcttttccagggggtgggttacacttaagctccaaattgtcaggttccctgacaccgtctttctgcagagctctttaaatacagtacaaaaatgtgtgacgctaaatacgtttctttatcctatctagacaagtcacaatactgtaaacctcttcaaccctgagcgtttgtcattgtacaaatgaattgtccgtgctttcctttcatgcacttatgtattaatgtgtcactttttgactagaggtgtgcttttgacacttaacctattttctattgaatataataagaagtgtgaaatgtaactaatagttcttaaaatgttaaatgaacagtaaatgttcagtggcgcacttcacattcaacttaagcatgataagtctatttggagtagagaaatgagattaccatatattctagaaccagcagaaaactatgtagttttcagttttttgagctgcatattctagtttctttttttttttttttaatccaaatcaacaaagggattttttttttctagtttcagttttggcactggattttatcctggagttttaaaatattcttcatcctgttctttttctattaaggttaatgttgaagaaggaaaatgcggaagtcgtcatttgacaagttttataaatgagtatttgaagctcaggaataagtgaagctgaaatttgaaaaaataaaagaaagaatgcatgctaattatcagaccagaagtcccacttgtagaatattgagcaatttgtgtgaagtggggaagatgaaagaagtcagaatttgaaacggaagaatgaagaaaagaaataaaaatgaagttaagataagaagtaatctggaatcagaaagcactacgctaagtaattactagtctgtttatgtgtccctgtatattttgctaaacatgcatgcattatttgtttaatagaggaaaatatatacagggtaaagaagtgccttccaggggaaacgtttaaattaggtaattctgattttaactgcttagttaaatgattgaaatgcaatttttaaaaaatatttagtagtcaagcaccaggcagcagtgagctctccagcatgggtaacagtgggcttcatgttgtcctctctagataaactttacctgtctaatgttgctggtcctggggcatgagcgaatacctccagggttggaactggtggtctttgccacctccctggactcttagattgcactgtcccctttccttcagtactgagcaatgtatagtagaatattttctgttaaaccattttcaaaggaatgtcaccaggatggttatggaaccaaacccccaaaatccaaacaaagcattgaacaaaatagttccctttggcattagtgtgttagttttttccatatggcactagtggaaatctgtgagcatttgggccctaaatttaagatgcatatttgctaaatacacagggatggtttttcaaattctgtttctgtttaatgcctatttcagctgattgactaggattactgataaaataccgtagcttccccttagaagaggtgggtcacacaagtgaacaggatagctaatacaaattgcagtaatggcagatgctttcattcctatttctccttttttgctatcaacatttagctattgtaatgttagaggtaacggttacaaagtagctttattctggttacctggtatcccttgcacttattgagaaattcaacccaaaagctgtcccttcttttctgtgtgttttgttttagctgagtagaagggtcaagtgattggtgtaatgttactttcagttgaatgagacaagtacacatatcaaaaataatacccagtagtagtcagccagcggttttctacccagttgagaatgccaagggtatcatgtcacacatgtcttcctgaaataaactttctctgagagttgtcaggtcttcatgctcttggagaaagtgacttaaatggcatttcttggagaatccattttctgatgctttcaggcctgtttatttctatatcttgcaagcagaagaaaattttctcttaagaagttttgcattcctttgtcaaatttcttgccatagataaactaatgatgataaatgttattttatgttccaaattactcaaagagcaggcaggaaactgaggtaaatgtgtgaatgaatattacattttaattccaagcccatggattcttttatcaagaaacctgacaggtccttggggtgcaaaagaggaaaagacctcttaacccccagcccactaaaggaaagaaagcaatttggaatctggttatgacccaagctggatagacttaaggtgagaaaacgttgctagtggaccattgtgtccatttgtttttgttttcccccttgaccaaagcatctgtgggtcctaatgtgtctcctcctcgggccatagggaagatgaggaggaggccggcttctgttcctgagaacaggcagtgtgtgaaagactgccttaatcagaggtctgattaatgctaaggggagtcaaaacaaggaaggggatgacagtgtttcaggaagataacctttgccaagggaaaaaaatgagtaggaagcatgtaacttctgaggttgactaagtcaagtaagtcagacttaactagtatgataaacagtgttttaagagatgcagtgtttatgagccactattttaaatctaacaaaccacattcagtttttaaaataatacagggattggatggttagtcctttcaaatatgtttttgtaaggtggttgctgttctcagaatagggagatgtggattattttgttggaaggctaagtgtgttgtatttttacttgatgtattccctttaggttttgtattaggatgtggctgagatccagtctgtgagagcttgattgatttcctgagcattttttcagggaaattttggttttattcatgctaattttagtttcatggtccctttttttgaggcagtggtgtccagttctgtctgttggtgtggttttaatgtgttgaccatgtcagccctgagagtggaatttgaagtatgcttagatttagggacttccccaactggtttttatagctttacctgtctgcattgagatttaaagttaattatgcttttgatttgggtgctaattttaggtcttatttcttgtaggcaagttttattcccttgccatatgtatttcccagccagttaaatggccaaaataacttcagaaagctttaacttctttaagaaaatatccctgataaaggatcgagacgtttaggtgttaccca

SEQ ID NO: 109880 - DNA, 1250 bp, Homo sapiens
gagggcaggcaagggagacagcatttaaccaaaaaaagcctttgtggatagtgccttagtgcctttggtcgtgaaggagggaggcccccggcgggtttatgtggcttctgcccgagacggccgtttttcccgttataagagggggaagatgaaaatggccgctgcgtccccgcggtgttgggggaggggagcgatatcttatttcggcgttgctctcctgcgaaggtccgccgcagccatcttgggctggcgggctgggcgagctgccagaggcacaaaatggcggagaagccgcgcggcaacgcggacccgacccgcagcgggccgcgcttcgtaaggccgcgtggtggggtgcaaggggacagacgacgttcttttgggtctttgggccggtgtttaggttaacgaaggaccgtctttgcctccacggaaaggacggagtctgggatgtctttggggcctcttaagatggaaactaatccaaggccgactaagttctgggcccgttaggtggaggggattgcgtgagggctttgtgtttggcctaaatgaagcgcttttctctgatgccgaaagggcttcccaggcaaaaatctgtatcagtattctattaggacagaccacaaagtcgttaagatgattttgtggacatcgcatttccacgggattgtgaaggagaaattggcgggcaaccatttacggcgccgttatttcctttgttttgaggcgttctaatacttagaaccacagcgtgtgttggctacagttttctttcccttaagtttccacctcttaaaggtgttcagtgagggttgattgaattgcgggaacaagacagttctagggtttaaacagcatacgtagctggtctgtggggctctgggtattggattcggaaagcattgaatgatgcgaacatacgaggcttgctagaattaagaggaatctgttagaagggtgatagaaaagcaccatagaaattgatttttgaggctgtgggaataatttgtgcttttttaaaaaaaaaaaacaatttgttacctaagtttccccttgttggtaaagctaccttaagatctgaatatgatttatcaggtaaataagactattaaatgtcttagcaaacttttgattaagattttatatgattcctcagagtattttaggaagaaattttcagtgatgaagcgtgagtttcctgcgtaattttggagcccaaactgcttaatttggtttgaactaatcaagcc

SEQ ID NO: 109881 - DNA, 1045 bp, Homo sapiens
tatttttgaaatgttaagtgtttttaaataacttttttcatattacacaattagcatatgttctttgtagaaaaccagaaaaaaatcatagcccaaattaaaaactattctgaaaactcaacctagagatcacagttaacactttacatcttcccagatggcttttctctatactgtattttaaatattaaaaatggtcatgctatacactttacaaagtctttaaacttgttttaagcattgtattttgaacatctttccatatcaagaaaaactcttttacaccatttttaatgacaggatgccattccatagtacgtatgtaacatcatatatttaagcagtcccctttgctggagataaagggaccacaaatatgatatacccatgcccaccaaaccaagtaatctacactccccccagcccaaaatcaaacaaatgacaaataataatttgggtcttttctattgttttaattagtaaccaactcctattaattctaccttctaaatatctctaaaatccatctccatcatcagtaccgtaaacctcccaatatctctcacctggactgttgcagtcaccacctaacaggtctcaccacatcttgccccacccccgccccttctgcatgatgtaatcagagtgatttgtttttaagcgcgagttactcccctacttgagacttttcagtgatacccactggagtggctaaagtaaaaaagaccagcaacaccacatgttggcaagtatacaatgcaggcaggagtgttaaatggtacaaccaactttggaaaactatttggcagtttattacaaaggtaaacatacatctactctatgatccagcaattccaattctaagtatttgccaaaaagagatataaacatgtattacaaaaagacgtatgcaagaacatttatagaagctttatttacaacagccactcaaaacaacccaaatgcccgtcaaccagagaacaaataaacaagtcatggtatccatacaacagaatactactcagcaataaaagaaaatgaacta

SEQ ID NO: 109882 - DNA, 8228 bp, Homo sapiens
ctctgattcctactccatgtttaacatttggcttttaaaatatcgaaggggccgggtgcagtggctcatgcctataatcccagcacttcgggaggctgaggcaggtgggtcacttgaggtcaggagtttgtgaccagcctggccaacatggtgaaaccctatctctactaaaaatacaaaaattagttgggcatgacaatggacacctgtaatcccagctgctcaggagactgaggcaggagaatcgcttgagcctgggaggcagaggttgcagtgagccatgatcgtgccactgcactccagcctgggcaacagagtgagactccatctcagaaaataaaaataaaataatcgaaggaatatagtttgttttttttttttaagtttccaaaactgacctaaaatgctccaaacgtgacccctgacccctggtttgcatacatttgaaaacctctgagtaaaactcacatttccagggttattctactaccttgacagtcattctcataagtaggattttggaagctgatatacttgagaacagaaattgcttggctgccgtgataattgggtaaactctactaggaagttttcctgctagaaggctgctttgcccagagctccaattatattgccctatcagtgtgcctcaggtggactgggttggatataatgcatttcagaactgtttggaaagccctgttaatttttcattaagtggataatggtgctacatgctttcatgtccattctgcaagtctgctgggagcatgggattggatggcagcaggctgaaatgatctgattcccccttagtccatgagctgcaataagtaaacatctcccagcccccctccaatcttattagaattgaacttttgctctgctggcccattagcaactcactagtgtgtttctaatgtttcaggaatgaccattctaattattccttattgactgctacagaaaccatagcacttaatggcaacacgttaatggtctatgggtattggtcaataattcatacgtggagaaatagtagagggcctgcatcctctgggatgttagccaagccctctgcaatcttaaagtgctaggattcttccatctctaggtctcacctcctagtagttgtcactgaatcatcgcctttgttgaatgtttggtcttgagggagttaaatgccttcccttccaggtcagagtagcagatcattgaccaaagcagtcaggttacagaactggctctgctgggattgggagagaacatggggcccagggaatgcgtttccattgctcttcactttcctgtctcttcaggttgctcggcgctggggcatccagaagaaccggccagccatgaactatgacaagctgagccgctctctccgctattactatgaaaagggcatcatgcagaaggtgagccattatacaagacccttagcccactctggtctcttttaaggaaaaagtccagggcttctgtagtgagactggtgatcgtcgctacgaggaaattttagccccctaagtgattctgtggtaggaaacaatcttgagaagacaaacttgagacaagaatcaaatgagatatagagtacatttgatgctgttggttatgtggaaactagaagttgcatgcagaacacacaatagaaaattaggcttctctgctttcccaaaactgcttctatatatagaaatttccagaaacttaggccaactgttgtatccaaaaaggactacagggaatcaacttgaaggtctctacttcaacagcttgattgaagtctttagttattaaaacacctagacctccaaatctgttagtttgatatgctcagaagtgttagaggaataagagcatctgatttttctttcagacttacagaaactggaactcaagttaaaaacccaacgtttgtagaatggcagcagagtcacctggtagcaggttgctctttgtggaatagaggatgaagcatattttgaagaaatcagtacaaaattcttcgtgggataggtagcaaggggccacagtcttaacatcccatggataagtagaagatgggaatggcaagtctttcttagctaccaaattcgtaatgtactgttgcccagatactagcatttacacattgagccagtctacctggcagtagccaataagatgaacgtggcagaagcatatgggcaaaactgctgagaacttgtctacaagaagccagattcatctttctcataggcgggtggtaatgtgaccccatattctcctcgccaccttaaaaaatactcaacagctcattgtgattttctggataaactctagacttgctagtgcgtcatacaggctctgaggctgttcccagtctggtcaccacctaactctcgtttcttcactcaaacttgacggctttcactagcatagccaccttttaatgtaatgtagtatttgtttgccaaagaatacatgttacatgcatgtacattatcaagcataccataaaatggaagacacctattaaactgtcatcctacttaagacctagaacattcctaatgctctcagtacctggccagcccctccttgttttctgtcacctttccatttcagattgggttaggtggtcccctttgctgcttctgatggcaccagtacttgttcctaccactgctcttctcgctgtgtcttaactcctttcttgttactaccccccactggagtgtaagctcctttgggttaggaattgaggtttaacttcagtgcttgatacagagttaaatgctgtaggataggtggtcccctaccttacctctcctttttttaaagtatacggtccagtggtttcacagagctgtacaaccattaccacaattaatttcagaacattttatcaccccaaaaagaaacgccatacccatcagcagccactccccattgtcctctatcctccttagagttgatatcatcaggccaaatcctaagttcaggtgggagagccattattcctttgctgttcccaactccacatccagcatggggagatgcaacccaggacacagtaacttgaaccaatggaaatgagctgtccttatgactagcttctgtgttttctaagggagtagaagagaactttatttctgagaataagtaggcaaagagtacaggaaggcccaggaatgaggcttcgtgggctcagatcctaacacttcaatttgttagctgtatgatttgaggaaagtcacctaatctcccaaagcctctatttctaataaaaatatagataataattcttgctttaatcccacagggtaatatatttgaaaatatttcagaaataataatgtgccatccagtgtaaggaaggggttattattttatttgttacatgactcacgagtacatgagagctcattaaaaggtgaatgatagcccgtcggtgtgtagagagacttagaaaagctgtagtcccatgccctccatttttgaagggaaaattgaggttcacagaggttaagactcattagtgactaaaccaggactggaagccgtgcaactcccagcttctgatctaggattatttccactgtgctctcctgcctcactctcccacacaaactaatttttggggttgggctttaaggtaaaaccagcgtacaacactaactagaggtggttgattggtagagatgtggaagcagagccatacttgttcaattaaaaaaagattttagaatcacagcagaatgactgaagggcaggattaaactcaacagtttgcatttttaaatctaaaatgtttatcttatcagtaaatttggctgccttcccttccccctctgcgtctccagacagaagccgattattgggtttgattttcggtattaggtgcctcttgtactattgctgaacaaccagcagagagaaggtgatcccattgacgcagatgtctcatcagccacataccatgaggtccttgaacaaccaagaccttctggttctaatattataatgcagaaaacccatagaaaggtagttagcggttccctcagtgtagcagagccatgcggtgagtcatttaaagctgcaggtaagccaaaagcaattcttttcagctttggaacatacttaaggcttctgcgcaggctcgctctcatcagatttctaacctttctaaataacaaggccatactgtgaagactgtaaactctggaagtgactaaaaatgtggtcaggcttctgccttgcacctgtcagtccttaaacctttttggaacaccagactccaggctcagcataaccatgctttcaaagctgtcactggaagacagaaagtgaagattttcttttaagagtccatctagtgtgaattcgaaattcagatatcttcttttttaactgctgtagtgtcagtaaaacacttggcagataataggttcccaggagttctcaaaataagtctgagtgattggggtaatcggctgctcctttggtccctggctttgtgacttaggaatacctcgttctcttcccctgatcccatgccctgttccaactgggccctgtaaggtgtgtgttctcccgcaggtggctggagagcgatacgtctacaaatttgtctgtgacccagatgccctcttctccatggctttcccggataaccagcgtccgttcctgaaggcagagtccgagtgccacctcagcgaggaggacaccctgccgctgacccactttgaagacagccccgcttacctcctggacatggaccgctgcagcagcctcccctatgccgaaggctttgcttactaagtttctgagtggcggagtggccaaaccctagagctagcagttcccattcaggcaaacaagggcagtggttttgtttgtgtttttggttgttcctaaagcttgccctttgagtattatctggagaacccaagctgtctctggattggcacccttaaagacagatacattggctggggagtgggaacagggaggggcagaaaaccaccaaaaggccagtgcctcaactcttgattctgatgaggtttctgggaagagatcaaaatggagtctccttaccatggacaatacatgcaaagcaatatcttgttcaggttagtacccgcaaaacgggacatagtatgtgacaatctgcatcgatcatggactactaaatgcctttacatagaagggctctgatttgcacaatttgttgaaaaatcacaaacccatagaaaagtaagtaggctaagttggggaggctcaaaccattaagggttaaaaatacatcttaaacattggaaagctcttctagctgaatctgaaatattaccccttgtctagaaaaaggggggcagtcagaacagctgttccccactccgtggttctcaaaatcataaaccatggctactcttgggaaccacccggccatgtggtcgccaagtagagcaagccccctttctcttcccaatcacgtggctgagtgtggatgacttttattttaggagaagggcgattaacacttttgacagtattttgttttgccctgatttgggggattgttttgttttggtggttgttttggaaaaacagtttataaactgatttttgtagttttggtatttaaagcaaaaaaacgaaaaacaaaaaacaaaaacaaaccttttggtaactgtgcactgtgtcctttagccagggccgtgccaacttatgaagacactgcagcttgagaggggctttgctgaggcttccccttggccatgtgaaagcccgccttgttgcctgctttgtgctttctgcaccagacaacctgatggaacatttgcacctgagttgtacatttttgaagtgtgcagggcagcctggacacaagcttagattctctatgtatagttccccgtgttcactaacatgccctctctggaaagcatatgtatataacatgtgtcatgtcctttggaaacctggtcacctggtgaaaacccttgggattcttccctgggcatgactgatgacaatttccatttcatcagtttgttttgttttcctttttctttaaatcttggactttaaaccctacctgtgtgattcagtagggtttgagacttacgtgtgatactgacaggtaagcaacagtgctagcattctagattcctgcctttttttaaaaagaaattattctcattgctgtattatattggaaaagttttaaacaaccaagctaaagctatgtgaaagttgagctcaaagtagaggaaaagttactggtggtaccttgctgcctgctctgctggtagaattctgtgctccccgtgacacttagtacattaagaatgactacactgttcctcgtatgtgaaggaggcagtgctgactccgtgagtgtgagacacgtgctttgaactgcttttctattcatggagcactccatagtctcaaactgtcccccttatgaccaacagcacatttgtgaagaggttcgcagggataaggggtgcactttatagctatggaaacatgagattctcctctattggaagctaattagcccacaaaggtggtaaacctgtagattgggccttaattagcattgtactctaatcaaaggactctttctaaaccatatttatagctttcttaacctacacatagtctatacatagatgcatattttacccccagctggctagagatttatttgttgtaaatgctgtatagatttggttttcctttctttacttaccctggtttggattttttttttttttcttttgaatggatttatgctgtcttagcaatatgacaataatcctctgtagcttgagctacccctcccctgctgtaacttacgtgacctgtgctgtcactgggcataggacagcggcatcacggttgcattcccattggactcatgcacctcccggatggtttttgtttttttcgggggttctttggggtttgtttgtttgcttcttttccagagtgtggaaagtctacagtgcagaaaggcttgaacctgccagctgatttgaaatactttcccctgcgcagggccgtatgcatcctgccaagctgcgttatattctgtactgtgtacaataaagaagtttgcttttcgtttaccaagcacccgaacctgcctctttcttgccctcattggtctaattttaaagcaggcaaaagccccctggctttctctccgcccccgccctagccctctcaacaatttagccttaccaatggacagtggcatcgagggtagttagggaactctgttacctggaaatagatgtgcacagctcctcttaaactccagctaaaaatttaatccaaagaggtggaaagtcgagagatcctcttcccagccaatggtgagctgagatcacctcatccccttgagcccaccaagccaccaattcttagtaactctttttttaagtgtagcccatgtttcgctttgggttgtgtgaaaagattacaaagcagtctaggactttcgagtcccagaattatcctcagccccttatgtggatactttgaaaaccagtaagaacttaagaccattcattttctaatttttccccaataagttttgctcttgacaagtgaaaaatcaattaatggttgataaataacgaaaaaagctcaggaaggttttgcccactatgtttttttctggccgtgcagcagtaaaaacctcctcctccaagtttgtctctttctcgtgaatatgtatcactcgggaaatacgtggaaggaaataaagttcgccgggttgtattgcggtgttattacggttattacggtttctagtgctcttatttcaccctttttctgcacctctaatttggccttctcaagactcctattacagtggagaaataaagtagagccttttttcaagcctagaacagaaggctttctgtcagtttatctgctatctttctttactgttttacaagcctctaagtgtagaaacatcgagactgaatgagtgcaccgcctcttgaattggagcttgtgaggaatgaatgtctgccacataaaccccattagcttcgacagattaagaaaagatgcttggggagaaggggcaagggtgcgcaggaaaaagccgtctctgcctctcagcttcaccatgataaggctttaacaatccgctccccattattcacgggctcgttatccagcctgggcccggacccagatcgttaacctaa

SEQ ID NO: 109883 - DNA, 1789 bp, Homo sapiens
ctgaggctttctgaaagtagttctgtcatgtgggcagcccttattgatttatcttgtttcacaaacaggagcttttattattttattgccactgcctcgggcctaagcacaggccgtccagctgcaggtaaacctggttatgatccttcgtaaagctgttattgaatcttctgcactcctaccagtggcatagagaatgatgaacagatggcaaagggcccctgctttcttacttaataaagaaactaatattaatacagaatgctcgtaaatgccaggcagccaagtcatatgagaagcctgtggtgtccttgagcctccctcggttgaccgggcagctttgtttcttcaggaaatggtgctttccaccccaccttgaagtccccaagctttccctaagctccaaatgttcctttctcttcacccaggatcagttgggtgccacatgtgcacgttagcctcaggacaggtgacatttgctgagctccccccacccctccttgtatacctgtgagggccctgttcttgttaatgtcaggaagataccagcttctggaaaaagctgtaagaagtcgtcatgggggagcttgaagggtgaagcggaggaggaagctgttgggacgtaattgtaggcagctgtgtggctgagtagtgcactctgggtaattatccataatatccattacactgtgcatggaaattgtggttttagaactgcgttttggcaggccccctaatcaaatgtcttttgatagtcatccagcttagcaccctctcaattatgactgactcggctttaatctggagccattttaactgtgaatctgcattaatgaatattttggggggtagggttgtttgttgaacatgtggcagataactgctgctgggaggtttgaagggatgggctgctagaaagagccactccctgggctgtggctgctctctctttaaaggggagaaggaataggtagatccgttaactccttcagcctcagtcctcaagatacgtgctaccaaagtaactaatgagagagaagaaagatctgatgacaagctattgcctgcctccccagtcccagaagaggggcagccctaattcccagctgctctggagctgagccgcctcatgcattactgtagaaggaacagccgtggtgagggctacagaatcacagggctctggcccgggaggatgagtcagtaactatggctaccagagctgctttgaaatctgtgcgtataccaaacctttctccagtaagcaattgcatatgcaagtgacagctgagaggtggccgctgaagttgaagaatattcaaggattgttttccaccccttaacatagtaaaatgatgaggctgggcttctctgaaatttccctgtgtcacttgtggcagacagcaattaaagattagttttataaggcatcattgctttgaacagggtacaatgatgtatattattaggttagcagatgtctcttcttaccattatttctattggttttaaatgtttatcttctctaaccaggatgtaatttttggttaattttgccttttgggctgtttcaaaggtagagtagagtgggtaccatatggagaaaagaggagacccaggacatcgtgtctgctgtggggacatgaagcaactgaacggaaattggactttcacagggtttcttgcaaggcagagcagaatcattgctattattgtaattaagagagatgcattcttatcagatcatttttggcttttatgaaaggtcattttagaatcctgaatttag

SEQ ID NO: 109884 - DNA, 2124 bp, Homo sapiens
ctccgcctcctggattcaagcaattctcctgcctcagcctcccaggtagctgggattacaggcgcccaccactatgcccggctaattttttgtatttttagtagagatggtttcaccatgttggccaggctggtctcgaactcctgacctcagatgatccacccatcttggcctcccaaagcgctgagattacaggctatttgtcttcaacaaaccaatctaaaatcacttatttcctactcctccataagccacatagcacttgttattatggctatcctcattcagaacccttaaaccttataattgctcatggaattataattgctcaccaccgtgcccagcctcgtggattttttaagtcgcagtgaatccttctcagatctaatggaagtccttcattgcagagccttttcacctgcctgcccccactgcattatccaacacacacagacctgtagtatgagccaggtgaactaacaggaaaacggagcacagggaagcactgcttatcagacaggagccctggggcattctcctaagacgtgtgctggtaaaggagtatgcactggagaccttacaccttgagacaggctgaactacaaggagggatgtgaccccatccaagttatctgttacctggctttgatttgaaccaccaatcttgacaaggtgcctagcgacatggtggttagcactgagtgtatattaggggtttgtggatgaagactgtcaggccatccttccttcttgagccctttaactttttgccttgccttcttttatttcgtttgcatgtgttgttgggccagttcctccttgacctctgttttgtcatctatacagtgaatttgtttcattgctagaaagtcttttcagatcctctccactgtttggtaataatacccccaatactgctttcgaaatcctctacaggcccaagtctttattcattttggcaacattctttacccttcaagctctttcgtaattgaacgaggtatgtgagtagcttggatgagttagtaggaaaggttgaaattaattttagctaaaaggaaaatggcaggtctgtgtacagatcaaccaaatccatccagctaggccaactgaaatagagatgtgtttccagctgtaaaggcttagtcagagcaacattgatccatgcagacctcagaagcaaaatgcaaaggaacgtactggtgactcagcacttccctgcagtcttagctgtaaaagcaggaattgatgctgctctgactgaggcgcaggtgattacatcagaattggaatgcctaagccctcttgaagtccctgaaaattcagtctgccatagatacagcagtaggacttaggatctgaaatgataggattgcactctagtccttaaatccatagttttagtacaacacagaatttgttaagcaacgtagtctttcttttaaattctctttcaggtttttcatatgaaaaagatccccgattatactttgacgacacttgtgttgtgcctgagagactggaaggtaagtagccccatccaaggtttgttgccaggtagaggtttggaggtgtcagaacacctcagccatgactctcttcccaagtccagtgattaaatcagcatgaacaactcctttttgtcccaaccacctgagaaacttaggactaagctattgtgtgatgtgtccttgtcccaaacaggcaaagtcaaacaggagcctaccatgtatcgagaggggcccccttaccagaggcgaggttcccttcagctgtggcagttcctggtcacccttcttgatgacccagccaatgcccacttcattgcctggacaggtcgaggcatggagttcaagctgatagaaccggaagaggtatgcactggatgctggactcagacgggttttgatttgttgttgttgatgatgttttttgtttagatttccattgaggctttttgtgtcaagtctgctcttgcttctcattcatattctggcctggccagtgggcttggctgtatccctcctattaatgggacagtttctaatacatggacaggcagagttctccagtgtagaatacatgaaaagtatttgtaacacttctgcaaaatttagggggcaa

SEQ ID NO: 109885 - DNA, 1824 bp, Homo sapiens
agagcccatactcttcatctccttccatatttcacagccaatgtcatctctatagcacccaacattacactatgatttcctcattaatggctgcacagtactcattgcatggggatgcttttagctaatcacctattgctgaaaagtgggtacttccaggttattctcaaattccatgaacattcatctagctaagtgttttcttgttctcttgattcttgaagctaagtttctgaaatttctgggtaaaggagggtatgacattttttaaggcatctgctgccggtttttgtgagggtctgttttgttgttgtttttagtacattgtcacagatttttaaattttacgatttatctaaagaagtaattagatgtgaatcaaaaggaagaagggatccttttgttgggggaggataatcgggcttttaagctcctgcataaatgaatgacagtagcaaatcagtgggctcatttgatggaaaggagccctggtagggactgagatcatgcttgagggatatgaaaggcctggagaggtgggctcagagcttaaagttacccttctgggcaaaggctaacttggtatggtggattgaggagttcccttctaaacattgaaatagggaagtttttttagaacaccttccccagatgtatgtcttctttttctcaagtgtatttctccctgaagatttaaagcagtgtgattcccaaaatctgtggcaacagcttcacctgggactttttagaaatgcacattctcaggacccatcccaggcctactgaatcagaacccccagcggtggggcccagcagtctgtgttttaacaagtcctgcaggagattctgatgcaccttcaagtttgaaatctactgagtagtaacggttctcaagtttggtcaaacattggaattacctgaggagcttctaaaaatgtagatttccaggtttcctccagagcaattaaatcagaaattctggggtgggacccaggctttagtagtttctaaagctccccaggtgattccagtgtgcatccaaggttgagaaccactggtctctgtcattttaaatgaaagtcaaaagagctgatactcatgaagcattgggtggcttttataagtgattagttcataagagccgtgtttatgggtagctgcttcgcactcacttggttagatgggagaccgagtgttgtttcactgggtaccctgtgatgttctgagtaagtgtccagccctggaaaggcagggctgtctcccggacactggctgtgatgggcacagctgcatggggctctttgaggttcctgaatgtttctacagaagcagttgatgtctgcagcaggcaaactaggagggagtgggggaagagagggaggaaaacattttgcataattacaacatttaggaaagagcatgctcttaagggaaatatttttagcaaggcattgggttgcttactacacacagactatctggtgcatttgtgtgtgttttccctccaccctttcccattcctttccctgacttcacacacatcaaagaagttagtttcaaagaatccagcatttttaattgttctaaattaccctgacatgcttttcctatccttatacaggcttgaccacagatgcctgtgaaacagttaaggaaacaagtgtttctgattggcatctgtgattgctaagatagccatcctgccttaagtgttcacctggagtccttgcataatgttttgagtctttcgtttctagtttgcccctcaaacaggtcttccttcctgccaccttcatttgagtgattagatgattgtggccacaa

SEQ ID NO: 109886 - DNA, 2795 bp, Homo sapiens
cccccgccccctcagggattcaaacaagaataccatgacccactctatgaacatggggtcccgggcatgccagggcccccagcacacgggttccagtcaccaatgggaatcaagcaggagcctcgggattactgcgtcgattcaggtcagcatcaaattgtgctattctttgcttcattcttgcattcttctgtctcgttattcagtgtcttatacatgcagggccttggggacaggaatttttataagaattttttataatttttataagaattgccctcaaataacttaggagctagtagagctgacatgtttatgcgcaatggaatacaaaacaaaacagaaaagctatgtaagtggtaggaagtgcggtaggcattcagaagtggtatgaagtacatctctgagtccaagcctggagagtgttggggttcagttttggatggaatttgctcgaccttctctgagataatacatagattgatctattcaggcaccagttggttatgggaaatgctgaggaaataggcagaagggagagacctgttgctttatgacagaaaaattaccaagtgtgaggtagtgatcgtgtgtaaacatttccatcagcattcctctggaaagctttgatgtatttttctcaggagtagcatgaacagcaacattttttcctttaagactgacattttgatctgtcctgatgggttttgcaccccactccactcccttaaagcaagacactcaacagaggttaccatatctgtaattctttgatctgagttgtattgccagggtgatggctcatcccacatggacacaactcaaattactgtctttcgtctcgatggacactgataacatgatggctgaagaagagatcacttgagtgtggtttggtttcagtatgacagccccagcatggcaaaaatggaccaaactgcaatcctctaccccttccaatgctggtcctggcttcctaacttcaggtcccctaatccctttggcctaaaaatactcccacctgttggagcaaaattagatgtgaccaccagcagtaaaggggagcaaattagaaaagatctaaagcagtcctcttcccgttcccaccctaacacccaggagtcagcatgggcaagaggccaggcttggccttttgaaagccagtattttttcccctgccattggctctttcaccagatttagtgttaacacatttctaaaataagtgaacaatgagagtgaaacatcttttttttcctcccgtgactcttgattaggagagcctgcctttcagctggtgggttatggtgtttgccatcttgcttattggtgtggcacctctttcccaggacaaagccagaaagacatgaccccagagcaggaagtttaggggctttaccacagagctgcagttgaccgatgtgctgtttctgctgcagaaactattgacaggattgtgtccacctttgctttcctttcagaagtgcctaactgccagtcatcctacatgagagggggttatttctccagcagccatgaaggtaaggaacctgcttttctttcctcttctctcctctctcctctcctttcttcctttctttctctcggcttttctttctcctaccttccttccttcctctttctttgcttgactaatacccaagcttaaaattgctcagtttccaggctaagatttgagatcatagtttaaaccttgcttagctcatgaatatgagagctgattgattgtaatcttcaattattttgcacgcagggtttcaagcatgcccctaagccctgtgagggctgccattttcattagcaatgaccccaactttttaacagtataggacaatttggagaaaaaacaaacccaccttatttccacatttccagaaatggaggttatgtttatataacactatcagctgaaactggaatttaggagttatgtcagtgagggtggtttttatatgttttacagttatgtcagtgagggtccaaggatgtcttagagttttaaaaatgtgtctctaggttttttacttagtttgagtgcttgggtgggtaactcttcattgtaattattattatatgataaatggttgccatttttaacatgggagggaaattgaaggtattcttcaccaaccttgagggggctggtggggaagtgagctagcagggggtagggagtactggggatgggagtggagaggtatgttatgtacaaaatgcattattgaaggacacaaatgttttctcattggatttttaaaaaatacctcaaaggagaaacatgagaacagatataaagcagtttacccacaagcctggattatcacatatcctaacatttatttttatgtgaagatgatcgttttatatcaagggtgtatgctgtctgctcaagttcttgtgccctatccctttgggaccaacttaattcagtaagtctctgagatcatctcactctaattaggagcaggagcagtaggcaaggttgagcctgtgactttgccttcattagtgctgacctactaattagggtgaaagtaattgggaacaaataagatgcataagtgttccatagcatatggcttcaaggaagtggtcagaatggagctagaatgtcagtttcttggaggagcttgctttttttcatctttttttgttgttgttgttgttgagacggagtctcgctctgttgcccaggctggagtgcagtggcatgatctccgctcactgcaagctctgcctcccaggttcacgccattctcctgcctcagcctccc

SEQ ID NO: 109887 - DNA, 2044 bp, Homo sapiens
gggattacaggcctgagccactgctacaggctgacgcctgtaatcctagcactttgggaggctgaggtgtgtggatcacttgaggtcaggagtttgaaaccagcctggccaacgtggtgaaaccctgtctctactaacaatacaaaaaaattagccatgtgtggtggcaggcacctgtaatcccagctacttgggaggctgagtcagtagaattgcttgaacccgagaggcggaggttgcggtgagccgagatcgcgccactgaactccagcctggacgacagagcgacactccatgtcaacggtgaaacggttacaggtttcaccgtgttggtcaggctggtctcaaactcccgacctcatgtaaggaactcacaaggtgatctgcccgcctcgagctcccaaagtgtggggattacaggcctgagccaccatgcctggccatatttgcatatcttctgattttagcttgggagttgtggggagaaggtggggcagttgaagataatgtttattgagaacttaccagtgttataacagggccgggccttataacatacattatcttacatcatctttacaaggtatcctggctgtccttatttttttggagaggaaactgaggcttcagagcggttagataactcatccaaggtcacacagctactgagtggtaaaggttggacttcagcctaggatgttctgacttcacagccacagcctcttacccagctgtgctgcttctcgattttccgtcttcttccctgagccttaacggaagtactaagtgcatgatgttgatttcttggcagattttatgtatcatctctcagctggcctttaaacggccactgcttcacctggcacccataatcactatataacctctgtcagatccttttctcctttttttttttcctgtgagcattgtgtttactctgtgtgctggcagcagaaaccagaaaggaaatgcagaaaaagcatctaacggttttcataacgtaaaccaaatgttgggagtgtgggtgagctcgtgggaggaaaggcgctatataaatctgacaaataaataaataactagttctttaaataaactggcaccgaaaaagccttaaactgtgacctattgaatttaggcttattcggagtcagaagtccctttgctcaccaaatgtgagttccttacacgtgcactctgttgggctaatggtgggagtggatggaagggaggaggttaaggggaggaagaggaggtttggtaggaaccaggctgtgccttcactgaaagtgattgcctgccttggtaaattagaggcatctttgttgtagctgtattatgtatacaacacattcttagatacttcaaaaggactggagaagggagggtggttcaagtgaaggtcagtgagtaaagttcacaggatgtattttgaggacaaggactgaatgacttcactaatctctgcacataaaagacattatcagcagcaagctctgagaatctttcttccaaatatgttggctttgtgacctacccctgagatcccccttggccactcctgctgtctcaagacaaaccagtacggaacaatcccaattatagaatctgttctgcagatcacaggcctctaagctttgcgcatccttaaagttatgccgcggggaggggatgaggttgctggctagtgcccatgtggaagtaccttttcctgaggaggccataccaggccaactctagagtttcattctggaaggtgagaaaagatgagcactaagcggaagtgaggccaccagcctgccagctgcagaggctctggttacagaactgagcggcacatgccatctcggagctatcaaaggaactgatttctggaggtcaccttcgaaggtgctgggatggtggcagaggggaaagggagagaaaatggaaggcgttactaccattcctttcaagtagcacaagatgtgggcactttacaaaaataaggccttaagaatatcttcggccgggcgccgtggctcacacctgtaatcctagcactttg

SEQ ID NO: 109888 - DNA, 1122 bp, Homo sapiens
tttggaatacactgctttctcacttacttgacatcaaccaaagaggttaaaacccaagaagcagcaacatttaagaaaatgctcctgtacctgaagaatcctctgcttctggatagcccctaagggcatcagtattgtggtaggctagcatgctgtaattgacagaacaaaatgtgtagtgctggagtcatcaggaaaaggtcaactgggtagtgtcttctgaaggaggaaacagcctaagctgtttgagaatgtcaagaacgtctgcttcggtggttattattgaggattcagagcttaaagggatgggctaagttttctggaattttgatttaacaaaaactaccaattccttaaggatgctagataaattaagagattttatatactcgtttttcctcttgttttttcttcctctcttaaagttcattacccttaaagtaaattgctattcattttttgtccttcagattttgtagtacaataatttttagagaggaatgaacttgactgtaagtcacatttgtagcctggcctggaataaagtgaatgtgcctgatgcatctcttctccaagtgcctgttaataacatgttgtgtatggcagcacagattcactttgggatctgaaactgagtttcatggatgcttaatggatccttctttgacagactgaatgatgttcttgtaatggttagagtgcgtaggtttttttagttctgagtcttaagagggtttgtttttagcatttcatcatgtttactgtaggcttcttgttaccttttaacaagctaaaggacatttccttttatccccagtttactgaaagttttttaacatgaacagaggttgaaattcattaaacatttatactgcctcttttggggtgatcaaataattttctcctttaatttcttaatatggtgagttacactgatttatatgaaaccaaccttgcattcttgtgacaaacctaacttgtttattctttttttttttttttttttttttggagacagagtctaactgtcgcccaggctggagtgcagtggcgccatctgggtgcatagctggaattataggcgggcaccaccacgcccagctaatttttatatttttagta

SEQ ID NO: 109889 - DNA, 1001 bp, Homo sapiens
gaaaatgagacagaccaaaatccctggtttgatatttgtaaaagtaatagaaattacagtcatggataatatcaagcttcataatcacatatttaataacttttatgcctgcccaaaagtggggcagattacttttattggtgactataggttgtctcttggcttagaactttttattaagattagagggactattacttcaaaacgaaatccctaatacaaatatatggtattttgcatgatagaagtaaagagagtctcatttgaaacttttaaccgccctgtgacataggcagagtgaaaaaacccattttataggttagaaatcaagcctcagcacagttaaaggactttctaaagctcacatagccaaatacagggtcctacattcagcaaccaaaaacttccatgacgtgtaattacgccatttgtttcagttatgattttatttgggctgctaacatccactaatgtctactataaaaactgagtaattgaccttgataaatttgttttgaccttgaacattatctgtttttttattatacttttaagttctatctatctcttcaactacaaaatcttaataaattcctacatcatttaatccaaacccatgtgcttaacatgtgtcttttttgttttgctgggtgtgccgtatctgttcagttgaatagagtaagctctttgaggataaaaacctgtgatttagactcctttctttaggccacatttagccttgtaccttatttgtcctcagtatatgtttattgatagtgataaaagtttgctaaaattataccgtaaatagctaaaatgtaatctagtcaaaagtacacccttgccacacatggcggcacacacctgtagtcccagttacttgagaggctgaggtgggaggatcacttgccctcgggagtcctgggctctgtagtacactatgccgatctatcaggtgtccacactaagtttagcatcaatatggtgacctcctgggagtg

SEQ ID NO: 109890 - DNA, 1032 bp, Homo sapiens
gaaaaccattaaaaaccttgtggctctacagagcactaagttcatagggtacccagtccttctagggaaagagtctcaatcctgggatacttgatctgtggctttgaggcaggtaatatatacttcttcatgtctatcatatgttaatgtgaactttaagcaccagagaagtaatctccaaatcagaatatatgaaaaagtcttgaagcttgtgccctttacttaagaatatccaggccccaggaatgaagctttaattttaaatcattctttgctctagaagataaacatagatttgcctgaaagggggaggagaagagttgttaattcaaatgatgtcacagcacaaacagaccttcaacacatattctgactaattcctgggaaccctggaaatagttgggagaggggaccagagaacacctggcaaacatacattctcccctcacccacccaccctacacaggcatacacggagaattcttttagaaggagggaaaaaggaaaccggaagcagaggctaaaattatccttgagaaaaatcactagaagtgttaaacaagtccctgtgacgcagtgtgtttgtcacttttcagaggtacaaatatcccctcggggctacgagcgatttaactatgttaatgctgttatttcctggcaacaatgggctgcaaactagctttctgctggacctggtaaccatgctaatggcttcatttcagcttaatggttccttctctttttctgtttacagtgcctatgataggaagcctccctctgggttcaagccattaacccctcctacaacccccctctcacccacccatcagaatcccctatttcccccacctcaggcaactctgcccacctcagggcatgcccctgcagctggcccagttcaaggtgtgggccccgcccccgccccccattcgcttccagagcctggaccacagcagcaaacatttgcggtcccccgaccaccacatcagcccctgcagatgccaaagatgatgcctgaaaaccagtatccat

SEQ ID NO: 109891 - DNA, 1011 bp, Homo sapiens
ggccaacatggtgaaaccctgtctttactaaaaatacaaaaattagctgggcatggtggcgggcacctgtaatcccagctactcggcaggctgaggcaggagaatcgtttgaacccaggaggcagaggttgcagtgatcacgccattgcacgccagcctgggcgacagagtaagactccgtctcaaaaaaaaaaaaaaaaagagaaaagtgatgatttgtttagctagttctacctcgtataattactaagaagtaactcctaaagatgttttaggagtaaacattgagtcaaaatgaaaatgttactgggtcaccagaccactgactgtagttagctatttaatgagacctttgatacagtggccagtggccagcatagaagcttaacttgctctccttccccaccttccaaggtagctagacaaggagtaaccattctaactcaactagaaggcagcccttatagcgcaaaatgcatctttccactttggataaaatgctgtctctgcaacaatttagctcctagagaagacagaaaaggcaaactcggttttttgttctttgggtttattttggccactacatgtaaatcaccttgatttgaaaaattcttgttactctgccctctcagaatcctatgtggtatatgtagttggcttccaagccaaaagcagtagctccatgtatttattccatgaattcagcaaaattcactgcaccatctatgaaaggactggttacgcaaacctacccttgctggtcggtcactgagacaggcctggagcagatgttgtaagcacaaaggtagccaggctttctgctttctgtattcattagcctttcctaggtggtggattggtctgttgttttattcctttgcttttaaaatttttggaatgcctctaaagttgagtatttcttgctgagagctgatatttaaagttacttgagaaaggactttttaaaaattctatatttaatttgtaaatatgcatctgaataagaaatat

SEQ ID NO: 109892 - DNA, 1186 bp, Homo sapiens
agggcccctcatggctttcctgtcagtgtagatctgtgaaactttccattcttgttcctgccatgttttgtcctgcggggaaagtatatgtaactaacattgtacccagccttgtagggtagatgtggtccctgccttcacggttaagaacaaattggaaatataatccatttgttcacaaaaatactttttgaactccccctttgtataaagaatatactattccacatataagacgttttggggtagaaggtactatataatttagagccaaaatgatgtggtacacactaagtactgtctggatttgaagaaatcaagacatcagaattcgctggcagcttagatccttttagatacgtgcagttcctgaaacaaatacaaagtgtttctgggcaactttggcataccctctggtgttagacttgtcagcaaaattggtaactgttataataatattgtgacaatgtcaagacacttctaaaacctgaaatcagaccattcaataataccctaattgttttctttccaaacttaggtaaagtggtgattgcaaatgattatctttagataaagcaagaaaagtagacgtttcaaggacatgtagcttttgtttaaattgggtcatcattacctttcctcattattttgccaaaacttttatagcagaagactggtgagaggaagggcagtgaccacggggcagtgctgagaactgccagactatctactgtgttggaggaagggatttctgtgtcaaattctcatttactagcaacattcaaacaagcttcgctattttctgtgtctgaatatctgaaacagttgataacaattgagtgttggctgccatgatgtcaccatcaaaaaatcacgagagaaactctaatgacttctaaatataatctgctagttctcaacttattttatgtattcaggaaaagcagttggcattatataagaaaagaattatgaaaacctgtcctttccagtcagtcactggcaagactttgcagcaacattgctttataaccttgtcatctgtgatagagtcatctgtctcgtattcaatcctgaattcagaatttgggattatagaggcacctgagaggccagttggctggaagatagttcagccttatcagatattaatagaaaagagatgattgtttaggccgagtgcggt

SEQ ID NO: 109893 - DNA, 1416 bp, Homo sapiens
ttgccttattgcattggctaggaccaggcttggattttgatccctgtgtcagatagaaaaatctaaggagttccgtagtctaataagaaaagcaactatgaaattggttgacttgtgagcatcacatctaaatttaaaatggtgttatggttgtctgcaaggcaatacatgtacttgattgtgcatacccacagatatggacttaattacatcttatcagctaactgcccttcttttttctacccctgacgagctaagactgtcatatatatttgtgcatagatccttagcagagttcttatagtcaaataggggtccagacagctcacgcaagatcttcctgcctcagtggtggtagtaagacaattgtccagaagcaattgcagggcagggcagggcttctggggagagagatggcatccatggctgcagtgcggagtctgggtggtagtgactggctatagaagatgccaggtcttctgaagtgctggtagctgtctgaatgagcagaatgttttgatcagctcgactatagaagggagagtgagatcttttagatggaatgctagaatgggaggcaaggattacaaaaagtgaaggctgccgggtacggtggctcacgcctgtaatcccagcactttgggaggccgaggcaggcggatcacctgaggtcaggagtttgagaccagcctgaccaacatggtgaaaccccatctctactaaaaatacaaaaaattagccgggagtggtggtgcatgcctgtaatcccagctgcttgggaggctgagataggagaatcacttgaacccgggaggcagaggttgcagtgagccgagattgcaccattgcactccagcctgggcaacaagggcgaaactctatctcaaaaaaaaaaaaaaaaaacgaaggctactggagtcagagatggcattgcttgtgacaatggaggtgaaatagagatcctggttaattttggtatcccagagccagacaaaggtgtaagtccttgagtggatttaggggtatgacgtgtggctcgcactggggagtgtagggtaaacatgaggatacagccctgagagctggaaaaaagtatccttctgttgtcttctcccgtattgtcttccttctctctttccctttatcttttattctctctttgattggtcttttttctctcagattccttctgggagccaatataatgaaaagactaagaactgcataggtaggaatcctggccactgaccagctgtgagacgtggcaagtgactttgagcctttacgtggcaagtgactttgagccttgttttcgtgttcgtaaaatgaagacaatggaagcattaatagctttctcattgaattgggaagattgagtgaaatgatgtatgtaagagcaactgggcataaaggaaa

SEQ ID NO: 109894 - DNA, 2708 bp, Homo sapiens
gctgtgccagttctgaagcttctttccctgtacctgctaatagcaaaccctatcccaaagcacaagcacaaagcacaagccttactttcttcatgtgggactttgcccaggacaaatgcagctgttcttgcagaatgagcctgccctgaaatctcagcccctgcatgtggtatggccagccagttgttggcttaccaggtgtttgtcatgtcccctatgagtcgtatggagggccttgattccacactaaggtccagctgccattcttggttcctaagacataaaggcacaggggattttccaagccagtgtacttacttcaacacagtttaggtcttcagccccgtgttcctttttattagcctggtaaactaggctgaacagttggagcccccaggctcagagcagcgaaagcataggccacctatttccagcttcctctcgtcctgatcccagccctgctcagcatttaggggtaaaaagggctaacccaagctgcttatgagggaagaaaatgaaggagaaccataagaaagagaacttcaattctgccaaccttcccaggttggtgatagctgccttgcactctctggaggaccctggggatgaaatcgaatgagttgtccagctgttctggacaacctatttgtcctaaacgtgttttacatataaattcacaaggagtggaaattctccattttttctcaagaatcgtttgtggttgacttgggcatatattttagttcctgttatagatgcattaatatgaatatagttactgataggtgttatttttgttgatcattttgcatttgtgtaactgctatctttttacccaggcaggttgatggaagtattagcaggcagtagtcacagtgacagcagtggctgtttttattttgccatctctggagtgttcccttgtcctttctaagtgggccaaagccaacaaaatgtgtttgagaaccactggcgtagacattaggtatgaccagcatatatccttgtgtaaggctagattcccagggctgtattatccttccaattcagtaacaggccaagggtggctttcttcatttgtcgacgtatggttttgaggttctaagcatttctacttttgacatgttagtcaactataagataaaggattttttttcctccaaatatctcagaggaaatgggacataatagctgttttattgatttatttttaaaacgtattgctacatttgcttcatctctgtgtatatatggttttttcttaaccatttgaaagcaagtttcaggcattataacatttcaccccaaataccctggtgtgcgtctccacagattgacattctcctacatagcctgagaaaattaacttttattcagtaatgtttggaattccccagttgtctccagatatctctttagcaatgttgataatggttttgatctaggattcaatttaaaatcacacattgcatttatgtttatgcttcatttgtcttctttaatatgcaacagtctccctagcttttttattttccctgtaacagtgacttttttgaagtcttggccagtcgctgacttttttagggtccatttttaaagaatatatagaaatgcaaacagcatccagaaatgctgcccttaggcttagaaatctctaatattgttgattctctcacttctcacatttatgtatttgtgttgaccttaaaacagtggtgaaagaacagagtgacacagatggagataattgggtcagagatcatttgtgcatgtttgaggagagggcttttggggggctcattaaacggtttttagcacagcttgctcaatagttgattttaccatttgtggatgatttttcacctattaaatttgagaatttatccttacacaggttagctgtgtgagatattaaagaaaaacggcacattcttccatacctacaccaattctgcttttagaacttgtgtcccctaactaaatttgataacattgtcaatttttgtttttggaaactgttgccaggcaggatcaatgttaaacaagtttgagcatgcctcttatttggtttggaaatccagacatctccttttccagatattcttttttaagtgccagaacctgtccacttaaccttatctccttgtgaaccttcttgtttcccagaacagagtattatctactattagagtcattcactagtgctgttagagcagttacaaagaatattgaggtataatagattttatgtgtaaaatgagtttttaatctgctcagtcctaaaataaatatttctgaccctctctggtaatactgtagaacttaaaaaataagtcttaccctatctacatcttttttcctgctaactaggtatttgagctttgtctcaaaattcgtcaaaaaaggcaagagctaagagtaggcagcactatgttggaagcacaaggtacactccctcctgtgacttaaagccctctggtctttgccagtggagtactcagacaagttaagggcaaatcagggaaaaagaggtcatacctgctcttccctggtggatttttcggttctgttttgccagtgtccttgttatttttccatgtccctcttcttgatcatcttttcctctaccttctttccctgtgttctactcactcccacaaccacagaatattaatagtatgggcaggtgtctcggacttctctcccct

SEQ ID NO: 109895 - DNA, 1049 bp, Homo sapiens
ccaggtggctcccgatgtagctaccagcagtgaatgggaaggaaggtctggagaggcaggcttccagagagagttgtgccctaatgcaaaccagctcaccctggggcaggagaaataccactgaagtctgtttctctccgctggtagctacagccagattctgaaccgaggggcacatgatagtttttcttttgcctttcccgttttgccagagggcactttctgaccttacttctagcggacttttgcacagccttgcagatttccacaagggtcttggccatttgaatcctaggaagggtgcacagcaggcaagatcccctgccgtgtctgaatttcttacgtaaacacagcgtactgagcgagcaagcgtccctgcggcgacagctgggcgctgagcactattaggtctgccccagctagcagagctgcagattccccctcttgcctgaatggagcattccaaattggttgtgaatggagggcggggctcacttgcagactttttcaatgaataaccagaccccattgtgcagcccgtggaaaaacaaccaactcaaacaacactgggactgttagaaatatgcttgtgattggcagcttggagagcctccaaaattagtttcctttggcttccctgctgctccctgttctccaagcctgggcttaatggggtttgagttttcttttaagtgctcactttaacccttaaactgccgggctgatggcctgggattctggggaagagctgccgctgacccacaaagccagtgaagcccattcccctttctttgtctctcattttagactgtagctgtctaaagggcgtgataataagaggagagggtggtttagcttcccctggagagggaggtgttgagacttgatctgaggctgttaaacccttttatctccttcccgtggggttgtggctttagctccccattgaggattcctgcctgctcttctctgacctcccctctactccaggcctgaatagcccaggtgtttacctgccacgacacagacacttcttgcttaggcttaca

SEQ ID NO: 109896 - DNA, 2876 bp, Homo sapiens
caggaaagcatctgggaggcctctggctgtccaattcagcactcacttctcttccttctatgatcctgagaaagttactcaataccttcatgctttgagtttttccatctaggatttggaagacagagagtaattataaaagaaaaaaattataaaaaactgacatatttaggctcacacctgtaacctcagtgctttaggaggccaagtcgggaggatctcttgagcctaggagttcgaggttacagttgaagcgagtagtgatcacaccactgtaccccagcctaggtaccagagcaagaccctatctctaaaaaacgaaaacaaaagaaaactgccatgtttcctagaagacacctttcgtgtgtatacagataaaactgtgtacatatttcctatatatgaaaaagtgtttgtgcatgtgtatatatctatgtaactgtgtatgtagctaaatgtgtaccttaacacatagagcggctaaaccagggaatctgggtcagtgcatagatgtatgtacatatttactacacattttcatagaactaactatgccatggataagattggaactcaagagtgtttcaaagtcggggtaaggtgatgtgttccattcatttttctgaactgactgggtacttaaagagtgtgttactagattttagcatatataaatagcagttttttaaatatacattttgggtctgatttttaatctcacttattaatttcagttatgatattataaatatatacctgttagcatcttgaataactaagatattttatgctgagtagagagcatgataaaaatcttatttcaaagtcatggcctccataccaaatacagcctagagaattgttttaagatccaaatgaccccattttccccttgaagtgttctttttagatctgtgtttcaaagagaatggaacaactggaggaagtacaagtaatttcctaaggaccagctaattaactgataaaatcgacttttcataaatacattgcaatagacggctggggaaataggattaactgttatgacagcccttgagcctaaaacacattgatcttaatcctgtttcacgatgagattattcagctggatttctttattaatgtgtgagtttagtacagtagaggcagtgcctttcctttggagagggtacatcattttggtctttggtcctaggtgtggtgtagcaaaacaccacgttttcttgcttgggccacctctattcaaaaggatcatcctaaagtctttttgtttggcaaggtaagaaagaaaacagtgggcactttaaaaataagaggtttgagggaaaacaaggccattggtttatacttttcaggaatcagtagttctgaaggtagaaaagaatgctgatgaaagcgtgaggaaaacatggaggagagattctttgactccaggttttacagtgttactttcaaagtgtttgttagttagcccagtaccttactgctgggagggtgctaaatgatttgaaatccttcctgttttgatagcctcaaagattcttagactcagtattctgaaggacccaagacctacagtacgcatttacttaaaggagccatctgttttacaaaatctgctttcgtctacctttaattcagttaggcttatttaaaactgaatttttctcttacccttctgtgtctctgcgctgttagtcatctaacaaaacccagtaggcttaccagtcctttgtatttggtgagaaagatttgggacggggagttacatctgtgtcaagatcacttgtgtaggtgccagaagtaacaaaatcctggcatccatgaagaaattaccatttatcccctcctctttcagcattcttcagttttacaggagtaaggcatgggtagcataatgaagccgaaaatgtgtactgtctcccatttctaccatctagtagtatcattgttttaatttcagccctagaaaaaaatgtttcttggtggtggggtggggtgtgtgattctctgccgagaaactgttccctccacacatttcttgggttttagtggtggtaaagtacatccagcctcagaggctgacagccccctctcgggcatacggctgcccttgaggcagcttgggccccatctgtgccctggcacacagtgcttctccacttggaatccaaggagctcagaggcttgtcatgttgcagctcccagctcttggacaagtgccaggcatgctgatgccattaccggattaggttgcttttttaaaaattcattttgtgaactcatcaagctcatttaacagaggctttggtcgtcagtttctatcattgtcctatccctctaggcttggcttaaaggagtggcaagataccaggcccctagtatgtgccggcactagttagagtgtgtatgtataaattataaccataatgtaagtacacctttgggcctggcaggcaaatgacagtgggttagcaactcagatgttaaagggaaaagaattccccgtaagaggactctgcatagaaaataaagggggctcccttgtttaaaaagaaagaagcatctaggggaaaattgaagcagagagtgcaagattccagggagcaggataagatctagttattaaaaggccaggagtttgaggctgatctgaacagccgaggcatggaatggggattctgtggtcagaaggacttcagagaaatgcttccagtggcactgagttcgctggaggggacatgagggcaggcagtgagaagaagcatacataagacatttgaaaatagccaaatatgtgatgaaaaaaaggaaacaaccatgagctaaaatttatctcctggatttgcttttcataaagaagtatgcttttcctt

SEQ ID NO: 109897 - DNA, 3444 bp, Homo sapiens
gaaagaaaaaatgatgactgggtaaatggatttggcacggagtacatcctgtacctctgataccattaatcaagcccggcattggtgtgtaaagcttgcaccttgagtaggttttaagtacttcacagaagggtaataattttgcacaggccctaaaaaaaaggcagtctaaaattgtttcatttctttttttcccccctcttagttaaaatctcccaaattcatattacaggaggatcccttttcccccagaaattactcaatgctgaaacctctcaaagtggtattagagacgctgaaagcaccatggacgggttttatgatcagcaagtcccttttatggtcccaggggtaagtttatgtggcttttggtttgttttgtcctccctctccaatatgagtcttccccctgtggacctctttactacacttgagccttcactttctgttggcctctttcagaaatctcgatctgaggaatgcagagggcggcctgtgattgacagaaagaggaagtttttggacacagatctggctcacgattctgaaggtagtaaagctttccctgattatgttgtggcttccctgctcccagtgacagtagcgtgtagattcttccctgtcttctccctagcgaaagaaatatcctcattctggggtcttctttttcaatttcagagctatttcaggatctcagtcaacttcaagaggcttggttagctgaaggcaagtttcatggatgtcctattttccatataaaacattttactgtgctttttaataaaacttaaaggtctaaaataaaaatctattttccagcacaagttcctgatgatgaacagtttgtcccagattttcagtctgataaccgtaagtacctttctggtgatggcacatttgttctgaaattgtttggtcttagatcatccatgtctagaatatgcttttttcagctatggccagatttagacagtagtatgcatttagtttcttctaataattcagaattaaccctgaaaacttttatttcataataaaattatttctaaagtatttctactgtattgcaggtaagatttactgaacataattttatcctaaatttctttttaccttaagaatattgtaaagctgactgggcacagtggctcacacctataatcccagggctttgggaggctgaggcaggtggatcacttgaggtcaggcattcaagaccagcctggccaatatggtgaaaccccgtctctactaaaaatacaaaaattagccaggtgtggtggtgggcgcctgtaatccaagctactcaggaggctgaggcaggagaatcacttaaatccagaaggcggaggttgcagtgagctgagatcgcatcactgcactccagcctgggcaacagagcaagactccatctcaaaaaaaaaaaaaaaaagaatattgcaaagctttaagctcaaaattataaattaactgacaaaatatatttggtgttaggccaagcatctattaatcacacattgttttatggcttttttggggtttgttttataaattaagtccttgatgtgaatcatgaacctgatatttctctttttcttaaaggtgcagaaaatagttaatggaaaactccagttaactttggcttcatccaacatgttgtcaattttgtctctacccctaagctgacaaggggtggtcacagagtggcctgatttactcttacttttcgtgtagttgctgtggcttttctcttcagagaagagaaactttttcttaaaatggccactaagtgctcattactagagagaaaatgcagtgggaagctcaaaagatggctttcaacactggcaggggcatggttactttgcactgatcttttggggctgtcctcaacaggtttgggagcttttatggtctaggcagagttatgaaggacaaagccggctgatgaaatttgagcagcacagggctgctctagagagcattagtcactggcgaatgagcaggtttaagagaggcctggagaaaatgctgcctctcttgagagttgcatcatagagaaattcatgtctcttagtcatagtttataatagcaagcacctgagccatgcaaggactcaatttctcattttggaccaacagattcttcccagctttgttttatctctgggtaggtgggtgtatgtgtgtaaaaatgccactggagagagagtatcttaggtctctctctaagtaaaaagttgggtattccaaatcttttaaatgtaagagcagaggtaacagctaaacattccttaatgataggcctcatgtccaaggcacaatgccatgaaactgtaaaagggaataaactggaacacacacatgcatggttaccttagctttgtcacagcttgctgtggatgtgttctatgggagagtaaatgcatgttaattattgccctttgattgctttcgagtgattgggaagcttgccactgaaagactaaataaagataatccaagtgtgtgtgtgtgtgtgtgtgtgtgtgtgtgtgtgtgtgtgtgtgtgtgtttgcaagatgaaagacagggtttgtaatccaactttgttctgtgttgacaatttggcccagcctttccagttcttgctcagagcagcataaactgcagtctgtttgggaggtggctttcttggcagaggttctttgaaatgcttttatgacacttttgtttgtttctctgtaacccaaaagagttaaaagggagatgagatggctgcattcaaattgattgcatgtgctgaagcaagggtatgttctttgtcagcaagcaggatttatatttggagagatatttatctgtgggaataggctaaagtgaagaaatcaataaatgtgttttggctctttagaaataatttctgctcagcaaatagaatgtgctaagttctttaattaaaattccatacctcaagtggaggtaatttgggagatgtttctgcttaccaagtatgatgttttttttactttgcttactttttgttttaactgcctaaggttgagcctttctgtcttttaaggataaaagagatggttgactagcctagaaaaggtcttctaatgattctttccctctgactttatttcttgaggtagagcttcaagaagggatagattcaaatagaataacttgcttaagaagcaaggcaagaacacaaatgtgggtggtgcatctttgagccattcattcttgcaaaagcaagtttgtttgcctgcagttcagaccaacagccagaagcatgaggaggagctggcagagcccacagccggctgcatgcacttacttttccatgagcgctttccacagcctcgagttcaggaccagcttcactccagtcattttctggaagagctcgtgatttttttcaggggagggaagaaaactcattcaaatttaatgaaa

SEQ ID NO: 109898 - DNA, 1020 bp, Homo sapiens
tgtggtgtttggacggggcacgcaggcaggctggcgcgagtgtttttctaggaagttatgaactgtgtgctattttgctcctctctttcctttgactttgaaaatatctgattccttgggccaaagtgctgcggaggatgctggctgtgaagggtgtccttgtatcctgcccacttatgaaaaatttgatatgctacacacagtgtgaaaaacaaattggatggaattgctcaccgggggaaaagtttcctgtttaaaattgtgtatatgtcaaacaaaagaagttgacctttaagcattttgaattgcttagagctggagtgagtgaaattaatgtttttccaccttttgttgacttaacggtgtttttatttgaagaataaaagtgtttaggaagatggtacctccctgaaattgttactttattccactcacgttaggagaagttttctcccttctaaccccaccctttttccccagactcacacacttacccgtcctgaaatgagtttcatttgggggtgggggggtatgtctagaaaaaaatgattccgctatatgaaacagcctaagttttaaaagacctttggtagagatgcattgtaccacatgcaatggaattagtttttttaatccattacttttcatagacattttactcttttagaagttggagatgtcacaaatatctctgtaagtaaccagggagatatttgtgacattacagatgctatatctgtttagtcctcttttaaataaagagttgtgtgtgaagataagtatacctctgatcaatttattccaggaactatatatagtgttttaacagtgacctacaaaatgcttttggaaacaccatgtatgtcagatctttaattgccaataatttggaatacttaaacccagtttctctgcttcctgacactgtactgtcaaaaattaaattatctcttttttaaaaaccctactacaaatgccctggagtatatgagagaatcttgaaatcacccttttatttta

SEQ ID NO: 109899 - DNA, 1049 bp, Homo sapiens
cttacgcaggccttgcaagtttcaggtggtggaaagtggacatccagtcgccctgctcccacccagcaggctgagggcgtccggctgtgcggcgactcgagaaaatcggggcgcaccggaacagcggcctggggatggtggggataacacgggtgtggaggggacagcaccgaaagatgctgcagcctcgcagcggattagggttccggccgcattttcagagggtggagaaaactcgggggggaaccgaactcctggtcgacgagggggtgccagggagagatgttgggggtggggggattggaagcggttggtagcgccgggcgccgcacctcgtttttatgaatgtgggtgactttatgaatgaagcgggtttctttcgttggctcgctgctccctgcggcttttttttttttcttccctttttgtgaatgaagcattgagctttcttcctaaaacgctggggtgaggggcctgcgtcggaggctgggcgtgcgttggaaatgggggcgggggcgcagctgaaggagttttcatgaatggggaaggctgagaattgggtggaagtgtgtcttgttttgtgaatggggcccagcgctagagatccagttacagcctctacctgatgtggcggccgcggctcgctctcccattcataaaaccgggcccgctgcgcgccacaggggaggggcctggatcgcgccgctgcgctgtgctaaagttttcctgggggcgcccggggcgcgggtggtgggggggcaaaggaagtggtttaaactcctggatgaactcgagcctttccttcaggcttttaaaaaaattatacttggaatacaatttttctaaccctggaatgcctcttttccgttcgtttatggcagtttatttcttttaattttttagaattttttttgctcttccgggtgaagtatttcatcatgagactgaaaaatatctccccctcccgtcttctactggttgtccccttcctcctaacacattcacaaaatgtcttaggccatgatttaatctgacagattttcctaagc

SEQ ID NO: 109900 - DNA, 1035 bp, Homo sapiens
gaatgtggagaaaaaggaaagtgaaactaatgtattttgggtgcccactctgtgccagccactttcacattcaggtctgccatttaaatctcataaccccactttgaggtcaatattattatttcaaattttccattgaaatagcaatagatcaaagcagtcatgaaataacttgttgacattcttcttcactccaacttctgtatatattttgggcagttttcttgcctaaggcccaagttctcaaacttaagtacgcctcagaatcttccagagggcttgtcagaacacagactgctgggcccaaactccagactgtctgattgggtaggtctggggtgtggcctaagaatttgcatttctaacaagttcccaggtgatgctgaggctgccggtccaggaccagactttgagaaccactgaccaatgggaatgatccacccaataacttagcccagtggttcccaaactgtgctcattttttcatcatctggaaatctttaaaaacaaagaccgatgcctagctcctatgctcacacattctgatttaattggtatagggtgcaacctggcattgttgtttttaaaagctccccaggtcattctaacgctcagcaaagtttaggaaccactggcctagcctcatttctcctagactctaatcccaccctccaacatccacttcagctgcccaccactgggactacaggtggaatttgtgcatcggctagtgcttttcacagcacctctccccaaccctctctttcactgtctcagaacagctttttctagaactccttaagtctcttactcaccttctcccttttcattcagtccatctcctttcctattcaacccagaccctgtggcacagtaattactgcagccatctcctgcccacagccaatatcatcaatgcccttatcttccttgttctttctttgactatatctacctgggagggtttgaggaggagcatctaagtcaaactgcaggcacagaagtttgaagttcattttgaacttgtggaagttg

SEQ ID NO: 109901 - DNA, 1111 bp, Homo sapiens
tggcaagtgacagagccaagatttaaacccatgtctctctgccttcaagcccaggcaggcacgttctttccaagacactacattggctctcactttccaagtaggtgcattccaagagggagggaggacatcagcgtccagcagaccccaggcttctcccatctcctctacttgccctatctacatgggacccactgcggtaataggggaaggggacaacctagaaagcagagtgaggattgcctgctcttccaggaagaggtaaacgtttaccaagttaatagcaaacacacttagctggctatggatagagatggaggggacagggtacagttaaaactgtagtacggaagaaaggtgactttgtggaatactatttgtcaaggactgtgctggtgatgtacttttttaaaaaacaaacctggtgcggaggcaagatataataatattaatatccaacattgatgtgccaggcattgctctaagcactctataagatagagcagtagtgggagatctcaattattcaaacagctggaagtttaattttgctataagcctagcatcagcaaaaatcccgatttgcctcactgactcatctccagcgtaggatctggcatctgccttcctaggtttgcatcctggctctgccatcttgtagagtaggaagctgtggagccttgagcaagcatcttaacccctaagaggccctgtcagttgggggtagcaatgctgcctccctcatcatgttcatgtgaagatcgcaagagatactatgggtgaatcccagcacagtgccctagaaagctctcaccaagcatgagttgctaatattattcttattactgctcagaagggaaagggatgttttgaccaacagtgaataaattgagatgatgtagaagcaactacagccaagatggggaagtggctgcttcatctagagggtgataaggataaaagaaaatgtgggccaggcccggtggctcacccctgtgatcccagcacttccggaggtcaaggcaggtggatcacctgaggtcagttcaagacccggctggccaacatggtaaaaccccatctcaactaaaaatagaaaaaaaattagctg

SEQ ID NO: 109902 - DNA, 1350 bp, Homo sapiens
tttagtgattttatggtttgggtcacaacatttttttggaggttggtgtgggggtttctgaactgagatacgattacggagtgatcttgttctttctttggtctatcatcatcccagagtggctttgtctaatggtggtggtttaaggtattgtttatgttcaacaaaagaatacaatagcaagtccagatcctacaccaaggcctagctgacagtgctaggctagctcctggctgtcaggagctactcttctctttcttatcatgaacatgtgaaatacgctctcactttggaacctttgtacttttttggtctcttctgcctggtatattcctctccaaatactcattctgcttattccatcatttcatttagacctaagctcaaatattatcttagggaggccatctctctccattctttctctgaaataacatttccagaattgctattccttcaccctgctctatttttctccatggcacctagaactacttaactttatattatatttttattgtattgtattgtattgtactgtatttattttgagacagcatctcgctttgttgcccaggctggagtgcagtggtgtgatcttagcttactgcagcctccacctcctgggttcaagcgattttcctgcctcagcctcccgagtagctgggacttaacaaacatgtgctaccatgcctggctaatttttatattttttgtagagacagggtttcaccatgttagccaggctggtcttgaactcctggcctcaagcgatccacccgcgttggcctcccaaagtgctgggattacaggcgttagtcaccatgcccggcctatttattttatttttacctatctttcctactagaatatatagtcttcaggagcatggattacacagatcacaatgtgaatggtgccctctggagtcgtgaagtgtcatcctgcttcaacaggggccttgtctcttctctatacatttatccccatcagtcagaacagtacccagtgttcacttggtccttggtaaatatctgacaatgaaaaagtagaaagaggacattgtatctgatcaatcctttgtggggtgggggtgtccagtgtactctgaacagtgagaacaaaaggataacaagaaataattaatcatttaacattatcctattaaaatattgtataattgcttagagtacaatttatatgaattcatgttcttatattctttttactcataatcgcaattttagggatcaaaggaagcagttccaggtactggtagagaacaagttttatgaatggttgattaatacaggacatcgccaacagctggacagccttgtaccccctgca

SEQ ID NO: 109903 - DNA, 1023 bp, Homo sapiens
tccactttaattagttttaggaactcttggccaggcacaggggttcacgcctgtaatcccagcactttgggaagccaaggcgggcagatcacctgaggtcaggagttcaagaccagcctggccaacatggtgaaaccctatctctactaaaaatacaaaaaaattagttgggcgtggtggcacatgcttgtaatcccagctactcaggaggcagaggcaggagaatctcgcttgaaccaggaaggcggaggttgcagtgagctgagatcgcatcattgcactccagcctgggcgacaagagtgaaactctgtctcaaaaaaaaaagaaaaagaaactcttacatctgggtaccagagacatacatatcaaaactggcaatgtttctaagttggtttttttaggatcagccaacttgtgaatttactatgtctacttagttgttagactagtggttgatgttttaaaacgtctattcatcttttattttcttcttggacagctttcagtggacacgctacagtttctgctcttcttatacattcaacagttgaacaaggtctccctaaggacatctttgattggcgaagagtggcccagtcccagaaacaaatctcagtctcctgacctgactgaaaaatctaattgtcataataaggtactccttatatcttgatctcattctctaaaagggacaatttgtgtgggagatggttcacttgcattaaaaattatgatgagatttcttacataagccagtgatttgatggcttgttttgtttttcactttttttttaaattataaaacaaaatcagtgtgtacagtcttaatcacaatagagaactggttgcagtgccttcactggtaggaaaaccacttgctgatttgtgggcagatcatcactatgttcaattagcactgccgttttcaacatgtcaatcaatgcgaatcaacttatgtgactaaggagcatcaagaagatggagtgcttgcaaaatcttttgaaatctactgaaaaaaatta

SEQ ID NO: 109904 - DNA, 1027 bp, Homo sapiens
tcttggttggtgaactagagctgccttttaagatgatgatgtagtacatatgacacagttgagagagaggggtcaccttccaagaaaaaatgcataaatgagacttgtttcaaatcagtttatgaagaaactttgtttcctaggtatgcaaagaagccttttcaccctgatgtccttagagataatatggatcagtccagagttctcctctgggtgaaagcagaaccctttatagtgggtgccttgcaggtcccccctccatccaagtttagtcttcactatctcaggaagatatccacctatgtgcaaatccgggccacagaaggagcttacccgcgcctctactggtctacatggaggcacatcgcttgtgggaagctgcagttggccaaggacctggcgtggctttacttcgaaatatttgatagtctttcaatgaagacacctgaggagcgcctggaatggtctgaggttctgtccaactgcatgtctgaggaggaagttgaaaagcagagaaatcaggtacggattgatatgtgtgtatacttaattacttttggaaagaaaccattcttttttaaattaaaaaatgtttttgcttattacaatttttagatagaaacagagtttcactttgttgcccaggctggtcttgaactcccggcttcaagcagtcttcctgcctcggcctcccaaaatgttaggattacaggcatgagccaccatgtctggcccaataaaccattcttaatttttgtattagctgtaaaattttaggttttaggctaatggccattgtaatctcaagttatcatttgagttttagtagttccagtttggcagtatttcatgtattcaatgaattagtccttacttaccagaccttactcacctactcccaaagcagtaatgttacagagaccctgttattgaaaaagggaaatattttactgactttaaaaagattttggggtgaatgagtgttatgaacaactgatatgttacagtcagagcacctgactatttt

SEQ ID NO: 109905 - DNA, 1053 bp, Homo sapiens
gcctttgctggggggtgggagggggtgggggaagtggcattgccagactgacggagtggagaggggcatcgctgtgggttggcggggtggcggaggaaggggtagtatgggccaggctagtggggtgagaggagaaccgtgggtgacaccagtgagagggccttaggtccagagagggtcttaggtagagctagatttgcccagaggagtgggagttggatgcattgccaaacggcatttgggggatgagggaaagaaggtggttgcgagctgaagcagtgtcacgtagagctggggaagaaagagggatgcctgactgtaaggaaagatagtgacagtgccaggctgaggttgaggggatggacgtttgtttgatcaaagaggtgagttgctgtgccccgctgaggtggagaagcggacgatgctctatgccaagccttcgaagagccattctggggctgacattaaagtgggtggatgatgccagcccgagttgggactgaacgaaattggatgcgggatgggaacaagaagatctttagacagcccttgtacttcccagcttcttgagctatttattatcttaagttgcttcatctttaacattctggcagtgctactgttaggacatttatgtggcataatctttttaaagaaggaaaatcatcctttgagagtgttatttgacttttagaaaagtcaaaatcatttggagccagtatagggaaaggggggaagagttaatttgattatatggttattgcctaaagataacatgagaccataaaataaggaagtggttttcttgaccgaaggtggttctgaaagaaaagtgccacagatgttttgaataatccgaaaagaagtatatagcctcttactgtgattacttcaatatataagattcattacaaattctggtgttctctctttagtcattctttgtgtgtgtatgtgtcacataaaccttcatttttatacctctttgctcagatacaaacctaaatgtagaggaaaaataaatcttttactttgaaaaatgtaacatgtaac

SEQ ID NO: 109906 - DNA, 1308 bp, Homo sapiens
aaaacttcaagaattatttcaagcaatgaaattgaccttgaataaccttcatagagtatttttacttactactctttctgcatttcaaactcaggacattacaaacttaaacatatatatatatggcaggcaaaattcttccacaaatggatttctgcatataccaaaaaatgaaaaaaggaggatgaaaagatatcagtgtaggcctctctggagggcctgtcatttgatttccttgacttgacaatctcctaatacatgcgcgcgcgcgcgcgtgtgtgtgtgtgtgtgtgtgtgtctgtgtgtgtgtgttttgggtagggggtgttatagacctgtggggccaagttgttctgaaggcagtatagtggttaacagcataagcaccaaagtcaaactgcatgggaagtaaacctgaggaatccgtcttaactctttcctgtcaccaccctgaccttcacagctgcattgctaatctcaggtattattttttagtgactacacgagttttgagaactttaaattaaaaacatgaatggagcaatgtggaatgaacagtgcatcaaagaatttagtcttagagaaaataactttgtaaatatgccttaatacagtacataatggaaactgcattctattaaaattttagacccactgtcaaagtaaaaacaaacataaatatgactgtgccttaactggatattaccaactcatgatcttttcctccactggcttttatccccaggttctgtcagatagtgagaaacggaaacagtacgatacttatggtgaagaaggattaaaagatggtcatcagagctcccatggagacattttttcacagtgagtaatttacccatctgcaaagtgttagtgtctgagagagggtcacttagcgattaaagaattattctcattccctagttcagaaacttttgatgaacagtacaatttagctgatccaaagatcaattattgtcctccctgtgggaagatagtcttctattttcacaaagcttcaggaaagactgatggcactgaaaggacattccatctagccaaccatatcagttaaatcagtgcagacaattcacggggacatgtgttggaaatcagttcatccttgcctacttgctaccttgcaatctgcaaaccacttaatgagcaaaattattgttagcagagatagaaaaattcctgctcccatacccagagctgcctctctttcgtgctatcaacaagtgagggtgattataataaccagcattaggggaaggaattagggtagaggacctttatctcttgctt

SEQ ID NO: 109907 - DNA, 1041 bp, Homo sapiens
gttcacatagtaaacgcatatataatttccaacactcttcggccaattttaggatatacaaagccttttgtttacctgaagcagtagcattaccgtttatcctttgaatgtcatggccaaaagttattatgaggtagcctaagtttcatcaaaatttagggtgttcagaccttaatgagttttaattcagcaatgaaagaagatatgtaactctagttggcattaataagatgctctcaggacctcacctttagacttaagtttaaaactctaaaaataaaaaaagctttaagacttaggttcaggagaccagtgtatcattctttgtttaggaaatgggtcaagttatgtactgctgtatctgaggcaaaggtgatgatttctaataatctgaaacttgatacaaccaggcagagacactgccgtcacagatttgacaggtcaatgcccaaagtagtggattaaaaaaatgtatcagttgccaaatagatttgtggtattcaacttgtatgatttacaatatgctgtaatctgctctgactaggtgagcctcacgtggatggggagcctggagatttacggttccgaatcaaagttgtcaagtaagtaatctaattttagaggtcttctcagatgagtcaaattatagagacgtaggtggccaccagagcagttagacttttttctctgtttcttacccttattaccctaaacgatgatttgtaactcctctacaaggctgaaaacttggggttgggccctaggattgagccccagttatttatttacttaggacttaaaaatgcaaaagatgttgaaaggaaataattgataagtaaggagttataaaagagaaacaaacaagatagggagtcaaagctgagattttagctgaagaagtatggcaccatacaagaataggagacttttccatagacagaaccttctacataatatgcagcttctgtaaagagagcttttcttttgtgagcttctcttcagcatgaagtgctgcttagacagttttgcctgggactccag

SEQ ID NO: 109908 - DNA, 2098 bp, Homo sapiens
taaacaaaccaatttactcgttctgcatccttttgaagcctttatgtgggtagttttgagatgtatcagctgtttcagtcattgagaaccagatggactcctttcttggtcgtattctgccgtctgtacttactctgctgctgagcatactgcaataacagtgccagacctttcagctactcagaatggattgcacggcctttgacaatcttgtccttatagtttctattgacgaaaacctttctttgtttacttgtttttgtgtttgatttttcttctttaaaatcctttgttcttgactcacattgtcttaatggtatttcctttgctccttcattctttctttttgctgagctgtgacattagctttgtgtaccagtgctcactagaagctgtgtgatgtacttcagatgtaccgctcctgctgcagtacattccctttggttttctaggtacatatttcccgggataagatcaccaggccaggagcgaagctatggaagaaaggggaagggctccccaactttgacaacaacaatatcaagggctctttgataatcacttttgatgtggattttccaaaagaacagttaacagaggaagcgagagaaggtatggcatattagtgtgtgtgtgtgtgtgtgtttgtgtgtgtgtatgtgtgtgtgtgtgagatgagaaaaggatggcaatagaagaactctccagtgacatgagacatcaatcattaatgctagtagaacactaaggaatgaactcatctttctctgtaaaggcgatatattaaaaatcctgcatctttgtgttacaaaagtctatgtaagctgtgcttcaaaacctagggagtgatagagtatatgggagtgaaacagaatcacttaaaacaaatgaactggaccacactgtaaaagggaagatgaggtagactgtagaaagattagaagcttatgggtgcatgtctaggatgactggttgagaagagggccccactgggggtcctaaatagtaagagaaaggagagcaatgaaggaggtaaaaactgaaaagaggatacagaagaaggaatggaagactgagctgaagagttttctttcccttttgattgcctcttctcattcctcatttcatagagctttgtgggacatgtatgtggtatgtgggcctaaaagacaagggatcatcctggacacacatgtgcatgtgtggggttacctacatgcaattacgttggagattggtagttatttaattcacatccatgtttgtcataaggccttttatgagctttttcttgaaatatgctctttaaacgctaggaaagtaacatttttttgttaatggagtcatttgttcattctttcttcaggtatcaaacagctactgaaacaagggtcagtgcagaaggtatacaatggactgcaaggatattgagagtgaataaaattggactttgtttaaaataagtgaataagcgatatttattatctgcaaggtttttttgtgtgtgtttttgtttttattttcaatatgcaagttaggcttaatttttttatctaatgatcatcatgaaatgaataagagggcttaagaatttgtccatttgcattcggaaaagaatgaccagcaaaaggtttactaatacctctccctttggggatttaatgtctggtgctgccgcctgagtttcaagaattaaagctgcaagaggactccaggagcaaaagaaacacaatatagagggttggagttgttagcaatttcattcaaaatgccaactggagaagtctgtttttaaatacattttgttgttatttttttcatgactcctgtttcttctgtgagctatttgggttgtcctcccatcaagcaagatggatgcacacgcatgcaaaagagtgatatagatccagtccccatgcccaattacacatacggcatctgctagaaaggagcttggaagaaactgaatggttgattggggtccatgaatgaaggttacacaaagatctaattgtccttgaagtatattttctctcatttaatttgggaataataatctgatatggacactttactgtttagaaagcacctttcatgt

SEQ ID NO: 109909 - DNA, 1082 bp, Homo sapiens
tctcttgggtcctagtttttccagcaagttacactttctgtctgtgatctgcacactaccatttgaagcactttttctcctgcacaccacctcacaccccacccagctccctcctgacacccatgactgccatacagaatgtctcctctcctgccctctgcctgccccttccctcactcctgggaagaaatcagagaatttactcctctgtggtttcatttgcactgggtgatggtgattttttgaggcacctgattgagctccatgtacacattatttcagctcatagacagcaggtccacttacctgaggccacacctttacttcatcaatctggttcaaggtgtgtttgtatccccaaggaaggttttgattgatgtagtctatagccaccagagctgcttcctcagtttctggatcatcgcagttcggttgtctataaatcagccctgggccatgtggggctgagtggcagccccagagctgagcaagacaaaggagcaggacgagggacttcatggctgccccagagaggccctggcaggcgtgcaggtggttggaggcttcgggaccaacccaggtgctctgctgggaaaggtagacccatggagggtggtgggctttatttatctgttggagcctgccggaagaattgcataaggatacaggatgatttctgctttggttcaaaagaaaaaaaaaaacaccctgcaaacatcagccctggaaaagcaaacaggttaggacatcgctggtccccaagaaatctgccaaagtccatgctgctgtgggggagatgctccaaagtctgcttggaacatggtaatagcagcaaagagaagacagctgagggaatgaggtggacacagtcagcctcagagtgccatgggtttggcagcagaggaaatgtcttctactgtgatctgagcatgccatggggtctgtgagagggaagggaggatactcagcaatttgataaaattctccaatgtcagggggagttagctttccaagaggagtcctacagggagaacaaggcccacagatatagcaaaggtacagatgtgtataggagatgccaa

SEQ ID NO: 109910 - DNA, 1196 bp, Homo sapiens
ttcttccttcctcctccttctccatcttgtccttttccttctccttctcccaatggcaagtagattatattggccttgggctgggacactcggggggaacccacacccatggtgtgtgtgtgggggcaggacgaaattgaagctatctgatggtcacttgcagcatgacaggttctggctgtgttggatgacgagttgctgagggcctggttggttggtagctgcaaaacctagacgttcctgctggctgcatcttcgcggggagctgggattaggcaaggagtctagggcctggatgcagaacctgggcatgcatgggggtcagggaggatggaccagggaaacctgtgtgctggttagcatggtctatctgcggtttcaaagacagagcagcaccagaagaggaaccctgtctgggtgtgctgaaagtggcccagcagaacataaggttgtggctgggacatgaatgcaccccagggagcactgaactgctctgagctgccgactagggccataggctagctatgtgggcccatattgaggtaggggctgagcagtcccagcggcaccgcccaggctgcctgctctggggtccctgcaaaagccgccgctgagcccacggacttccgggtcgtaagcacgtggggcctgaacatctgcttggctgggtcagctgctatgacaatgcccgggcgatcgtgccctccagcgctgcctgcatgccgaggaggaagcgagtccccacgtgaataatcgggctccgccggctcacagcggatgtcagaaggtcaggtcgctctgctcctttcgcctccgtttttcttcctcatggaaactttcttcagctgcagaaaaagctggtccttttctttctgcctggcccacagcttctcctgcaaagtcaaaatttgttccttcggtctcctctggtgacattctctcttccatctcctttctcttccttcgtctgctcttcctccatcttctcgccatcaccttatccgccgcctcctcttccctctcgccccgcagcctgcgctcccgccgggggcgctccggacacactgtctgcgcgaccccccacgggacccggcccccaggccagctctgcccgccgcccacaagggctgggggcacccgccgccagcccagctggcagctatggctcctccgagcgcacaggaaaacctcggctt

SEQ ID NO: 109911 - DNA, 7602 bp, Homo sapiens
cttcattgtggaattaaacagcggtgggagcaagcggaataaccgagttcccctcccgcacctgagtgccggcagcgagccgcgagccgggacctgtcacccgcgggaagccccggccgcccgacgaacagcatctccggtttccgcctccggctccggcgcggctcccccggcccgcctctgcgtcagggacgcggaaaccccgtaggagcagggcgggcggggaaagcgaggtttaactaactccgcagctatattcttccgccgcgaggtaaagagtcccaacccaaccccgggccctaggatttccagcgaccctgtaatatcgagaaattaccacatttgggtttttctaccaacttgcttaggattttatccgaggtaacgaccccaggatcacaattttgtagctgaccgaagcacggcgagaaaattcctccgcaagaaacgggttccggccacgagcctataaaaaacgggtggttgggcgccgctgtcttttcagtcgggcgctgagtggtttttcggatcatgtctggtggctccgcggattataacaggtatgcagtctgttggcggtcgcggtctgtagtgaaggtcatagggcgccaggggagatgatagtggatggcacggaggcaaaaactctaaattaatggacgttttcttagggtacagcactcctgtgcccttccagaagcttccatgatgggtagggcccggattgtggggagataggacggtggtgcgaaagcagtggctaaagggcgtttttcctctctaagacattacgaaacttcggctgctttccttcccagtgtagagcacgggaaacatggagtaaaaagccgtggcgcagtccgagttcggtacactgtaaccaggacccgaagctttattttcggtcatccacacgagttgggggagggtcctaggctttacttggggaagggttggaggcagcggtctccactcggccacggcgcggaggcgacgggacaggaccggtgccggtgaaccgttggcatcgccctcgccaggccgctccgcccgcgtcaatcacccggcttgcgcattgttgggggcggagttcggcgctccgagctctcgcgagacgctccgcagttgaaacgggatcgccatgcgctcgggcctggggggctgcctttccgggcatccgcaggccccaacctttagggaaggcgcacagtgtggatattcgccctgaggctgctgctttagcttgtgcaggggaggctaacgtgctgagacgggttgcaaagggctatgcgcttaaggtgcagttgaggtggcctggaaggggtgtctgactgcagtattcttgtcagcagagaacatggcggcccagagggaatggaccccgatggtgtcatcgaggtaagaaacggttgtggatcttgaagctttggaaaggtgagtgtgttcatctcatttatgcgtgcattattttttctaacttacagagcaactggaatgagattgttgataactttgatgatatgaatttaaaggagtctctccttcgtggcatctatgcttacggttttgagaagccttccgctattcagcagagagctattattccctgtattaaaggtaaaagaaactggcatttttaggaaattgttctacatagacatgaaccataaaagggaaagtaacctctgggggactagcacctgtttgtattccttaaagtgaaatgatggcaatcatctttcgggactgacctgaaatgaagagaatactcattgctgatcacttgattatttgggcataatgttccaaatggaatacatggtgtgaagtagaagtgacaatttgatgtgggatcggtaaatgtgtatcctactttttttagggtatgatgtgattgctcaagctcagtcaggtactggcaagacagccacatttgctatttccatcctgcaacagttggagattgagttcaaggagacccaagcactagtattggcccccaccagagaactggctcaacaggtattgatagtgtagttcaaaaaaactgcttgcgtgttgcataggtttcaggtttcacaactgtgaagaatttaaaacttagtataaattggtcctaccagatccctccttttaattgtccatgcatgcagggagtttttgttgaaagttttaaaagaactgggtatgcaggtatggtttgtagggttgtatactaatagattgagaatccgaagcgctctcttggatgtactagatctgtccccattttttaagtttgaatgcagttgtgcaacatgaaaactgcagtgacatgttaccatttgactgtctccgtagttcgtgatgcatctgttgcatgctatgttttcaaagctcactgctatattggctttgaagtaaaccttcctaataaagctgtaggctttattgaggtcaggattatataaggcacaataccctctgggggaaaaaaatcatttgccctagctgtaattacagaacataaatttcactacgtactccctacctacagtgaagaataatgtaggaaacgttattcttggattgtctagctgatgcgtggagcagcagcatcccaagtttgacaaggcataagaaagacattaagggaattttaccttgcagcagttaggtcgtctgcattttaagcttggaagtagttttgtgctgtgcatgcataaaagctgttggcagaccagattatatttgcctttatgctttaaaaattagtcattgatcctggagttctgcggaataataattaaggcttgggttttagatccaaaaggtaattctggcacttggagactatatgggagccacttgtcatgcctgcattggtggaacaaatgttcgaaatgaaatgcaaaaactgcaggctgaagcaccacatattgttgttggtacacccgggagagtgtttgatatgttaaacagaagatacctttgtaagtattgtctttaagagagtattttttttaaaactgttaacatagttgaaaagtcaaattgtatcactgagtagatctagaaatgacagtatgactttgtttctaacagctccaaaatggatcaaaatgtttgttttggatgaagcagatgaaatgttgagccgtggttttaaggatcaaatctatgagattttccaaaaactaaacacaagtattcaggtaagcattacttcacccccctcttaaaggtagagatggggtttatttaatgcaggtactgttacaatacaactgatgtgttttgttgtcgttccccctgcttaaagcacttgatgcataactctgtctaccttcattccgtagtaagacagagacgcttggcttcagacattttcctttgggtattaatgtgtaagttgtgctacaacataattttctctttttaaggttgtgttgctttctgccacaatgccaactgatgtgttggaagtgaccaaaaaattcatgagagatccaattcgaattctggtgaaaaaggaagaattgacccttgaaggaatcaaacagttttatattaatgttgagagagaggtaactgtctgattgttagacattattttaccttcttgtataagcactgtgctaaaattgcagacactaggaccatgtcttggtttttgcaataatgctagcagagtacacacaagaagaaaagtaacagcactagattgtaaagactggggtggacctctttcttaatgtccaatgtcctttgtcttaagatttggtgcaatatctcattagacctaacagaatgaagttaatttttataatttctacgttttgagactgggttatgagactggctaagactggccaattttggtattttgggtagagacagtttcactttcttgaaaccctggtctggttggaactctgggctctaagtgctaggatcccaaagggctgggattacaggcattagcactgtggctggcccagaatgaatttttaactgaagagttggaaaaactaaatgactgttaactttaacttctaaacattacaggaatggaagttggatacactttgtgacttgtacgagacactgaccattacacaggctgttatttttctcaatacgaggcgcaaggtggactggctgactgagaagatgcatgccagagacttcacagtttctgctctggtaagaggtgttctaaaatgtctggatttccactaaagcaggattcagactacaatatagctgctaagtgctgtgttgtcgttccccctgcttaaaataaagttgtttcttaactatacctgtctgctattctcctgtagcagccagggacgcttggtctcatacatgttgattaaaattaaataccgacctgactggtgattcttgaattaaggtttattaatttgcagcatggtgacatggaccagaaggagagagatgttatcatgagggaattccggtcagggtcaagtcgtgttctgatcactactgacttgttggtaagtctcttaatgctttttaaaaatctaccaaaagttagctttttggggggcaggtttttaagtaacctttgccaacttgggctatttggaagagtaaaagaccacactccacagtgggctataccacttagtatagttcgctactattttgtggcctacatgacaggtgtcaagtttttttgaatcaatttttaaaacatgccattgtgtttcaggctcgcgggattgatgtgcaacaagtgtctttggttataaattatgatctacctaccaatcgtgaaaactatattcacaggtgagaagccagcatcttggctgtattgaaaaaaattcatacgtttttctactgtgatttgtatgaaaggtaacatcaaatcaaggaatagattcagtaaagtcagtagtgttcagtaagatgatgtaattaaatttgtactagggaaggttgatgagaacaaagtgggaaaacttgtaaacattgcccagattgtggacatagggtttttttccacaattgttggtcttaccttatgcttgagcttttagtgatgttcttgtgtccatgtgtttttcttggtgattttttctatagttgggattttcttggtgtcgcctggtagcaatttgagtgaaccctggtttagttatagtggctttatccctaaataaattgaattgtactttgttatatgatgtaaaaaaagactttttaaaaaatacaggagtcgatagcagcagttggtgacgagatggcactcagaaacggcgttgacgtaatttaggacgtggaatcataagcgaaacagcacactgtttgaataaagagcgagtcggtatttatatttgtttttcttttgtcatgattatttgatttttaagttgctccagctaaggcatttttttgtattagtatttctattagggaacctttcttattaggtggtttgtattgtctggtttctaacatgcaggtagctgtttggcagttaaacacgtttagagtaatttgagttacaacgtgtgaaactgagcaaaaaagcagtgataagtttgggttaccataccaaatatttgttttcccactggaaaaaagtaagttttagaaaatagttaacctttgcagcatttgtttacagtttacagttccagaagtgcgtcgaaatggattacataactgctcttttattcctggtgttcacatctgtcccaggctgacacctgctcttggctggcccactttggtatgggctttaatttcactaccccaaacacgatactgtcatctgctttataataatgctcaagatgcctgataaaaatctcattttgcagccagacaagccttgaatccttttggcactaactgcaaaggaagatttttttctctagatatgcattagcagctagtgctccagttagaagcacgaactataaccttgataagtaaacagcagctggtggttaacaagtggatcgtcatgttcagtagtttatacattatgtgagaagtaacgttctgattctttttcttacacagaattggcagagggggtcgatttgggaggaaaggtgtggctataaactttgttactgaagaagacaagaggattcttcgtgacattgagactttctacaatactacagtggaggagatgcccatgaatgtggctgaccttatttaattcctgggatgagagttttggatgcagtgctcgctgttgctgaataggcgatcacaacgtgcattgtgcttctttctttgggaatatttgaatcttgtctcaatgctcataacggatcagaaatacagattttgatagcaaagcgacgttagtcgtgagctcttgtgaggaaagtcattggctttatcctctttagagttagactgttggggtgggtataaaagatggggtctgtaaaatctttctttcttagaaatttatttcctagttctgtagaaatggttgtattagatgttctctatcatttaataatatacttgtggactaaaagatataagtgctgtataaaatcagccaattatgttaaactagcatatctgcctttattgtgtttgtcattagcctgagtagaaaggcctttaaaatttttttagaaagcatttgaatgcattttgtttggtattgtatttattcaataaagtatttaattagtgctaagtgtgaactggaccctgttgctaagccccagcaagcaatcctaggtagggtttaatccccagtaaaattgccatattgcacatgtcttaatgaagtttgaatgttaaataaattgtatattcactttaaaggtgcttttggtcattttatttttattacaacttcattatttacaaaaccccccatccagatatattcacgttaacaattctgagataactgctgcatcacagttgcacaaaggctgatgagttgcaaatgttcatcagcaccatctgctaggcatttgtcaacttcctacgagaaaaatttaagaaattagcatccttcaggtagttaaatgttccattgacatgtgcaaagtacctacttacggcaagtttttctgtgataatagacttctgtttatcagataagttattttctacaaccacatcatggagttgattgacgagctgagttgctgcatgaccctcatctattaaatcctataataaaaaaaacttttggtatgatgacttaatattcctttccccaaagttagtaagctgactttaccttgaccacagcttctagtttgtcaaaagagccactctgacaggcagcaaatactccatcaattttctcagctggtattacctaggtaattgaatgttcggtattaaagatgtttctaggtgagactagacatacactctgccaactggcccccgtgcccccagtcatttctgttccacacctaagttccatactttcctgggaaggctttgggagaacggaaagggccagagtaactccagtcaccactaagcaaccaaggtgctaacaactgtgcttttaaagccctttaatggctttgtgaacttccaagtttgggcacacatggattatagcttgttctggtcagtggatga

SEQ ID NO: 109912 - DNA, 1043 bp, Homo sapiens
gccatcctcatttcagtggacaacaatttcatctttccatcttttagggcttaaactctggagtcattctaaattctctttctctcatgctgcacccactctgttagcaaaccatgtcagctgtgctttcacaataaattaagaaacaactacttaattcatcaaattcatgttggtccaggacagaagacctgttctttctcttagaatcgtttcacaactgagcctcctgcttgtagtcttgctcctgtggtatgttctcaaaacagtaaccagagtgatcattttaaaagctgtagtgatgtgtcattcttccgctcaaaaaccaggaaaggcttcctcttttactcagagcttagaaaggcctacaggattctgtgtgacccagccttcagaccctgcagacttcatctcctgctcttttccaccgcttcattctgcttcacctcactgagcctactcctcagatataaagcacactttggtctcagagcctttccactgcttcctccaggcaggacaccttccttcatgtatcctattgttttcgtctcttcttcaggtttctatttagatgtcaccttgtcaaacaggccatttgacagccttatataagattataatctcctgcctgtctcctcccaccgacttggctctctcccttttatccttccttgttgctgttcaatagcgtaggtggccatctgagttactaccctgtgtcttttctcactaggaacttgcttccatgagggcaaggatgttatctcttttgctcacagctatttctttaggacccagagcaatgcctcaggtatcataggcataatccacatttgttggctgaatttaacaaaatcctcacaatgacatttcaaaattagttggaataacccaaaatttatacatgaagaaactgagacacagagaggttttttttttttttttaattttattttattttaagttccaggatacatgtgtaggatgtgcaggtttgttacataggtaaacatgtgccatggtggtttgctgcccctatc

SEQ ID NO: 109913 - DNA, 1048 bp, Homo sapiens
ttccttgttcttcagcccagttcaccagttataggaaatctttagtcattgtcctgggtagcccatgaaaagtgatattttatagagctgtgtatttttccagggaggattgtttttgttcacagatgagcaaacatcctgtaagtgctgatttttcactgtgctttccaccctgttcctccctggtgccagcgtgccaacatctctacttactggcagcctagttgaagaaacctctagagttggcccaggaggactgttttctcagtgtttagagatcatacagtgccaagggcagctgccatggcctcaagccttccctagctcagcatcttctactctttcctcttacagatggagaggcaacttcaatgcactggggaaagaaacgaacaatgacagtgaatgatgatattgcacttcttatggaccaggctctaagtgttttatgtatattaattcacttaatccccatgacaaccctaagaattgggtacaatttataactccattttataaatgaggaaacaggcatagagaggtctcatagctagtaagttggaatttgaacctggggagtaggacacccaggtctgtcctcttagtcattatgctatgctacctgctactttcttactttctttttttttttttgagacagggtctcactctgacacccaggctggagtgcgcctgggagggatgtcatctcactgcaacctccacctcccgggttcaagtgattctcatgtctcagcctcccaagtagctgggactacaggcacgggccaccacacccagctaattttttgtgtttttagtagagacagggttttgccatgttgaccaggctggtctcaaactcctgacctcctgtgatctgcccgccccggcctcccaaagtgttgggattacaggcgtgagccaccatgcccggccactgcttgttactatgtgtacattacctgcactagggtggatagaacctcatgtggcacacacatgacgccacataacacggctcatgtgttcacagtgcccagcacag

SEQ ID NO: 109914 - DNA, 1081 bp, Homo sapiens
agaggtctttggagacctgcattggccatgggctccccagttgtgagtgggctcaggctctggatcaccgctgggaagatacccttctatttatttattcattatttttatttttgagatggagttttgctcttgttgtccaggctggagtgcaatggtacaatctcagctcactgcaacctccgcctcctgggttcaagtgattctcccacctcagcctcctgagtagctgggattgcaggcgcccgccatcatgcccagctaatttttatatttttagtagagacagggtttcaccatgttagtcaggctggtcttgaactcctgacctcacgtgatctgcccgtcttggccttccaaactgctgggattacaggcgtgagccactgcgcccggccctcttctgttttctgagtctcctgtgcactcagggctggctcacatatactgcaggaagaggcaggaggaggatgacacaggggactggaccttggaggatagcacatgattgcactggccctcagattttcaaccccctgcctgtgcagcagtaaccttgactgcattgtagagactcccatccacttcatctcacccttgcccatcaggggtgtctgggaaagagaggtttctagcctgacagatctgagttccaattgcaatgcctcagttgcctcacctgtagacagagcaataataatagctggtttgtagattgttgtgagggcaaagtggagaagtgtcttagggagtgttggctccctctcctaactctttgcctctcctcctctcctggaggccctcttcatgaacacccagctgtagggcagtgctgcactgaaagaaaacgggacatgtgccttacccaagttcagtcagcgaagagtgtccattcactcattcagcattcaatcgactttttaaatgaacacctactgtgtgcttgcctctgtgctgggcactgtgaacacatgagccatggcgcttgacctcctgtagcatgtgagctaaagagagagagacaaatgctaattaaatagtaacacaatcaaatgtgaaaccgtgaattgtgggggttgct

SEQ ID NO: 109915 - DNA, 1787 bp, Homo sapiens
agtccaagacaaactttccttccttaatacatagtgctcgggggcatccttctggctgtagcatctgcgtaatagctgctcctaagaatgcaacgtgagctgaattcaaacatgaatttggagccagtacctgaatatgtgggttgttctatgccaccgggccccctgcctgtttaatttctccttcccctgctgccaaggcttccgagaagttgctgtgtaggtgcttaatgcttcggagatggtcaggtatgagtttaaatcctggtctcgggcactttaattgctaattgtgtagcactgagcaaaaataatagggatgcagcttttatagcaccaatcaggtcagtgatgttggtgatactgttgagagcttactatgtgccaggcattatgctaagtggttgatgaccattatctcatttattcctccgtataccctacaggcagatgctgtcatcattctgaaattccagatacgtaactgaggttcagagaggttaagtaagttgcctgaagccataaaacaaacgatgatggaatcagatcatggatcctgatatgtcacaccttaaccattgtgccattggtctacaatttgcctgatcctaagaatcacctgagactcttgttaaaagagcaattcccaggccctgtctcagattcagattcagcccagctggggtggagcctggggagcagtggatgcagcgggcaccctggatgatactaggatctggcaagtttaagaaacgctatattgtgccttcctgcctgtaagttgtggctcatggttggccctcaagaaatgttagctgttagtattataatataaatgaattgaaaggacagcttattgtgaaagaatatacgtctttaaaaagcttattagtcctgacactagattttaaagatagaggtcggatgggcgcggtggctcacgcctgtaatcccaggacttttggaagccaaggcaggtggatcacgagatcaagagatcgagaccatcctggccaacatggtgaaacccattctctactaaaattacaaaaaaaaaaaaaaaaaaaaaattagccaggcaaggtggcaagtgcctgtagtcccagctattagggaggctgaggcaggaaaatcacttgaacctgggaggtggaggttgcagtgaggatcaccccactgcacaccagcctgggtgacagagactccatctcaaaaaaaaaaaaaaaaagatagaagtcaaggggaaatagattctggatcaatgaatctatactctaatactctaaactcaaaactatctgcaagtgggatgtgtgcctttataggtccctgtcactagtggtcaagcaatcagtgccatcacgtgttgggtgtgatggctgagctgttcttcagggacccattcctcagtcagtgtctgctgtatacatgcagctgcagaggacatttgtgcactgaggagggctttgggtgtgttaatattctagaagaggtggagtagagcagctatgcaaagcaaggaagaaggcaggaggtgttaaaagaaaaactttagagaaaataaatgtagcaaagttcatctgagcaaagaaccatgtgtgaattggacagcactcagaaccagaagaggttcagagagctctgctgccgcagtgaggacagtgagcttttgtaggctgaacgtggaaagaaggctaagaaaatatattttattagagtgggaagaccctagttagaggttagttggtggtttctgattggtgaagcctctagttacattttactgt

SEQ ID NO: 109916 - DNA, 1030 bp, Homo sapiens
tttctcatttaattctcctaacaactctatgatagcagtcacgctatgatacaggtcacactggtattgtttcacaaatgaataaacgggcctagaaaattcaactagatttccctaggttagcagtggagttggacttcaaacctaggtctgtgtagctcacaaatgaacacttattatgcttataccattttgcctcattagaataataggaagtccttccttttttggtgaggaagaaatttagagattggttaccctgactggtgatacagagcaaagctatgtacaaattgcatcaaagggtggcagatccctacattcccatctaacatcacatcattcctaacctttttccatgtggataagcatgaccttagtcaagtcatttcttagtaagatagattgttggttgctcgtgactctcagtgaagacccagtaatgccaagaatcatggcagacagttagggggaatatgtatcttcaactatggggcagtatggcaaagatattgagggccaggaatttgactacttttgaggagcgatgacaactgagtacaggaagtgagaggaagggagcatgtaccgtgtatcatttaatcaaccttgagcttgagaccaaagggaacataccctaagtttaactaggatgggtttatccagatataatggcatcacatcgtaaattgaaaagtgtctgtgtgtaattctctctgtcttatttcttcgagaaggagtttcgctcttgttgcccaggctgcagtgcaatggtgtgatctcggctcactgcaatctccgctacccgggttcaagtgtttctcctgcttcagcctcccaagtagctgggattacagtcgcccgccaccatgcccagctaatttttttatttttagtagagacggggtttcaccattttggccaggctggtcttgaactcctgacctcaggtgatccagccacctcgtcctcccgaagtgctgggattacaggcatgagccaccgcgcccagccccaattctctcttttt

SEQ ID NO: 109917 - DNA, 1027 bp, Homo sapiens
ccaggcttctaccctttgtgcttggtggtagctaactgacttttttctttttctcatgtggtcaggatttttccactgaagcatttcttttatgatgtgggagagacagatagcacctggctagttgccttcttttggacttgctgtgatttgacttttcagccaggccaggtatttattttcccttgggtggagtgtggttctcccagagatgcctcattcatgattcatttgttcagggcatacaaaaggcatttcttaggacctaacctgggcctagcggtgtggtaggtgcctgggcttcagagaaggctaggatggttgctaattctctgaaaggtcatgccctaatagaggaaacggacatagaaactgtgaggggcgctgtcttggggtctgtacagggtgctgtgggagcacagggaagggttcctaactcacactggggatcagggaggctttggctcctgatactaaatgacctcttatttgatacactttttatgtcagacttgctggttctttccacacattgagtcaaagggtgtctctggttcctccctggatggactgatacaggccatttcactcactctcccaagggtttatctcctctggcctctccgagtctcacctggaggtgtgtgttcctgtggcgtgggttccttgggagcgtgggtgattcaccggctggcctcatcccatactgatcctctggggtgatccctattcaccttgtctcctttgctgtcataactccactgctgggggcagaggtggagatgttgagcttgtgggcaggaataagttccactgagccacagagcttgactctgctcaccttcccacaatagaactcagagttggaatcctttccccagccacctcccctcccatctgaggacagagggtaacctgcccgtcatctctggggttatctccaattttcagtctccctcatctccagctgacctcccatatggccaaatcgatcctgaggttgggaatccagttcttcaaactgagc

SEQ ID NO: 109918 - DNA, 1016 bp, Homo sapiens
gatgagttcaggatttgtttcaaaatctagggatgtaggcgtaagtggggtatacacaaaacaggactgaccatgagttgataatactgaaactggtcatgggtctgtggggttcattatctgtcatccatgtttctttttctttttctttttttttttttttttttttttgagacggagtcttcgctgtttcgcccaggctggagtgcagtggcgcgatctcggctcagtgcaagctccacctcccgggttcatgccattctcttgcctcagcctccccggtagctgggactacaggtgcccgccaccatgcccggctaacttttgtattttttagtagagatggggtttcaccgtgttagccaggatggtctcgatctcctgacctcgtgatctgcccgcctcggcctcccaaagtgctgggattacaggcatgagccacggcgcccggcatctgtcatccatctttctaatgatctatttgagacaaaagtttcatgaagctctactttctcttattacatgcagtggattctgatattttaaaatcttgtttattctctttttaaaaacctggtccttgtgcccaaattgcttttgagatccactgatgtaaaataatacgtattttgaaaaacactggtgtatcgagggagagagggacctataaaataattgattactgtcaaccagaaagtgctactagaatatggtcagagggctgtgggagcacacagaagggaaggaccgaccaacagggtcctggggagtctgggaaagcccttcagtaacttgcatggaagaggagacataggcatctttgacaagatggtggggggatatctgaccttgaggatgagggaagtggtgcaagtggggtgagccaacctgagttcagtatggctgcaatgtgagggctgttggggagtggcaggaaatgaggttacagatagcagcagcagcaaaagtcactagtcttctgggacagcctaaggaatttatattttatctgtgtt

SEQ ID NO: 109919 - DNA, 1102 bp, Homo sapiens
ttttttactgaagaaatcagtgcaatcatgaactgtgaagtaatagacatttatagagaaaatgcctggggtgcaatggtcattctgaaaatggtagcttttgttgtccttgggaagctgaggctcaggatgtgaaacaacctcctgctctttttcagaggcggcaaggagctcagagctgggttccttcacacagggaaggccccttgcaggaactgctgctggtatctgcgtcattaattctttaccttttattcttccaggctcctgtaaccatttatccttttaacttttttacctattttatttctgtaaaattttatttctgtatcttccatgccctgctgggcatgaaggcagctatcacaggccaggaaattcatgttagggaattgggtcatcttagggaactaattcaaattgctaatggtatttatttgattcagtggaaatgcaccttgcagtacttgattcggaggactgggttgaatttcgggagggtttgtttgacattgtctcatcttactctctggagcaggattcagacctggaacgctctctttccagggcaacctagccaagctatggtctctgcctcaatttattgccctttccccaggactcacatcttcctccccactcactgtttgcccaggctccggtcatctatgttagtcgtgctcttgctacacatctgccacctctttcagaaggttgagagcagccaaaacagaaacgggaactgtggctctcaataaactgtctgctcgcagaccaagagagaagcgggagtgctttgtctgtatttactgcattttttttcattttttttttctttttttgagacagggtcctgctctgtctcccaggctggagtgcagtggcacgatctcggctcactgcaagctccgccccccaggttcaagtgattctcctgcctcagcctcctgagtagctgggataacaggcgtgcgccaccatacccagctcatttttatatttccagtacagacggggtttcaatattggtcaggctggtcttgaactcctgaccttgtgatccatccacctcagcctcccaaagtgctgggattacaggcaa

SEQ ID NO: 109920 - DNA, 1050 bp, Homo sapiens
tttaacactgcctctgctggaaaacagctctcacctcctctctttctgtctcttattttttgcctttgcagatgagttttgatcatcctgagaaaaatgggccttggcctgcagacccaataaaccttccctcccatggataatagtgctaattcctgaggacctgaagggcctgccgcccctgggggattagccagaagcaggtaaggaacacacagaggcatgggctagcaaaggggtacattcctgagtaaaagctggtgtggcagatgtcctggcagggaatctcaggatctcagtatctggctccagctttgctgttttctttttgtatgtattttttagtcctctttaactgctgattcaatgtgggtttcattggggggtgtagagaaatggcttgtccatttctattaactatataagatttaagttattctgtatttcagtcaaccattctgagtacctactacctgccacgaatgcaactggtactgagtatgtcatgacgggtgggtcgggacaggatttccttgctttgagcattgatttctgccggttcagtgttggccagttctttgaaggtgatgatgcaagtcgctgtgttcttcctctagaagcctcgtgatgattgtaaagattctctgatacaattgcatcagttcaataatctttcattgagtatccgctctggtccaggcactgtgctgggtactagggtttcagaaaggataccaggaggagttttccttgagcagcaaagtcaggcatgaaaagcaagcattacaaagcactggctggcagcaaaggggagcagggatagtgcggaaggggaggtggcctccactgaccttcagaagcagaaaggtgatgctgtcagagctggcaggcacatggacaaggagaaagagtgcagcagtgcagacacctggaggcttaacacagtctggtgtaattggaaaattcaaagcttagtgtgtttttccaaaacatttgtagagaaaagtttgctactcttttccctcggttgcgccatttagagaaagtttc

SEQ ID NO: 109921 - DNA, 1058 bp, Homo sapiens
catcttgtttcattcagacatgtgaaagtcaggttctaagtccactatttccaaatcactcatgcaactttgaaaattatttgtatttccaaacctcactatactcagctataaatggagctcataaaatctgctgtgcttatctcacgggagtataataggtctgtaaaaccttaccaatacggaaagtacctgagtgttaccactcagtgcacagcagggatggcaggtgcagcactgatggtgaaggtggcttgtctgcgactgtctgacagacgaagttgcctctctagtgaccttgagtccgacttgatcacactgacttctcactgtcccttatcacagatgcatgtccttgggtggaaagatgatgaacttttagagtcagacagacctgggctggaattctggttctagaactgacttgctgttgacattggagaaaccctataaccttgctaagtctcagttttttccatttcctaaaataggattgtcaatatctctatcatagtgttgtagtaaaggttcaatgagatattgcaaggaaagtgactaccacgtagtaggccctccttaaatgctactttccttcttttctctagttcttcttcagttgtcatatggtcatgtgattacctgtgttgggtgtctgcggaaattgaattccttagtttctggtaatacaacaagcttccacccttcacttcatgatcttctatctgaattcttcttccactgtgtacatttaatcatttccacaacttcagcagcccaagataggagcccatcgttcccagagtcactggttcctgaggtctgggatggtggaagcactgctttggttggtactgccaatggattccaggaatgagctggatgtcagttcatggagaattcccagggaagagcctggagctcagggctgctgagtcatggctgtggcttcacactgctgtcttcactacccgtatcacctccacatggcccccaggctgagctgctgctctcctgtctctgttcagaataccttctgtgcctttttgcttatctagttc

SEQ ID NO: 109922 - DNA, 1087 bp, Homo sapiens
ggtcaccatcttgtttttttgttcttcctctaataccttttaatttttttttaagaaaatcactttctatcaccgtcacatcttctagtcacctctaggtgcttccaatgcctgtttgttgttcaaatttatattttggcttttggtattacttttattattattattattattattatttgagatggagtttcgctctgtcacccaggctggagtgcagtggtgtgatcttggcttactgcaacctccttttcctgggttcaagcgatcctcttgcctcagcctcctgagtagctgggattacaggcatgcaccaccatacccagctaatttttgtatctttagtagagatggggtttcaccatgttggcccaactggtcttgaactcctgacctcaagtaaccacccaccttggcctcctgaagtgttagtattacaggcgtgagccatcgtgcctggcctacttttattgttactagaagagataggattgaaaggaatggactggctagcaagaagctctctggggcaaatgacagttgagctagactttgaaagatgggcaggacttggggaaatagcaatagccgggcactccagaaagtggaattggcaagacagaggagaacaggaaatgagggaggcgttacaccactccaagagtagtgtaatgatcactcccctattagtgatcaggctggagtgcagtggcgtgatcataggaaatgagggagacattcagatacccctggctaagttggaggtggaggtgtagaagaattggctggccttgccccgtagagagagatgaggctggaccttcatggctgcttgtgctctggcaagtgtggaaattcagacagagggttaggaccagctttgtccctttcccttctcatgcctagtcaggaaccctggagctggagagcactttagggagcactaaaacctcatctccacttctatataagatgctacctaaatatccaggagagatgttcatttactcttaattaattcattcattcaacaaatgtattcagtattgagtagactgtggcagtcagtacataaactctatagtta

SEQ ID NO: 109923 - DNA, 1106 bp, Homo sapiens
cgggggcagtcaacagctcagctgcccgagtggtgctccacccagacttcaacatccaaaactacaaccacgatatagctctggtgcagctgcaggagcctgtgcccctgggaccccacgttatgcctgtctgcctgccaaggcttgagcctgaaggcccggccccccacatgctgggcctggtggccggctggggcatctccaatcccaatgtgacagtggatgagatcatcagcagtggcacacggaccttgtcagatgtcctgcagtatgtcaagttacccgtggtgcctcacgctgagtgcaaaactagctatgagtcccgctcgggcaattacagcgtcacggagaacatgttctgtgctggctactacgagggcggcaaagacacgtgccttggagatagcggtggggcctttgtcatctttgatgacttgagccagcgctgggtggtgcaaggcctggtgtcctgggggggacctgaagaatgcggcagcaagcaggtctatggagtctacacaaaggtctccaattacgtggactgggtgtgggagcagatgggcttaccacaaagtgttgtggagccccaggtggaacggtgagctgacttacttcctcggggcctgcctcccctgagcgaagctacaccgcacttccgacagcacactccacattacttatcagaccatatggaatggaacacactgacctagcggtggcttctcctaccgagacagcccccaggaccctgagaggcagagtgtggtatagggaaaaggctccaggcaggagacctgtgttcctgagcttgtccaagtctctttccctgtctgggcctcactctaccgagtaatacaatgcaggagctcaaccaaggcctctgtgccaatcccagcactcctttccaggccatgcttcttaccccagtggcctttattcactcctgaccacttatcaaacccatcggtcctactgttggtataactgagcttggacctgactattagaaaatggtttctaacattgaactgaatgccgcatctgtatattttcctgctctgccttctgggactagccttggcctaatccttcctctaggagaagag

SEQ ID NO: 109924 - DNA, 1109 bp, Homo sapiens
gctcccacagtgcagtggctggctgaagggctcctccagcgcggccagagtgggcaccgaggccgaggaggctccgagagcgagcgagggctgcgagggctaccagcatgctgtcacctctcactttgcctattataaaaaatgagagagagaaaataaaagcgaatttatatgtgaccccagaatctagaacagagctctttatctctctctcagcaaggcctattaactaacacagttttgctgctgtctgttttcagaacaaagacttgttctgtgtactcagacagtctaaaatgaaggttgaaaaaaacagctcatgtccatacacagaaacagaaactgaaccgaacaccgaaactgaaactgtttgtctcttcctgagaaacgagcaaacctgaaagctactctctcagcttcagagggaaaaaatggttgtagatttctggacttgggagcagacatttcaagaactaatccaagaggcaaaaccccgggccacatggacgctgaagttggatggcaaccttcagctagactgcctggctcaagggtggaagcaataccaacagagagcatttggctggtgagtgtgggtttcccaggcaatagctcttctgagaagagaggctcaggctcagcttagcatgatttattcctctgagagcttgttgaaggagtaaatgtcaccagggcctccatcctattgtggtcatagtactctttagggtcgacatgataagacgactccaaacctccattttgtttaactgctggaagtttcttcttttactaggtttccctccgtaaatatttctggaaaaccctggagaaggctccctattccataaattttcccttctagtttctcaccacgtcatttgttccagactacctctagagtcttttgcagtctccccagcagtcctgaccagcttcccccagctgcaccagctctccaagccttggcactgttcagtacaagcctgggacggagccttttttttttttttaaatatcttaagaattggctaagatcaagcagttactctgaacattgctttactgaaggcctggggataatagtatagaatgatgttgcaaaaact

SEQ ID NO: 109925 - DNA, 1051 bp, Homo sapiens
ttgagttagtctgagtaaggaagtattttacacttaagtagtgtatattttttcatagcaagagagataattcccttctggggcagaatagcattctgtaaatcccacaggcacttcctgtggtcttgatgtagcaggggaccatcctactacccttggactgagagagattgtgggctgcggggaagctctggctcagtttgaccctggtcagtgatctttctgcagatactgtttggagataaacttgaggacaactctggggtctcagagcttgagtgggcagcccagctctggcctctgggcttgcctacacacagggaggagagggtggtcttgaggccctgccccaggtgctgaggctgtttttactcctgtccataggtccatgacgggctctccccgcagcagcagcgagagccactcaccactctacatgcaccccccgaagtgcacgtcctgcggctctcagtccccacagcatgcagagatgtgcctccacaccgctggccccacgttccctgaggagatgggagagacccagtctgagtactcagattctagctgtggtgagtccttttccctccctcctcttgtcagggagaaggaaggcccctctgctccataggttttgtgctccattttacttatgctgttgtctctgattggagcagtcctcaattggaagtccactggcactccaagtcaccagccgttcatcccacgcttcgcttcttggggaactgggttaaccaaagcaagggatggggttttagagttgatctggggtaatcaagacttaccatacagtcattttagcttcatgccagcaaaagtagcttgtggggctggctgtaactcccagagctttctccattcctctataccaaaatgactaggactgacctgtgtgcatgttattctctgccaggctgtacattctgtaaggagaagcatctgaccttattcattctcacatcccccataggtagtagtaagtccctagcatggggtaggaactcagtaatattagtcgagttaaaagagttga

SEQ ID NO: 109926 - DNA, 1070 bp, Homo sapiens
gtcggcggggatcgagttcggcccctcccactgcgggagccgtcggaggccgcgtcggagaaacgcgcctctgttcggactggaaacgaatctgggaacgagtttgaagcgcggtcaagtttgactcatcgctttccaaggacagttagtgccttccatcttcattaacgtgaataaggaccttggctgacttctttccagatcggatttttaaaggcattgtttgcttgaggagatcatgcttctcccctcccccgccagcctttttgcaaaggctgagcccagtccagccaggacggccgagggatctctgctccgggacgcgatttgctggcattgtcttcgggcccttctggaaggctgtctcgcgctgagcgtatggggaacgtcccttctgcaactcctcttcagatcttgatgataaaacacatccctctgttttattgcatttcctagaagcttgcaggcttgcaagagcactgttggcaggaaacgtgatagaaatgaaagtcaggacacaatgtccccgaacacctcggttatccaaagcggctgtcgaggccatcgcgttatcaaattcgcttttatttactgtcgtctcctgcaccctcccgttccccagccaagagggcgaagagtgttttcccccaagaataaaaacagctccgcgatttgacctcaccccctgccgccggaccacggtggtgtctgcagccgtgcagctagttggctgaaacactgctgagaccgggagccccacggcagggcccctgatgcggggttcactacggcagttgcagccttattaaaattccttgtccttgtccctaaacagtgctttacactttcagatttccctttggatttttcagcgggttattggagttattagattaccaataatccaacagcctctgtagcctctctggctggagaggaggggggaagggcggaaggcattctccaaatcgggaggctctggccaaactaggtcaatgggaaggaggggaggggcgagaaaggggttgacggtttcaaaccttgatggagggctctctctagcgttaggc

SEQ ID NO: 109927 - DNA, 1061 bp, Homo sapiens
gtgttacatgaagtaaaaatggattatctcaatcctcatggaatataacgggacttgaccagcatttcctttttttttttccttcagtaactcacttataaggaataatagggtcctaatgaggattaagatttaataaggtgtaattagagttgttcatttcttccatcatatacattataagagtactgtgccggatccagaaatgctactaattatgttgaaactgttgtatgggtgtgttggggaagtcactgtgtttctcctcctgaaatgtttatgaattgctcaggtgagcatggtgagcatggtgttagcatgaacatcatataaagttaactacaaaagataattctgactcatgaggaacttcccaagagtacaaccacccaagtcataatctggatgcttagtgaactgcatacagtgttgtcgtcagtgctaaccctaccaaaagcctcattcccatttactgttctggtttctttcgtactcttacttttctcaacctcctgttacaactttctacgtgcaggcgcttgcgtgaaatggaaaggttgtatgaatttgcactcagtggtagaaaaatactggtttaccaattcagaggctaaaacacagaatttcaggtgtagtgtggggtcgtttgggccaaggatagcacactggtggcctaaaggctaccagcagcattttcatgggttcagtaatggcataaaagacttttaggcaagctgggcttgggtcctgcctttcgtttgcatccattacagtcctgtacacgtggcctttgtgtagctcatgccagtccttatttggagttttcatatacatttcacttaactctcacaagaccccttctgaggttggcattattatttttttattttatccatgaagaaactaaagccctaaagcccagggagtttaagtactagctctgtgttaagagctgagtaagctcatttttttttttttttttctttttttgaggtggagtcttgctctgtcgcccaggctggagtgcagtgacgtgatctctgctcacttcaagctccacc

SEQ ID NO: 109928 - DNA, 1033 bp, Homo sapiens
gtgtggtggcggggaactgtagtcccagctactcgggaggctgaggcaggagaatcgcttgaacccgggaggcagaggttgcagtgagttgagatcacaccactgcactctagcctgggcgacagagggagactgcctctcaaaaaaaacaaaaaacaacaacaacaaacaaaggagagtgtgcatttttgcatttaatttctacaatgcaggccccaaccccaacacccaaaactttatagtctagaatgtaggctccagaggggattacctattctgaatggtaggggtaaaagcctggggccttagggtctggcagtccccccagaggcaggctctctgtaagcagcatgggtctagagttggttttgagtgtacgcagagggaggagaagctgagctgatgagctgattgctgtggctgggacttgagtaggatctttcttagagtgacacattctggtgaagacagttccaggaaatgatggacgggagaggaaacttggttataaaggggcttaaaaatgccaggctaaggagtttggatatatcttaaattcatcatttgagggttttgagcaggctgagacatgatttagaggggaggtactggcatcgagaagccccctgctgcccaattccaatgagagaggtaataatttggcctaagaatattattggcttggcacgatggctcaagcctgtaatgccagcactttgggaggctcgaggcaggtggatcacctgaggtcaggagtttaagacagcctggccaacatcgtgaaaccccgtctctactaaaaatacaaaaattagccgggtgtggtggcatgtgcctgtagtagtaccagctgcttgggaggctgcggcaggagaatcacttgaacctgggaagaggaggttgcagtgagccgagattgcaccattgcactctagcctgggtgacagagtgagactccatttcctctgctgcgccccacccccccaagaaaaataatattatcaattggttcttgttcatttactcgacatag

SEQ ID NO: 109929 - DNA, 1032 bp, Homo sapiens
gattgttgattcacgtctgtaagacattttcattctcatgctttgtttggggcagagcctctgccttgtgaatcactcttatgagagggagtctcagtttcttttcttttcttttctttttttttttttttttttgagagggagtctcgctctattgcccaggctggagtgcagtggtatgatttcggctgactgcaacctccgcctcccaggctcaagcaattccactgcctcagcctcctgagtagctgggattacaggtgtgtcccaccatgcccagctaatttttttgtatttttagtagagatggggtttcaccacgttggccaggctggtctcaaacttccaaccttgtgatctgcccgcctcgatctcacaaagtgctgagattacaggtgtgagccaccatgcccagccgagggagtctcagcttcttcatcaacagcatcattctagtcagtctagtttccgtttaccttgtcatctaccacttcctccaacttaccttccccccagcttctcttattctggtgaatcacctgtgtcttcatttttcattcttattcatctgaatcatcttcttcatctaaggcaaggtacccttttatatcttcctggaaagacatctacttcatttaaaataatgctaccaatttcctcccctctggtagcaaccagcagatggaacatgctagatgaggtagaggataatctacaaatctggtctgccatatcatgggagatttcacgtaacagtgaattctttcagagcctctcagcaataccttccttgtttttcatatctgtatcaaaaggaacactggcaaacctgggttgtatttctcattccattttgggcttgaatttttctgagtctgagtctcagtttatctgtgtatgaaacgttagggttacgctatgtgtactctcagggccttttaactagaaaatgttgaatttgaatgtttactaagtcaacacaagctgcagtcaccctggattgcttgatcctccatgtacttttgagcctgg

SEQ ID NO: 109930 - DNA, 1076 bp, Homo sapiens
atcctgagtcagtgagagcagtagttagcttgcagcagcttcccctctccccctgagtgagcctttcttcctcttcctcctctttcattcagcctcatcctgccttgggtccatttgacagataatggcaccttgaggccttgtcttttgcatggcatctgtgcctgactggtcagaaattacttgtgaagcaacatagggggttgttggttgggtccacttttaggatgaagtcagaagggatcgtgagtgatgcttggccaataagaatgtattgatttgatttactaattaatttcatttccagacaccaatatatgcatagccttgtttgaagaaaattaaggagaaccattttgtaaatggcaatgagtgtaagacacttaactatcttcctgctctccctggcgtgggcttccgcgctccctgactctgcttttatttaaggtgtctgggaaggcatttgtccttcggcttcccagctggcttcttgccttctcactcactgcctcccgtagcctgtgggcagaatccctcaccgtgcccaccttgccctgctctcgtctgacctcacctctgtttccaggatttgctatggctgtcccctgccagtcatgctctgtgcttgctactctgagtgtgtccctggtcccactctcttgcagcctctgtgtcttagcacatgctgccctgatggcccaagggcccttcccctttgtttctgtctggggaatgttctgtctcctctttcttgaacctccttatattccctcaagaagacttaaggcaaaaacaaacctgaacttactatgtgtggtatttttgtgttataagtgtaggacctagtcatagtaacacatttcaaaaatatggaaccgtataaagaaaatgagcatcactcataaatcactatttagacacaagcattgtttacgtttctaatattctttctttagtggtgcttttcatgattttatgtgcatttgcattttactgactaaatattactatataaacattttcatatcttgccacttcacctaacaatacagcacaagcagcttctcatggcatta

SEQ ID NO: 109931 - DNA, 1695 bp, Homo sapiens
aaacattttctgtaaaggactgggtagtaaatattttaggccttgcaggccatacatggtctctgtctcctcctcctcttgtttccgctgctgcttcaagattcttttaactatagaaaaattatttctcgctagtaagctgtataaatatcagttttcccacctggttctagcctcaaaagtggagcaattctgtacatactttgaaagcaatgtttaaaaatttatttaatttaattaattaaaaaattaattggttactttttagagacagggtcactctctgttgctcaggctggagcacagtggcatgagcatagctcactgcagccttggaaatcctgggctcaatcaattcttctgcctcagcctcccaagtagttgggactacaggtgcacgccactgcacctggccatgtacatactgttttgtaattgttctcttccacaatttaactacttcatcagcgtcctcatagttttctgttttaggcaacccagatataattactggctttctgctgggatgcccacagcactttggccagatctctgatatagaatttaaggcacattttattgcgagtatttgctgagatgtctctttcttaagtctaactcctcgtgagtctttccagcctcagcacatttcctgagtggtgcttaatagatgctcagcaaatctgtgtggaacgattgccttaggctgcaagtttatcccttcacaatgcctacatttagattgcaactccaggcttgctccttgggccagcagcatcagtatcacttagcacttgttaccagtggagactctcggtctcaccccagaatctatgtctttaggtgttgctgaaagtttgagaagcattactgtagagctcacctctgctatattcatcatgtacttatttatagtcatccctacctcgttcttttcattggtcggaacttcctgtgactagaccatgggtattccttaattgactgacacaatttgtttcacatacagcaccagctgccatctggcctagtgagacctatgtggctgccattgtttttggctgggagtggttgtgatagatagaggagggagcaaatatttaattagcacctgctatgtgccaagtcctgtgcccagctctttacacacattcttccaagggtgagacatgatggtgtttgctgaagggaacatagggatctttaagtccagtgatttttaaccagctaaagaattgaatatatatatataacatatgcacataatatatatacatatatgtacatatattatatatgtgcatatataatatatgtacatatacaatatatgcacatatataatatatgtacatataatatacatacacacacatgcccagcccttactccagtctagaatcaaaatctctgagaagtagacctggtcaagagtacttagagaaaattccctcagtgtttccattgtacattgctggtgaaaaaccaatggtctaggccagcatcctattgtacagatgagaaaggtgaggcccaaagaggtcaatgagcatcccaaggtcacataaatttaatagcaaggccagacctagattttgtactatctgcctgaggacacacttcacattacctgagctgcttctgacctgcagtgttggggtggaagtagaagtgggtgaagaggttgaactcttg

SEQ ID NO: 109932 - DNA, 1046 bp, Homo sapiens
agtcgctctgctttttcctattttgtaagctaaacattgtcaaagcatccatttaaaggaaaagttctgctgctacatataaaagttaaaaaaccactgtgtctacccttccttttgctaacactgagaggcagagtggttcagcacaaggggacacaaagtggcttagcacgagtcacgagatgtgacgggtctgagacctctcagcctagagctcccttacccctgggccactttgttagacacacctcctttaattcaaatccccgtctcagtgggacatggctttttcattttttcaaggaaaggtttaatctgtccagatccctgtgaagatcttggctcttggcgcacctgctggaggttcgaggtcctgcaaccacagagtagctgcaggaccttcaggatgtcccgagccacaaggtctttgacctgcattttgcaacctggttgtgtctcccctttggactctgggaaccttgctgagattggtacaatatctgtgctaaaaaggtttgaaattatagctagtattgtgttaccttcctggtccaaccttcacagacattgtctgactaagtatatataactcttgagtgttcactgtgtacaccggctcacaagaaaggcaaggttcctgatcccaaggatctaatggagagacagaaacaaatataaacttttgtcaactatttcagagacagttatttttgttatacaagattgttatgcatgctagttatgtggagaggatttcatctcttagaaatgagacggggagaatctgggcgatgagaaagaagaccagaactggggagtacagtctagaattgcaaggggttgagtttgctatgtgaagcagttagttttggactgttgcacttactatttctgagatttgagcatctgacttttcctttaagcttttgttttctcatttgtaatatgggagtgagagtgcctagttcacagggtcattgctggggttaaatgagataatgtatgtaacctgcttagtataatacctagcacagagtaaacactca

SEQ ID NO: 109933 - DNA, 1035 bp, Homo sapiens
tttaggacacatgattggaccatttctagatatctgcctaatttgtaaatgaaaaatatgtaagctacacaaggagcactgactcgtctaaaatcttaacgactgactgatttgggcttggggtttggggcttgggtccttcatgccctgatcagagctgtttatagcttgaagacttcctgggggtgagaacaagcaacctcttggtgcagtccaaagccaggaaatgggtgacgattttgaaaaaggactcatctgacctccagaaagcctttacaaccaacagtagaacgagatcactaagaaacagaaccaccgggaagccaagatgtggtacttggattcccatctcggagcacctcctatatcccgacacaccatttcccctagtgtctgatctctctttctcctcctttaattcagtctggagtcattttagatcagattcattcctgattggcttcactgctccaacttagtcatcacagaaccttagggttggaatccatgttacaagttaaactgagcaattcacccccacttttcctgacaacagtgttctcttgagagtctggttttattctgagtcttccagcccggtgtctgtgcccatgaaggactcatgccaaattacattctcaggaggactcccagaccaagagactctgggcttgggcgtgagagacttggggctgttctttttctttttttttttttgagaagaagtttcactcttattgcccaggctgacatggagtttcactcttattgcccaggctggagtgcaatggcacagtcatggctcactgcaacctccgcctcccgggttcaagtgatactcctgcctcagcctcccaagtagctgggattacaggcacacaccaccatgcctggctaatttttgtatttttagtagagaccagttttcaccatgttggccaggctggtcttgaactcctgacctcaggtgatcctcccgccttggtctcccaaagtgctgggattacaggtgtgagccactgtgcccggccgaga

SEQ ID NO: 109934 - DNA, 1031 bp, Homo sapiens
ttatgttggtgagagtttcagacctagaggaaagggtcactgaaggtatgggttaagagcaactctgaaagccacctgccccccgacttctctgtgagtggggccacagggagaagatcccttcataggtagctcccctacccttgctatgcttggaaactgaccatggaaagggattcatttcttaaagggatagggctaccatttaactttctattgtgtcacttcccgaaacgcaacacctatggcttaagatccaagtgctttagaacatgagatacaaggtcttccaggctctggctgccacatccctttccaggcgtgtgtcccaccacattcctctgcatcctctgtcactggcctcaccagattagtcactttctctgagaacaccctgaactcatccttctcaaggcctttgcacattgtgttccctgagcctatttttctcctcctcatccgtggaaatcctcttgggtgttcaggcatcgtttagaagtcacatcatctgcagagaacttttagaccctcaaaaggacgttgcatgtactcgtgcttttctacacttttcattctgtcttttgtgttccagtgtgtcccccattgaggctcttcgacacccctaggcatgtccaactcagcacctacacctgctaggtccacacactgtgttatccaagacagaaggtgttagcaaacctctctttggtgcgcccctgaatgcagaacatgtgacattctgttaactaacagttgtgccagagtggtttccatagcccatactggggttcccatgatttgtttgatcatgagcccggccattcgaattgtttttgaattggtctgatatcagctagttaattgttaacccttttcaggtttgtttcccacataccagtagatgtctgcttagtgccagggttctgagctttttatttcacttaagaatataatagcaaggtagaattcaggaaagatttacttgctgttaatgtgaacttttaaaaaaatagtttgaaatgtaggctttg

SEQ ID NO: 109935 - DNA, 1058 bp, Homo sapiens
acgggaatgagaccatggattctgctgcaagattctgggacacacgtgctcatggccatcaagaacatagaacctgggcaggacagggacagcattgcttgttcatgtgtgtgtctccagagtctgctggggtctctggcatgggataggtgctgcatgaattttcatggatagaataaatctgaaggaagtgagggtccctttcccaaagggtgttctatcgggcattggctgactctctgttagggagtataggaattgtagcacagatgaagccagactacgtgatttaatgagaatgaaacaaatgactggacaagctgggcatcgtggctcacatctgtaatccctgtgctttgggaggccatggcaggaagatcgattgaggccaggattttgagaccagcctgggcaatgtggcaagaccctgtctctacaactaaacaaacaaaatcccaaatgactggacagaaagaggcttttgacttaagaagtttgtgagggcataaaaaggcagtgagtatggtgggatgccctaacagaagtcctgacaagtatgagatgtgcaaccctagaaaaacaacatcccttcacccttatttttttgatctgagaattaggaacaataatcattgccctgcctacctctcatgtttgcttagagcaagtgcattgttaaatgccaacctgttttgtaaactataaagtgtggttcctgtatgatacattattacagttgtcttcttccttaaagactcatcttgaatataaagaaaaagacaatgtaagttcagtgcacagcatcgggaacattagacatgctcagcgtatgcccttcctgccaacattgtacctcttcctcctccgggttggatgggcactaactcgtcctcagtcctgcagctagatctgcaactttgcttaatgatgcaggttaaaattgaaatagaattatgtattattatttttcacattcatttttgcctgagacaggaggtggagggtggtaaattaagaaacccgggaagctcagtgcttgagagaacccatagaagcta

SEQ ID NO: 109936 - DNA, 1049 bp, Homo sapiens
tgcggtgagccgagatcgcaccattgcactccagcctgggcaacaacagcaaaactctgtctcaaaaaaaaaaaaaaagaaaaaaagcattgattaatattatctcacagtttctgaaatttgggagcagcttggatgggtgccacaagatctctcaccacatcgcagtccaggtgttgctggacctgcagtctcaccggaaggctgaactccggggaagatctacttgctaccaagcacatcgcatgatggttggcaggatttgtttccccacagattattggactgaggacttcagtttcttgccgtgtagggctctctatagggcagctcacatggcagctgccttccctcaaaatgagtgagcaagagagagtccctgagaggcaaatcacagtctttttataagttaatcctggaggtgacacactgttccctctgcctcattctctttacgagaagcgagtcactaggtccaggccacactgaaggggaggggtgaatatgagcacaaggttattaataccaggaggtggagttacacggaaccatcttaggggctgcttaccacagattccccaggtttacatggatgtgctaaggtggaagtggacgttgcctgaagcagttgaataaacccagcacacctctgtggatcaattttacttgaagacatttttgggggaaaactccatttaaaactcttaagagaagcactggtacataatagcacaggatgtaaagttggcatggcttttaagaagaaaaacacaagttttcaattcatgccgtgttcccttacctctgtatttttgccctcctcagcggtagagcttttttggtagaaatgtcgaaaggttcttgcttgagccccttgctgtatgcgtgagacaccgagacttggaaagggcacatactcttccagggccacagagccagcggtagtcaagggaggaaccatctgcagctcctctctgtgccccgccttccaccgctccacacagtctctgctgcataatgagtctgtgcaacttttaggatgttttctc

SEQ ID NO: 109937 - DNA, 1987 bp, Homo sapiens
ccggctatttttttttttttttttttttttgtatttttagtagaggaggtttcaccatgttggttaggctggtcttgaactcttgacctcaagtgatccaccctccttggcctccaaaagtgctgggattacaggtgtgagctgccatgcctggctaactctgcttgttattaaagtgtttcttaccaattatttcatttttattaaaagtacatagtaggaaatagagttttagttggacaaggacaacatggtaaagaggaatttggagtaggaagactgtcacgttagtcactgaatcctacctagttcacttagttttttttagcctgttttcacttctgcaagccatggagtgaagagtgcctacttcagagtctttggtgctctcaaagcagcgtaatgtctataaagtacctattgagtgtggtacttcttatgtagttggcacacattaaatgttaagtttctgatcaccttaagagtccataactctttgctggagatcacccttagttcttttctttgttaggccattatctcatgtcctgtttacactgtccccttggattggcctagacctgcagcgtttgtgtattggtcaccccagatttcatgtttcctgaataattaatagcctcaacatttctaattttgcataatgactcccaaggcctaactacaaacatcataatgtgctcatgttttctgatacctggaaatatagtggctctaggaacaaaacctttatccactgtgtttcatggggaaggcttattgggcatcactactggaaagtaagtgttgattttaatggcaagactagtccaggggtgaattctactcaggtgccattagcaacctcttcatctgtaaatggaagtgtctctgggacctgctcagctctgacctgctttgggtcctttttggacttcttcaggatgagatcacctcaccgtggttcaatgccaactggtttgagttatatcagttattaaaaatgatctaatgttttccttttaaatctgaggccctggctcattctatgattaagccagtgatttatttataatatagtgtgagatggctgcagccactctatgatgtaatctaagaatgacatgaaaacaaaataggtttttacataatgaaagtattcctgtaatacagtttatagcaaggctttttccccccattgagaatggagatatattctttacttttccttctactcctgtttaaatcttcttttaccatttattacacttaaggcctttaagtcaatttttaaaaatcagcatttacaactccacaaagtctctggttactcttttaatcttgtcattttcttcgctcccaatccccactgccaccctccatggcctctgtgtgtagccgctgctcaccccctgctcagcactccagagtcctcaccattcctctgcttatgctgtttcttctgctggaatgctcaccccaatcctaacttttcttctgctaaaggcatacttcactggttcccacaaatagcatccttctgtagcctgctcaaatgcacatcttcctttaagcctcctgtgttgctccttccccttgttagaaacccgttatctgtactcttatggaacttagtgtaatagcaaacccccacccctgctccaagggctattcacagactgtcagagttagggaggagaaatgacttagaggaatggggtaaggggttttgatagttcccggtctgctcctaatagtgagacccgggcagtcagtcatggctcatctttgtggttcagtttttctcagctgaggaatgagtggtttggattttatttcacatggccaaatgatgtgttggtagtggttccttgaggtgctgtgctgagaaggactctgaggctgcatcctgactcagctaatgatcacttaggaatatcgccatgggagtggagagtgaaagcatatgagaggtatctgagctgctttt

SEQ ID NO: 109938 - DNA, 2459 bp, Homo sapiens
tcctttcacttgaacacttcgaaaccattgtagggttattaattggcctaatttcagtattagtgtgggagatgggagggtccaaggagagacgtgggaatggctggtcagtggagcagtcagaacacacctatttattgatcaagtttgccatctcatatggccatgatttgtgataccccaaaataattatgatagtcacatcgaatatcactgatcacagatcaccataatacatataataataatgaaaaagtttgaaacattgtgatagttaccaaaaggtgacacagagccatgaaatgagcacatgctgttggaaaaattgtacctaaagacttgcttgatacacagctgcctccacaaatcttctatttgtaaaaaacacagtatttgccaactacaataaagtgaagtgcaataaaacaagatatgcctttattagttaagtacacattgaagatgctcaggaaaaaataaattgcttttgtgattcaaagaatccacataaatctaacaaaagaatgacaaaacatatttctgtttttcagctctaagagatgggggcactggatcaggagcaggatggtagtggtgtgcagctttgaacaagtccagttgccgtggggtttccctccatggcagagggctctccactccgtttctctgcccctgcggcaggcacacctgcagggatgcctgggccctgggtgcagatgggcaatcgtaagcctaatcacccattcaggcacacacttacttgttttccacatgcaaatatggcctttttgcggatgaatttaatacagttgttgcttcctcattttatttaaaacaaaacaaatggccaaccatgtcagttgagggtagcaaatagaaacatgagtattatggtctttgctgtttgtgtcgattacacggctgaaaggaatcccaggcaaatcagtcttttctgtgctcaattttatttttactttatatcaccttttcttactatcgctattggttttaacaaaatttttaaagagggctatcacattcctttctcttaatcattttatcaatatttcaggctccttagttctattttgtggtttctacctttgacatttttagtttctgaacttggggcccattgttcaaagaaaggcattatggagtctccaaaagccattggcaggtggtgtctgtgacttccttagcctggaaataaacaaataaacaagcacaaattagaagtctttgccctattactgcactattagtattgattgcgcaacatcatgcaaaaagtcactttaatttatctggcaggtcctatgtaaacaccaatacagtcaagagggcttggatgggtatttgctttcatttctaatgaaatttcaggcctctagggtaggatatcaaaattggtagatcatttgcaatttattttatcccaaacacctcactttacagtcagagaaactgaggcccagagaagtaaaatgagttgctcaaggtctcagagagcaagaaatagagatgggacttgagcacctagatctctggtattgctgtcctgtagttcatggagctggcagatggatacatctgtgacctgggatgatggagagactgctggacccttcagaggatctcatctcaaggtggggtttatgtgtaaatgatatctgtgtgtttcattttcctttcataaactaatttaaaaatccttttggtatcaaattttaagccaaaaagtagtgagggggaacatgggtaggaatagcttacagcttgcctaacaaggttgttgactgcataagagtcaggagttttgggtaagagtgtgtgtgtgtgtgtgtgtgtgtgtgtgtgtgtgagagagagacagagagagaaagaggtaaagaggaacaaatgaagagggagaggtcagattgtttgacagtagcaacttcataggcacagaatttctgagttggaaggaagtcttatacgtactgaatttgactgctttattttgtagggaaggaaactgatgtgcctagagtagttgagagctttattcaaactcattccactgttattgagtagttaggatattagaccagcaacatatttgggtagaaactttcatataaaaaagcgtaatcataactatccaatcatgtcaactagtaaggctgctcaggtgggataacacatcaaccttctttgggattcttccctcagacatggttttggtgggaggagcatggcaagggaggggcgagctccaaatgcagggctgctctgtcctcggcgacctgagcagacacacgagcagagatcagagacactcttagtgaatgaacctccctattggctatattaaagtaatgctctgaaaaagttccgtgtggagagcaaggccagttagggaacattttgtggatcttttatatgtccttaactatatgattcttttattttta

SEQ ID NO: 109939 - DNA, 2009 bp, Homo sapiens
gggggagaaaaagtcatcagagttgtttgaaggttcatttatgttgatttgtttttattttgaagctaatttgtttcctgcttgtatctgtaactgatgtacttcatgtgagaccgtgttataatatacttgagttctccttggccctctgatttcttttctttttttcttttactgaaaaataaaagatttccttctctcttcagacctacagctttctcatctacatggacaacctatttttaaagaatcttcagagagtcgttgactttgttataactactactatatacgtaatttcagatgatagaattgaaaatttaacttgtttttctagaaagagtttattttccctataacttcaaagagtaatggtggggagtaggacattctgaaaataagaagaaacatgtcaaatgaatttctgacttccagctaggcatatggaataaaggtctttattccagtgacctctgctcattggaaaactttgggctggtagatttcatgattctgacgctgtatgtcctcttgagttacagtgagtgatgaggccaaatcgcagggtggatgatgtgctttttttgggctaataggtgttaaggaggcatgctgtcctttggcgttaagacagatcatttcctcagttgggtaatgtttaaggaatccactaaatccttaaatatatggcacacataaggaatgcagagcttttagacactcagccttaacatgggttattttttagcatggctaatggctaaacttgatttctactgggtttgttcaacctatttctaacttataggtaaaagcctgctttttatcctctccatcctcatcacctttttagttgtgtctctgcttgattcttcttgcattcaggtctatattgtattataaaaagaaagagagagacagagagagagagagagaaggaaaagaagaaggaaaaaaaaaccacacacattgaatgggaaggcaggagagtagagctctgaccccagctctgtcatagccacctgtgtgactatttgcaagcattttcatccattcaacaaatacacaccaggtactggagatacaaaactgtgaaagacacggttcttaccctcaccacttacagtcaggagtagagagttaggtacacaaatagaatgtgaaatcacttctcctttctgggtcttcattttacaaatgcaagagccagaactgggccaggtgatcatcaaggtcccttctgaggctaacatgccatcattcatgcaaaattcattaaacatctgataatcacttacctaagtgaaaattagcaaacatttcccctttctccttagtttgtaggggatgatattgaagacgaatgaggcgatgtctacaaaatgctttaataagcaagttggagaaagagattatgtaagtttgaggcattatgattaatgaaaaatgaaaacaagggctgatgttttcagagagagaacagatggttcctttgttcagaatttgagtataaaaaagagaggaagaaaagatacttgctatattgtttaggccctgaatgtgagtaactttaaaatgccaaaacaatctggttaggaaagtcccatagattcaaaatagctcttacagtgatcaaactataattaatataacaaaaaaaagacagaaaaatactaataagaaatgccacagtgacagctgacacaacctgacaaaaactcctatttttacaacaactctagaaacttgattttttctgttctcaggagttataccacactgtaaaacaaactagtgagaaccgatttaaaactgtttctaccgttccccctacccctcaggttattttagtttcccatgactcataaaggaaatcttcaggattcacaagaaattggcaattcttttccatctttgctgttgagtattgataggaaaacagcatagtttggggcaatttaagtagagaacaaacctccgggggcttggggtggtgtctcagaaggccg

SEQ ID NO: 109940 - DNA, 1188 bp, Homo sapiens
caaagtgctaagattataggtgtgagacaccacacccagcccagccctgctttcacaaaaaacaaaataatgatgaatatattgtactaccctcactgttttcatttgtctgtgaatgctttttattttatcaggaaaaggaaaaatttctgtttcttgactgtaattgttgaaatgtattttcaaagttttttactttatttttggactgataccataaaatcgtgtgaaatgatgtgaggattttctaatggagaaatgacttagaatatcccttggatgtcctatctgctttttaattgttttatcatcccagacatgtttctctattcctgtctattcttttatctgtaaaatgaggttattgaactagatgctgtctacaactttttttttttctttcattaacattaaatctctggtacctgagaacattgggatcaggctgatatgtctaggtgtctatttctttggtctacccttcaagtaggaatgaaaacccatagaatttctgtaattatcagcctcaataactttctaaagcctttaggaagcagataccctgcaatttatctcactaatttgtttgtgattaacactctctgccccttctcatatcccaagctcagtgttttgatatttaattacagggaattctttcctcttcatagatgatatagcaattgtatttcatttctcttatctgaaatctctgctgactttccatgtcttatgaatttaaatagtctaaatagggcatgagatcttaaatattccttccagtttctacattttctattcagcaacaacattttccctggaaaagggtgaaagcctgtgagtcccccacagggcaggagcactgaatacacccacattttcctaccatctgacatagatgagacacaaagtagggactcagatgattatttaactgaatcaactggattccttaattctcacaatattatccttcctaatttgtaaatagggaaatggaggcttagtcacacaaaatatcttgttcgaagttactaatcaattaagtaacttaataatttattgacatctgaggcatttctctctttctacagcctcagaccagaaatgatgggatttcagccttcttttcttagagattggtgagccaagacctggagagagaactctggttgtcttaagtcaccc

SEQ ID NO: 109941 - DNA, 1049 bp, Homo sapiens
aactttttattgtaaatgattttaaacttatttaaaaagttgcaaaataagcatagtccaatatagccatatacttttactcagattcgtctattgttaacattttatcccattggatttatcatcctcccccttcctccctcccttcctctctttctctgtctacacacacacacacacacacacacacacacacacacacacagtctcccccaccccatatatatatatatatattttttttttttccagaagtatttcagagtaggtcacttatatcattgcctctacccctaagtacagtgtgtatttcttaataataaaaaaaataaagatagtctcatcatattcacagtatggtaatcagcttctgtacatttgacactgattcaatacttcagtctactgtctgtacttctcctttgtcaggtggctcagttctgtccttgaagaaaactgctttttcccattcagtgtacagtccagcctaaggtcaggtagtgcatttagttgtcaagtctctttagtctcctttgatttggaacatttccacagcctttctttatcttttatggcattgacacttttgttctccccctttacaattatagtattcctcattttgtattagtcactggtttcttcatgttttgattcaattatgcattccctgaaggaatattacaaagataatgtgtccctctcagggatcacatctggagtcttatgtgtccatctctccgtcattggggatgttaattttgagcaactgatcaaggcattgtccagtttctccacagtataggtattctttcctttgcaattattaagctatccatggggagacactttattcttgctccttatcaaaatattaccctacattttttcctaaaccagcatttactatgattggtgcaaaattaggattccatgttactactctcttcacattcatcattcagcatcctgcgttctactgtatgcgggagccccttccttctcctccctccctcccgctctctctctctcttttcctctttcttttc

SEQ ID NO: 109942 - DNA, 1069 bp, Homo sapiens
gactgaaacccaataagaacatacatatttttgacttcaacacagagctctttaccttttacaagtcatcctctctggtccatttttgtcaaaaattaacgtatttaatagagaaggtgtttaaaacaaaaggagggtttagagattatctgtgctttccctcccctcagtaaaacctgtaatgccccttcttccccaaataaattatgagaatggggctgcataaattttctgtgagcatgtgtgactatgtttcctctggttcctcgccgcatggtaattactctgtgctctctcctgcaaactgcccatgtttcactgcttgtaggtcaaagctgtattgagtaagaagtgaatttgggaagttttgcaagtaaagtgctacctgagtcagtgactgtgtcttaattcacctttttgcttccaggttcttgctcagggccatctgtgcacatggttttcactcaataagtgcctcatgaattttaatgactacacattaaactaaaacaaggtctgcccacctattcttaagaaattaaactctacaaatgatgtattccaaaactgcaaaagagagtgaaagccaaaacagatgaagctgtccttatatgggcaggaaaaactcagtaagattttatcagttcagtaggtgttgcatatggtgatttggaactgtctgccagttccaagatggccttactttattgtatggtcagtacagtttgtatctagtcctcatcaggttaggcctggaactccccaacccctgttaaaaacagcaaatcagggtttctgtggtggaatggggaggaaactggcttgcattaattgatgtataaggtagcccatgataaactcaatgccacttttatacacatctgggagcaagagcttttggttaattggcttgcctatgtttttgctctgccttggatgctacagaaatggaattgtttgttagagtcgttgcatggtgaaggaaaaatcagagccaaggttttgaaggacctaagggagaacattctgtgttctgcaggcatcttcctccttgggacacaaacagctc

SEQ ID NO: 109943 - DNA, 1050 bp, Homo sapiens
ggcagggtactaactatagtttgctgaccttatccactgtgtggattcatcttgggaaaggagcagagaaggtactgagaataccacatctgctgaagactctgctggatgctttctccagacatctcatacagtcttttcaacacccactcaagatataggagctgttccatttcacagacgaggaaacggaggctcagagactttgcattagtctaccaggtcataaagctagtgttcacagaactgagactcaaaaccaggtctgtatacccatgaaattggtgcttttcctctatgcctgacacatgacacatcatatcaaggcatcaccttttcttgaatcttattcatagattctgggcaagcagcctcagcttggtcctatgaaacctttcctgacctcctccacacaccccctacacacactctgtgaacattgtaatggttagttgtatacacagttgtttccagtgctggactgtgagttcttctggatgtcttcctatagtgtttaattcatagctggcttttgatacgtatgtaatgaaaattctggttttctgcaccatactgtgtttccatgctgacactaaaaatctagacatgctttcttagaattaggcaacccatttacctttaaggatgcactgactttggtttttgccttaatatttggccaaaacctgctctttgagttcgacctctgctttgcctttaggagggtaaagtagccaaatacctacctcattaacattgtaggcaactctgaaattttgcaggataatcattgcattgatgcgaacatcacactggttaccgtcataccgtatcagcataaaaatgttggcaatgaatacgtatatttttcaaatttgttgttaataaccagatatgtacttttaaatatagtgagcattttacttataacttggaatggaaaaccttcttaaactactttgtacgctgagactccaccaactaattgaaatataaaggaatatattatattaagagtaagatgctacaatatttaatgatgactgtgaa

SEQ ID NO: 109944 - DNA, 1029 bp, Homo sapiens
gattacaggcatgcaccaccaccaagtccggctaatttttgtatttttggtagagacagggtttcaccatgttggccagactggtcttgaactcttgacctcaagtgatccgcctgccttggcctcacaaagtgctgggattagaggcgtgagccactgtgcctggccacttccacctattattaatgaaacctgtcctatttaacaaaaacgataatgtggggtgtcttgtgcttggagcttggagaaaggaatttgcctctgtttttttaatgacttatggcaaggccagtatgaccagtaagtgggctgtttattattattattattattaatcaccattgtcactgatagaaattgtcactattgtcactgatagaaaccaagatagaaattgtcactattgctatagccccaagaaggacctcatggctgcataacgattgagcaccttatatttacacaatgcttggttgttgttttttaaggcaactgtgactcaacaacagctgtttgagaacagctccatcccagatgaaatcagaggaaccgaagtttaaaaagaaagtgtttctgggctgggcgcggtggttcacgcctgtaatcccagcactttgggaggctgaggcgggcagatggtttgaggtcaggagtttgagagcagcctgaccaacttggtgaaaccctgtctctactaaaaatacaaaaaaattagcagggcgtggtggtgcatgcctgtagtcccagctactcaggaggctgagtcaggagaatcccgtagtcccagctactcaggaggctgtcaggagaatcccttgaacccgggaggcggaggttgcagtgagctgagatagtgtcactgcactccagcctgggccacagagcgagactccatgttaaaaaaagaaatgtttctgagcactaaagacaatttgaacaaggcagaaaagtacaaataggaaaacaataatcttactagattgtttgtttttgagacagcatctccctttgtcatccaggctggaatgc

SEQ ID NO: 109945 - DNA, 1070 bp, Homo sapiens
gcgggtgatgttggagttgattcatcacttaagcgctaatccattcaccagctccagtcagacttcaacacaaatgccaaattattcatcttccctaaatccaaccctattattttctctctcaaaaccttcagttgcttccttttgcatatggaagagagcgtggactcctccatctggcatttaaggctttctatgatctgtcctcccagacattgataggctgtggagatacagtaaggtagttgttatgagccacaccttgcagccaggctgctccagcaccaagcaacactttccccgggaggttgctgcacctccctgctcctcactttcctcatttgtggaataggaatagggtcattgtgagaattaaataagttaatatttgtaaagggtttaacagtgactagctcataatccgtcacgtagaaagttttttcttagctcatttaataagtacctttctaacccatcactgatagcatttttcttttgcaccagacttctttctagtcattgctgggagcgtcctctcattttcctgcctccctgtagctgtcactctcactcctaaactgttggcgttctcattttggcttgcccaaatcttacgcattcttttaagtccatgttcaagtgaatcctcactgattttgttcttcattcatccccttaacagacttttatggagggtctactgtgtgcaaggtgtattatgtaggaagccttccacagttcccagagctaggtgagctctgtcatgtaggcctgtcttgtacatatcaccttcgacattgctgagcagtttgtgttggacatgtttgatctcctcccctagaatataaacagctggagagtaggatgcttattagtaggtgcttattaagctttctttaaaatgagtaagtgcacatgctaccttttatagatctgttaccttctaatgaaggcaagaacaataggaacaaacattagttttgtgtgtgtgtgtgagagagagagagacagagagggagagagaaagagagagagagattttgaatgggaataattatgaggccacatct

SEQ ID NO: 109946 - DNA, 2192 bp, Homo sapiens
tagtggggagaatgtgggctttggagttggattgtctggatttaaatccagagtccaggtcattgtatacaaatgaccttaggccagttgtttaatttttgtgactcagcttcttcttcatgtcagttctatcctggggctaatgataggacgacaaaggaatttttttttttttttttttaagagggaatcttgctgtgttgcccaggctggagtgcaatggtgcaatatctgctcactgcaacctctgcctcctgggctcaagcgattctcctgcctcagcctcccaagtagctgagattacaggcgacaaaggaatttttgaagacaaaatgaaataatgcatgtgaagagcttaaaacaatttgcacatatgaattatttaataaatgtggttcttactactgtttgtaggaagacatttgaatttagtaaagcacataaaagccttttacatatgtatggataagtccgtaaacaaatacacacttattagtgatgcgggtttagaaagagtatatttcttggtggcagaagttccaaagtcaggccaggcatagtggctcacacctgtaatcccagcattttgggaggctgaggcagatggatcacttgaggtcaggagtttgagaacagcctggccaacatagcgaaaccccgtctctactaaaaatacagaaatattagccaagcatgatggttcgtgcctgtaatcccagctacttgggaggctgaggcaggagaatcgcttgaacccaggaggcggaggtttcagtgaactgagatcaccccactgcactccagtctgggcaacagaggaagactctaccaaaaaaaaaaaaaaaaaaaaagctccaaagtcatattgcaaggatgaggacataggtagggaaggggaaaatttgtgaccatttttgcaactttccaaactcctttctcctcccccatctttctttcttccaagaagttaccgtcattagcaatttgccatgtgtctagtttttgtctcacatttatatacctgtaaatatatgtttattttttgctttaaaaacctcaacagttatttgtataaaatttaaattctttgttctttcatgaaatatcatgactacaaacattgaaatagttactccgaattgcagtcacatgttttacttgtatataatcattcttataggcagagggataactgtaaccttttcccttctccttctcaccttgccctttgggagacgtttcttccctttttttgtgtctttctaccttgtccttctcctcccctcctctcttttcccttcccttatattctgttttcttaccgttcgtctccttttctctctccttccctccctccctcccttgcaatactttcctacctttcatactttctttattatatttttagtctcttgtctttagcttaatatggggctcagtggccaggcgtttacataatattgtgggtccttgaaacatcaggtcttggacacctagtctcagctctgaattgtcaggttcctgctgatatactttctgggtccactgttgctttgtatttaatactggaggttgtgataacattgtccagcttcaggaggccatggtagcgcaggagggatgcatgtgttgtgtagttccttgtctggaatgcagggtgacaggaggttggcttgtgtacacatgttcatctccttgggctactggagagggagtctttattttggtggggtgctcctaagagcagtgagctcagagcctctgtcttgagacttgctgtgtgttttcttggcctcccaatgctcctggcataagtgacatccctgcttaggaccctacactcatgatttcaggcaacctttctgccttccttttggcccctgcctctccaccccatgttcatattcttcatcccaggtgcagtgccaccctgctggctacctctgccaggcagcatccttcatgcttagctcaaattccaccttctcagaaacatctgacttcacatttggtgtcagtctctctcctcctccatttcccatcacacagtttgtactttcagagatactttcatacaccaccttgtattcaatgggtggtatctgtttctgagttctgatcagagggcagacatctctgatcctttggaggctagctcagtagctggcatttataggcactctgtaactgtt

SEQ ID NO: 109947 - DNA, 1596 bp, Homo sapiens
gagtgcagtggcgcaaccttggcctcccgggttcaagtgattctccttcctcagcctcccgagtagctgggactataggcgcatgccaccatgcccgactaatttattttgtatttttaatagagacgaggtttcaccatgttggccaagctggtctcgatctcctgacttcaagtggtctgactgccttagcctcccaaagtgctgggattacagacgtgagccaccatgcccggttcaacatgcagttttgtgtactgtttagggacagatgccgaagccacattgcttgggtttggatccatcctaccacataatatcatgtgaccttggacaaacaacttcacttctagtgctgtactttcttcatctataaaatgggcttacatcatagggtccttgtgaggattaacaaagttagaatgcgtagagcatgtagaacaatgcttggcacacagcatgccgtgcttcagtggtagcacttactattccattatactacagccaccgagaaggacaggtacacagtgaatagtttaggactgttcatgttcccggcctcttcactccaagagcatcagcaagtttagtttagaacataggagttgtatttacacagctactaatgaccttggaaaagttcttggcttctctgtccttgacctttgtttatctgaacgagtaaacttcagatgacagagtgtgtggggaatggaatgcatccgcatccttgataagctgccctagtggaatgttgccatgtggctactgagggtcaattcactggtcaaaggtggcctgctggttggtattttttctgtgtcttccgggcaagttctgtctttcctcagtctgcacatgcctgggtctgtcctcagagctctctcccatttccctcttctctagaaagcattgatataatggggccacctcttccttggactgtttctgtagcatcagaaggaggtgggtgggaatttggcataccactttttgaaaggtaatacattctaacatatgtatttcacccaccttcaaagagtaagaatacactgaatgatacttaattttaaagatgtgttgctgaggtgaactctaagacgaacaattcttcagaatcttttactttcttgggcttcttgtcccaaacaacaattatctttataaagcctgtgtgtgtatgtgtgcgtgtgtgtttgtgaaacttcctggaattggtagtgttgattttgagatgtttctttggcttattcaaaatataaacagaaaggctaaagtgtttttcatgtcattaagaatgtctttataagaaaggacattggccgggcgtggtggctctcgcctgtaatcccagcactttggcaggcccaggcgggtggatcacgaggtcaggagatcgagaccatcctggctaacacggtgaaaccccatctctactaaaaatagaaagaaaaaaaaattagccgggcatggtggtgggcgcctgtagtcccagctactcgggaggctgaggcaggataatggtgtgaacccaggaggcggagcttgcagtgagctgagatcatgccactgcactccagcctgggcgacagagcg

SEQ ID NO: 109948 - DNA, 1047 bp, Homo sapiens
tagtcctatgagataagctcataactgggatgttcaatatgactttattaacacagggaatacagctgattatctcttagacattgttaggataaattgtttctatacgtattgaatggactgtggggcatttttggtcacctgcactactacactggatccattctgtgctctggggtgtaagtgtgtgtgtgtgtctgtgcgtgtgtgtaatttcgggaacgggtaacacattcgtattacctctgtttggacacgatttttagtgacagagctaggaataacaggtggaaccttctaagttttgttgcttaaatatcaggccccctcagaattcaggactgatggtagaggatttaccagtttacagggaattcagatattctcttctctttctaggaaagccaaattgttggtcattctgcccccaacatttacagaagcagtttctcggttttatttatccaagattcttatgatgaatagtgttaatatcgcagcacactatgggctgtgatatgcctatatcacagagaaggcaagctgtggtgaagtggaataaatgaaaaactgtctataactctgcttctagatgccccacttaagcaagtaaatgggaatgtgagtgacaatatcatagggataaccttgaaagagtgctagtttttaaacaaaaacaaatcatttggaacgttaggatttaaacagttactgataataaattgcttgtgacccatctgaaaattgatggatcatagtgatagtgaaaatatttaacaactgctatggcccaggcaccgaacaatcgaaaccaactccagtgtaaacagtggtgccatcaagtatgcgctggttgtcagccttgctggtggagtcattgtgtcacgatgaagcaactaagagccagtgctgcacaaagtgttgagagaaacaaacaaaatccagggtgctccccttatgcggagtagagagtagatagagccttgtttcagaacgataaaacttcggtcaaggacttgatcttcccacttattgctgggggctcca

SEQ ID NO: 109949 - DNA, 1021 bp, Homo sapiens
gagtgaagaatgtgtttgctctttaaaattttttacattttttttctgtagtaattggactaattagcttttatatctattctgtgattacctttgttaaattatagtttttttagggaagtcacctatttcaaattcatttgcatggtgtaaaataatttctcatgattgttttcatttcctctgtatttatggttatatttcacattattatttaaagttttatggatttctgctatgtgtatccatctttctggctaaagcatcagagtttaatttattatttatttaaaaaatagcttttgcatttatgtgttggctctaccactttgtaattctttattttctctttaaaatcttcaataataccttctactttttctaggtttattttgttgtttttctcattgtttgaacttggctcttaatttccatatttttatttctgcttttttattcatataaataagatataaattttcctgtaagagatgcttatttgtatgccttaagttttgctaaatagtgtttttaatcttattttttagttatttgactatgcacaggttcttaaaatcccagacccattagaatgtaagctttgtagggacaggaaccttgtctgtttatttattttgggtctaccgttgtgcctgtcatatatttcttaagcacttgctaatgtgcttaagaaatgcttttgtgtgaataaataaatctccagggaattatggaatttgtggctgattcagtcctgtaactctagttcgtttctgcctcatttggatattctctctaggtatctactaatgtgtaggaataagaacatattagacatgcttcaaattacctttttaggtcatgatattaatagatttattttaaaagtctacatagtttttctcaaatcaagtatacctgggtaaaaatgtctttctaaagattagcctgtctgggcgcggtggcttacgcctataatcccagcactttgggaggccgaggcaggcagatcacctgaggt

SEQ ID NO: 109950 - DNA, 1148 bp, Homo sapiens
agtgatgggaaaagtattggccttggagtcagacctgtgtttacttcctggctctgctattttctagttgtatgactctatgcaagtaacttctcatctctgagcattaatttcttcacctgtttgacatagacaatgtctgcctcacaaagttgtgatatgttaatgtatgtgggatacctatctcaggacccaatacttagtctttataaaacactaaatgaattggttttctcatgtatgtcttatggttttgctggtgatggaccaatagtcatcttccatcttcactttagaggtgggggaaaagggcattagagtgattgtgtggtaaaatccactctaattctagctgtgagaaaaagagcggtgaaaatgtggtaagcaattgcttctaaaaagcttggactaaaagcgcttgatggatttgtgctggcttcccggtagactcatctctgtactgcccgcacagcacaattaattgttgttactagagaaggaacaaataaagaaaagagagagagcagacataaaaacatcctttcatctttctgaagacagtcccctttgtcagatcagtggagctgtacctgtgaatcaccttgggaaagcacagtgtgggtaactagaaggaaggtcttgtggctcattttgtacccacttcctgggctggggaaatatctaaactaacctttcttacttgtcaatatctactaccgttcaccatgcatcttcacagatgagggcctctttctcacatcttcactccaaacacattactgtgtagacagccacttattttctgggaagaaaactttgcaaagcagtagcagaataaagtcgagggtaaacagaggccatggaaaagcactagagtttgagtgcagagacatgagtctgagcatgagcagtgaatagctcatgaaacactcaagttgcattctccttatgtggaaataaaataagtcatggttgttctatgcacgtggcacctgaccttgggtccttattgctatgctgctagagtctatgaatcaagatttgccagttgtgatcttgaaatttagtcagattaaaagggaactctgactttgagggtgaatgccccaagtgggcatcttattctcctatggattcagcttgttagg

SEQ ID NO: 109951 - DNA, 2112 bp, Homo sapiens
cagctttcagccttgttttattaaatctactttttctcttttatttgacagtccctttctgtccagggacctgcctaaagtagcaaatcttttttttttttttttttttttttttgagacggagtctcgctctgtcacccaggctggagtgcagtggcacgatcttggtttactgcagcctccgcctcccaggttcaagcaattctcctgtctcagcctcccaagtagctgggactacaggtgcacacccccacgcccagctaatttttttttttttttttaagtagagatggggtttcaccatgttggtcaggctgctctcaaactcctgacctcaggagtccacccgcctcggcctaccaaagtgctgggattacaggtgtgagccaccgtgcctggcctaaagtagtagttcttaatatacgtgtgtgtatgtgcgtgcacacgtgcatacacatgatcctgtgtttggggcagatgtgaggattatggaattttcagaaactcagatgaatttatgaaatagttggaaaatgcagaactccagaaaatgctatcaacaagtttaggaggtttgtagatgctctgaaggccatccatgagttaagcaaaagttttcattctatgtgggaagtatgagatgacatttgagtggcatacatttccttttgctgttggattttccccgtagtcacctattgttatactctgagtgttaggctcgttttgtagcatgacttttggcatgtatgtatctcaaactattgagtgatattttaatattgaaactcttattctacttcattcattcactcatgcattcaaattcaattttaattcagaatttgctaaatgctagacatctcaatacattattgtatataatcctataaaatagaaaattgctaggtgctcagagaggttgagtaatttgcccaaagttttacagctaataaatataaaatctggatttaaatccggatttactccaaaatatgtgaatacctccagagataacattgaagacaaatagagacaatgatgcaagttcataaaccatggaaatttctggtagaaaatggtagatgggccccagaggaatacagagaatgtgtactatgggattttaggaagggacaagatcatacattatgaattacttcatatcataattcgttaactacgtgtttatctggctccttaagaaagaataaaaaaagctagataatcatatgaaacacattatgcataactcagtttttttcttgttcttcaaacttctgtcaggttagtgctctcaatatcttcatttggtaagtgagatgaggagatgaagagtagttagggtcatagtgccctgatcatactgagttttcacctaaataggaatttcagtgctttgggtcatctattttgttcccctcctcccggcctacccccccattatattgagcttgagacttttaacagagataacttctgaccacgcacagatcagcacaaatgcagatgtgagcagctagaatttggatgctgccaaattgtgatgactgccacatgtgtgaagctaaagcttagcacctgatgacccactgtgagtgtgtgggggggccagaagagtgaaaggcaggtcagagatggaagacgcctcggagtttctcaatggcagtaccttcaccttgcagatgcagaaatggaggtggttagaaggggtaagacttactaaaattcacacagcaggttaatggctctctgagaataatggcaaaacaagaacaaggctttataccagcaatctacagtagtatctacttttatttcctacctttccgttggcatatactcacactgataggcttgacaggcagataaacctgtatttgaaggtcagcaggattagttgtgtggccttggataagttacttgatttacttgggtctcaggtttgttgtctgtaatagaaaccataccctttttcttttctttctttcttttttttttgagatggagttttgctcttattgctcaggctggagtgcaccggcatgaccttggctcactgcaacctctgcctcctgggttcaagcgattctcctgcttcagcctctgtag

SEQ ID NO: 109952 - DNA, 1126 bp, Homo sapiens
accaagcattggagagatggttggcacttgagtctcttcttaggactctacaggctctgtctggagtccttgtttctatgaagaccactaagaataaaggtaatacaggtgctgctgctgctgtattaaacagatggaaagaagtagacattcattgtatgtctgttatgtgacaggccttgtgacaggtgttttcacatagtttagcttggtcagtcatcaaaagctagaattcccattcctccatgagggagacagattgtttctaaataggacatttagcagaagctctttcctgtaagctctgaaaggcactcggtagtggatagatgcttccctcctagaacacgggtgtagggctctgcagagtagcatgcatggctcttctaagggatatggattgtagagactgtgaaaataagcagaagttgtgatcaaaattggcgttgggggacttgtggtcacccgagtgtaccagaagactgagctcttctactctcctttccacacatacatctgagtctttggagagctgcaacctgagtgcctcgttcttgagtgtctgtagcattggcttttacttgcacttactacattttactcctgcctcttccctagctagcctcgacctcaacgtgtattatttcctccccccttgtcatttttcttctattacttttgcttcttccccttcctccttctcctgacttaaccttgggtggccgcaggtcttaaggctctgtgatggcagagtcttctgtattggactgtgaagattctggcagggaagacaatacacaaatctgttaaatacacaataaaaatagcttatgatctatgggacttggtattaagcaagatgatattaacgaggtttgattgctgttctgaaatgtggcagctgcgcacacgtattggctgctttttctccccacctttggcagcttgtgagcggtgttgccatgacactccttgggctctgtttagatcagctattttctgaaggagtcgctgaccttccccacaatagaagctgttgatgtggtcacgtcagtgcctcttcgggagctgtgtgactggcgagccctcagttgccacttggaaacggttggaaactgtagatcag

SEQ ID NO: 109953 - DNA, 1038 bp, Homo sapiens
ttttctcagcacattgatgatcccaacttctttttcctactaaaagggcagagtcttagaacataaatattatatatgtggaaaagggcaacatagtttctttcgggaggatttttggccatgctactcactagttcgtggatcacacttaatctctgtgcctccgtgtcttctggagaaaatttaagggtgaaattagattagatcagtgaatttttaaacttatgctctagaagccctaggattctgggtagaaatgaagctccaatgattgagtgtggggtgggcagtggggactctgggcccttcaaaccaagcagctctgctattcgcttgttaaaatttagagttttataaactgtttcacttaaagaaaggttctactgcttaacctgcctacctgttggcatcactgtcttaagtgatctagagtcagtggcttatttcccacaaggattcagtgggcaactgtggcaatagttcttggctaacctggtcactatggaagttctttccgtggaaaaagattctccatccttcaatttgagataagatttactaattgagacctcatttgtttctgattttaatctttgcatcattttagttttaataaactaactttccaacttaccagattttcgggttgacaaagaccattatttagagaaacacaggcaaaggaaagtctaaaagctttggctggaatttcaactgcttctggtcaagaatatgaattttactttgtacggccaaagcgtttcaaccattctggggaggtgggtgaatgcccacaacttgaacttttcattccattgctttccatcctcaagtctctcccttcttctccatacacatgcaactaccaccaccaccatggttctcttcgcatggcctatgtatgtccccagacatggtggagcagaaaagtaaaaagttgtgatttacaaaccaaggtagagactataagaagaacaaaaatgattaaggggcatgagttagtgacactaacaaaaagccttcatgtatcaacataaa

SEQ ID NO: 109954 - DNA, 1052 bp, Homo sapiens
ctcctgacctcaaatgatttgcccattttggcttcccaaagtgttgggattacgggcgtgagccactgtgcctagcccctctaggttttcttaagaaaacctatctattcctcaagtgcttactctgcaaagcctaggtctgccaccaaggaataaaaatatggctaaatgtacttcctttcctcccagagttcactgttcaataggggacacaaacacataaataactagctcttgcaccaagcgaaatgtacagtgcgacaaaggagaggtacagatagtaggctgtgggcccgaaggagggtttccgtgggcgtgagtatgaaggaggggtttcctgaaggagggggtatttgaacaacccttttgaagactaaaaggatgtccgcaaatgaaatttagggtagaaacatgccagaaaaaggcacagtgttttcaatacgctaggcatttcttaaactatttatagctgaggttatgggaaaagagatagtagaaatatgagaatatcttctccaaagattctatgctaatatcctgatccatctgactatgcttatttgactgctttttgtgtttgtcttcttctttactggatatcctttttgccgcttcctttctggaattttctttcctggccattagcctctctctcctacaccgttgccttactctcactgccatactcctttggacatcctccttctcttgtttcctgatacttttacatccccttccatcctttactccttagcttttgtttttatttgcagtgttaaagatagcctctttttatttccctgtagtgattagatcgacgtgtttacaatatgaacacacacgttttctcttcttcaggctctgagtcatcgagttcacaatgccatgtctagtcagtacttctatgtgtgtatagtgcccattgtggccgagtagagataaggtcactgcggaagaaaataaatcgctaaaatctgttagaatacgtcagcttccaggtttgtctgaggatgcagtggaaaccacgttctgtggccagcatgtcagtagct

SEQ ID NO: 109955 - DNA, 1007 bp, Homo sapiens
acacagcttctacacttatggggtttcctttctgggagaatggggctggtgacaattaatgcagaaaacttctattggagatagacatgcaaaaacactcagagatagagttgaggaatttgtagtcattagaggagagagatgttagttttggctgggattggagttaaatggagagaaaataaaggaagactttctggaggaggagggttttgatctggaacctgcacgctcattagaatttgaattcgacctggcagaaaggggaaaagacttcccaggctgagtgaagttttggagctgcacattttattttatttttcatatttgtttcctgctgccctctggccaccattcagaccgtttggaggcctgttattgtaggtgggacctaagttccagcaccagtagatgtgtgagtgaggcttttatagtattgatgtcttgtatttaaaatgaacagaggaagaagccctggagtccattctaataaatgtatttcaaagggggctttcttcttttgtctgagtgagaggcaggaataggaatgacagaggcagcaagtgttggatgtctgtagaagaatcatagagttctctttagagcactaaacagagggctaataaagggctattgagtcctccttatgtttttttcctctctcagatgagttttaagggtaatagaagcgcttttttttttttttctggtgacctcttaatcttacttttctctctttatctcttccttttcctagaagctaatattaaaaccactcttgtcctctgccattaaaaataaatctgggtaggtttcagcaagagagtatttcctagaatgcattatattctgggcagtagaagtgtatgtttaaatacttttcctgtagaaggtcattatgacaacagaggatgccaccagcaaccctgcagtatgtggtgaatgtgtttccacgctgtgtctgtctcgcctctgctctctgccatgtcaagctgattttaagttta

SEQ ID NO: 109956 - DNA, 1050 bp, Homo sapiens
tgagatgattcttcttttgtatgtcaaattttacttggcttctccctcaccctgactcctagtcccaccattttaattttatcatgatttgaataatatcacaagggaatgaagaatttattctttttttcaataggtgaacaaaaaaaagtatgagaaatgattgatgtgtatttcaacattgagaaaacccaaggaattaggaagaaagttctctggcatatcaggaaataggaaatgatctcaccaattgctagaagtggttgctcagtctcttggaaagtgcaccttcagtagatagcacttaagtcatagcatgcgcgcacacacacacacacacacacacacacacacacacacacacacataatctctctgccttattagccatttattctctactgtctttcagtagatgatttcttttaccttgttcctttctaaatattacctccactgggacctaattacaacccctcaaaattcacattacattggaatagatgtgagctcccaatgttatctttaggcattacagaatattagaaactgactgtggttatccattgtgtatgcaggtatataaacctcttttgcccaaatcgttgtcagactgcagtgagaaaagtcaaggaaatatttcttactagcttctgaatgttgtatgaattttccccgaagaatgataataatgcaagctgagactttttatattctaaagtaaacatccaaagccagttttccccttctattaaatgaacctttaactgagctctgaaattgtgaggaaggacatactttgatgcccattattctgttcaatagccatattcagaagagaagtttaattcaaactccagcccatcaaagcattttgcagggttttcaaagcagttattgtaatagagagtaattaaatattactgttttcaactgcttatttataatgtacgaagacattataatgaccccaaagttggtttgcctttagaaaaataaggatacaaaatgctgtgtagaaaagaatatgctatcttaagtctagagagc

SEQ ID NO: 109957 - DNA, 1105 bp, Homo sapiens
ctgacctcaggtgatctgccagcctcggcttcccaaagggctgggattacaggcgtgagccaccgcacctggccctcatttatgttttcaatgtttccctttgtcagcttactaggggcattgttattttgtctcctaacttttggggaaagcttcagtggacctctctctaatctgaacagaatacagacatggccagttatagagcagaaggcaaaggtgtgaggaagtctttgtaggtatgagagttcttataggcctgagcgttatggtgagggcaggtcctatattaagtgggctcataaatggcatatatgagataggtagaagagaagcatataatggcctcgctttagactcctttactgtgaatttgacatgccctccttgtactatgtgtggttcacccactgtcttactctctaggaacactgaagtgatttgtttgcgtgccctgcagcacagtccttggtcccctctcaacatgccaccccacacgtttttgttacctgaaaattctatttgtatcactttctccaaaatggctaggtgcagcctaggtcagaattaatcgctccctttcccgagtttccacatcttattctttgacttatccaaatttctaccacttttgttattgctcctgcttacattctgtcccatattgaacatgtagtatatgccaggctctatgctttctctttattattttattgccttcttatgtaaccctacaaaatgtttttttttttttcttataaagaaatggaagcttaaaggaggtgacattctctatgatttgcttggagtatgtttctgaactaaggctgctgtccatatccagcatgcggtactgcctgtccttctattcacagcacatgtggcagcaaaccccatattacagtgatacatccctgcatcccttataagaatatatataagctttgcttcctcattgaagcaacaagacatggtttctcactcgtccttatgttcctcatagctcatattatgctactgtgtttttagtaggaatggttgcatatggtcaaatgtatgtctgtgtgttcttatgtatgcatatatatttggatggctggcggat

SEQ ID NO: 109958 - DNA, 1083 bp, Homo sapiens
ataacctggacatgcttaatgaaaaaactgtctcgaaaggttacatgtattatatgatttcattttaagacaaagctctagagataaaggacatattcatgattgctaggggacagaaatgggtgggtcgggggggggcaagtactggtcattcctacaaagaggacgcagcaagagtctttgtatgggtggaacagatctgtacctcaattggagtgatgattacatgaatctatacatgggataaagttacatagaactgtatgcacacacaaatcaatgcaggttataaaatggtaaaaactgagtaactcctagttaacaataaggtaacaatgtcagtttgctgggttttcgaatgtattacagctttatgagcattaccatttagggaacctgggtaaaatgtacatggaaactctgtactatttttgcaactttctatgagtccatatttaaaaaaaaattaataatagtaaaataaaggaatgcatatagatatcttaatgtattcttctcttactcaaagtgctatcttacatgccatctgaattgcttgcatgatactttgaaagatcactgctatatgtatccctgccaaaatgtatggcttaaacctgtggttttcaaagctggccagtcatcagaaagacttggagaacatttttcaaaagaaaaaaattaaagcaagtcctaggtcccatcacaattttacagaatcaaaatatctggccatggggcccaggaatctgcattaaaacaaagcaaaataaaaaataaaacagaacttcccgggaattgtgattgatgctcaaccaacgtttgggaaccactcatttatttcattaacttcagggaccagtgccttaatctcctttgaaccttctccaagtcctgagagtgtactcttcctcccgtagttaatgatggtagcttttgaagtcttgagagtctttatcttgtgaacattgtacagattcagagacctagagcatctttcatgttgctattcttttccctcagtgctttcattatagacaccaatcgtttgcatatgttgtcctgggtcattttatttgggat

SEQ ID NO: 109959 - DNA, 1004 bp, Homo sapiens
atgtcttttttagggaaagcattcacaacaccatcagaccctcgaagagattcttaacttacccattaagaaaagtaacatctctgtctaggggtcaccagtctctcaagccagttatattgttgctgcttgaataaacaaaacaggtttttatttctgctcttaccaacattactaggctgtgtttgtagcaaaaactgagtatgtggtggtggtagtaactacagtagaaagtgtaacgtgtacacaattatatcatgatacatggtttttaaacacattttatatatgtatatatttaatttattcacacaacaaatatttgcacatgttgcctgagctgtgcatgtgtaaggcagggcatagaaatgaatagggcatgggttctttctgctgaattagatggtaccccctcaccccccattttactgttgaagagagggaagcttggtggtgaggtggcttgccccagaccatacaggtaaaaagtagtccagagtagattcaggcataacttgtttgaaccaaattgtgttctttagactgcaacatgctttctgttccttagcatgtaactattaaccatgtatttttatttatttttcttttacgtgaatttaaaatgtcatatttgttctgcttctattactgcagtcttgaatgatgattcatcagtgcagtggcctattttagtgaaccacaatagcttgggtagaaagaaaaaagatccaacatacacaggaatggaaagcagccatctttttatagctaaaattgcaaacatctggcaattactctattctacctcccttcaaaaaagaagaatcatcccttcaactggagcctgccactgtgtttaatcaaggcagaaagcaagccttaaggagcaataggttttgattcaaggaggccattgcctaacctagttggccaaagtctcttcagaaaataccccatttagtgctccccataagctactgggttatataatgatagtaatggta

SEQ ID NO: 109960 - DNA, 1051 bp, Homo sapiens
taagtattatatttaaagtttttttttagtagtgactagcacttagtaagcacttactgaatgttatcattaataaatgatcttacaaagcagtagcatttccttctaggatttttttgtagtccttcatgattgatagagaagagacatgcagtctaggatttcacatcagctttttaaatataggaaaccagatgtaaatatgctgcttcggttatttacatctgacattcttgcatgcttgctgacaaaacattaagtaaaaattatgctactctttcccttagatgtcaattcatggtcacattaaagtcacaagatttttcctgaaacttactgctggtaccaattttaccataggttatcttaattagtatcatcacacagtggtgcagtttgacctttggggtttgattccagtcctttgtttattctgactgtgaatggaggagtcaggcagaatgacctttacatatctttacctccttctcccatcttctgctggcatagaaaactttgcataaagaaaggcaacagagcaactgcaaaattgctgggattaaaaagaaaattgtatgataatgagaaatccagtgtactctctctcccttaatatgtgtgtgtgtgtgtgtgtgtgcgcctgtatacatcagatatatggattgatgcagtgtactctctctcccttaatatgtgtgtgtgtgtgtgtgtgcgtgcctgtatacatcagatatatggattgatttctttttgtttataaaaaatattcacttttcaaaatgtatttatactatgctatcattgaattcttacatatcaaccctttgtggttgacactgcagagatgatgagctccattttataaagatggggcagttttatctcaacaactagtgtgttctagatcaaggactgattccagattctcaaagtcctacaacagtaatcttcaccatgctgtgtgtatgcgtgcgtatgtgtttatcagaatatattagaagataatttgcaagcagggattggttaaagttgaatgtttatgtattctttt

SEQ ID NO: 109961 - DNA, 1072 bp, Homo sapiens
ccccaagaggccctggtgtgtgatgttcccttccccgtgtccgtgtgttctcattgttcaactcccacttgtgagtgagaacatgcggtcaacataacttttaaaatccagaatgtcagtactaaaaggagccttttaagtattagaattcaacttaatgaaatgttgctacgtattttctctgttctcatcactgacgtagctgctttggagcatctatatctgatatttagatagtggatggcttcttgcaaacacttacattgctcacgtagtaatgtgaaccaacagattggtggcccgggcagcaacatattttctataatctgtagcatgaagccaactgaggtgtgaccgtggtatttcctgaagtggctttcttttgcttttctgttttgattattatgtggctgtggatttagttcacaccatcactgtgaagaattttcgaaacttaagaatcaagctctgtttatacattttcaacgtaagcccttaattacagtcactcctcgggcccagtgattttacagttacatgtcagattgaggggtttcgtcttgagaatgtcagctggctctgtgaagaagaagaagagcagatacgtgagttacccagaggagtgctgattgagtccaggagtctttctgtttaagagcacgttgaaagagtttgtgtgtctatttgtaaaaccattttggagatgataaaaagcattctgagacacacaaattttttttctgttttcaaaggcaagacagagacatgtggacaggttgatgaagggatcattgtgatcttttctctcagaacttgattttcattacttgaactttgtcttctatgcttttattaccaacacctgtacacaaaggtacacataatacttgcaaaaaagagaagaaactgttttcagactggggctctattaagtgttcattgaccacaatctacaacaacaaaaatgacaattcctgcttgccattgaaaataatgcaattgaaaagaaagggcggaagcaagttcttggctgcatagcttcagtctgatgccatattctagagtgaaaagg

SEQ ID NO: 109962 - DNA, 1127 bp, Homo sapiens
aagcaacaacaatagctctgaggtccttggaaccaggagttttgaaacttttactttactgcacgtctgttgacatgattccatgaatatttctgctctttctcccttatgtataccagatccactgggctgagttaaatataagaccccaagcatggtcaattcttattaatagtccttgaagaggctctctcttgtttttgattgactttctttttctttcttttcttttcctcatcctttctccttcttccattctcccttccacctcacagaagcctaacgggcttggaatagcacttataaatgcatgaatttttagaaatatatactattgttttcatttccacaataatcatgcctaacatttatcagccacttcccatatgctaggctctctttcaagtcctttaaatgtaataactataataatctcacaacaaactccatgagacagggactgttatctagtgtgttttatagattagaaaactgagacacaaagaaagtaactttctaagctcacatacctggtgagtcagtagctgaggcaagatttaaaatcaggcaatctgactgtacatctcactcttcgctactttgtccttgtgcctttagatcatggttctgtgctatcgatctgatcttatttcttactctttttactactgttgttgctcagcatagtcttcccccctcaaaaataagtaacatttatattgctattattattattattattttgagacagagtctcgttctgtcacccaggctggagtgcagtggcacaatctcagctcactgcaacctctgcctcccaggttcaagcaattcttctgcctcagcctcctgagtagctgggattacaggcgtgcaccaccacgcctggctaatttttgtatttttagtagagacagggttttaccatgttggtcaggctggtcttcagctcctgacctcgtgatccgcccacctcggactcccaaaatgctgggattacaggtgtgagccaccacgcccaacctgtattatgaattataatacatagataacgtgtaaatatttaatgtcacatattattcgtgtgagttagatttgtaaatttgattagcgctgagacattggta

SEQ ID NO: 109963 - DNA, 1058 bp, Homo sapiens
aaaaatatcctttgaggtcacaggattgatgctatacaaatagtaattgtattattaatgatagaaatatgaagcatattggtattaaactatgagctgatacatggagcagcagatattgtatttttagttcatttccttaggcaaactcaaatattgtactcacacagttacctcaggcattcacaagttagagttccagtgcaaacagtttgcagcaaatatgaaccacagtggtactattagttttgcatccactaggcacattttccagcttctgaagagataattgaaggagaacttggatatgggctaaattgtgtatatggataaaagattcagcagggatttaagcactttcgacccacatgaaacattaaatattagctgagactcacttgaagatggacttcttgattttgaagagttgtctgcatttttataaaactacatgagcatagtgcattttaactaataaaggaagtgaacacagttgagatgcattatctttcttagccttagggtactgggtgttactattataatttttaaaaatgtatgcttttcaatttttaaacagtttattatggaaatgtttaaacatatacaaagggatgagattactataatgtaccgccaggaatatattatccagcttcagcaataattgactgatggccagtcttgcttcacctatacacctattcctttccctcaccctggattattttgaagatagtctcagatattacgtcagttagtcacttctgcaaattttagtctttagtaggtatgtctaaaacatctctcaaccataaataacatgtcaggagagctcttttgcaagatgtttattgatcttgtgccttttgcatgagtatgggaatggctactgtttatggaaaaggagattaaagaatgcagtgtgggttttttttcgtggccgatttctttctttccttctttttttttttctggaagtaggattggtttggggcatgatgtaggaatgttattgggtaagggtttaaactctatgtggcttctgtggtttggag

SEQ ID NO: 109964 - DNA, 1508 bp, Homo sapiens
tggtcctaaccacaactagagatttctggactcccaggcctctgctctttccattaccttcttgttcatttattttagcaattgcctgaaggcaggatcacaacccatatttctgtatcacccataacctttattttcatttcattttattttttttgagatggagtcttgctctgttgcccaggctggagtgcagtggcgcaatctcggctcactgcaagctccgcctcccgggttcacgccattctcctgcctcagcctcccaagtagctgggactacaggcgcccaccaccacacctggctaattttttgtatttttagtagagacggggtttcactgtgttagtcaggatggtcttgatctcctggcctcgtggtccacctacctcggcctcccaaagtgctgggattacaggcatgagccaccacgcccggcccataacctttattttattgcgagaagatagaatagctacttgattgatatttgtggcttgattgatctattctttcttcgactgtgcaataggaattctctgggaaaggactatgaagtctgtatacttatcacccttttgatgcttttggggttgttgtaagcatgcaaagggttcattgtgcactgcttctgtatactgactcagggtggtggggagaggaaatgggagaggaagttatatacatcttgagcaaatcaagcttttctatttttagtccttgctactgtttggaaagtacagcctctgttcatggcagtctggcatgtgtttccttagtgccatttcgaaagggggaaaaaataaatatgggaattttttttttttgtagtgaaaatagttactcagtgaaatcacataagtttcccgtttttctcttgatgaaacctcaaacccactaggcacagattcctcaacctcaactatgcatgtgaaaggctcatgcagaacaggagaccagagtcagcaaaaccttgtatagcaagataagctgtggtgccccagagaagcgcggatgggtggcggaggtggggaaggcagggaagggaatggtgatgttctttcatatttagtggggaacttggccaactaccagatcgttgccccctggaaaaggctgaaacctgaactaagataaagagacacatagctttgcagctttttgcttaagctgttccttttgcttcagtttctgtccttggtaaaagtttccctgactgctttatagctactcccccaattcaaataaataatttttctttaatagttgtgatggcatttgggagatttttccaatctaaggctatatcattaggacacgataaagagccttttatgctagtaaataaaatgatttgatctgtatttagatggattgctataacatagtggtactcaagtgatcagaaatggtgatgacagagtgtcttggagtcaccttcaggggtccattgaggcagacaaggaccttaaccaaggtggtggccatgaccatggagaaggggaacaag

SEQ ID NO: 109965 - DNA, 1024 bp, Homo sapiens
tgttgcattgtattccctgggtctaaggcagaaatgtgtacgtgctccaataacccttgtttgttgtgctgtggaatcacgttcatttctgattaaggtgaaatcagtagctttctgatacggtctctcactcactttttatcaatggcaacctttttcctaaaaataggaatttctgctgggagtgttttaatataaattgtctgtgctcagcctgaaatatgtgtgattcataccatgtgtttgttcccacatcaacactaagtcccaagatacaattacccctgcccactctctccttcgtcatggggaatgtgtttatcctttagatatcagcaccttgggtaagagccaatctccttatatgccttggtttgcacacctgcattgtctgaccacagctgaccctttgagtctgctcttactctatttttaccttaaagaacactcgtgtttgccaagtacacttgcacattgcagagttccttctatatctttatgctcatgttgtaaatatgttaaatacttgttctccatttaaggccttctcaattctgtcgccatatagctctctctgatttctctattcagctactttctctctttcctctctctcattttgcttttttctcgaacatcttgtgtgtcttacctacatgtagtctgccttctaatatggacatttgtggataaactagtttcttcaatgcaactgtaagctcttggcagagaacccctgatccattctctttccctccctccccttccttctccctctccctcctttcctttctttcttccctccctgcccccctccctccctccctccttcctccttccttcctacctgcttccctcctttcttcctacctgcctccctccctccctccttcctttctacctgactctctccctccctccttccctcccttcctcccttccttcctcccttcctccctccctcactcccttccctcccttccctccttcctttccctcccttccctcccttccttccctccct

SEQ ID NO: 109966 - DNA, 1059 bp, Homo sapiens
agaggactgcgtagagcaggcagtatttgagctaacttggcttaaagtgttacgggaagggcatgggattcaaggtgcaagaataacaagagtgagaaagtcaaggaacgtggaaagtgaatattatttgaagaataagtttgtctaatggggtatgtaaagtgtaaatgggattactgctgaaaaactcaaacttacttagcagtacctaagtagcccttttgatgcccaagggctttcattgttagaaagagaaatttacagggggatagcaacagtgttactggctgcagtgattttggagtaatgactttagcttacagctactttataaaaaaatcctccatgacgctgcatggatttatgcaattaaattacattagtgtttgaaaccaaaatttctaaacattttaaatgtgtttgtcagggagtagttttagaagaacagatgtgaaaagttcagaggtgatcctggagtgaattgcagacaaaatgtgatcatagaatatcagagctttagtgggccttccagctcacttagccaaactcttattctacagatggaaagcttttgcccagagagggaaagaacacactcaaggaggctcatttagagacagtttcagtgattctttgtattttccccgaactatgacacaaaggcccagcttgatgataaccacgaccaggggagagtttggtttcctttagtatcacaattggtttattccaaaaagtctttcttttatggcgtcttctttaaaataagtctcaaacacataacaaagaattaggcatatcaaagacgtacttcaatggtaaacagaaaacttatgacgttgtaacatctttaagctagtatatatctaaacccaacccattaggtaggcatgatttgttagtataagtacagcttagcctctagaagctatgcaggggttggaacgaaattctgtctatttcttagaagacaagagatcaatcatgaactaatgacttttgtgttccttcttttatcagagttagggtacagtattcatcttctagtttctagtacag

SEQ ID NO: 109967 - DNA, 1450 bp, Homo sapiens
cttacgttaatatttcatggtagctggagatttagtaatttgtgaatcaagttgcttttgaattgattaaatgggctttcactatcctcatttagactagtgtgatactgtgaaataataagaaataatatataaatatatttttctactccagtttctgaatcagtgtttgtaaatccttataatttcctaggtgataggggtgctggtagcatcttttgttctaacattattttgttattgaccttggttcctgactcagagctactgaattctgtggaatttcctgagtgatggaaatatctattgttttgatgaggcaactcttggtgggctcctggattttggctggttaccagaatgaccaagcaatgatttgaagcttggaagtttaatcttcacctctcatcctctggggatgagaaaggggctagagattgaatgaataacaaatcatgcctatgttttgaatgttttgaagtctgtataaaaatccctgaagtgcagagaggtttcaggttgttaagcacatctttatgccaggagggtggcataccccaactctatggtaacagaagctcctatacccaggacccttttggatctagccctgtgcacttcatcatctgcctgtccatctttatcctttatcgtatcctctataataaactagtaaatgtaagtaagcatttccctgagtttcatgagtaattctagcatattatcaaacttgggaaggggataatggcaaaccccaatttgtagtcaaatcagacagaagtctgggtaactggtgaccacccctactctgccccaccaccgcagcttgtgattgacatatgaagtggaaacagtcttgtgggacttgaacccttaacctgtgggatctgtaatagtaactccaggtagattgtgtcagaactgaattgagtcataaaacacccatctgataccatagaatcagttgatgtatgaaaaaaaccctcacatttagtgccagaagtaaagtgttctgtccaggcatggtatctcacacctggaatcccagcactttgggaggctgaggcaggttgattgcttgaggtcaggagtttgagaccagcctggtaaacatggcgaaaccccagctctactaaaaacaaacaaacaaacaaacaaacaaaacttagctgggggtggtggcatgcacctgtagtcccagcaactcgagaggctgaggcaggagaattgcttgaacctaggagacagaggttgcagtgagccgagattgtgccactgcactccagcctgggcaacagagcaaaactctgtctcaatcaatcaatcaatcaatcaatcaatagaagtgaagtgttctgtgagtagcatagaggaaagaggtgagtttttcttcttcaactaatatgaaaaatttggagatattttgaaaataagaatagggtggggcata

SEQ ID NO: 109968 - DNA, 1048 bp, Homo sapiens
taataagacatatgggagtctacggaatctagggaaggcagctgagtaagtaacgatatttttaaaaaaattggaaataggggccaatatttgaagactaatgaaattcaggggcatctattctcgttccacaaaagtttagctatctggtattccatctggtgatctattcaatcaattaactcttccatattgggatgtttgtcagagtccagcttacaaattgaggaaatccacagtcacttgtgagctagtttgtatcagttattaaaatttacttatttattgtaaacttcatcaaaccaacaattgttaagcccctactgaatgcaggacactgcagattacaatcaaggggaacacagtttataccctttctcacaccacaagggacttctactgtaagaaaaagatgtgtaaagccataacgacaagaatatgtgataaatatgataatgaatctatgaacaaggctgtatggatgcctagcggaaggtgctccaatattctcctggagaggtcagagggggcttttcagagcatttaagcatatatattacaggaactggaaatgttcagcccagttggagcttagaaaatgtagggcaagtgataagcctggaaaggaaggcacgtagatatgtttctgcaaatgcattccctccttctgtcttcctgtctgccttatatacacaatgatgactcagtaccaggaatctcaggaaacaaacaacacacatgcacaatataaattcctctacaatccctctatttatcctcagtgcaaaacctcaattaactaatagctcatctgaaaactgtcagggctagaaagtcccataacccctcaggataaaatcacaccaaccgtaagttacttaggctctccaaggtcagcctccttttatctagcttccctctttttataaagctgcgggcctgtctctaacaggatcatgtggtaacattcatgatttgcaagagctttactgctacaaagcacatttgcaatacactgtctcttttttttacttggcatttgcgattt

SEQ ID NO: 109969 - DNA, 1054 bp, Homo sapiens
caagaagatggtgaaggcgatatggtgtggtagatggagcatgtgaattctcctagttctgcttctaactcactttttgatttttagcaggcaagctatttcacttctcttgtgccacggtttccattcataaactagggaactggacttcttgtctcctcaccgtctgattaaaaacattccgtggtgattccttttcttggtaagacacatagcttagtccacctcaggtcccaaaaggaggatcaaccttagtgttttacgctctctaatatgacctcttgcggtcgatgttttagaggtatctatcatattgcatggattgagggagtttgacctgttgagctgggcgagttatcaccatgcagcacttcaggtgcttactctctttttatccatgcattggttcattggattcaaacatttcattagacttcctgccttcttttggggggatattttgaatttggggataataagtttagaaatctttgggatgaagaagaggaaagagaaggcagaaaaggagggccatgactataacatttatcagcaactgtgcctcttccagaagaatcaggatggactggatttgaatataaaaagtaggaagagaggcaaggcagaaactgggagaggccgcagatggtagtgattgcagatcctttataaaatgctgcatgtttcaactttcctctgcccaacactatcaagtgagatggatccttggaggtctttgggtccagtcctcaaggaatcaaaattacatctaggtagtaggaataggttctagtgttctataccacgtgggataactatagttagcaataatgtgtgatgtagtttcaaataactagaaggcagatagttaatgttttcaacacaaaggaaatgataaatatttgagatgatgaatgtgctaattaccctgatttgatcaatatacattatatgtatggaatttcactgtgtaccacatgaataggtataattatttttaatttaaaaaaagcagtttctcatgtaagctggatgttgctggatagtttaacag

SEQ ID NO: 109970 - DNA, 1082 bp, Homo sapiens
ggagtgtagaggtggctaacagaacaactctggagccacaatgtgtagattcagataccaacagtagcttatgctgaaacctgggtcaaattacttaagctcacatacctcagtttcctcatctacaaaatgaggataataataggttcttcctcacttatatgtaaagcatttaaataaggactagtagattgtatgtactagctgttattaaattctgccacatttgtttgttctccatacacaccttagccttttgtctatgtctctgttcacattgtttgctggaaacaggatccacccttctcctccaaggccagtgtatgtgtgtccacaaacacacagccatccatgtgttgtgattccacgcacctccgaagatacggctcagagagccaccctctgcttgccagattgagcatagttcatctggaactttcatacacttctctgtcttacttagcatttgcaactatactttatagttattttcaagtttattttgcctcttttgctggtgtgtggacttcttgagtccatggacttcctgtgataaatttctccctactacaaaaagctcagtgccttgtgctgagctgctgtgcttagtaatagataggggagagggtgtttttttatatctatatacatatatatgtacatatatatgtacacataatttgatatacttttgagtgtacatgatgtggttccttatttttgcattaagcctatcacttccgggcattggcaaagatctgaaaattaaaaggaacacaaataagaaatgcatttagtccatttaagcaacatgtgagttcctcttattgagtttcttccctaatttagatctcaagttttgcaaaagaatgacaaattcctttatttaaagaaaaatgaaagcagatctgttaccttctgtcctatgaatgccaattctctatcctggataattagataaataagatatgtataagcgtatggtttatgcacatagacatgaagctctcaatgcctgcatgattttcctgtcatgctcatgtgggttaaagcccaatagatgtattttgaaaactcgaatg

SEQ ID NO: 109971 - DNA, 1143 bp, Homo sapiens
ggacacttatgttgtgctttcccacaaaattgtctagcattttctttaagacatatgcatgaccactgcccaaacgaaataaatcaccctttctcttaaaggatccagactattaaatatgaagaacatcaactaatttgactagcagaatgtaggccttcagtgttaacatagcctttttctgttattgcatttatctgcctttgttctgaagccccagtctagtacctttcttaatgcagatctctttgagcataatgtttccattaaaccagccagtggatctcatttgctccatacatattcatattaggaaatattattgtacaaagtaaaagatgctagtaaaagatatgctggaacaacatttctgacagtatttgttctgtagttaatgctctgggagcctttttccttcaaactctctattcctagttagggcctcatcatttcttgcctggattattgcagtagcttccaggctggcttcctttatgcccttcataagcatatggctgccagattaatatttttttcaacacagccctgatcctgtcattctacaattgagttcctcacagtctacctgatacagagacagaaggaatgtgataatacaaataataatggtactcacaacaacaataaatgactggtctttgatatttaatctctaatatcaattgtcttgagacaacaaggctttttgaattcaatatcagagggtttaactgtgaggtacttggcatgggtctgaattgcatgtatattgtatgactgattgaaagaagattatctgatacacatgagaagtgtggaggtgggagctgacattttgttagaagtgcatgcctggcattttgatatactattgcacctcctcaaatctttttaacagaaacaaactactttgtgatgatagaatagcataatacaggacagcggaaaaatcttagtgctttttgttctggttttgattttgcaactaaatatgtatgataaataggaaattagtgcattggagcatatgcatctgttaaagcagattgactgcttggttatcacactataaacaacatttttgaagaattttaaaatttataatctctgatataatgttaaatgaaaaataagatacaaagc

SEQ ID NO: 109972 - DNA, 1045 bp, Homo sapiens
gatttgctactgtgaattgtgctgctataaacacacgtgtgcaagtatcattttcgaataatgacttcttttcctctgggtagatacccagtagtgggattgctggatcaaatggtaagtagagctctatgatgttttgatactcttctatggcatagacttagtgctcccatgttctaagtgttatgaaaggctgaagataggaatattagaacatggcccccttcctgagttatatagcttagaacaatggtactcaaacttaagaatgtgtaagaattacctaggccatagcacttacacatggaatatcaagagggagaacagactaggagaagacgtttgaattcagctgcccatgtaaagtataaagaattatttttacccagaatcttgaaggggaaggaactgagtcacacagacaagaatgtgcctaaagcaattcagcagttcagagtggaatgaaaaggaccctggttccctgctcttaagccagtgttctttagctggctagaactcagctctctgtttaaaaaatgaatgggttgcagtggagcgctgtgttccaagtaggatttgtaagacttctggaattctgaaaaaattctactggttttctgcctgtttctctgtctatacttgaattcactgaggccaaaaatggtaactttttacccagtagctggcaacattcctggtaattagaaagtgatcagtaaatgctcaatgactatctgaatgattgcatttttcaaaaagaaatctgaagtctaaattttgagccaactaaacatcatatttctttggttttgggtggtttgggaaaaatccaatgtgttctctgaaaggaaaacatatttggagatatgattatttttttctgtaaataaagttactttgttgtaaatataaatatacatgctcattttataaaagaaaatgaaaggagaaaaaagagcaaaatatctgtattgacaccactcataattaccactcataatttttgttttgtttttcttattcacatataggacttttatcatga

SEQ ID NO: 109973 - DNA, 1098 bp, Homo sapiens
taatagtcactcttcatgaaaacattttctacccttcctcctactctgtggcaaaagtgctctctccttggaaattatacctttctgggatccattccttttatccatctacaatcagtggacagacaactccattttgaagaacaaatacgttagaagaagaatttttttctcctatacaatctacagtgtaactgatacacattcaaatcatcgtaatacagtgatcattataaaatgagagtgttttctgcaaagaggaaaaaaaaaactgagcaaacatctagtgactttgttaggagcttaatgtgctctaaatatgatgtccttcaaatattttatttgaaatatttgataggtcttagaaaattttgctcatggaattctctgagaactgtaacacaccacctattcctttttcgctttgctttcggtcacccaaatttttttagaaatatgtgaacgagggtctgtttgtttccactgaagcaaatatagccacttgctcacactggtggcttcttttactgaagtccgtgaatatgttagaaactcttgtatgaaaatacagcaacccaatttgtccctattgagcctactttgtgatttccatgccctgctgcctggtgtgtatacactgagatccactttgttaaagaacaaaactgggtttgttacttttttgtaggcttattattaagtctgagcattctggtgtgaggttaggaacgctggtttcagactctggaaaacagagttctaatcctgaccctctgaagaccttctcactttgggcaaatctttcctgagccttgtttccttgaggaaaatgtagagatgtgtgatattcacatttcttacgccctacagttatgtgaggaatactgtatgtttcagttatgcacagataaattagttatttcttctcaaagaatcctctgttaaaaattattccccaaatagctctttttcgacacttgtctcaaggtggtcacattttaatttctgccactgatacacaaatttcagtgataagaaacccctgaatgacttgagagtttcctgagagatgggatcccacctattttattatctttt

SEQ ID NO: 109974 - DNA, 1032 bp, Homo sapiens
catattttttcatggtcagttataatctgaccaaagaaatgcatttttcttgggatattaaccttcattcattcatcaaatatttgttaaatgccagcttatgggctatgatatgatgaagcataatgaggaagcagcagggaataaaaaggacagtctctactagtatagaagcagacatatgcacatgtgatatgtacagggagggagaagtaaagagcacccactgtgctggaggattcaggcaaagtttcacggaggaacctgacattcagcttgagatgtaagacattcctaggaatcagctagataattcaaagacaatggagaagtgcattggtgtaggtatcattgttgagatgtgagagagcttggcacaatagacatgaaagaaggtcaatgtatctcaaagagaggtagaagaggtggatttgcatccatcattcccctaacctgttgaagatttttgagcaggaaagcaatatgattagatttgcatttgcaataaatcactctggctaccaaatgaaggactcattgaaaaacagtcgtggacattgggagaccagtttggatgtttttagagaattcataatgaaaaatggtggaatcttggcatgggattgtagtagtggaaatggtaaaatgtggacatatttgtgagttatggaattccctatttagagagtaggagcaacaggatttagttcttgaatggaaagtaggcagtctcagaaatgattcccagtgttctcctttgagcaacaactgggtggatgagaaaaccaaatgaaaagcagatcagggtggatgatgaaatctgtttttaatatattgagtctgaaaagcatatgagacattcaagcagacacatgaaatagacagttgaggatttgggcttagtattcagaatacagatgaattctggagacagaaattctaaagtcttcataacatagaaggtatatcaagttgtggccatggtcctggagacaatcgagagacaaaagcagagatctggtgtcaaataaa

SEQ ID NO: 109975 - DNA, 1035 bp, Homo sapiens
gacgctattatgaaggctactatgcagcagggccaggctatgggggcagaaatgactctgaccctacctatggtcaacaaggtcacccaaatacctggaaacgggaaccagggtacactcctcctggagcagggaaccagaaccctcctgggatgtatccagtcactggtcccaagaagacctatatcacagatcctgtttcagccccctgtgcgccaccattgcagccaaaggtaagaaactcagtaacataaggaggagaatacaggggtgcctatcttagtctgccttccccaggaagcgaagcctaaggcaaaagtgtgtgtgttacttttatttcactgacaaatacaatcccagggaaggatgagtgaagccagagaggagagagagactacttagtatgttactaatatggccactgtttagtatcaaatggaattgcttgctcaatctcagagaatcatcttccaaagcccacagacaccatagcatctgaggacaaagtgttctgatggagaaagagaaaataatttatttttcacatccttccctatattggttaaagcttccctctgttgtgcagaaacttcctctacaccttgcatttgcttggacattaaacaggtctgtagtatctcaagcctcagcaagggtagtgatctatgggtgagacatgtggagggcaaaactgagtgaactgctgtcaggctgtggccctgtgaaggcgattataactcccgcaatgttggtaccacagcggttgctgggccagaacaagtggccaaggacccaggaaatgggtgaggccaagcaggtctaagataatgcaaatgccttggacagtttctcctttgagaaggggctgcagtataatgcagcttgtttgtgaccccttgtttattcattttactaatcctccagaaagaatcttattcttcagcctttagcactattaagcaatgtttaaaaactccttatgagtgacagttacttcttatttgatttaattgtccatatgtggaccttttaagt

SEQ ID NO: 109976 - DNA, 1049 bp, Homo sapiens
aaaaagaaacagcgtgatacaactttaaaggaaataagttggaaaaaataagaacctttcctctccacttccataggctagcctacgtaaaccatcagacatagaagcgattttcagaatcataagtcttaaccccttacatttacagatgagaaaactgaggcctgaagagttacagtgactttcagagttatgtggttagtaaatgacctcatgtgaatgcaaaatgtaactcttctattctgcagttcttctctatattggttaaggatagttcaagacagaggaggtcagaagtaagtgacctttaaaaggtgtaataataactattgtcaggatgatcttatttcctatctttagaaccccatcatcagttttgtaaggccactgaataatagaaaatggttccgattctggtgctccctattctgtctcacagctgctcctgtgaaaacactcgttcatgggctctgtgtaattttgactcagtccataatctctctatcctgattttaaaagttatcatcagaatggatgtgctggtatactaagaaatgtctgtgaatattatttatttattttacttatctaatcattttcatagatttggttgtttaaaaataccccaggtctcaaatccctttggaaagttcagcaaatcattttaacaggtaattctggcaatatgtaattctttgtgtttacagagtgagagaaattctatttatcagtgttttttctttgttttgttttacttcagttctaagcaaagcagttattttgcttattgacatattgatatattcctttgggaatctcatttctttcttggccagctacaaacactcatactgtccaatttcaacaagagactatggttattctcttcttcaccaaacaaagaaatttgaaccattattgataaataatttctggtgaatattaaagctttgaaatgttttgcacacacagtgttaggaagtgtcttagagtgaaagacactatttttactactatagtatcaaaagtgccattgtcccacatacaaa

SEQ ID NO: 109977 - DNA, 1006 bp, Homo sapiens
tccttggataaaaatggccaccttctctctgtgtcctcacatggtctttcctctgcttctctgtgtcctagtccctctttttataaggacaactccagtcgtattggattaaggtccaccctagtgctctcattttaacttaatggcctctttaaaggccctttctccaaatacagtcacaatctgatatactaggggttaggacttcaacatattaatttgaagggagacatgactcagctcataacaattatgtaggcaaatgaacatttattttaaatgacagaggaaatgcaacatgttataaattaataaaagctatgaaatacctcaaaaatcacattaataaaagctatgaaatacctcaaaaatcacaaaaatcttgaaaaataacactcttatgaattaaattcctgattactttttcttacatttttagcagcatattcattgattaactaactgtacaacctaatttcataatattttctgcagagagaatacaaagataatttcatgctgagagtttattactaccagtcctgccttacaacaggtccttaagggaatgataagcatgaaagactgttacctacttctacaaggacacctttaagtacatagcctgctaacactataaagcaactatactatcaagtctacataagaaccaggtaacaacatgatggcaagatcaaatgcttatatatcagtattaatcttgaatttatgtgggctaaatgccccacttaaaggacaccgagtgtcaaattggatgaaggagcaaggcccaactctatgctgttttccagagtcccatctcacatgcagtgacacctttaggctcagaataaagggatggagaaagctctatcaagcaaatggaaaacaaaataaagcagaggttgctattctatttcagaaaaaacagactgtaaaccaacaatgattcaaaaggacaaaaaaagggcattacataatgataaagggttcaattcaacaagaa

SEQ ID NO: 109978 - DNA, 1019 bp, Homo sapiens
gctggagtgcaacagcgtgatctcagctcactgcaacctctgcctcccaggttcaagcaattctccctgcctcagcctcccaagtagctgggattacaggcacctgccaccacacctagctaattttttgtatttttagtagagatagagtttcggcatattggccaggctggtctcaaactcctgacctcaggtggtctgcctgccttggcctcctaactgaagttattttttaaattaaactaatacatgcaactggcttaacaaactaataggactaatgagtctaaaacaaacgacataccctccgtgcttctcctctctccactctctcaatcctacttcacgaaagacactcttggctgcttcttcctggcatttgcacagcttcatgtctaaaacagaaatgcatttctatctttggaggcataaatcttagacattatctgtggattaataacacaaaagacacggatatgccatccatataaatgtttgactgtttagagcttcctactctgggaaggattgacccatctccctccaaaattgagaaaagggactttcactggacattatcttcaagtccttgcagtgttccagaaggtgtgacaatctggtcctttggctggctgcattactgacctgctgacctgctgttttaggttgattatatttgcctttgagccaaaagagttacttgatgatactccagagccccatttccacacaacacttaggtttaaaagctgcaaaaatggatttaatgaaataatgatggagtgatttgaagatttttcatgtctttcaggaaacacaaggtgctcttagtgaccacagagctagcagcctcccctgcatctcaactttatgtttccaaatatagtctagatgcttagtaagtgttaaaaaataatagtgcatcttgatgcattctttatggtgtaaaataacctgttaggtagcagggataatttttcttcagcattagatggctgtttatgtatgatatatttctc

SEQ ID NO: 109979 - DNA, 1050 bp, Homo sapiens
atgttgactcaatcctgtccttatgtgaaacaataaaaatattttaaaactttctctcagttatgcgacatagtgcttttctattttttcctaaactggaagctccctaaggggaaaggatgcatctcatagaatctcaaggtgctcagcaggtaatatgcatttgagcaatgtttcttgaattaaacttgctagccttatttatcctgaagtgatataacatcgttgggctgcttcaaactgcctttatcctgatgggttcaactggcacaaacagttattaagatttgggagagtcagaggtcccatagataccatggactttgctgcatctcagttcttccattgcatgcctttggaaatctttcctgctggtgaggttctgtgagggactgtggcctgatagaatttgtttcatttctgtttgtttttattctttagaaaggcagagtagaaaaaacagtttaatgagataacaaatagaggaaaatactttggacttactgtttaaatttaaagattgactttatggtagctattaatagttccaacatcttgttgaatacccaaagcttaattatgtaaagagcttcttatttcctctctcctgccccttttcttctccatccccttgcaaagcaggcacaaaaattaaagctatttagagatatgtgaatcagcatattgcctatatctaatttatctttgtgcaatgcacacattcgtgaatttctcaaagccatgtgactctccagaaatctttaaatatgtaaataatattataacgtcccttagtgaatagcagatgcaatgcattattccaggtgtctgagtaatgcgaagaaaagatcaaattccctgttgtactacctgtgtcacatgttacattaataaacacagtcagcttgcaagaatagtatgttatctgaatttaatgaacttctgaactgaatggaatgcatctaattgacaaactgtcatcaaagagaacagaagacactacaaagtccaaagggaaagaagaaacaagtggggagaaaaacaaacaaa

SEQ ID NO: 109980 - DNA, 1195 bp, Homo sapiens
gcctgccactcacctgctaggaacaggccaaggaccactatcagtccatagcctggggattggggacacctgttacagaatttatactgttaaatgtcacttgatatgcacactaaacctattacaaaccacatattgtcacttgtcataattggacagagctgcaatgaggttttggttttaagtgccaactcacctctaagctttttcagatccttgagctaaaagtgtcctctttctgaaatcctattaccatttattgtatatctttaatgaaagttttagtcttttccttcatattaatgttattcacccatttggcttagcacccctcttagagataaagctctgtgaagatgtgtttcttactggttcatttcggcatgccgctaaatgtgtaaaacctagaagatatcccatagccttgtttgaataaataaagttacacatggtgtttcaagttcacctatttctttgactaccaaaagacttctggttttaataaaacaactgtgaagttcaagtcctgtgtattctaacactttgatttactcaatggcctgatagaaactgtttttaaaaattatatttacccttagcattttcctgagtattgtctttagctattggtggggaagatggatatatgtgtatgtgtgtgtgtgtgtctgtgtgtgtgtgtgtgtgtggagagagagagaagagatacatggacccattgccacaatcttttaattatgtgaaacaaaaaatatttaaataacgttgaggttatccatatcttctgtattatattctgtgttactgatttttttggatcaaatagtgatttttcatgagctaggtataaaaatattaccagggactaaaattaggggaaactgggagtaacttagagtgtagccagttgtttttctactggtgctaccggcattgaaagcaagagagttcctccctgtgtggggatggcctgtacatggcaggacctgagtgtgccaggtctccagcctttacactttggtagcatcttccccacacacccagtgtagtacgccctctagagggatccatttcttcagtgaccacgtctttggagagccactgtctagatttttagtgcacaaaaatggagtgtgattaagggttttctgaggatggtgtattgttttatgttttctgttgctccactcaaatt

SEQ ID NO: 109981 - DNA, 1001 bp, Homo sapiens
ttcattcatgagtagatgaataacataagtgtcctgactcaaggagcttgtaaactaagaattgtaatgttataaactatttatatttctctagtattttacaaattaacaagcaaaattgtgtgattctatttgtagtcaagtgacctcagaagctattcagtcttcaccatttcctaacttatgacttgatctcattctagccagtgacgctctatagtattatatttattatgtcatccttaacggtgtggaagttgaaggaccagaaagattcacacagacttgtctttgttcacaggagtagacccatgcctctagatttaaaaggttcatcaaggcagtataacttagtagaaagaataagaaactgtaagtctggggtgggatctggcctcagtaattctctggctgtgtaaacttaggtaagatgcttaattttaaacacagtatatccttctttgggaaatagaatataccttacggatttctttataacaattatttttcaacaggaaagaaggaaagagaaatgcttgcatggagccatcatttattcaacagtcactcatcaaatacttgttgaatgcttactcggtgccaatcacttgtccacacactggaagtcaggagtaaatacaatcataaaaattcctgccctctgggtgcttacatttctggttgtgttatgctgcagggagaaagaggagattttcaaaggtaatagtacctaataccatctgaaatcctaaaatttctgccttactgtcttccacctaccatccccattggggaaaccttaccttagaggaggccactatatagtggatatataatagtgtttgtattttatatcttttatcactgttttctgcacacagtaaaacagtgataaaagttatcactttcttaagattttgaggttgctgtacattctcatttgtgaacaaaaactttgctctgattacgtaggattcatttaaaatccatggaatcttttg

SEQ ID NO: 109982 - DNA, 1064 bp, Homo sapiens
gtttcctgttgtatcagaaactagtgagataaatattagtaatttttgtcccattgacacatgatggtatatcaggaattctgagctcattttttttttttggctcaataagtgaccttagaaaatccagaatgggatttttaagttgaatatccttctctgacctgtgaaatcactgcatctgtttccctgactttatcacaaggtaacccaagatattgccaatatttacatgtgacaaactctgaaagatgtgcataatgctcccaaaggtcatcatcttcatacctaccttataaagtgcaaatggaattgacctagtctagaataagcaggcgagatgcagagagattatgtgacatagctaggtcatgtgactagtatgcagcaggcttggggcataaatcctagtcctctggctcccgagtccagtgttcattacgctatgtgacatgtcagtattgctgtttgctcggggttaggcttttcctttggaggttagagcttgataactctaaatcgataaacttcttagtatgccacagtaatgctagcagaaagtatttgttgaagcaaaaaatatgttgtttcaaggggtctgctccctgaaagataagtttttttctttatttgtggttttacatctaatttttctaatgtttcaaaaaacattctgtgttcctttaatctacaagttggaatggatacggtgccctaattttcgtgttccctttgagcacaagcaataacacattttaaaggatgataaatagctgtgtaaaatgtagatgggttctataaatacttaccaaaatccctgtagtcagaccctggtagaaggagagaatagtcaaagtgttctctctttccacattcttcttcttcttttaggggtagtttggtagttaagaacacagttgctagacccagacagactcagacttgagtcttgccctacctgtactacctgttagattttagggaactccttaattttcatgggcctctatttgtagaaggatgctaacaatattatgtgtagtttttagaacattcatctagta

SEQ ID NO: 109983 - DNA, 1010 bp, Homo sapiens
cacatcattaaaacattttacttcggattgatggacatttttgtgtgtctaatattttctactatatcttctagagggcaagacctacttctcaatatctttagcatggcacttactaggcactcagcaagtgccctttgaataaatgtattatttgcaatcatctcttcaggtatatgtagtttttgtgttagaagcttgctaggttgcatcttgcaagagaaacaatgtgatccttcacatgtacttgttcttctccgaatgactttctatgcaagaagcactggaggctgagttcatacgttcagcattgtcagcagaattgagtcctgaatgacctgggtcagtcactacattagatgatttgattagaaaaaagaataaagccagttataacttgttttctgcctattacccaggatatttagaatgatggagatgcagaagcatttagagtttttgatgatactcatggtggtatcatgaaaataacaccttgtgtgtttatggcacataattacatgaaactcattttattctcattagagtgtcaccttgaatcctgttctttttggtcttaatgtttagtgattagaacttgggaagcaatttctagaaccagaatggtcgggtacaaatcctagctccttctcatatcagctctgagaacttgggcaggtaatttaacttcatgatgtctcaatttcctaatctgtacagtggggcagccagagtacttatttcattgtattatttgagaagtgggaggacatagtgcatagtgattctataaatattactattgcaaccaccaggctttgcataaggccctaagtcaagaaaactttcaccgtttaacagagatgtttctctctgaaaggcatgttatttgagaaatagttgttgagatgaaaggggggaggcaagatagaggccagcttgatgagggctttgaactcagccctatcaacaagaagaccatagggctgcatagactgaggagaaacact

SEQ ID NO: 109984 - DNA, 1034 bp, Homo sapiens
ttcccacctcactatatcaacggttggggcaaatgttctctagcatttctttcaacagtaataagttcaatgtacaaacatccttaatctaaagtataacaataaagctaaacataaattgatggagattaacaacaatgcatggagaacagtaaaacaaaacatagaaaatccacgaaggtttctagttacatcaaaatacacaaaaagtttattaatgctcttgtcattgccatgtgaggagggtttataatggggtctaaaatacattttttaaaagtgaaaaataaggtctctgtatttaggtcctattaaaaaggaaaagctgacttaccaagtatatatgcttcaaatatcatagcaacaaaatatattgccacaaaaaaaaaactgaacatagatgctaattgcatgaatgaatatatattgaacactctgggaaacagatataaattattacctttcccttcaagaactgtccaagctctactacttagtagcttagaaaacttgaacaagtattattccctctaaaccttcatttttgttttgttttatctgtaatatgggaataataactagcttatactgttgttttaagaaatggatgaaatatttatacaaagcacttagccaagttcttggcatgtagaatatgctcaatacaatactcaaggttctcccatgctcttggggcttatagtttatttaagacataagatatgctcgttaaaaatccattaataatgctcaatttaagtttaagttcctagcaacaatagaacgtatgtcactggtaagtaatcattgccaaatggggatgaataaccatttgagaatttggaaaaatggctaacttttattgagtgcttatgatatggcagcactatattttatttacattataggaattaactcatttcactcttataggaaaacataaccctgtgaaatagatactattatcattttcagattttgaaattaaggcacagaaatattaatttgcctaatgtcaacagctaatacattgc

SEQ ID NO: 109985 - DNA, 1046 bp, Homo sapiens
tgtttggaagttagcgtcttgcatccaacttctaggtctacccctagattatcattattattattacatgatttcaactaacatttatataatgctttttaaagcacttttctacatgttatatcacttgagcaagacagcagtcctacaaaatagacagtgtgtttatttccatttgggatatgaagaaatgaaagatttcagtgattaagggactccccactccccagggctctccactaccctcacaagtcataaagcaggtaagtagcagaattgccctggggcacaggcctacagactttaaattcttttcacttttcaccccattgtgctgttaacaccatgttgctgaattggtcatgggccataagatagatgagttaacatacttcatgttttagctttttaatctgtataaggaacgatgtgattactttgtaaagtgcttagaggatctcaactgagaggtgtaaagtaatttgtatttcatagtttgtgttattatgtgacaagaaaatggtttccaaagtgcttctatcaattacaaactgggaaatgactccaggtaggcagctacctttagtggatcttgttttcacagataaatgacctaattaatgaaaaaccccaaaaccacaatggaagaaaaattagacaataagtggcttagagagaaggttgtattgatttggggggaaaaatgggttttttggttttgtttctctctaactttttgtttagggtatctttgagttgtgggaatagaatgttctctagttaatgaggcatattagatatattttcttttgtggtagtgacttctggtaatgtttgttcagagtagtatatgtttacagcactaaataaataataattctgagcattttatgtgttctatcttagcatacattaattttttattaatttggctagtgtgtttgtttgtttgtctgttttgtgtcagagtttcactcttattgaccaggctggagtgcaatggtgcgatctcggtgcaccacaaactccacctccaaggttcaagc

SEQ ID NO: 109986 - DNA, 1031 bp, Homo sapiens
agtcagttattcaaggacacacaggtaggtctacaatttaggtgctctaacttcatgtctaaggatcttacccttatcaccatcccagaaaagcccaaagtagcttgggtctgaatttccactttgccacagtaaccttgagcaagttttgcttctctttgcaacagtttgctcatttgcaaggtagggatgattataaaagtgtctgtgatagggggttttggaggattaaataagttaataatacatgcaaattacttacagatgtgggctgacacacagttaatgttcagcagtactgagagtattgaaacgttatgatacaggctacttaggttttgtgtatttgaacataaacttcagaccaatttctggtgatgaccacgggtaagatattctgtgttttagttaagatgatttccagttaagatgttgaaatattaaatacttttcttgggtcactgaataattataaaatatattaaaataactttgatatttatttcattcatagaagttctagacaatccagtctagagaagagttatgtaaaattctacaccagaaatagaaccctaaccttgaaagacagggacacttattcatatatgtatgtctaacacaaatgggcctcataattgttgacagccacttattgagcattgaccatgtgccaagcagcatgctgaacacttcacatagctggtcttacttaatgctcacaacaggtaagcattcatatccggatttttcagatgagaaaattgagtcttaggcagttcagtaccttgtccaaggttatacggatatcaagagcctagatcttcataagccaagtctctgttctttttgctcagcaaatacctatttttaatgaggatgcttttctcaactagctactatattctgcaaccagtctgcattttacactgctatcctttctgtgtcattcctaatactcattcatagaattataagatcatagattgttaaggctggaggaaacctgaggagtttcttggttctcagca

SEQ ID NO: 109987 - DNA, 1204 bp, Homo sapiens
tgagatggagtctcactgtgtcccccaggctggagtgcagtggtgcgatctcggctcactgcaacctccgcctcctgggttcaagcaattctcctccctaagccttcagagtagctgggactacaggcgtgcaccaccatgcccgggtaactttttgtattttcagtagagacagggtttcaccatgctggccaggctgatctcgaactcctgaccttgtgatccacccacctcagcctccaaaagtgctaggattacaggcatgagccaccgcgcctggcctgtctaatcttttatttaatgcatctaggctcctcctttcttccttcatggtttcctttttcctacttccctatctcgttttctttccttcttttcatttacagagaaatggtgttagaaatgaatgagaggagtgagcaaagaaagatgagggaaaaatagatgtgttaaggagtatacgcataaagaaaagaggccaggaggaaaagctgttcaccccgactcccatcctaatcttgcgtagtctttcgtttcctgagaatagttaggtcagaagttacagtagaaactttcatggaatacacaaaagggaattaagtaaggaaacttgtgaccgatgctatgggaaaggacatgtttgtcaaagcaataggttcttcctgagttagagaacaattatggttcccccatggaaatgtttatctgacgcaatgagaaccaggtcagacacaattcagaaatgaaatgaataaaattattctaagatctagatgggaggagacataagggattgtgttttgatagtcttaagggtgcacttacatttacatccccaaattccctcttccatgaaccactgtgcactgtacattgccacattaatgctaactgtgccaattagattaactaatattggtcaaaaaagaatatcctggccgggcgcagtggctcacgcctgtaatcccagcgctttgggaggccgaggcgggtcacggtgaaaccccgtctctactaaaaatacaacaattagctgggcgtggtggtgggcacctgtaatcccagctacttgggaggctgagacaggagaatcgcttgaacccgtgaggcggaggttgcagtgagccaagatcacaccactgtgttccagccctagcgacagagtgagactcttatcaaaaaaaaaaaaaaaaaaaagaatatc

SEQ ID NO: 109988 - DNA, 1015 bp, Homo sapiens
atcataaaggtgttataattcagtcattcttccacataagaattattcagaaacttatttctaaattatttttatcaaaaaatgttattctattttttaatttgaaagaatttaagtcttgaaatttattagtgacatgtaaattcctgactgagcattatgaaacttgtttagttcattgctgaatttggtattttgtcagctgggaacactaaatacccccacttaacttgctatttgtgaagctcagagtagcattggggttcctgtacactttggcaattgccccatggctaatttggccaacttccaattcctcagggagcaacaaagagttgtctcattgccacctgctattaactaaatgcttaggattcagtgtcctaggggtgactgggagacatgggaatggattattgtaacagcctgtggaacctccttccctggggaattttgagaacagcaaagaaccatctgtctgggctggttttaggagcagccctgcctgaaggcaggtgcacggattagatgacctgtgaagattgtcatccatcccaatgacttcaatggaaaggatgcatttgctgaatttgaaaagagtccaggaggaacactgataggtttggggagcatatggtcaagagcctgagggtattgagcccttcttgaaattggagacactcggtgtcaccccatgccctgaattccagaatgccataatctacacgtgaacccagcagtcattcacccttgaaaattatgtgcagatgtggttcacattggagtattcacgtcgttgttgatcataagcagaattcctttttaacacatagctcaactgatctatacccagaacatactgttgaccctgattcttctggttaagccggatctgcctgtataatacatcatttactgacccactgacattgagttttcttagcttgtttctcagtggttgttctgtgtttgtttcaggcaattaaatatgttgatgcatgtttcagaagagctc

SEQ ID NO: 109989 - DNA, 1030 bp, Homo sapiens
aggtagaaggagaaattcctcacaatcaggcaacagcgcctactagtgggaagaaactgatacttgaggtagggcacctgggagatagctctgtgcatcttgagagagtgctacactgagagcccaaaggctctcaggtctcatctctcctgacagcttgctatgacatcttaatcaatgaattgcctctctcttaccctttgttatagagtctgtaaatgaagagtttggaatggctactttctaaattttctacacgtcctatgacccttgaaatcctcttaacaatgtattatggatactttgctactaaacggtaaaacagaatcccgagtaagatgaattggcttcctaaggaagtagtgtcaggggagaatagcaccatctttggggccagttccatttatgcaggtaatatggtatggtccagctcaaagatcactggactgggctgagttgcaactctgctacctacttctcaagtcatgtacaaggtcattcctatgttaactcatgtgttgggaagatgataattgtctcatttagcttttagttattataagattcatatgagaatatagaaattatgaagttttatgtgaatctgcaaatttattttcagtctttatatatcacaattttaatttaggctaattataatttttattttcccctttttgttctatattctaaattcgtatctcccatggaggcaggtactgtatggacaaaatcttttattagtcacatattgttttcatccattttgtgctgctatagcagaataactgagactgggtaatttataaagaatgaaaatttattttatcacggttctagaggctggtaagtccaagatcaaggcaccagcaggcttggttttctggtgagggctactctctgtttccaggatggtgctttgtgctacctcctcacatggcagacagtggaagagcaagccagcagaatgccgcatgaagcctctttcacaaagggctttatcccattcatgacagagaagcccgtatgg

SEQ ID NO: 109990 - DNA, 1071 bp, Homo sapiens
taagatctcaccctacatttgaagtgcccagtagtttcaaggaaactttacagaatctctggacttgtcagtcctcttccagaatactgggccctttgagtccatttttatctaccaaaatgtttcttccccctcttatccaacaggtttttaatgatgcaaacaggggaactgtttattataaagcaccttaaagagaaatgaacagtaatgctgactgagctaatcattgttttcttttattacagaacacaaaaactatattttaataatatacctgggtaactaaaaaattctcagtcatgttaccttagcgttttacaatgctacttacttaatctacctgttaaactattctctggtagagtaatttgatgaatgaacacagacttttttcatctattgtaaatttctttgctatccttcagcatgattttaatctttgtttaacacatgttgatgggaaaagtagtgttttttgtttgtttgttatgtaaacccacaaaacagtcatggtttgtccctcagtgcccagagatttcaacataaaagacaccttggtttctttaccaaggtattgggagtcatacttggctttacaaggttcacatttattgaagacgtttttggcctggttggtattttcctataacttggcagctctaacccattgtaaccttggggtctgtagcacagatctgaaagttcatcaagattaaggcttcgtaggattaaatatggctttgcatctgtcttaggttcaattttatttcgttttctttccaaaggtaacttaatacatgtaacatcatttctttccaaaggtagcttaaacacatgtagagccatacagtggtagagttggaaaaaaaatcttaaaatcatttgcgtaattactctctttagcaatgagaatgccaagacatacagaagaggaaagcgacttcgtatgacctatcattagtgtcagaaccaaggctgcattccgttattcacgctccacagtcttagattctttgcagatgctacatggttttcattttcctaaacataaagataaacaaagtaatg

SEQ ID NO: 109991 - DNA, 1044 bp, Homo sapiens
actggagaaggtctaatctgattaaataataggtttctacagtgtgtgggctcaagtttctatctccattccaggcatagtatgggtctctgtgattctgtaggatgccagccccttcttctttggtttgttgttactatactatgcttatgagaaggaaaactatccgggagatatttaatcgcgtacttggaagaactgggtgaattcaaataatggaaattctaaccatttttttttttttacttctttccctcataagaacatttaatcaaggtttttctttaatgagatctattcgtggtgactctaaaatgtaatttaattcttatcagaattcagttaagctttaccaaagacccttgttcaatattgattcgagttcagcacagtcctcaagccctcagatggatgtatcagaactttaatttcttctgaacttttatatgtccaataagctgcatactagaagtgtaaggaggttgaggaaattgggcaaatgaaataaaacaagttggctttgaagatagtttgcattaaggagaatcctagaactatgcgtctctcttggaaccaaaagccttagaacaggaagcatattctgtgtgatccagcaaaattgcctttggttacactgttgaaaactgatgtctaaaaggtattccatacaaaccagagcaaacctagcccttggccatcagtcagtgtgcctgtcttttttttttttttaattgatggaatgagaatattcaagatagtggcttaattatttttgtataaggaccagcatgtttgatactctgagttcaggaatgagaccagtctaatgtaaattaaatttacttctgcctaaattggttgttgatcaacttaagatcctattaaaattaaaaatttacatgattttgagggaaaatgcaccagtaatgtctgcagctttggttcaatgatttttaatattttcctgtggtttattgagtttgttcttaatctttgtgcttaagtagttatgattaaacagtttgattcagtatagcattgtaa

SEQ ID NO: 109992 - DNA, 1070 bp, Homo sapiens
tgtttcttaattttaaataaatggcattctattatttgtattagtgggagacttttccactcaacatcttaagactgtatgtacatatagtcatttacaaatgattgattattcttctagagaacctgaaaaattttaaatattggaataatgaaagtttagtaagctgacaatataaaaatgacaattttaggtttagaatatataacagaaaagtgtcctcatacagaagcaataaaaaatataaaatatctaggtaaaactttaaaacgtataaatgatctaagtgaggaatgctaaaaaagttttgcatgaataattaactcatgagcaaaaagggtattttggggattgaatgtgctttggaaagcctctctcactttaatagacattcgtattatcaccctttattatacaacaatgttttcagtgggggaatgaatagttactacactctcctttgctagtggtatttatttagccctttcaaccaaatatcccccagccctctgctcatcttagttactgctcaccacatccttgcacgttccaaggcagcccttacttggtaaggaaagagaggcacagacctgtaagtggattgcccagaacaacaaagaggcctagctgaacataaccctttcttcccagttcctgttgcaaaccgtattaactgctgttgtcatagaattagaatgctttttaaagtccagcaggaaccttagaaattcaataatgccattttatagctgagaaagctaaatcccaagaaagctgagtgttttgcctgaggttatacgatttattaacggcagaggtgggactagaaaccatgagtcttcatgaggccttcaaagaactactttctttgggaccgacatgaagggtttaaacatttgtggctacaggtccagagagacatccctagaaaatgctgagattagtaagattttggttggagagtgtagaaataggacagcgtttgctttcaccctaaccagaatgaagggtctcagatttccaggttaaatgcctctgaaactttattctagaaccttcccactgcccta

SEQ ID NO: 109993 - DNA, 1001 bp, Homo sapiens
cttccataaagtgctttttgtcaaagtctcttctggaattaactcctcatgcacagatcgataaaccccaccaacttgccaatgtaattaagaagtgacaggttaagcataaccattaattaagttcaaagtaaaagaaaatgaagaagattgtttttgtgaaattgtgctgtcagatttttctcaagggtatttctgagttcctataaaggggaatttaggaaagggaggagaagattgtctccacttccttgggaaaagtgagtgtttaaacacatgtccattgaatatttttaactgaaaagtgaactatttgccagttttaagagacattgagtgagcaccttctgtgtgcaaaagactgtgctccgtgctatgcggaatacagcgcagtgtgagacttgttcacgctctcgtggagccctgaggtgaatgagaagtatcagacatgtgaacaaatataacacaaggcaaagtaatccaacttatctgtgagagattcgggcagttgtgagagctcagaggaaaggccatgccccatcctacagtggggagaggaggggactggcatcgagaaagacctcccagaggatgcagcatttgagcaaagccttgaaagtagagtaggaatggataagggggaaagaatgaatgagaacagttccaatatctcaacatttttttatgttgaattccattatagcttctaggatcaaaggaaaagaaatcagcctcttgttcagtaaagatttgttgagcattcattatatgtgcattattctgcagaaaatttggggctgggagaggtaaaaaaataccttcaggataacaggctttttcacaaaagtatcaaatagtcttagactcattgtcttcctctgatggcatcttaatggaattcaatacaaaggccaaaattcctttgttttgaagccacaagaaaacacagccaatggaaaagccgtgttagtgctgcctgtcctattctgataaggtgaata

SEQ ID NO: 109994 - DNA, 1166 bp, Homo sapiens
ttaagtaaaatagatatctttttagtgagagagtttctaaatacgaacttattcaaaacagtaatgatattctattttagccagctaatactcaactacgatttgcaatttagagagttgtgcttgtatagattgtccctttctgaagtgagtgaattgtaactttaaataagggctgttaacacatcaaaatagtttttaatcagcctcaaaaattccccttatttccaagtatcttatttttactatttcattgatgtttcaagtggaatcaaatattccaactgttttccactggaagaagatgaatttcaggtacaattcagtagcaaagaacacccatgttttcaaaataatggagaaatttttttctcatatgaagttatgattaaatttgtgaattgcacaagcttggaattctgctgcaggatgcctacattctgtattgctttattttggtcatatattacaaatggaatatttcccagctcatttatatacagttcctggttgctgaaattttactggcaagctttgtgaactaattttacttctcaaagatactaggaataaagtgaaaatagggtcttttctctcataggtctaaaagatacttctttcctttaaccattacattctggaggtgtaattaatccaaccctgctgtagataggatctcattataaagattctaggtaaacagtctttctagcagaaatgatctttttggttcagtcttgcagcatttcctaaaattgctagtgtacgtagtaaatagggaggtaagtggggaaatttcctaaaaatgccagtgtacagagtgaattgttaggtaaatgagaaaatcaggcttgatttaccaaccaccccatgtgcacatacaaacaaacacacactcacaccaaagccaggaaccctgcaacaaagttctatttaccctgaggagatataaaactttgtgactgccactaaattatttttttgaaaaataatacagaaatttgtaagcagacacaacagctctagtttatccaccaaataacaatataaatgggacaagcaaagagaaactgtaatttgaagatttttgagtgtgatacttataaaagtgtgtgtgtttgtgtgtagaaatgtattgaatttgagagtaatttatggaaagtgct

SEQ ID NO: 109995 - DNA, 1084 bp, Homo sapiens
cacttttataatccccaccctaaaaaagaaggaacattagcagttaattacttcagaagttttcttcatgacaacctggttgtatgcctttcttttttcctaaaagtgatcactatcctgacttataataatactatatattagattaaaatacttttgttgtatatgctttttttttttttttttgagacagggtctcactctattattcaggctagagtgtagtggcacaatctcagctcattccaacctccgcctccagggttcaagcaaatcttgtgcttcaaccacacaagtagctgggattacaggcttgcaccaccacagagagcaatttttaaaattttgactagagatggagttttgccctgttggccaggctggtcttgaactcctggcctcatgtgatccacctgccttggctaggattacaggcattagccactatgctcaacttgttgtatatgcttttatgcagttttcttttgttctgttatgttcatgaggttcttctaacattttaaatatggccatagtttatcttcttctagaagctttaataattttaggtgttacttttaggtgttttattgttttgagttaatttttatataaggtgatcaaattttgagtaaaggtatttttccccccatagggatgtccaattgttccagcaccatttgttgtaatttaattaatcttatgcagattgtaaatcagatgcatgttacagaccatataaaccatagatgggtctatttctggattctctattctgttccatcagtctgttaatatatgtctgtccattctccagttcacacactgtgtgggcaattatcattttgcagcaaatctagaaatcaggtagtacggtttgttctgctctttcaaaattgtttggctgttctagttagttcacctttgcatataaattttaaaattcgtttgtcagtttttacaaaaatccttctggggttttgattagaattgttgaatgtaggtgtaaatctagggagaaattacatcttaacaataattatgtcttccagttcatgaatatacatgtctgtatttatttaga

SEQ ID NO: 109996 - DNA, 1054 bp, Homo sapiens
tcaatttttattttgttttggtggtttgttgccttcattcttttatattttctctttggagttctaactacatacaggcttaatatttttctataattctttgatgctctgttctcttacttttcactctttctataaatttctattgacctatctttaagtttactaattctttccccagttgagtctgcttatgagcctattcaaagtattcttcttctctgttactatgattttcatttctagcattttcattttattttcataagacagaatgagaaatattctcatatgacagtctctatatctttgagatcatgcaaattttcttcctttttcactagagccttaaacattaatcatagttattttaaattccctatctgatcaatccaacatctgtcttatttctgagtctatttctgtttgttgctttgtctcttgacagtgtgttgttatttttacttcttggtatgccaggtaagtttttgttaaaagccagacatattatataggataataaagataggctaatatatttcacacctgtaaatgaacatgccttttcttttgttaggcctttagtgtggggtgtttgtgtcaatcttgtcagaagttggccttgatttgaattttttgttgttgttgttgctgtgattccccttagtgcaccacagatttcaaatatctctaatgttactttgtctttgtggtgaggagtggttttccaaaaggactttctcagtatttgctccaccctcagatttagatcttctttttgtgcctgtaccacagagacaacttctttttttgtctgtctcccaaattttgcactgttggtgggaatgtaaattagttttgtggttgaacttgattgctgttactttttacttgatgcttttgaggcagagggacattttctgctgttaccttcagttttagagaggcagtgtggctgtgagtctccgaagcaggctgtttcagtgatcctgcctctccccgggactaaaatcacttcttattcttttcccctacctatgatgagttatcactg

SEQ ID NO: 109997 - DNA, 1288 bp, Homo sapiens
tttatatgtgagattgagaggcagcttggtaggatggaaagagtttagactttgtagttctactgccccaggtttgtatcccagctttatttcctaacagtgtagccttgggcaaattgcttaacctctccgaggctcagtttcttcaaataaaaaaatggaataagccttcccttgcagagttgttaatattatatgaacgttatatatgtgaagtgcccaactccttgcaaatacctaatatacaccagcttccttcccaggcttttgctggtcagatctggtttccacttaactttggctgttggaagataagataatttattatgaagataattgtctggtaattgtcatgagaattcagttgatgataattgaatgatttgtttacctttctgtctaaagagttgcaactcatgggggtcgtgtgtgtgtgtgtgtgtgtgtgtgtgtgtgtgtgtgtgtgtgttacttacaatgtttttgccatctcttcctgtatgacagtatttgattagtcaggtcttaaaatgctaaacactttatccttttcttttaatttcaattttagattttgggggtacatatgcaggttcgttacaagattgtattgtgtgatgctgaagtttgggcttctatcgatcccatcatccacactgtgaacataatacctgacaggaagtgtctcagccctttctccccctccttccttccttccttttggattcccaagtgtctgttattcccatctttacatccatgtgtacccaagttttcgctataaagaaaaaaaaaaccctgaatacctattgcatgcctcactgtagaggctacaggattcacaaaacaaggccccataccctgggcattgataaaaggaaggaaaaatgtagctttcaaaaaaatgaaaattgactttgttgaagggtattgtaatagaatcataaaactgagtgaggaaggaatgtattctaactacacaattagggaatactttgtggaggaggtgggttctggattttgaagacggagtatgatctttgacagatggtgttcggtgggaatgaggaaaaagaaaggtgagcttcagccagggattggaggtggaaaaaatgaacacatgggtggcgatgattcaggcagaggggcaggaatgtgaaggaactaagacataaaagtagaaagacagtttaggcctggtttatgagggggtctttgaatggcaaactcacctttggtggtccacgggaaggtttgttagaactgcaggagtgtgcccaaacctata

SEQ ID NO: 109998 - DNA, 1772 bp, Homo sapiens
gagggtctcatctggaaagttctattattagtaccacatggtcagtacattttaagatagacattttaataggcagaaaactgtatacaaggagagatgtgcaatgcagaataactatcaaatgatatctagatatcttagattgctactctaggccatccatggtcttaccccatgggttcctctaactcccttcatcctcccttaacattagctgtaggttttctcatcactgtctttgctcacgttattttctctgccttgaattccctccctcaagctccccacaccagcaccaccagcatgtaccctgttctttaagactcaactcaaatacctctgcctcaaaaacatattgccctaattgtcctggctgaaagtgacagtcatctctggaccccccccactctcatctctgcacctctctatgtcatccttaatcactttctgacttgtgttcttacatagttgaatatgccttatctctactacttgatattaaacttcataatgatgataagatcctatcttatcttctcctgtctcttccctgatcaggcctagggtagttcctcccacactgtactgttaagagaatacataatgaaaaagtaaatgaataaatggcagaaaccttatgtggaatgctggtgcaaacagttcctttgactgggggcttttaaaaagagactgattgtataggagatctgagcaattttcatattaatggaatggattattagagctggcatgaacatcaaaagaatctagccacaaccacctctcaggtcatcttcattttcaaatggggaatctaagatttagataggaccattccagatcacatagtgagtgattaatagacctaggactcatacctcatctgacatccaacaccacatgttcttttgaaataaggctggaataatagtgagacacacatattagacacatgattgtgagaagacagttttccaccccacagcacatgaccccatacgtttaagtccctgcctatacaaatagtacagacaaagtaacagcaactttagagggaaacatgactatttccatcatatggtgattctacagagcagaatcagaaacctgggtaaagagaaaagtcctactcagtttcattcttgttaaaagacttaatgactggagttcaaactggcggagtcattggcagcattaaagaagtggggttgaagctgggcaacatttccacaacagggagtggaacagagagacagaaaatattgggagtcttgtgccccatcagtagaaggagatgaaggccagagccaaatggtgggggcaggggtagggggaagattcctttctccagcatgtaacagcattatgggagtgaattcagagcttctgtgtgttctgagccaagtgcctgctggaatgtggactgtaaatctctcatcgtcctcttcactgacccacaagcaacccctgctcctcccatctgcttcccgaccacctgcctttcagtttttctttatataaaaaacgttttccattctcctaccttcctctctgtctacctttgtatggtacatctcatccctcttctaaatatttccatctgaccacatttttccctaatgagacaggctcacaataggataaagtgtaacatttattcatttatctgctcagcaaatattattgagcacatactgtgtcctaggcaccactttagttcttgagtggtcagcagtaaagaaaacagacaaaaaaataataccctggtggag

SEQ ID NO: 109999 - DNA, 1041 bp, Homo sapiens
gcattcattcagcacacggagtaagtggatgagatctctcctgtcctgttcctgaggcaaccgctcaggaactctggacacctctggtccttccgaatcctcccaaatatggtgcatccggaacccacttgaaacacactgtgtgttaacctgccagttgagaagttctagactggagaattgttttgcatggttaaatagaaaaaaaaaacttattttatataaagtacttacctggactttattaattcattaactaactgatatttgtggagcattaattttatgcaagcatactgttgtagatgcttgggatccaacgacgagttttctcttgtcctataggagtttaggagacaaactgtcttaagatcttaacatgttttctctatttatttgcatgtaacttgcagatagcaagcctgaatgtcttctttctatttgaaatacagtgtgtgtctaccgatatacagattccatataatgtgatgtagcagagagagtctccattggacagagaattaggagacctttattgtaactcccaatctgtcactagctgtgttctctatctataccttagtttcttgaatccagcagttggactagaatcatggttttcagatagtacaggttccatcccttcatgcccttcagccagaagtgattttgggctctttaatatgtgctttttttgataaattgtttccctgaagaaaggattatgggtgaatggccaagtaaaagaaggtgaaaattcctgggctagtgtaatctctaaagacttttcaagactgaatgtcttctaactctctctttttttctttttgttcttatctcaacaagacctaaactatctagatcatgagatgtcactccttatctttccaagagtctttcctgtttcacgatattgtttttgtacctaaaaaaggtaaagatgaatataagatcacattttaattttataaaatgaaaatgttgttaacatttccaaatggcagtaatcactttatagtcttctgaatcttcaattactta

SEQ ID NO: 110000 - DNA, 1042 bp, Homo sapiens
accatgaaaaaactgagtcacagtctgtttttctttttttaaatctcttcagttcttatccaggtccatttcaaataatatgtcatttcataccttcacaaataccatctccaatttccagaagatacagagagatacatggcttatattttcagccaattaacctgtcatagaaaaaaaattgttaggtaccattgatcatattgagaaatactaagaaattaataagtattaaaagtatttaccagcagcctcaaaaacatatgcatatgcatatttatatgtatatgtatgtgtatgtgtgttagtatacactcaccctttaacagtgctaaaatcctttaaagaataaagaatttgatagctctttaacttttaatttttaagcaaaagtttaacacaataaaaaatgtaggaaatgcagacttggccacttttaagttttgtgtaatgtatatttaaacgcactaacctctgcccttttgaaaagctatgtatttgagtcttcttatgtcagttcctagaagtcaaggcaaatttccaagaaagaagctctaaaaggtgggaacaaggcaaagataccaacctcagactatttttctaggacctaaggagtgcatacaaaagtctagaaacaaaagtcagaaacaaataggggctggacaggactttgttctctcctccagttagcctatcccaagcacagggtttgcattcagaatctatctaaagatgaatttcataccgcgcaccatgcaggaaagagatgctagatgctcttcatgcccaagcaattcacacgctcactctctcacctcgccaaatatcacaatatttaccaccgattgatggaagaacctccacagtccctgagtctaactccctcaccttacggatgaggaagcaggtataccgactctcagtttccacctcttccttttacctctgcgtcccacctcagtgtcgacgcgcagtatctaaccagaactctctcttcactttcaggaaatttgccccgcgatgttctgtgtgcaaggagcct

SEQ ID NO: 110001 - DNA, 1040 bp, Homo sapiens
tgtctcacttttcatctggttgaatggcttttcttagtgtggtatttgctgtcacatagtttttcctgggtgagtctgccaactcacaggtgcttttaggcttgaaatctccatcctatcatttccgttttgcctgtgactgtaaagagtagccattcttttcccatgtattgaagaggatattcttctcttgctttatactactcacgtccttggggagggaaatgcacaatttttttttgttaggctgtaaagaatttaagctgtaaattacataagttagaacaagcccaaatttaatttgcaaccatcagaattcagaatctatagtgaccagtgatcaaggctaattggaaaagagttatcggcccatagctaataagtagtgacagacaaccaagcttcaatatttttctaaagaaattacaggtgggatatgctagaaaaggcattttggggttatgtttaaaaaaacattattgtcccacaatattaccttaagatttttcttttccgcactacctgaacattgtaatacagacaaacttgatttcttctagaagataacattttcaatactgtcccacttctcatcttaaaaatattgtcatgtttattctaatatccaacacaactatcaaaattgcctttttctctagaggatgaaggctgtgaaaaaaccgttcaaattctcttctttttcttttttattaccaggtccattttgcctgacaattgcaaatcagagcatacaaaataaaactgtgcagttttgtttggtttactttcaaaagagtagaaagcttgaaaagattctgaaaccacagtttcattattctcataatccttctgcaactgaaattacatattgcaggagacattttcatatcatcaatgtgacatttacaccacactttcaaagacaatcactgaaacaaaaattgtctttatgagctaaaaatatgcagaatctctgcctagaatctttattcaaacttttattagccagtgaaacacttgcttgccaactgccaagccat

SEQ ID NO: 110002 - DNA, 1122 bp, Homo sapiens
agaagcctctctcccatgaaccacgatgtacgttccacagaggcagaaaccgccgtaggttagcaatgcattttagtctttctctccattcacatttactgagagcacaccacgtgcatgttgctgcaacaggcatttccgatagagccgatccatgagctaacaatgtctgaaaacaaatgttatggaactgttggcatttctgagatttggcctttgccatttgatagactttgcttcccaggatgctgtcattttgtgattttttataattacaaggaatttggtaccatgttgttttcaaaaaacctcctagaaagtctccatgtatgctctagaagttgctctacgtaacagttcagcaagcaagtgttccttctcttgagctgcgtccctcaggaagctgtacctttagggtgtgctttccactttttatttcctctcatttcactcctttcattgtttgctatatcctaaaatatgtgaagtgagagaaaaaatatcatttcttctcattaaatctcctgcattaaatctaagaatcctttaaaataatcacacctgataagtgttttatgcatttccctccctggagtgttatcatccatcaagccagtatcatcatccacctgcttattccttgggactaatgagagccaagttaaatagcaaatgacttctcaccccttcctagtcctcatgcctgaggaataagggcgacattaatgggagcgggagagtggtggctttggttgagatgcacgttcacagactagaaaagtgcctcacctccatggtgtatatgtgccaccttttcttaatccagtctatcattgttggacatttgggttggttccaagtctttgctattgtgaatagtgccgcaataaacataagtgtgcatgtgtctttatagcagcatgatttataatcctttgggtatatacccagtaatgggatggctgggtcaaatggtatttctagttctagatccctgaggaatctccacactgacttccacaatggttgaactagttcacagtcccaccaacagtgtaaaagtgttcttatttctccacatcctctccagcacctgttgtttcctgactttttaatgattgc

SEQ ID NO: 110003 - DNA, 1052 bp, Homo sapiens
cctaaaaatagtagtgtatgttatttgatggcttttgtttccatagttccatcactgacaaaactgtcaatactgttgatggagcagcagcatagcctagagtgatgcattcttacccagaggtggcaataggagagggtccatgtaaataggacgaggtagacagtgcatgattgtaggagaagggttgaagggaggacatgattccaaaaaagatcgttctcaatgtgtcgtctgactcaaccagctggcagattacacttgccaagtcgttccctttccttctaagtcagttggctccatattcacttgaatatgcctctgtttgggcaaagcaagatacctccacttaacctttatccaaggaagctcttggtgtcctcttggtcataaagttgtctcctacctaacccagttttaccaaatggaagtaaaaggggacaaactatggaagatggactccatgccattgcagtcagccaccattctcttttccatataaggagccccattacataagctacgggtgaggttggaacagctatgtttcataatttcaagagtgtgaccaccctgctctagtcatcatcattggatgaatccagttgactctttggcaaaagggtgatacttttcactaaaaatgcctactcttcctgttgatgttccttttctgtttttaccttgtccaatttccacactagtcattttttttattttttagaggatcagattttagcgctggaaaatgagttcaaaaatttcagtgtaatgtcataaggatgttgggatacagagattttttttttccttggaaacaaatggactgggaagaaacacagcatggctttgctctgagtttcaatctgatgattatgaccatggaagatagtcttatgtaaaggttaaatggtgtttacaagtggatagataaggcggagatggtgagaagccgggttttctctatgctaaatgtgtctactaagagcagcacttcctactagctaagcacaatcatagccccaccgtgatgagctgctagtctgaataac

SEQ ID NO: 110004 - DNA, 1038 bp, Homo sapiens
atatggtagattctagtcctagacccctgttttacagctagaattatgccaaaaagttgaaaagtaaagctggatgaaaccttagagaagactccgccatcttataactcagatggtgaaatgagacccagaaagaatagtcttcccaaaggctcacggtcagttattataggagcctcatttggaatttgagtcatccaattctcaatccactgttcttaccactacccaacactacctttgtttaactgtctttcttgcataaaaagggacttataggtgagagattctatagtgccattgggagctgctgcctgaatctccgtgtaatttcaaagagtttcctaactcagaccctgtcccatttcactgtatccttaagaggctgagaaacggggcattcagattctttccccatgctgactcttcattctgtttacacatgggccggccagatgctagagaaaaaaaaacaaacatttgcagctgttatcaggggtaggatagagcacatgaggttcccaagttttgatccaacacatcagaacacacttgatttttactctggcttggagtttactgccttcagcttcttctacaaagcctgaatgttgccatttcatgtcaaaacctgcactgagagatgccgatggcttcttgagctaacttcagcccatcaccgcagtggtctagatgaccaaggaagtgactgcttcattacagcttgaggggaccctctttcttcatcccccactttcactttttttttttttttaaatgaaaaggccgatggttctcccaagtagccagaggccagcaggagcactaagtaagagacagcaagaagtgttcttagtgagaacaatgtggactttggagttatgtaaaacccaattttaatcctggcccagccattgactggcagtttgattttgagttatttaagttggaaccttatttttcttgcttatttattgaactattaattgaaaaagtgattctagtcctagacccctatttgacagctagagaaatgag

SEQ ID NO: 110005 - DNA, 1054 bp, Homo sapiens
attattatttatatccactgaatgcctactcttctgaagcacttgagataacatgaaacatatggcaagtccttgtcatcaggatggagacaagacatacttaaatagaaataattacagaagcatcaattgtgggtttgtgagtatatatatatatatatatatatatatatattttttaatttctaggtaatgtcacatggattttttccttttcttcctcacacaacttcttgaggcaacccaagcaaggatcatcattgctattattataaatgaggcttttgacaggaggggggcaatggagtggcttgctgaagtttcaaaaatgaaagacagacccaggtcatctgtcttcttactattaaaatgtgcaaaattaatggtaatagaaacgataatgagcatccagacatctatggatatagggataaagggacagtcatcagcatccagacatctgtggatatagggataaagggatatgatttagtctcatcatgtaagaataaataaataaatgtcactgaataaatgctattgaatattttgacaatttttcggttctgaaaactacatttaaactctctcaggtattctgaatatgaagttttcacagtggacttttggaatggaaagaaataccttattttttggcataagaagtggcattcactccaggggaaatgtggctaaaaataacatcagcatccttaatctccattgcctgagaggagcctgtgttgacagacactgggagggccagtcttctttggtttccctcgcttctgtttgtctaactagcccttccttaaatgccaagtcagaaaagtgactgcattgaatcttcccagctattgaaatgaatggcaattatcttggctttctcaaggcaggctttggtcaaaacatattcatatgtgttttggagaaggatgagtggcataggatccagtagtttcttcctgtgtctgtcacagtgacactaagatttctgcatgtatttctgtaatatcctgggccattacggtgtaagaagtttgccgatggctgt

SEQ ID NO: 110006 - DNA, 1024 bp, Homo sapiens
aaatcagacaatgataaggagtcataggctccaagaaagttagacattactagctcaatgatgggaaaacccatttctgtcctaataataaagggcattttgcagaaaacacggtgaaggatgatgctgaagtgcccgtttgcatatattgacagcaagaccagtgtcaagtatcataaataaattgccagagagaaagtaggaagtttccattgaagtgggcagctgcaatgagcttcgatctcaagatttctaaaagcattgaagaatttacatcacttcaactattattttctgttgaacatgagaacaggtaaccttttatgtctagtttatatccagcagatgcttgtgatttctacctttctggcacaaaagtcctcatgattacacggcttcctcctctgccaatcaatgctaatggcaagagaaatgagaagcagtcattttataagcattatgtctggaaatgttcctttcgttgatagcagtttcttaacgccagtatggttagatgctatggcaacttaaaattgtgtttccataatatagtggacattgatgtcaaactgatctgcctgggtttgactttggccgaattatttggtctatctttgccttatttttatgatctgtaaaatggggataataaaacccatcttgtcaggcctttggtaagtgtcaatcatatgccatgacatttgtcaagaggcttatgcatagggattttaacctctattacaattaacaacagcaatgagaattgttccattgcatgcccagatggatactaaattagaaaaagaaagatccaggttgaaataataacagcttttttttaatatagaactttaagtcgtcaaaatgcttgttattgtatatgcaaatgtatacacatgtaacattttttttttgcaataattctgaggtaatcagggcaggtgttgctaatgttttacatcatgagtctcaaaggggctacatatttactacagccaagcagctaataaatagtagaactggg

SEQ ID NO: 110007 - DNA, 1046 bp, Homo sapiens
gggggcagggcccgggggcgggagcacagcggggccccagcctcaggcggcgcgtcactgagcacaaaggagacaacagcgaggcggcagcgggcgctgatcttcgctcgccagccactcgcaattgcggttacagacctgcagctccccctcccccagccggcccgcccgcctttctgtctcctctctccctccgtactggacggccccggtccatttccgggctccggatatttggtatcgattggggccggggacgcggagcaggtggccgcggcggggcagctgggccgccagcttggtgcctcggggaccgtctcccgctgctttggtcaccagcccctgcccgcccgacccgctccgttctccggcctgcgagccctgccggccggactttgcgccgcgtccggcgctgctgctgcgctcggggccccgctcggcgccggcggtgaccgggaagcccgcgttaaaggggcaaccgggaccctggcccggtatggctgaagtcagcatcgaccagtccaagctgcctggagtcaaggaaggtaagggccccggagggagagcgcgcgggaccctcccctctcccagcccgaggttctctcaggtcaggggcgttgccatttcggctcccgcggccctcgcccggtgcccgccctgcgttggccttgcccggacgtgaaaggaattgaattcaggttctagtgtgggacgttgggcaagtctccgacgttccaagcccgttttttctcaagggggtggttggggggggggggggctagcagcagccccagcaagtaggtggctgtgcccgtgttctcgtgcatcgcaaagcctcagtggacgctgagagccgggtgaatctgacttactccgcttctaaaaaatcgaggcccagcctggctggcttgaaggctgggaagtggagaggggttgacattcagttccgtgtggagcctttgttttgaaacatgactctttccctccttctctccctacttttcctaggccggcgtctggctggctgactttcccaccttcctcaa

SEQ ID NO: 110008 - DNA, 1051 bp, Homo sapiens
gaaaaaaaaattacactccggtaaatttctggggactttcaaaatcaaatgtaggtagaaatcttatgtaaagtaagagtatgccgtatgccagctctgagtaagggtctgtggggctttcagaagttcatgagtatccaacagatttaaccaccttaaaatgtttccttacgttttttttttagcttatattattggtcctgtttaaaacttattacagatatttgtgtgaatgaagtatcatttcatctttttagaaacttgtatcagaggtacctaggctaatttatcaccaaatttttcatcttgcctgatgagcatttccagtcctgatacagctcctcagtgaccaaataccaggggagtctcccctggacttttttggcttttgtttttccaatgagtcataaaggcttagtcattttccattaactttaggagttttaactgcatatagtaaaactatgaatgacttataaggatatctttccctcttcaccgcttccccatcagcaacaaattctgttttgtttattgactatggaggagtccatgattgactttaagtattatattcactaatttttgagtagcatcttcccaccaaatactttgaaaatattaggtttttcttttatattatgaaggtctgtgtaaatatcgaatacaagagttgacaaatactgtgaaagactctttttgtctagatgggagtcctgacgtagaagaaagagaaagataggggctcacttaatggtccacgttcttcccatctgtacatctggagtttgccttaatatctgggccggtagctcttttggaaagggctattcactctcaatgtctgcatttatagatcactttctggcttttcctagaaaatattttcaattctgtcagtgattgctggattctaagttaacatgtttgcttctgttgttttcccagcattctctggtcagacttcattatttcaaattggtctttggtggatccacaaatcattccttctttttatagtttccccattgaagctccatagagctaatct

SEQ ID NO: 110009 - DNA, 1076 bp, Homo sapiens
tatctataattttaataaagtgatagatcagcatctttttatgaacagtgactgaaatttagaagtatttgaggaaactaggaagcccagtctgccatttaggaccattattattggaaataggattacagattcttgatactcttgacagtttggtgctctaaccaataaggtgactttagcaggtcagatatttgtaagaagtttgcagaggatcctgagttatgctattctggtgtttgtaaaactttttgtgaaaaaggcagctttctatctgtgatgtttattgcaggataattaacccggaaaatgtctttctgttactagaatttctgaaggtttttctcctttcttcttattttttggatatcaaccttgagttgtgtttttccattcaccttatacttaatttattaacattttgtaattcttgggatgatttggcagtttgcaactacaggggagttctaaggatgtggggcagttttctcaaaccagtaattctggagactagctccagattgtgcaaattcctgctagcacctcagcacatactgctttatctgctttaaatgccacataaatcctaagcaccccgttgcattgtttagctgaacaaatacatccgtatgtatacacacatttttcttgattctgagctctaatcttaacagtgccactcatttaactatgcgatcttgggcatattattacaaatctcagccatcatttctttgtaagttgagtgatctgtttaattgtggcccaaagaaaccaagaattgaccacctgcctgtatatatcacttttctaggtattctaggatcctattaggcaacatatcctttcattataataaagctgaaattccaggtgaaggaatttactgttgtttgaggtagtattgatagacatgtagctccatagccttgtttcagataagctggaggatgtggatgaatgaatatgctggatggatgtgggtggaaaaattcaacatttcgtgttatgtcctgtgcactagtcgtcattgttctcaggatccatctttttcacaagcatttatttgaaagtca

SEQ ID NO: 110010 - DNA, 1867 bp, Homo sapiens
cattattcacaattctctgttagaaaggccagttctgaggttgatgcagatgtttaaaatcctgaattaggttaataacagtataatgagctttttcagaaattatcaagacaaaccactcaaatataaatcaggagtagagagtgatattttataggtcctaaaggagagaagaaccgggtattatatttctgcctgagacttcaaggttttgaaattgttcctggatgaaataagtaagctagaagggaagtctttcagttcactccctggcaattttaatagctgtacatcttgggaaggatgaaatgctgcagttttcattgaactggaaccttttattcagtctggatacccgggctgccgtaagtcaggattaccgcttgtttactactgctttctcagtttcgctttcccaggagtctgtataattagctgactgaaccagagatggtacttcttggaaatatggtttgaaatcattaaactcagatgaagcttcacttatttattttctgtaccaggagatacatcttctgtgtcacttgtgacctttaacacttcatttgggtttgccttctctacggtgcttctactttcttcccacttattatcacatccaatgtagttattagtcaattaattctatacagattttacattaatttgggaggttcaggtagaggcttgaatgaagacagaggcttttgaaaactaagtccgtgattttgtgtatgattcttaattattacaatgagtgaaggaaaagaagaaatataaatagcaattggtctgagtagatttttgtttattttcatttctttggtttgaatagataagaatactatgatattagacctgtaatgtgaagttactaagtgtacacttttttatagcttataacatggcatgacagagaatgatttgtggttattagtggtagaggcaggaccgtcaaacaggccccagtggggtgaagtgataggtggtatagaagaggtgtggagttttccattgttgggtgtgatgatcagattccagttctaccacatattttcgttgtgatcttgagaaaatgatgcaacttccctggaccttagttttctcatctgtaaatgtgaccgtgtcagcctctttgcatctttatcttgaagataaagtgagaaaaataatgtacttctcatatagtgagtattcaataaattgtatttattacttttaggaaatacattattttttattttccttattcatgttttcacctttgctttttagtgaacaacaagactgtgaaattgctcaggaaattcaggagaagctggctattgaggcagagagacgacgcattcaggagaagaaggatgaggtataacttagttactgcccctctccctcatggagaaaggggtgctcagctttagagcaaaaactttctgtaggtcacgggctcaatgaagggtttctgaatgggaagcagaatgcctcttatttgggctgcattttcctctgtggaccatgatttatagcctcttgattatgtaaatggtaaaagtcttgagagataatggataatttcacatatgatgtgagttagtttcctatgactgccgttacaaattactctgcaaacttggcttaacagaaatttattgtcttagagttctggaggctagaagtctaaaatctgaagtgttggcagggtcacgctacctcttgggaaggatccttccttgcctcttcctagctcctgactcctggcaatctttggcattccttggcttgtatctgcatcacttcagtctctgcctccattgtcacatggctttattctctgtctgtatctttgtgtcttcttgtcttcctgcaa

SEQ ID NO: 110011 - DNA, 1076 bp, Homo sapiens
caaatttgaaattgtataaaaacatttgtcaaatttatatcaactcaaatgatatatattatttattaatgaatccatgtttttctttcaaagccacttattgaagtcatattagtgattttttaagttgtggtctttggagtcataggactgtggttcaagtcctgtcccctcctaagaacaatattaattttaatgaagttacgtactaaataaaatggagattataaaagtaaatccttcatttggatttgagaagatcaaataatgcaattttggtgaagtacttatttatacatatatcggtgttatatgtgtataatgtaatattttgtgtatcttattttgaaagccaaacatggaggcactcatataaaatgcagatatatatgtgtataaatatgtgtgtgtgtgtgtatatatatattatgtatatgccaatacataatacctatgtatgttttggcagtgagggagtaagttatatttgccaaataacttggtctcaagaaacatacaggtctcagtcctcaactgtatgaggttttaaagcattcagatagattcctcacattatctttttctttccaagatttaaagctgtcacagcaaatttattattagagaataaactttttcagtcagctctgtaaaaatgtagtaacagctctgtaataattcctgcagcatatttcctaaaagtaaaactatgaatatctattaactatttagaaggaattaaaaatcataatatcacaaattcatgtcaaaacccaattctttttgtttattttgagctggaaggtggacttcacttgtgcaactctgagtgagcacatttttattaacaccgtaaaccattgttccccggatgtggtcatcatttaagtggctggtctgtattatataaatttacagcagtagtcacttgattctcatgttgtcacgatagtcttaaaataatagtttatttaaaagagcagataatttgtttttatcaccgggtaattcttctgttttgcttttgattttatgtaaaataaaacttacccataaatgatgaagataaatacttc

SEQ ID NO: 110012 - DNA, 1971 bp, Homo sapiens
gtggatcattcctctgaactcaagagaaactagcaatattctgatagttttattggcatttccagtaagaatatttgaaagcctctgtctgaaattacaaagcttaatttttttgttttacaagattcctcaacctctactttttactctatactagtttcaaattggtttataaatagaacttaatgtttaatggctataattttgttattggcaaatattaaagtgttgttagctctacctaatcgtgatcaagctcttctttcacatttgtttcactttagtttcttaccattttggctatgtacccagaattctttaggtatgcatgaactgtttcagtaatgctcatcccctcttctcaatttaagttgaaaaagcaattttctccatttttaaagtacgttaaactggagcccagactcccccctgtgtagtgagttcataactctcattaaattaatctgcatttttatttttcacatccctctgcctccactcagaccaaccagggtcaaggagggccagggaattgggttctggattctcaagaccttgtagactccaaagagatggaaagactgtgaagcacaagaaagagaaaccagaacatccactggagaacttggaagagccagaacaacattgttcatcgaagagatccctgtcatcctctagctcgggcaaagggagggacaatccccatattaacaatgagcagcatgaaaggaaacggtccactcaggagaggcctcggagacctctgcttcccacgatcagtggtgaagtgtttctgagcactgaatgtgatgactgggagactaagattaaccatcagactcgaaattgggaaaaacagtctcgacaccaagatcgactttcacccaagtcctcacaaaaagcagggcttcactgcaaggaagttgtatatgggagggaccatgggcaaggtgagcacagaaaaaggagacacaggcccaggactcctccattctcagagagtgaggagcagctccacctccatgacgcaggtaatagaggacagtctcgatggaagtcctggtatcatgtatataactacaaaccaatgaatttaataagtaccttaagcaacctttctttctctctagttcatgctcatgactttgaaataaatcctagagcaacatattataaaaggtatacacttaatctcaggtctgtaagaagaaggaaaatatttgtaacttttcccttctgtgagaatgcactgatttcttggagagttattccatgcccaggttgtattagaggtacccattccagatatagttcttcatttaccgagactgtgtatcagagattctgataccaaatcaaaactcctgaatttctggttttacttcagtgaacccagaagagctgatgagcctgtcttgatagtgtttgtctaactaaaaggccgatagagccggaaatactgtattttttagacctcatctttctcatttgtaaaatgaggagttggataggcagtcttttaagaaagtatttttcaaataatatgcctcagttcattttcatcagaatcagctgttaactaacaatggaaatgtctgggtttcacatgtattatcatctctggagtgaggcctggcagtttggacatgttttagacctggaggtggattcttaggaacttaaaagtttaaagtcattgcattaagttactttttatgctgtaactttctccagctctaactctacagttggtgttctaaagtaccaatacaggtaagttcttggtacctatataagaatgaggtaaatattatagataaacctcaaatttctggcacccctgaggcttaactctgaagtccatcattgacgcagtaatggctctattttctataaactgctgaggtgatgttttccatgtgtctgtaacactaggaatcatagtaccaaggagccagtcaagctctatct

SEQ ID NO: 110013 - DNA, 1034 bp, Homo sapiens
aagcacaattcttaaagttgttaggacaggccaaacttacattaataatgaagaaactagcaggatgacacggagctggttctaagagcatttgcagagcagcattaatagaatcagttgaaagggactgcaaaataaaattttaaattaagtataagataactttctacagggcaatgggtacttaacctttcggagttacttctctattggactataaattcttaatggctcatcattttctgcaggttaacttctaaactcacagggccataaaatatctgcactgttctgctgtgaattgttagtcagatatactgtggcattccctaaatgtcagactggcttattacaaatactcttacatgatatcaaaaagaatctatcattttaccttattccaagctcagaataaatttatcttgactgtcagtactttcaacaattttattctgtaaatttatttaaggctgaagttttgtgttcatttaaggatgttcttgtgttctccatctgaaggatgatgaacagaaaaagacaaggaaatgtgaaattaagatatatatggaacttgaaaataccactcacctgattttttgaaagctagtttctagagtctgtttaggatactgagatgagggaagctagtctgttaatttccttcagttaattacatttaaaaaatttttggacatctttgtttaatgacggccttacactgcactgtgagttctttttctatatccttacaaaaatttttgtcaccttgggtccagaggacactgcagagaatgggcatcctgacagtgcagaaatttagtattccaggctgtggagattttctacttaatgagatttacagattccagtgatacatcaagggtttaaataaaccatttcccctctaaatatttggaactgagagatattacctcagattctgactcttactaagtcatcattctctttttaactgccagaggttacagtcttatcaccctgtcaaaacaattagactattcaatggaatattg

SEQ ID NO: 110014 - DNA, 1029 bp, Homo sapiens
gtattatcacatgactgccaggtgctgctgttcctgctccctcggaagtagtaagtatgcaggctgagataaatagaaagaagcctctactctcctccagccttgacagcttagcctcttttaaactctgactctgtaatttgcttttctttaaattatttttgttttcaatgacttttttttcactttgtatttttccagggcctcacttgcaacttcttacataaatttctgctgttgcagaaactatgtgagaggggactttttaccaggcaggcttgcttagatatctttgtttaaatgtatgcattatctacattgccacttccattcctagggcaaaaatatttttaatgcaccccacactgtattctggagtagaggtagtattgtcattgttagctactaaagaaaaatctcctttatcttaaatttcttaacttttcagaaaacatcctcggttgttttattacattgagtttttttttttttttaaaggaatgaagccaagagtgatgaaagaagctgtatctactccatcacgaatggcccacagggatcaggaatggtatgatgctgaaattgccagaaaactgcaagaagaagaacttttggtgagcaaattttaaggcaaaagtttagatatattgatgggtattttttttgtgaatctagtccatcttgaaattatattaatagtcctctatcaattgagaaacctttttttatgagtggaaaaatcatgacaataggaatagagtatccacttttgcttagtgagtaagcattagcagcaaagtccataactccatttctccatctccatgattgttctccataaccctgctgtaggatttgataaaaagagctcctgctctggctggtgaaagcataccaactgattatcaacctcaggaacatgagtcacaattattttcaaaaaccagcttattttgtacaagatactgaaaatgcacaacatagattccaattaaattctttgtttttgtattttcgatatcataggct

SEQ ID NO: 110015 - DNA, 2322 bp, Homo sapiens
acaaaaggcattattttaaaagtaaggttagttggacattataaacatcttcatcaacacatcccacctcaacttccatcagttggtggcattttcactgttcccgatttaacgaagtagctcatatttttctttctcaaactacatgtatcaccttttggggagtaccttactgtctttgacatacatttgatgcataatactaaactaacacattgattctgtatatatgtcacaatcaagaataaagtactattagaaatgtatagaaataaagttattttacttgggcagggagaaaaagctgtttgagtttcaaaggtttttccttaattgtgtttccttttttcttcccctccccaggttttcattacaaacattaaaaacctaggaatctgccttgaaaatggactcactatagcaaatattactgggtgatacagaatgaattctacacttactttttttctcctgtgtttgcattcctgggatttatcctcaagtgcatttctgaccataagtaattttaattcatttcaaatgttttggttattcatgatcacttgggcagtataagaaaatgtagcttctgaatattggccacctctatgctgcatatacttcttgggatatagtatctaagacctttgtaaactgccattttgttaggtatggagtttggtatctagggagtaggccttatttagcaattcaaattttatggagatgaatgatcaaagtgaaacaatgtttggatgcaacgcagaataaaagaatataagaaatagctttttgttgcattaatgtatgatattttgaaggacagagcctttgctttttgtattctttaagaaaagcacaaccataaagtattttaaaaaaagaaacacttggagcaattgaaatatgttattctgactagatggactgtagaggttttgcatttctcagccctcctggggagattggcctagatagcattctttaacacttcctctgcttttgcctcagtagcaaggctttcctaagctcctgggcaatggaacatttattagtatttattgacaaaaatttagttctctgaaattttaactcatatatatgaaaaactttgtattccatctcttctttttcatttacttgtagagccaaggaaatggaattgaaagatgattgcataagtaatgatgccatccttctctctggctgtagactgaggcttttctcttgcttcaagtcagagcagtatttgttgataacctctcaataatgtttggtttacatgccagtaattaaattaattcaacatgaagttgaatttgatgaagtggtcatctatccaagtatttggtttttgttttgttttgttttgttttttgagttggagtctcgccctgtcacacaggctggagtgcagtggtgcaatcttggctcactgcaacctccgccacctgggctggagcaattcccctgcctcagcctcccaagtagctggaattacaggcatgtgtcaccacacccggctaatttttgtatttttagtaaagagcgggtttcaccatgttggccaggctggtctcgaacccctgacctcaagtgatccacctgccttggcctcccaaggtgctgggattacaggcttaagccaccatgtccagccagccaagtatttggttttaaacatttgtattcctttgtgcaagggattgtattcctctgtacaagacctttaagcacctcttcaagaaatttagtctttgtgtagctgctaaccttactgcaatatttattttcccttattttcccatactacttagttgacaaatggcaatcaagctcacttgttctccctctctctgtctcccccccatgtacacatatatatatcccttcagcttgacttgctattatttttcattgtataaatatgaaattcttggcatttcaatatggcatttgtttagggaaaaaatatgtaggtcactagagaaaaatgttaatttttttcccactgtgaattgccttctgtttgccttatcttttcagatagtctttaaagttgggcaatattcaggcagctatttagaacagtttctcagagtggatttgggtctctcatttgagaaagatttgtagtttcaatgaagtttgtatattataggaatttaagtaaaatcatctgagttaagttttgggcaaatgttaatcagaaagataatctacatccctactttatgtagtcattttggagaaatggaggaaaaggaaaataacaggactttttatagctgtgataaaatgggtaaagaaaaacctccattt

SEQ ID NO: 110016 - DNA, 2052 bp, Homo sapiens
tttttactttgtcatttttatataaatgtgaaagcattttgttgttgttgttgttgttcctgctgctagaacacatgcagtttaatttttaggcccacagtgtattatgctttaatgttgtgatgtaaactaatacttctggcctgggaaaacctttctgtttctgtatctttgtcctttggaggccaggcctcattaacaccagtattgttgaataagcacaatatatgacggagccttatcataaggctgcttgacatagacacccactctcctccacattttataaatcattgtttggaagtaaagttagataagagtcaaattaaatgttttgacttgaaaaatatttgacttttgcgttcaaaccactgttagacgtaagtattttattagacataagtattttattttgggactagacagttgctttacatgtatttaagggaacattgtgattttcagaaagtggctttacatactattgaattgctatttcccaagttactttacaaccagcagcagcataccaataaattacaaaagcagaaaatgaaaattaaccctaggtgttctgatgatagagaaatagctaaattagaaaagaaagatatggatagatgcttttaggaggaaaacctttttagaatggcaatgaccacttggatctaggtcaacatattccaaaatgtgtgaccttgggctttgtgtttactgaactcactctagaaaattctggacctgattcattaaccccgcttttcttctctaatgtgtcctgaagctgagctagatgatgagtaaattctttgctgactgttgctcatcactttctctcaaagttagaacttttcagtataaaaataattagcttttaactgattattaattttctttaatagtttctgtcaaaacttgtctaaaatttgtgttgtgccaaattggaaatacccactataatatggtgcattcagtttactccacaagtggttaacattttaagtcctagattttttatgtcttgcctttgtataagcatcgctttggggaataccaagatgattcattattcagtgattattttcttgaaagataactatgatgattggctgtaaaatcttcaccctaataaaggagtgagatctctgtgtaaacagctttctgaaggactgataatagaatagaacttgcagccaaaggctttttcccttttgagaagacggtatttgtgtaaggagtgctaaggtagacttcattgtacatagagtgccatattctgttgaaacgatcataacaaaatcaaaacctcatgcttcagcaaaaaggaaaaaagatttttaaattactttgtctattacttactgctcatagagaagtgactatataaaatggtccaattttctcatttctggtggtgcctgtgagtcttaaagccatatctgcttatcttactgttgatagaatactttttttctttttagcccatgataagtaatatgggcaggtagaagcaaactggagactgtcctgttaatgctgcatggggcacaatgtctttcaaattattggtggaagaatctcttttatccatggcgagaggtaagaatattaaagagtcaggatattgttgctcctggtatttaacaactgtcattagaaatgctgaaatttaattgtagagaagtcaagaaagaaagagtaaactgagaaaatcttactactacagagtcacttttacaatgagacctgcactttatgccagcactgtttgtgaggagcagtactgccttaaattagtttgactctgactgatgtcagtgtacgttacttcctttatgtgactgacagtcagctttccattgagatataacattcacagatgatccccaagtatccttgtcatcagaagctttggaccttttctgccactgacttgtggctgatctgtaacacaataaatacataattttatttcatgttgtctgtccacctctgaataagcagtggcatgaccaaaaagactggtagaaggagagaatttcttggccaaat

SEQ ID NO: 110017 - DNA, 1320 bp, Homo sapiens
ttgtatttctggtcaaattggtcttggaaatccctatggtctctaatttcagctcttgctgtaaactgcaagccaaatgctctttctcagaaagagctatatttttctcttcttacaggcaacccaatatttatttcataaagtgttataaatattgagaagatacactggggagatagcatataaaaatgatgctccaaaatgagaattctatatggggctttccctaagaagaatccatcccagcacatattttgaaaaggtgctgaattaaaaagtacaagagtttgctcatataaatcaagttgcccaggaaacctgaggtgatgctatcatttgtctcataatttagaaacgtgatctcttgagagagagactacgcattgcctgggcactttcagattccttaggaagtgcccctttgatatttggaatgtggatatatttataaaacaaatggattgttattccaaatccacatggatttataaccaagccccagaagaataggcagctttgaaatagctagttcgtggaattgaacagaaccttgatggaatgcagttgcctgtgtgaggacagaaaacaaagaggctgcctcagaccacatgcctatctagagattaagtgaatttgtgagggacattttgtggatgccttaaagatgaccagtggtgggttctgatgggaatatatacactcatctggactaggccaatggaagcagtctctttcagttcacctccgtacagcacaagttgttcctgctcatgacctcattgaggaaaatgagaattgtggtgctggtgactttcatgtgtcttgggaggttgaggtgttcaacatcgttaaggcactcccaaaacgcaaacctccttttttaaatgccaattgtacatctacattaattcatctatgcaaacttgtgttttcatggtttgttttttacactatatttctcattaggttctttaaacatcaggtttaatattgatattatgaataatttttaaaccaaagtattctataagtctgtgtgctttgttttcctggatggtttgaccaaggtaaacatcagtcttgtccttctctcttaataaagtcatccatttgttaagtcagtggtctctgtctcatgtttttgttttgtttctttacagcattcaaggacagggaaacttacgagagtcttattataattattattatttacaaaatgaccctaataggtctgtttagtaacagtgaaattttttcttactccatttccatacactttctgtaaatatgtataacatgataatgatgcctggtgtattg

SEQ ID NO: 110018 - DNA, 1268 bp, Homo sapiens
ggtcatcagtgggttttacttggtgcctgcttgctcctacaagggtaagaaggacaatgaatggcggctgtcctttgccaggagcgaggtgcagttgaagaagtgcatctccagcagcctcatgcaggcctatcaggcctgcaaagccatcatcattaaactgctgtcccggcccaaggctattagcccctatcacctgcggagcatgatgctctgggcctgcgacagacttcctgccaactacttggctcaagaagactatgcagcccactttttgctgggcctcatcgatgacctgcaacactgtctggtcaacaagatgtgccccaattatttcatccctcagtgcaacatgctggaacatctgtctgaggagacagtcatgcttcacgcccggaagctgtcctctgtgcgctcagacccggcagagcacttgcgcaccgccattgagcatgtcaaggcagccaaccggctgacactggagctccagaggcgaggtagcaccaccagcatcccctctccacagtctgacggaggggaccccaaccagcctgatgaccgtttggcaaaaaaactgcagcagctagtgactgagaacccgggaaagtcaatctctgtctttatcaatcctgacgatgtcacaaggccccatttcagaattgatgacaaatttttctgagtgttagctgacttttttttttcctgattcttaaactctgataatgtgtcgtgtggtttgtgatgctatctttctgttttttacatatccagcctagattggatttgttaagaacaaattttaagtttcctggttctgcaggatggtgcaggctctgaaacagtatattactatttcatattctgcctctgatttcgttgtttactttttgtagttattgtcatgctctttagtttgttggagttttttttctttttaaggagatcttaagccatagatgaaaatgcccatgaatcctcttgcttttttctgtttcatacttggtgcaaatttgttcatgggtatggggaaacaaatctctttctgatgcttaacgattctatcctattatttttattattttgtttttgtcttttttcttatgagctttcaccactactgatatttgagaatcatatgaacctgggaactacttggcatgttagctggatttatttattttggccagtgaccagagtagtttccccccttttccaccaaacaatgtaaactttgaaagtgataatactacaaattgtgttttggagca

SEQ ID NO: 110019 - DNA, 1409 bp, Homo sapiens
gctagtacagtttggcatcagtgtctttgctgctaaggcactggcaatattatcctcccttgtttctgtgccattagtacaatggcaacacagtaaaaaagtcagacaagactgggcgtggtagctcatgcctgtaatcccagcacttgggggaagccgaggtaggagaattgcttgaggccaggaattttagaccagcctgggcaacatagcaagaccctgtctcttaaaaaaaaagtcaaacagtgtgttagtattattataaagagagttatgaactcattacccctgaaagtgtctccagcccacactgagaaccgctggtacaaagaagagtgtaagcgcaaagagcctggggaaagaaaaccgcttaggcaatagataaaaaaggccgaacttcatatgatggcaggagagatggagaacagggaaggaagtgagaaaccctggcagaggttccatggaaaagatttggcagtagaagggcagcaaagagttgaaatgtactgaggttttcagtctgcataactgagtggatggcaattccattaactgagatgatgactgggggaagaggggccctgttttattattgaaaacgatactgcttttcacactgagagagaaaaatctatcataattcttgcatttggaaaagggtggattctagcactagtgagaaagtactgttggccaggtctctgcagcagcctgagatttgatttagtactgataatgagttttggttcttggaacatcagagcattctgtttcatgcataagactcttatgtctgtgtttcctgtaatagtgttgtttttttcttctttatttccaggaatggtgcaaaagctggaccaaaagcttccagtggctaatgaatacctgttgctctctggaggtgtccgggaaggcgtggtggacctggacttagatgagcttaatgtctatgcccggggtactgactatgatatggactttaccctcttggtgccagccctcaagctgcatgaccgtaatcagcctgtgacactcgacatgcgccactcagccttgtgccactcttggctgagccttcggctctttgatgaggggacaatcagtaaatggaaagactgctgcaccattgtagatcacatcaatggtgccaccaactacttcttctcacctaccaaagtggctgactggttctatgactctatcagcattgtcctatcagaaatacagaagaaaccccagcgagggatgccaaaggtagaaaaggtggaaaaaaatgggaccatcatctccatcattctgggtgtagggagtagtcgcatgttgtatgatattgtccctgtggtatctttcaaaggttggcctgcagtggcccagagctggctcatggagaaccacttttgggatgggaa

SEQ ID NO: 110020 - DNA, 1043 bp, Homo sapiens
ccacaaggaggttatagatgtcacctaagataggatctttcatttgtgacgccttttcgtgagttactgtgccagatgcttcacggttgacccttgaacaacacaggtttgagctgcacaggtccacttataggtggctatttttcaatcaaatacagattgaaaatatactatttgcaggatatgaaacccacttatacagaggaccaacttgttgtgtaagtggattccacaaggtcagctatgggacttgagtatggacacatttcagcatatgtaggagctcctgggaccaagggacgattgtgtattgttgtcttgtttaggaagaaagatacaccatgaacacagcccacaatgacagtagatgtcgaaagtgctaatttagttcaggtcaagaccctccactaggatgtacaggttgttcattccatggggtacctgggtgagaggacaagaaagagctagaatccagcctgccctctgcctgccaccctgtgtgtcgtgccacacgatggcattcactcagaggaagcagccttgactagcagcagtcttggtacagccaggggagagaatacttcattcatttcccttcatctaacatgttttgtgtgccttgcatgtgctagaggctttaaatagattatcttgtttaattaaatctttaaaataactccgtggaatctgtgtttatttgctcttccagtttatgtgtggtaggaaaagggaagaacatatggggaacatgagctaaatatctacgatgcgcttagacacttcatagcaatcctgtaagggtgggtttttatatgcgtttacttacttttcatcaatttgtttgttttttaatagataaggaattggaaactcagagaggttaagtaatttgttagcctcacttgaatagtaaatgacaagcccaggatccaagcccaagcctatgttgagtccagtgttcttgcgtacatatcagtgtcaaaatggggaaatactaagaaagactcctttggagtgacatcttttaaatcagccctgttact

SEQ ID NO: 110021 - DNA, 1004 bp, Homo sapiens
gtcataggtggctatagaagtctacgttatagttgtctgtcttaagtagtaggttcttgggatgggcagccacctcggaagacatctatactgagactccatccctgctgaagattctgattgatcctctcttgggataggaaaggtactgcctccacaggcagcattgctagaaaattctgccggatggatgactttacaacattacactgaaaacttctctctatatgttctgcttagtgaaaccatgtaggcaaattccatttcttctgtactagcacagcttatcagatatttgaagatggctctcatagcctttttgaattttccatttttcaggctaaataattttcactcctcttcttcctcttgtgcattttggctaggaccttattcatttcattcagtgctattatctcaatttctaatcatatgttgattcgtgtgtgattatctgattagtgtgggagctgttcatgcagcatatcacagattcccagttctcccagcatgtggtagaatcgtgctttctttcatgggtgagggtgggaccatgtgactagttttgaccaatgatttgtgtatgaaaatgatgtatgtcatttgcatgccagagcatttaactgccaaaaagagaatgcccagagccttcttttcctccagcagagtgactgtgaagttccttctagacatggcttgctctacccatctgggtcctaagttaaggaaagaaaagcgcccccaatccctcccgccccactcacccttgatggtcatctagtgtgaatgaaaaataaaacttggttgttttgagtcactgagatattagctttgttactcagcataacttcacctgtcctgattgatagaattaacatttggctttctcactaaatcatcagcattatgcagtgggggtggtgtatgtttctcttcacctttgtctcttcagtgtctagcacagcactggctcataggagacgctcatacttactgtgtgaata

SEQ ID NO: 110022 - DNA, 1049 bp, Homo sapiens
ttaaattttttttttactctgttaatctgtcagttttattaaaaaactttatttgaataaaacaggttaacatgagtactggagttctaaattaaccttttacacacatgaatatatgtcttacagtccaagctagccataagtattctttttcctgtcaagctctgagtagacttattttggagaagggtgtttttttttaaatggagttccactcttgtttcccagactggagtacaatggcgtgatcttgtctcactgcaacctctgcctcccaggttcaagcgattctcttgcctcagcctcccgagtagctgggattacaggcatgcgccaccacacccggctaattttttgtagttttggtagaaatggggtttctccgtgttggtcaggctggtcttgaactcccaacctcaggtgatccacctgcctcggcctcccaaagtgctgagattacaggcatgagccaccgtgcccagccagagaaatgtgttttgtgaagcagcgagtagacgcagttaggaattctctagttgcaagtcattatagagattgtcagacatttactcaatgtttttaaagcaaattggattcatttttgtatgacatgaattaaaattaaacctaaacaatttctttgcaggtgattttgattttattttaaatgtgtttggttaacaccacctgtaaataaactagaacataggatctttggtgtgaaaataatttagatgtgtatttaaaaggtagatttaactttaaatgaatattatactggcttataaatgtatcagatatggcgtattttattatattttatcatatccgtttagtagaaactatggagattgaatgtcaactgaatgttgccattagggtgatggccagactgtcctgtaaggatataggtttacacgttttcaggtgatctcatcacctctgcgtggtaatacttgactgataccagggtgtcggagtgctcgtttaagaatcaggagaccttgccctaattatcttagttctaacactgactagctgcgtggcct

SEQ ID NO: 110023 - DNA, 1038 bp, Homo sapiens
atagaattgattcccgttctctgtgtttaaatccctccaccatttgctacacgtgccttgactcaattttcctttcctgactatagtcatccagtattaagtggccagttaaacttaccttcctacaagccctgtgtaccattttgtgttatggatgttgtactcaaagggcatagtttggtctgaaagtaagtatgcaaggttctagtatatggagaatatgataaatgttaaacctctgtatggggagaaaaaagcacatagtgttttaagtcctagagattcctctactgcctagggcagaattactatcctcgtgaatagtgtaggagcctgaggaccagaaaaactggagtcaagactagtggtgaaaatgggaaactgtagacagtttcccagcaccagcctggagctgttgctgctagaccacaccacattccccttgtgtaggttatttaataaattcatttcacaacccataaagcacagtaggaaacaatgcaattactgaaccattggaacacagctgccaacatcttgtttattcagaattgtccaaacacttccatgtgggggcgggactgatgcaatttgctggttcaacagttgacattgataaattggagtttcatttcctctaccttctgttggaggtgctaatgagcattgaaaggctggagaaacacagaagggagagaagggagaatcttgcctcatctacatactaagtaattgagcctggaagatgtagacttgacaccattaggtaataggtggacacatttgaagtcactaataagggccaaatgcaattagtgttgtgaaaattttaattatttaaattccacttgcagattgtgtgggctggaagcttcatttaataggagagaatgtttgcttttcctaatattcttttatgttttctgatttttttctttttatttcatgggcactatgccaacattccttggcttctggaaaatgagggaattggactagatgatctctgaggcctcttccatactccattgtttgact

SEQ ID NO: 110024 - DNA, 1027 bp, Homo sapiens
caagagattgagaccatcctggccaacatggtgaaaccctgtctctactaaaaatacaaaaattagctgggcatggtggcatgcgcctgtagtcccagctactcgggaggctgaggcaggagaatcgcttgaaccagggaggcagaggttgcagtgagctgagatcgtgccactgcactccagcctgcgtcagagcaagactctgtctcaaaaaaaaaaaaaaaaaaaagaacaatcctctcaaacatctgtacctgtggtagaaagtaattgtctgcgcaattcaaggaacatttcagtctatcccagaaagaaattctgccagcattgcatttgtgttcccagtttgtcttgctctcacggtagaacagctggcacttctttgtggtgtttggtttccttgtttttgttccttggctgagatgtgaaggacttgggaggggctaagaaacctcaggaaggtcggaaaagtagtggcagaagacacaaaaaggagtggccccacaggagaaacagcatgtgcaaagaggaggcatgatagaaaagcagtggaatggggatgagaaaatctggatttttgtcttttttctttcttcttcttttttttttttttttttgatataactggggaaaattacttcctcagtcctcatgtccttatttgcatcataactggatttgggtttttttgtttgttttgttttgtttggttttttttttttgagatgcagtctcgctttgtcgtctgggctggagtgcaatggcatgatcttggctcactgcaacttccacttcctgggttcaagcgattctcctacatcagcctcctgagtagctgggactataggtgtgagccaccatgcccggcctcataactggatttgagtcagagaatctgagggacctcagtgttgctgaactcgattcattcattcacacaaattggcagagtacctgccatgtaccatgtacctgcagtgtgattggtcctgcaattcaaagatgaatgaactgagatcgttgacct

SEQ ID NO: 110025 - DNA, 1320 bp, Homo sapiens
tgaggttactgggagttagggcttcaacataagaatttgtgagtccacaacttagcccataacaagcacccaggctgcttttgtgtgttagaggtctgggtgacgcaatggcttggggtgggtgccagacacccttgggtttccgtagcaaaagtaaaatagagtgaactccctaaagacatttggtccattttctgctttttcagaaacatgctctgagattatctctgttagggagtcacagaatgctaccttcaaggaatgccctctatttaatattaaaggaagctgaggtccagggagggatacagctatgtctataattagatctcttgatttataacccagttccatccactcagaaacaaaccagagcatataaccatactctctgacctcactattgcctcactccaacacctcagagacacccagcttagaagtggtgggactttttttcatctccagagagggaggatatgatggtgcttcactgggaatgtgctaagaacattctgaaaatagtgacatcctgtaatcaaaagctttttgtctgagggaaggccttttttttttttttcccccaatctttcttcttcttgatcttccaaaggaggtcaggtttttcaccatgaattctaggatcaaggctagtaaatctgtaagttggcagagttttgttatatttaagcaaaggtagaacagagacaatagtagaagtgattcatctaaattttttagtttaattccagagttaagactgaaaatgattcttgatgtcttaataaatagttttagaccaacagacggttaaaatgttttaagaaattagatcaaattgtcatcatttttttctggaatctataagtgatttgggaatcagggcctagcatttttctggattaagtggaataaaatttgcaaatgtgcttgtatgtttttaagactttttttttttttttttttttgagacagagtctcgctgtgtcgcccaggctggagtgcagtggtgcgatttcagctcactgcaagctccacctcccaggttcacgccattctcttgcctcaacctcccgagtagctgggactacaggtgcccgccaccacacccagctaatttttttgtatttttttgtagagacggtgtttcaccgtgctagccaggatggtcttgatctcctgacctcgtgagctgcccgcctcagcctcccaaagtgctgggattacaggcttaagccaccgcacccagcttttttttttttttttttttaaagacactttctaaagatccctggccaaataaaatgtgaacaatcggcc

SEQ ID NO: 110026 - DNA, 1033 bp, Homo sapiens
ctcttgacccactgcccacggagcttttctgaaaccctctcacccctctgcctggttcacttctactcatgtctacagcatattacactctaccacttcttacaaactcatccttccttcaaaacatgttcctttgacaaagaacccctaacctttagggatttcttgctcttccaaaccctagcaactcctagcgaagcctaatgtattattagttacctattgctgtgtaacagattactccacactgtaaaacaacaaatacatattatctcccatagtttccgagggtcaggaatctgggagtggcttagcaggtggctctggctcagagttgctcataaggttgtgttcaagctatcggccagagccgcagcctttggaacacttgactgggctggagtatccacttccaagctcgcctgtgaggctcttggcaggagatctcacttcttcttcactttgtcctccccatagcgctactcaacatcatgtcagatggcttttctaaagtgagtgatgagagaaagacagacagacaaaagactaagattgaagctgcaatgccttttataacccaatcttggatgtaaaaaccatcacgcttatttgttacactgactgctacctttgatacaaggtgagaggtgactacttaagggtgtgaatacccgaaggtggggttgttaggggccacctggcaggctggctgctacacctgccttatattgttttagcatgcatgtgttctgttttgccagctagcctggcactgtttaagtttgcaggctggtctcattgactgtgtggttcccttacttcatccaaagtgcttttcatgtagataattattttgttttcaaaataatgtgttgccctctcctccttttttaagagatagaggtaactggtgcctggaaggattggttatctaagtcagtcaactactatgtgacagaacatgtgaattcactcctaggtctttaaatctaaaacccatgttctgtccactatacaaatggtatgctgattt

SEQ ID NO: 110027 - DNA, 1098 bp, Homo sapiens
tcatcaaagttaagcccaaattgaattctgtttgaatgtttttttgatggtccttcatatttatattgatttttaacctgtccttctcatctaggatatttttaccccatgtaaaatggatgcaactgtttgtttttcagatcatgtccaaataatcatttttgtctctagttccccagggaagagtgttatgcagacagttttaggatgttttagccagttaataaagtaagttgtcaggtaggccgaggagttactgagtttgtagtgtctggacaactgatctgctgctgtgttgaattgggaattgttgtttgtcctgcaagaactttgattttggagcattatggtgaagggtgtttcattgttgtgactgtagaacaaaggaagttaaagcatctactgtgtgtcaccggccatctcatttaatcctcatgtttcatgtgagttgatcatattttacaatgaggaaaattcgccttttgagagacaccatttccaagacccctaactgctagttcgtggcacagctcaagtaaggaccccgtttcaacctgctgaagagcccattctctttccactgtctctggttgtttttagggagggaataaggtgatatttgtcaagcatgtcccaaatgattgggtgtgacagatttagtgtttcttaatctctagataattaaatggagaaactatgcctttacatgtttatgaattcattttcaacatttaatcagcaaagtaatgttgggtctctgagacccaatcatctgaatcttgtttgacaaataatcgtgtgagtgtctgggggattaatgaaggcttagattccttacagctcccttgacctggagaccatgaagtctcagggatgactctttccaaggtattccagagcctctgcttccctatggtgatgagtcttcccccaactgggctctaattgctgcctgtagataaaggagtccagggaaccctcaaatcagaccacttgggagattttaaattaattggcatttaatcaagatgtttgcagggatgaaggtgcccatgcgtgcagctgccattgtttgtgcttacacctcacatcttgaaa

SEQ ID NO: 110028 - DNA, 1050 bp, Homo sapiens
ggatgcaagaaacttagtctgttttttcttttcactatgaagtaaagagactgttttccttgtttgaggcaattgcttatttctccttctgtttttcccccgtttaaaatgtcctgctacaaaatgacctctagaacctgtatatgaagcaggttgcaaggtggttcagctgagtgctagaatatatttaagaatactttactgactgtcagttcaagcaaaaaacaaagcaaacaaaaacctgctgctttgaaataagggctatttgcttcctatggctttctttcgcctcacaacctgtctttccagtttattagcttttgtagcaattacatcgattgaagagtgaccatacaaataggtctgcattttggaaatgggtgctgtgcatgctgagtggtgtctctgagtgtgaatcctggtgaaaggatgaaggaggcatctcgccccatattttctctccctgaactggtctgtctcagttctgctttctgatcatttcccctgttggcagaacctgcccttgaccctcagccacagtgagtcagtgtacactggcacgactccagatgcctgggggataaaactttgcccaagtttgccaatcattcctcgaagctgcccagttgttctagtctttgttgatgtttcctagaaaattttggctccacatttgtcatggttacttagtttatttgacagcatgtcttgctttgtgttggatactttagaggatacagcagtaagacttgggcactgtcttggagtagctcaaagaagaggaagataaataataataaccttttaaaaatcggccaggcatgctggcttacgcctgtgatcccagcactttgggaggccgagtcagggggatcacttgaggtcaggagttcaagaccagcctggcaaacatggcaaaaccctgtctttactaaaaaaaaaatacaaaaattagcgggatatggcggtgcatgcccttaatcccatctactctggaggctgaggcaggagaatcgcttgaatccgggagacggaggtttcagtgagcca

SEQ ID NO: 110029 - DNA, 1041 bp, Homo sapiens
ccgacctaaggccgcttttatcatatgtgattttgccagatccattgacttatgaactgaattcctcgtgcagcatgtttccacctttgtcccatgtcacagatgagatggtctcagaaggaggagtcttcttccctatctgcatggaaggcagagtcaggattgatcatatgccttcctaacccacaaccaggtttttttttttctctttagcctaatttttgtaattccacagggattatgtacacgtggagtagtcacgcttatggcaggaactgggtccagaagttcggcaagatgcgcacgctgaaagggatagaagaatggtttctctttgagtctccagcagctctaggctgtgctcggctccttctggcctgggttggagatgcctgtttagaaatctgtagctgtttctcctctggcatctaatgaattctggctgactttgaatgttcccttgacacgactgcagttctttaaagcccatcttccacatggaattggcaggttcatttaattgtttgggagccagataaaaatgctttgttctttgttcttacattatgccatttcagaatatctcttctcccacaaattgccgagactgttcaatttgagccttcaattgcttctctctgagcagatctttcaattattttgcagggcctgttgtttttgattaggcagttagaatatcagctgggtttcttaatctatttattcatatttctgcttgcctttcttttttctacctttaagtctcttttattgtgaaaagcatgcagtcatagcagctgtaatgaagtgcaagtacttttttcttgtttgctggctgtagtatgtgatcattttttcctttgcttatgttttagggtgataataatgtcctcatcattgttattatttttctttttaaatcagttactatgcttagatctcaaacagacagaagataattagtagataagagaaaaaccaaaaatgctgtgatttggccaggcacagtggctcacacctgtaatcccaacactttcggag

SEQ ID NO: 110030 - DNA, 1550 bp, Homo sapiens
gtagctgggattacaggtgcccaccaccacgcctggctaatttttttttgtatttttagtagagacagggtttcactatgttggtcagggtggtctcaaactcctgatcttgtgatctgcctgcatcggtctcccaaagtgctgggattacagacgtgagccactgcgcccgtccttattgtttgtttctgaagtggtttagtagccactggtgaggcaagaaatcctgccatttctcttgctggagtagtcctgggagctggtagaatcctggggagctgaggatctgccagtccattcctcttctcagagtgagctcatcctctccttgtctactccttgtcagaggtttggcatttgaggaatttggccttgggcaaggtgctgaagctgactgctttgtggttttaagggaaagcttaaaagattttctcgctatgggtattctctgcaataaaaatccattttaattgtttatgacattaatcaatgaaagatttatctgctttgggagaaatttctctagaacagttgaaagcttctgcctaaaagttgattaagagagatttttcttctttggcctccaacggatacccccttctctgcccctccctgcttccaacctgccacttaatggtgtcttctgtgaagccctctgtgtacagcctctccaatcactttttaatttccaggggaaatcgtaatctcactaatcacctagaaaggaatgtggagatgggagtatgaaggacgcagttcaggccttgaggcccagcgggcgtttgttttagtcaccgcatttgctcaaatgctttgtgcccgtggttaatgctggggagtattggtggaccctgcctctctgtctctcagagtccccttggagaccttcactcttcacttcaaggctgtgtgtgctgcccagctctggtgctggtgacatcagtggaaagagagccacaggtgctgtctggtccctcggaatctcttctctttattataaagtaccgctggaggcagagaaagagatttttgagctttccttctagcccacaaagctcagttttatttggagcttttaaccttgagccttagccagcccctgatgtgtggattttagaatcagtgtgaattttagggagatagggaaggcctgcagaagtttgaccactgcttcttgagcacctcttgctgtctttttctttttgaggagggtgggggctcctttagaattatgctggcatggtgattcttttttcttcttcttctttttttgagagacagagtgtccctccatagcccaggctggagtgcagtggcacagtcttgactcactgcaaaccccacatcccgggttcaagcaattctcctgcctcagcctccccagtagctgggattacaggcatgcaccaccacgtccagctaatttttgtatttttagtagacaccaggtttcacgacgttggccaggctgatctcgaaatcctgacctcaagcgatccgctcgccttggcctcccaaagtgctgggattatagccatgagccactgcag

SEQ ID NO: 110031 - DNA, 1313 bp, Homo sapiens
atatttccagcaaaggtaaaattcaaaaacgtaagggttagaaaagcaagttgtagaatgactagtacatgacaccatttattgaatgttaaacaatagtataaattgcttatgaatcacacatatggtagaagtatgaaatgtgctttagagtgacacactcgtatttcaggatagtagtcatctctctaaatgacagcagagtggaatggaataactgtatctgtagctttcttttttaaattattattcaaaagcccgaaggaaatgtagcaaagtgtcaagatttgctaaaggtggctgatggataaatgagtactcgtggtattaattctgttgtgtgtttggaaatactacaagggaaataccttaagaaaactagtcaacgtacgtgaaaatattttgtaaactcaagtactcaagaatgttagcaagtatgatttttatttatactcccatctcatcacaaaacaatggagactttgtcaaaaattataaaaatagaccaggtgcggtgactcacgcctgtaatcccagcactttgggaggccaaggcgagtggatcacgaggtcaggagttcaagaccagcctgaccgagatggtgaaaccctgtctctactaaaaatacaaaaattagccgggcatggaggtgggcgcctgtaatcccagctacttgggaggctgaggcagagaattgcttgaacccgggaggcggaggttgcagtcagccgagatcgcgccactgtactgcagcctgggcgacagagtgagacttcatctccaaagaaaaaaaaattataaaaataattgaactagtggggtttaaagacgtaaggaaaataattaaaaagagccatttgtgatgtgtgtgggattgtccaaaatttgaatacgctttctgttcatcactttagactcaggtgaagttccaaagagttaataatggtgggccatggtcatttttgtttttattggaatttatagttctcctgcttccaaggaagatttgaggtggcagagtcccagcttgctgtggccttgtggccctgaaagtatcttctactcagagagcctgcacattgccctgtcatttgtgcctgtccctctctaggcagcactacttcagagccatctgagacgaatggtggttttaaagatgattgagaaggagcttcttggagcttcttagaggactgttgtgtgtttaattaccttttcccgtaggctgtaggaaaactccccacttcggagttttcctgctgtgcatgtggaggcaactgatcagttctcattataataatccttgcctaga

SEQ ID NO: 110032 - DNA, 1065 bp, Homo sapiens
cttgctagattctccccttgcaaatgcttgcagcctacgcgtcccctgttgccttgttcctcagtatgggacccgtgaaccagcaccagcacctgggagcttgtttgaagtgcagcatttcaggccccacccaagccttactgaagagaaactgcatctccacaaggtcccagggtgactcagatgcacattcaagtttgagaagcagtgtcccttctagaactgcaaaaggtaaagcagatcttagggctgctagcgttcaaaaaataggatgctttttatttttacgtaagagcaaagcaacctgttagtaaagggaaaaaatattttttgttgggctaagccattatttaaaactttattttggaacttcaaacatataaaaatagagactggtataatgaacccccatatacctttgttttttctgtaacctctaccccaccgtggattattttagatcaaacctagacgtataatttatccctaaatatatctttttcctttttttgaatattgtggtaaaatacacatagcataaaattacgatcttcacagtttctaagtgtacagtttagtagtgttaagtacgttcacatttttgtgcaatcaatttcaagaactcttttcatcttgtaaaactgaaactgtataaatattaagcaacgtcttttttccttttgaacataccattttcactcttcaagaaaagttaacaatagttgggtgtggtggcgtgttcctgcagtcctggaggctgaggtaagagggttgcttgaatccagcagtttgaggctgcagtgagctacgatgacatcactgcacttcaccctgggaaacagaacgagactttgtctcttaaaaagtaaagttcattgatatcgtcaaatgtctggttagtgttcacatttcccagagtggacaaagaaaccgaagaatttggttcagcgtcttctcgaaatgaattggtagccctgtttgtatagtgaagaatctagggacagtggcgaaagtggggattttttttttttcctttccttaacttacagcttgacaggattttaa

SEQ ID NO: 110033 - DNA, 1041 bp, Homo sapiens
tctttgtttatttggtgtcttgagtttccaagatatgctcaaattatgatttccctaagtatattgccttgaaaataccaggaaaaaaaccttcttagtctttttatttatgttgggaatttctcctggcatctgtgatcagtgcaaatagatcatctacacaatgatgagaatttctgtttgcatattaccattagctagttttatatactaaaaatggacctacatacctgttctgtgagggaagcagggacatgctccactatttattgcaaggagatatttttccagaaacaccagaaggatgtcaagaaaaggttgctcttggttcttgtttctgttattctgggaataaataaaggtaaaaagaattgttttttctgcctagctgtagtttcagaaatggcattagacatgtgttatttctggaaatctgtccttcacagtgaagtcatttctggtgtctaccgttggattttttttttcctaactgactaagcaacacttttattattttattttgttaaacgaagtgttgactctggatgtgggtgttcaggaccttaattcttttctgttggaggtcattggactgagttcagtcccagcagtgataagagttataatgttttcttgttatgttgcacgctttagaaatagttcacaaaacacttttcacatctttatactctgcatacatggatttttcttgtttgttaggtattttggcttgggcttgagagtcaccctggaacaagcctctggaaactgtatttacacatttaaaaacaaaaaaaatcttcctgtgataaactctagggccagcagaggtaggtaggacctggcctgggcaagtgtcttgtaatttccctagaggctgcagcctcagggaaatgctgctggagctaggtacaataagactttttaaaaagaataacactatcaagtaaaaattaagtattaattgcaaagttagagcttcagagcaaatcaacttcctgtaataagcagcccattgaattcttttctgccaagagctcc

SEQ ID NO: 110034 - DNA, 1194 bp, Homo sapiens
tagaaacattagggtaattatagagctacgttctgcttttcagttgctataatattagcctgggtctgctcgtaccagctgtattaataagcaatgactatggccgggcgcggtggctcacgtctgtaatcccagcactttgggaggccgaggcaggcagatcacctgaggtcaggagttcgagaccggcctggccaacatggtgaaaccccgtctctactaaaaaaatacaaaaagtagccaggtgtggtggcaggtgcctgtaatcccagctactcaggaggctgaggcaggagaatctcttgaacctgggaggcagaggttgcagtgagctgagatcatgccagcctaggcatcaacagcgaaactctatcccaaataaaaataaaaaaagcaatgactgaagtttagcaaactcctaaattaagactttttctgagcctttctctgtagcatgtatttgctactagaggcaggcaaggtcataacctagggtgagctttgggttattaattcaaagacccagtgtctaaatcctcatctgtaaaatggggacaaaattatctgaactcccagtcactggatgtggggaccagtgagcctgctgggtgtgaaagcacgttgggagctgaagatggaccctgcctcacgggcagtgggggttgttatgtagcacgattcctgaagtgtgggccaaaggagctgccagtgccacatgaatttgtgagtggtcgtcatgggtgtgtgtcatggaatagaagtgttaatatttaatatctgggctaataattgtaatcattgtttgacacaagagaatgtacaagatgattttaccctatgaagtaaatgagtttgtttttctccattctacaaaccaagcagtaaaagtgcaggtgggttaaataataggcctaaagtcgaatcaaccatcggaatgtaatttgttaaaactttgccttttgttcacagcttttagagtttttcttttctcatggatcacatttttgggaagggcttcccatcacctctataccagtaataacagctgacatttattgaagcttggtctgtgccgacacattttacagatgagaaaactgagctagaaatgttaagtagtttaccagaggtcatgtagctggtgtggaagacccatttaagttttgctatcttaataacagtaataaaagcatt

SEQ ID NO: 110035 - DNA, 1018 bp, Homo sapiens
aatccttttgcctcagcctccacagtagctgggactataggcacagaccactatacccagctaatttttaaatatgtagtagagatagggtctctctatgttgcccagactgttttcaaactcctggcctcaagcgatcctcccaccgtgggcctcccaaagtgctgagattacagacatgagccaccccccagccagaggtggctctttaaagatgtgggggacgggaatcatgcactggtttcgaaagggagaaaagtgcttggacacgggggaatgcctggactggaccctgagaaatgggcagtgaagcccacctgaggctaagtgctaagtgctgagaattgttaaggatgtttcccagatgtttgaggaaatgcgatgttttcccatacagtcaaggggtgttggcagccttcttctgtcacttactgtgtcatcttcagctaatcacctcctctttctggccctcactttccccaactataaattgaggaaattaggcttcccttcctggtctgtgattttaggactccgtaagtagagttgcctcttactgatatcaaaacctgtgttaggtagctatacttttgaaatgatgggttagatgtagagatttgcagtggtggtcggtttgagggcagtgatttatatttcaaggaaatgtttggaacgcagtttcggttctcattcgaagaagtaaagacgtcatgtcacttgacacatggggaaacccacatcgctggctgtggctctcagaagagtgactcattaaactccaggggtgctttgacctgcgttgggaggttggtaacttggcccctgctgcttttggtggtgcaaaagctctgggcagctggctgggctgaatgtaactgcgtcttggaaggcaccaaggcggccctgagcagtttacattgactgtggaagccaaatattgtcgtgcaaattaagtaggacaccaaaaggaaaattcatcttaatcttctttaaatacttactgctcatttgccaaggt

SEQ ID NO: 110036 - DNA, 1035 bp, Homo sapiens
aaactccttagcctgttctacaaggttcttggaaacccagctccagcccacatctctagcttcctctcctataaccacttccgttttaccatgtatttcttgtatgcctgctatgagataggcaccatgtgaggtactggccttgcattatatgttaaggtaaagacacaaacattctgaacatgtttagagggcctcagtgctctttttcctgttgcctcttcatccacacactgaactctcagaagctcttactctcatttcaaccacgttggcctttcagttctttgaaaatagcacatcctcctgcccacagaggcctttgatggaaagccccatctctctcatcccacttaactcttactgatccgtgagatctcagctctgtcaaatctccacttcttggggaggccttttgggccagcctagaacaggtcaaatttttccctggccttctagcgtcacaggtttcttagttgcaccagtcggttatgaatttgcaattgtttgtgcttaatgtctggtattttacactgccatagaaactcaatgatggccttttgtgtatctgtttctgtcttttttttaattgcctgaaaagcagatcaacaaatattgctggtatcgttggctattttaccttcgttcttgaacttgggcaattgggtggttcaccattcatgatgaggcactaagatggctgtgtgtgttctgagctttaagtatataccttgatgtgttttgggaacttatctttccttcctagtctcccacctctttgtagcatataatcatgaaattataagactgacatcttttgaaattgtctagtccagttattcccaaccttttctaaatatgagaatttcttttttctcaattaagaaaagtatgagatagtgatgcacacctgtagtcccagctgcttgggaggttgaggcaggaggatgcttaagtttaggagtttaagaccagcctgggcaatatagtgagatcccatctccaaaaaaaaaaaaaatacgtgagattcatgtg

SEQ ID NO: 110037 - DNA, 1033 bp, Homo sapiens
acagattcttataattttaatgctgccaggaaactcgaaaattaggtggcttgacttcctccctcctccgttttatagacatggaaactgagggccaaaaagaaaaggggacttgatcatcctgaatgctgcctttacttttgggcggaatggaggttatgtaaatgttgggtaattaatgctttaagaaagatacttgtacctgagacagttggcttcatagcatttgtgctccagggaggattctgctgactttgaagacaggggaagtcactccaagagggctgtgcttcaaggtagggaaaatttcccctgttacaaagccaccttgtagtttgaagttctcttaattgctattagaggaaggatgctaaataaatagcctcataggcaaggtgtatttttggtctgtcgtgtttgctttggtcttttgatttgttcttcatctctttctctctggtttctttcctctaaaaagtgtgaccttttcttatgcctgtgctgtttccacagctttgaatagcatgatgaatattttgatctctgaacaactaatatctgtaatcaaggctggcgggctggactctggactataggaccggcctgtggctgggaggagttgccgctgcatgggctgaaacacctcctcaggatctgaaagaaccagcataacgttcactccctgtggctggtcttagagcttaggaggatttagggtgttgtaataggattcaaagaattagagaggagttaagctagtgggaatctttctgagatcagctcatccaccccatcattttactgatggagaaacttaacccctagtgaacagtgacttgctcaaggtcaaacagtgatggtagtgatgagaatgatgaaattgagaaactcttcctcactgttggctaggcgatgttccaagtacttagaattattaatccatttaatcctcacaacagtcctgtaaggagagtactgttacctgtccgcactttatagataagaaacctaaagccaggaaatcaccttgctc

SEQ ID NO: 110038 - DNA, 1075 bp, Homo sapiens
cccagggactggacggtaaggaagatgagtgtggtgggtggctcagtaaatgccgactcctcagtatgagtcagggatgccaggaaggcagggtacattggtaaatggagatcacctctcatccctgttttctgatggggccactgcccttcaacacctgcccgttgttcttccactgccgtggttctggaacttcagtgtgtatcagtgtcctgcttgttgaaacacagatggccaggccccacttccacagtttctgactctgtaactctggaatggagcctgagaatttgcatttctgatgagtttccaggtgatgcagctgctgctggttgagggaccgcactttaagaaccgcagccaagggcccggggccgagggtctgggctgatagaactttagatgttgtggatttttatgaaaaatctccagattttaagtattgagaataaatcaaattttaaagaaacaccatggggtttaaaactgtaggtcaaacagaacactgcctatcaacttatcgcctctgatctgaatactttcaggaaagttcttttgcagcctgctctgaaaactgagacccagagaagggtggcagttcatccacagcatacagctagtttggggcagaatcgtgactagaacccggtgtcctgctgtgtgtttgtccttgcatactgtcttctgaatacattttctctttgaatgggaaaacgtttgaaaataataataaccacactaaaatattgcgaaccgtgttccaggtgtggttttaattactttatgtatgttagctaaatcagtcctaacaccaacactatgaggaaggtacttgtaataggctgtttttgcattgctgtaaagacatccctgagactggtaatttaaaccgaggtttaattggctcacagttctgcaggtggtataggaagcatagtgctggcatctgctcagcctctggtgaagcctcagagagtttccagtcatgatggaagtaaaatggcagcaggcacttcacatggcgaatgcaggagcaagcaaaagtgggggaaaaggtgcccccatacttttaaat

SEQ ID NO: 110039 - DNA, 1722 bp, Homo sapiens
aaagtaatagtggagttcttccacctgggacagagacaaaaaggcatagtgagtgagacaagggtgtttactatgtcacaggttttaataggactttactgtatcatttaatcatcaccattacactttgaggttaaaaaaaaaaaactgtggtgaaccctagaattagaaaaatataggaattcatccaagtttaccagcaagtgagtggcataggtgggacttaacctgggtcaggatgaatacaaaaccctggcttttaacaaggacaatattctgcactcaggaccaagagacccagattttacctctgaatctccagttattaacatttgctgtgtgacgttgggcaagtcactcagactttaagcctcagtttctaaatatataagttgggcttaatcattatatgtacttcatgtgttcaggtgcattcaattctgaatctgaaagtttttatatagtaagagaaaagggaatttctgagttcttgtaccagctctgttttgtactatgtggtatgtgttttaccctaagtctcctaacctatgttgggcctaattctgcccgttttccaatgatagaaaatgcaaaggaaaaagtaaaatcactcctaaacttgaatcaccattaatattttgatgcacatttcttctaaacatctgtgttatacatatgcttatacccagacatatgtgtacatttacataacagggatggtatgggatccatgctcttttattaggagtaaatttatcaatatgctgtcctctacattttaaagaggagctataagttgaaacttgtagaatgatgttttcctagcttctttcattcatctctttttattccaaagaagatgcatttctagaacttagagcacattctgttatttatgtatatatgtatgaatgacaggtctcactctgttgcccaggctggagtgcaatgatgccatcacggctcactgtagccttgacctcttgggctcaagcgatcctcctacctcagcatcccaagtacctgggaccacaggagagcacagccatgcctagttaatttttaaattttttttttttttttttttttgtagagatggtggtcttgttgcccaggctggtcttgaactcttgggctcaagtgattctcccaccttggcctcccaaagtgttgggattacaggcatgagctaccacgccccacctctattctattatttaataattgggagtaatgaattctcacattggtgacctccgaggattttacctaccttatttgccatcttctgaggattttacctacctttccatgccgcctcctgtctctgcatgttctacattgtcatgtaacatacaccccaatttctcactttctttctttgcttaggctcttaggctcttttctctctctctctctctttctttttttttttttttttttttttttttgagacagagtcttgctctgtcactcaggctggagagcagtggccgatctcaatcttggctcactgcaacctccgcttcccgggttccagtgattctcctgcctcagcctctggagtagctgggattacaggtgcgtgccaccatgcctagctaattttttgtatttttagtagagatggggtttcgccatgttggccaggctggtcttgaactcctgacctcgagtgatgcacccacctcggccttccaaagtgctgggattacaggcgtg

SEQ ID NO: 110040 - DNA, 2343 bp, Homo sapiens
gacagctgtcataatcaatgacctgtcaacaccaagacactccactgtcttatcaaagtagggttctgcacaggctgtggggttgatctgagcttgctggtggtcactgtggtctctggggtctgtcctgatgctctctgtttgtacagagattctgatttttttttggaggcaggtgttagctgcaattgtctagattcacttcttattcctctgtaccttggtcttttaggagaatgattggtgttattatctagttaatatttgagagcccagactgtgcgaaaggctggcagtgcataataaacaccatttatcaaaattcagggaaattgccagagttcattaatgttttaataatatttggtattagcataatgtctctgccagctcttttgttatcttcattccctggtgaggttcgatagagactggtttgtgtccccattgaacagatgcagaaaagggggtatgcagatgctggagaaggcaggaaagaaacaagccgtcacctaacctacagaccaagtggtcggtaccatggcatgatttttacggtagttaatcatttactaatcatcttctcagggccaggaacttcacatagacttttgaggaggtattgctttcccattacatagatgaagatattgaaatttagtggggtgaagaaagtggatatccagggtcacaaagctaatagatggtagagatgctactgaaactcaggtcagccttactctaaaacatgttcctcttctcctacttgagactattaagaatagatgcataaaatccagaggaaaggctttgttttaaaaaatcacttctttcaggattttgtttcgattttagctataagttttagcgtaatataagtagatttctggaacagtctgagttcaagtattctataataagatctcctatttgaatttttgattgagaaaatcatagtaattataataaaatgttaaaatctatagtttcattcccagtctgcctcttgttggctttgtggtcttagtattttctctctctttttttgagacaggatcttgctccgttgcccagcctggagtgcaatagtatgatcatggctcaccgcagcctcaaagtcctaggcgtaagctatcttcctgtctcagcctccctagtggctaggactagagatgtgtaccaccgtgcccagctaattttttattttttaaaatttttgtgtagatggagtctcactatgttgcccaggctggtctcaaaatcctggcctcaagtgatccttctggcttggcctcccaaagtgctggtattacaggcatgagccaccatgcctggccagttttttcatttattaaacatggataacagtaagcattgtttttcagaactgttatgtcagaatgtgaaattactttgctaactaaaaaagaatatatacgtgagtttattatttaaataaatgtttgtttatttatttatttgagacagggtctcgctctgtcacctaggctagagtgcagtggtacagtctcagctcactgcaacctctacttcctgggctccaagtgatcctcccaccccagcctcccaagtagctaggagtgcaggcgtgtaacaccacgcctggctagttttttgtatttttggtagagacagggtttcgccatgttgcccaggctggtctcacacccctgagttcaagcaatcctcctgctttgacctcccagagtgctgggataaaaatatactttcttagaagatccagtgaacttaaattggaattatttctgcagcttgacatctgaaagaactatgcagtacaattagggtagcccaggaggattttggctcataccatgtgctgaccattgtgctagctactttgcctaagtccattagctcatgtaatcttttttccacaactttgtaagcataagtatcatgcctattttggaagtgaaataggtgttgttaccctttttaaagatgaaatggtgaggctcaaagaaagaagtcaagaacttaggccaagatcattcagagttggagactgaatccagttattcctgactcagaagctcatgttccttttactgtagtagcaatcagtttccatcacttttgggtgagacatactatactcagtagcctgcctagtctgtaggagcaaagataatttctttttttcttttttcttttttttttgagatacagttttgcccttgttgcccaggctggagtgcagtggcatgatcttggctcactgcaacctctgcctcctgggttcaagtgattctcctgcctcagcctcccgagtagctgggattacaggcgcccgctacc

SEQ ID NO: 110041 - DNA, 1015 bp, Homo sapiens
aagaaaggcaacacaccccaaaaatatgaacatgaattcattaggaaatcatttattcacctcgtctctttcccaattaaaaaattatagcatcagtgtgaaatttcattaataaagtcacacttaatttcattaagaaatttcacacatttctcttgtgtgatttactctcattgctctcttgtttgtatgatttggagttgggattgggagtagagaggacatcattttcttaaatttctagaatcgtggattttatgattgatgggttttcagcatatttatagaccccatcaactgaggatgcttcttcttctagcacttgacaataaaaatcacctttgcctgactcatgtcttcttgccattcagatcttatttcaaatgtcacatctcggagaggcatctcttaaccatctcatctaaaacagatggtcaaacactttcctgcattatcctatttgtgtacctcaaaacgctgatactatttgactgattggttgatcttctctcattccactcacatggaaactcagggaaagcagtaaatgtgcctttttgttgcccatctccagcacctggaatgatgtctggcccagagtaggtagtcaacaacatttattaaatgagtgaaccatgtctatttccacatcaaattcttactgttttcactgtatactttgtttcatacctgtgatcattacagtccttatccgggctgagatgagctcttccaagacaggttttgtctcttccttcaatcgattctccaagatcagcagccccagaaatatcaggtctgattctaccgtctccctgaaaatacatatatagatgtattgaacagaaataacacatattacagctttttttttgagacggagtctcgctctgtcatccaggctggaggacagtggttcaagtcattctcctgcctcagcttcccaagtaactgggattataggtgcccaccaccacgcccggctaatttttgtatttttaatagatacggggtt

SEQ ID NO: 110042 - DNA, 1420 bp, Homo sapiens
tgtatttcaccttgcactctctagtttccttcgtgctccctcaatatccaactcttaataaattcatggctcccggtgagcattcatcaattctcattccacgcctttagcccttcccgttcccgcccaactctcgctccctcccctggccaaatctctaacctgcaaggctaattccgaattccaaatcggaagcaagagggcggggccccgtgagaggcgatggattgctccagtccgttcccgacgcactgtgcgcatgcgctggtcctccgcggaccgttcgtgctgcccgcctagaaagggtgaagtggttgtttccgtgacggactgagtacgggtgcctgtcaggctcttgcggaagtccatgcgccattgggagggcctcggccgcggctctgtgcccttgctgctgagggccacttcctgggtcattcctggaccgggagccgggctggggctcacacgggggctcccgcgtggccgtctcggcgcctgcgtgacctccccgccggcgggatgtggcgactacgtcgggccgctgtggcctggtaagtgcaggctctaatctggccccgttaattctggggcctcttgagagtggggctgtcttatctctatctccaaaaatgtgcaggtgactctcaggccaggccgacggcagttggagaattcccagatgttcttgaggacccagaatgacaggagccctggctgggcttacgttcggagccggcttcaatactggcccttttctctggccctacccaacccgaaaattctggacgcctctcaatcttggcccgtctctattgtccttttgtctctgccctttacacccttgtgtcttcagtgttctgtctgtctctggttgcctcttttgccttttttctgtcctctccctgccaggtttggctctgtccatgagtcacctctctccacatttctcctaactctcggtgtcttctttttcttccatttccacgccatgtgtacattgcatcttcaggtacctgggctcttctatcggggaaaggggcgtccgtctctttccctagcccgctgatagaagtcagaactagagcaatgacgcacacggtgtcagagacggtgattcgagatgccctttcaatagcagcttttttctgtgtttcgggagggagacttactttttgatgcaaggtcgtgaacgtggcaccacctttctaatctcaatcattgttgccctggggtggtttaattctaaatagaaaatcatagaaatcttttcatttctgtgcgttactatatgcattgtaatgagattaaattggattttataggaaattttgttctagtatcattagataccttcaagcttagctcattgttgcaggcatttgataggaagtaagatgcatcaagcaaaattggaaaaacg

SEQ ID NO: 110043 - DNA, 1056 bp, Homo sapiens
ttatctctaccttttgtagccaagttctttaaaagtctgttagtatccagggtaatttcttttcttagttggccactgccctccctttttcaataggtggatgagaaaaaagtatattggatcgctatgattgccagtaattcatggtgatctttaagaaatatattttcatcaaatttttttaaaacctttgtcagatttcttagtttaggtgtatgtggaggtggaattaatctatacttgcacttattcacagaatttataaagataaaactgttctatgttgacgaatccatttgcaaaaaaagcacactttcaaattgttcttctaatattaatgaggagagctttcaaattgatgtatttgccagtaccacagcgtagtggctgagagcctgtattctggagctggactgcctgggctggaacccgggctcctccacttccttgctgtgtaccttagtttctcatctgtaaatggtgttgataatagtagctgttttgtagggttgtcatgaggattaaacaagttaatactttagccctttataagaatagtatctgacatattttcttagtttcatactctatatgttttgatcttttccagagaaaattagaaaagcccttcctagttcagaagaccttgtaaagttagcaccagactttgacaagattgttgaaagccttagcttattgaaggacttttttacctcaggtaaggaagaagctgtttgatctaatttaaaaatttaagaaccatggaggaaaaatacatggattatttgtttattcccatttttttaaaattaaaatatttagtaccaatgaaaaacaggacattttttaaaaagataaacacaaagttttgttacacaatggttttaatctttgtgtagcccagtaaaatgacagttcctaagcacttaaacatacttggcttttagtgaggggaaaaaatgtatcacttgttcttgacaagtagatgagacttcctatgtatttgcttttcataagtggttggaccaatttggtggttttaaaacaaatttaagt

SEQ ID NO: 110044 - DNA, 1056 bp, Homo sapiens
cttgattgttcatgctactgggggaaaaaaaaataagtagaaattagcctaatagttgtggcttattttgagtgaaggccttagcccttaaggcaattaaatttactgtggagagaagagctaatctaatggggagaaggagcctttgttacaggtgtggtagtgtggttctttgagtgacaagatttctgtttgccagattggttaggagaagtctgtgtgtctgctttctctcttatggcctaggatcactgtggtgaatgaaaaacctgtctcagggcctgactcagataattcccttaaaacccggctaaggtcatagatgaataatcagtaattgaacagaagctctgcaatagaaaagaagccagataattatttttggaaatttaattatatttacagattttattttatacagtagacatggaattaaatttattacattatgttctaatttactctttgcttgttttgatttgcttgtttgacaatacatgtccttgtaaactatttccttttaactttttctcaatttatggtgcttattttccccattaaagacttaccaattttttttttaactatttgttacacatactgaatctagagttgtaattaagctactttcattactggttaagtcaaattatagcaaatgctactataaaaatttactatccaaaaatgtgtctcaagccccaactgatggtttcaaattctgttattaataatatgcagcattgtgtttgcaaagcttggctgttacttgtgatgcttgagaatgatgagtcactcagctaaactgagtgattttgagacttgtgtacaaattgatggttgaatgtaagcatgcaaagagagaccttagcttagcagtaccctttttgaaatcactctgacatcaagtttgaaaatgtgggcaataatcagaggtggtaaggtggccaggctttagctgaatacttttttaactggttcagtctgagggctgaaagccccagatttaaacagtatttagaatttgaagcagtcaagtattagtttaatggttgt

SEQ ID NO: 110045 - DNA, 1082 bp, Homo sapiens
gtttgcaccacttactaaggagtctgtcacataatgcatgcttgggtactgctagctattattttatagcatcttaattaaaatctaaaataatgtgaagaaagggaagaatttgaatttttgttaagtggccctgtaatgtgaagacttaaaattttgatataataggaaatactcccttctagaatgtatttaagaactacttctttaaattcttacgttttcactatttcaaaataattttttcaatgtgagtagcaaggaattttccaagtgaaattcttaattatgatagaaaattacaatgatttccactgtttgtaagagataatagtcattgtttattttattcctaatgttttcgtagatgcttttaaaatgtaatacattttaaataggagatatgacttcaagattttggaagattttaatttagacttaatactatttgataacccatcttttgcttatatagttacacttattattttattgcagttgaagtatcagagaatcttggaacgattagaaaaggagaacaaagaattgagaaaattagtattgcagaaagatgacaaaggcattcatcatagaaagcttaaggtattctaagtttgtcttgtttattctcaaaattttaccgcttaacgttgtgtgttcatcagtaccagtttctaaggagctgtaaagtattctgtcatccttttctttctaacctaatgtgcttggaggatggaggatctcttcctatattaagacattttataagttgtagtctccaaatacttgttttatactatgcccataaaatctttacacttttaagagttatttcgtgtgaatcagtttatttttctgaaatatctagtttatctctaggcttaacttttacataaaattttatataaaatcagaattgttaattgatggacatgtaagtgacttatcatcattgctttacttgtatgccagtgaatgattagaccactttcttcagtttttaaaaaattaacacttttcttctaaggagagctttcttaggcatttcaaagaactttcgaaaaagtgtgtgctggtattgt

SEQ ID NO: 110046 - DNA, 1010 bp, Homo sapiens
atattaaagaagaaggtgggaggggaggaaggagtaaaagaagacaatccagcttggttagaatttagatatttgaagaaagtatggaaaaataataatagctaccatttattgagtgcttcatgcctggcactgtatcatattgtcccataatctcaccaacctttttgaaaaaattaagttgtttacttaaggtcgcataactactaggcagcagagcaggaattcaaactaaggtctgtctgactttaaagaactacacatcattccgggttttcgatacgtgtgttttaataatacattttcaatgtagtaaaattaaatgtatttttttcaaatagcaatggaaaaacattttaaatgcttttgtgcagatttatttaactatatacatgtatagcattattttgctttctaaattgtatattacgcttttaaaacttatgtaaactatatctcacattaatttttcccacttttaaaaatagattcagcagataattgaaggaaagctcttcccaatgaaagctttaggttattttgctgttgtaacaggaaaaggtatgcaaagatggattataataacttatttttagtttctgttgttttcaaataataaagagtaattttcttgatgaaaatttgaccatcattcttccccagggaacagctctgaaagcattgaagctataagagaatatgaagaagagttttttcagaattcaaagctcctaaagtaggtatcttgttaaaacatttaaacattttacagtaagagagtagcttaaattgaactgttttcacttaaaacatcaggttttataactattagtttaacatcggatttctagaatttttcccaaatagtgaactgtatctaataaacaagtccttagctactttttggcagaattgagagcagtttatcacatggtacaatacatactggcatgcttccttggacgtgggcactgaaagacaacatagatatctgcctcttactttatttt

SEQ ID NO: 110047 - DNA, 1037 bp, Homo sapiens
ctggtatgaaaggtaagagtggctgttagcaagcacattcgcagacttggtggtagtattgttgtcctttttgtcattttaatatactttagctcttgttatttttttttaataggacaagcatgctaaaggcacaccaagtgactacaagaaatttaagccttgcagtatcagactgcttttggaaaatggtacgagagtctgttgaacaacaggctgatagtttcaaaggtaagttggattttttaaagaagcaagcaaattaagacattttattagctggcaatctttggcatccatacgattctgtacttctttcctttaacagttgcttggtagttcatttacaattagacagtatctggaaaatagaagaatacaaaccttcagttgttatacaagaacaagatttttcctttcagaggaaacatctctagaaacacatttgcagagttcaaacagatgagaacatttgctagtgcttggaagtacacaataaactatagagaattctagattcaccctgttgaggatgaaggagcagatgtgttgggaagcagagccctctgaacttcctttacttggcaccatttcctgaatcccacactttcctgctcagtgtcttttatcggaagagaatatatttgctttctcttttcccatatgtaaatcctacctgatcctacctatttatgccagttagtccctctgcaatcttgtattactttcatttccattttacagaagaggaaacagaagacagttacttacccaaataacttatcctattacccagtgtcacacaacatgggtaataggcccaggatttggctgttggtggtacaactgcagagtccattctctcagcagctctatggtactaaactacttcagctgtgtgctaatggatttaacatggagaaactagaatcagggagaatagttttgaaagctattgcaaaaatgaaattctgagacgttgagatcccagagtactaaggggtcataggcgcactctcagaaattcagttaataca

SEQ ID NO: 110048 - DNA, 1056 bp, Homo sapiens
cagaagattaaactaggaattattaaaaaacaaaacaaaacaaaacaaaaaactaccttaaagaatctatttctgctaccatgtatcttggctttatcacttaatagctgtgtgatcctttgcctagttgcttaactttcctatgtgttttttcatctataaaatggtgacaataatgttgcctacctcacagcattgttataaggattaagtaagtaattatatgtaaaatacttagacaatgcccagcccatggtaactgctcagggaatggacctgctgttattatggtcctcatcatctgaattgatccatcatgtacatcaccccataaacagcgattgttcaagctaagagtcagtgtgtcctgtgcttgtgtgtgaggttgctcacaaaattgaagtcaatgttaaaagtaattttgtttttcatacctatcttaaaggcagtgtcagtttctaattattcggatgtgatttcacccctttcctatcttgctccagtgttaacttccttatctctgttctcaatttcttcaagcccctttctaagaactccagcagcctccctgcctaagttgcacgttgctgagccctggcagttcttgacacatttacccctgaagaagttagagagctgctgctaccccttcagtagctctcattactggcactaacattttttctgcgccctgtcccatgataggatattttcacatcctaaggttcaagcagtggaagtggttatgaaagcatcaatttttctttccactgctgctttctgtccctcagcactaggtgtcatggaaagaatgtagatctggtgagaaggtcaggaaacatggatcttaatactcaccccaccactcactccgtatttttggacagtcactttcttttttaaaatgagagagggctaaaatccagcattaaaaagcccacatagttataagtagattttgttcttcattatttttgacactgtgctcttcctttcaccgttcagatcattaggagttagctataatacaaagctgaatactcttcggctatgttt

SEQ ID NO: 110049 - DNA, 1068 bp, Homo sapiens
tctcaaggatagtaagtggagacacggcttattgagttctgagttcacagtggtgaaggagtcatccaactttagtgaacatttgtagaaatagattgaacatttcaaagtctttgtcattaatactatagtcgaatattatttgtggaatttttttagtcaactgctttgtaactactaaaaccaatgaataaaatggacacatgatgcttatatgcatttatattctataaagctataatgcagaatattttagtgtgttcgctactgtacttataggaattttataagcaattatacttttaggtatcttaaacacatatataattaaactcttacacatgtgccatatcagtcatgtgggttttttcctttatttcaactgccttcatattgatatagcactttgaaatagttaagaaagcaagaccattattagttataatttgtgtgtgtgtaagtgataaaattcttgattaattaatttttttttctagctgaaaatgcaattgaaaacatggtgggtccagactggaaaaagaggtggttatactggaagaatcggacccaagaacaggtagaaataaacaagtctctagtcttatgatgatataattttgttcattttaattcaggcattaaaatataacctttttgtggctctagaccagtctcaggaatattaaatgttttatatcatactttctaaaatataatgaatctttagaataaagaataaactacataagaaagttttttttaagtgaagtagccatgttgttaaaagacaagagatgaaacatgccccttttgtggttgattacattgttcatttcaattccctgtttgaggtaaaaaggaagattaaagttatgaacaggccaggcacggtgtctcattcctgtaatcacaaccctttgggaggccaagtcagaggaatcgcttgagttaaggagttcgagaccagcctgggcaacatagcaagacctcctctttactaaaagtcaaaaaaaattagccaggtgtggtggcgcatacctgttatcccagctactagtgaggctgagg

SEQ ID NO: 110050 - DNA, 1197 bp, Homo sapiens
aaaatagtaaggttttcagaggatgtacaatgaatatgattggcgggaaaagatacaatttttcttgccttattttattatcttatctatatctaccattaaagtccctacccctcacctccacccctgttcattcctttccgattcttatagcttcttttcctatctagcattcagtcttataccactgtctcattccttgttcattccttaaatgaaagaatctaaatagaatatagaatctaactacataaattaatgaaataatgaagatgaaaaagatttagcatccaatccattttcttttcttgtttgctttgttccttgaattcatttagagaaaggagatcaagtaatggaaaaatagaggagacaaagggaataaaaattgaccaaatgagatgtccctatttctttattttatattttcattttcattttaaatacagttaattgtataatctatatcctatttttttcctagtttcccacatttcttgtttcataagttctctatcagatgtgagtctcaactttcctcaaaataatgaagagacagtcttctttttctctgtgtttctttactatttttttttttggtaatgacttttgtgaaaaatgagccattaagagactgaagcaaagctgaggaagcagacagttagtgattgggtcatgcatgtgttcagggtgcgttggttatctctgctctacagatgggccgagagaaggaggtctgtcagaagagaatttctagagatccatccaaggtttctgactttgatagaggaagatgcattgattagaaagagctgctgtaagggagataaactgcaaaagaaaaatggtatctggccttcaagacttagtgatattaggcctaaagtctctagaacagttggtggcagaacttgcctcagcaactgactggtggtaaatgtgctttggccaaacactctctgaaagaagtgattcctgctcgtaagttatttttgtcaggaacttaaacccataggggaatcccttcaagagaaagaaaggaatttgctttaaagtcagtgcaaagggtctgtaagcctagaagaggaatctggaaaccctttacagaagagccttctccccacaggatttcagggcagcatgtgtgagacccaggctgactgtagaacagaggccataatttggaatatagaaggg

SEQ ID NO: 110051 - DNA, 1850 bp, Homo sapiens
gtagctcatgcctgtaatctcagcatgttgagaggccgaggcaggaaaaccgcttgaggcctgtagtttgagaccagcctgggcaacattgtgagactctatctctacaaacaataaaataaattagccgggcatggtggcacacatctgtagttctagctacttgggaggctgagatgggaggatcacttgagccctaggattttgaggctacaatgagctatgatcatactactgcactctagcctaggtgacagagtaagaccttgtctctttaaaaaaaaaagacaaaaattattatttgcttttaaaataaatcataattggaaaagatgggtgataaaacataccaggagtttattttcattgcatgaaactctgttgggaatggactcctaggtatcacttagttttttgggaaatctgcacttccattaaagtgtatagcttaagaatatgacattctctgagactatataggtttcatgctgataaaactactgtataacagagattttctatgactatgaaaagtattagcaatagttctaacatgataaaaaatttactctccatatatataggttaattttatcatctttattcatttataaaaacgatgctcctcaggttttttaactttctttaaacagttaggcgattagagaaaaatgttaaagaggtattggaagattttgctgaagatggtgagaagaagattaaattgcttactggtaaacgcgttcaactggcggaagacctcagtgagtagttcttactgccctctaccttactacctttccacctttcccatttccatttgtttgttgatccatttaatctcaaacttacagaaaagttacaaggaactgggctgagcacggtggctcacgcttgtaatcccagcactttgggaggccaagatgggtggaaaacaaggtcagaagatcaagaccatcctggctaacacagtgaaaccccgtctctactaaaaatacaaaaaacttagccaggtgtggtggtgggtgcctatagtcccagctacttgggaggctgaggcaggagaatggtgtgaacccgggaggcggagcttgcggtgagccaagatcctgccactgcactccagcctgagcgacagggcgagattctgtctcaaaaaaaaaaaaaaaaaaaaagttacaaggaatttttttcttctctgaagtatttgagagtaagttgctgaccttaagtcctatcacttccaagtaggttcatgtatagttcttagaaacagattttctcatagcaaccgaacattgataaattacaatatctaattctcagacccctttcaagtttcacccgttgtcccagtattatccctccatataacaagatgttccaggctcaatacctgacccagcttcctttttttgaagaatggtgtttagaaatggagacctagaaattatatatgctgttattggaatatcactgttccctggtttctcagtggaaagagctaggaactaagtgttgtgaatgtttgtgtgtgtgcaggtgaatatacacacactgacatctgtattcctaaatcatgtgtatatttatttattaaaaactgtgagttgatgctgatacttcccattttaatccagcattacaaggtttgttctagtgttctccctttcgatatttgtcacttgctttcctgatagaaaacgggcttctagtatccttaatatattttcatattttggtcagtcctcctatacgtaacccaacttgaatgaagatatgtccttttccattgcagaaatgttctttttccccagctcggactcaacactacacaccaggccaccaca

SEQ ID NO: 110052 - DNA, 1348 bp, Homo sapiens
gtcaagccaagttctatgttctactgctggttttcctgagaaagcagtcatataactcccttgaaatgatttactacttttgtacatataaaattataatggtgttaatgtaccaaataatgtccttggaagcaagggttttgccagtaactcagctgcatcagtcaccctcaaggagatgagccatgactttgttcattagttggaaaagagtctggagagtgccttttcgttactgtttatctttggtctgacacttgggaatagggtcatggatacttcagccagaaaactttccaaatttaagttattaatgtattataaggatcaaagtttctagtatagcctgttcaattagaacatagtgtgttggttgattggatttggagaaagggaggcaatcaaatttttactacagtttcagcctgttacagaatattgtatagagtgttaaaatgttgatgcattcatatttttgccagttttaagcttgtacgattttaaatcatttccttaccttggagacttcccccccacctttttttttttttttgagatggagtctcgctgtgtcgcccaggctagagtgcagtggcacgatctcggctcactgcaaggtggttctcccacctctgcctcccgagtagctggggctacaggcgcccgccaccatgcctggcttattttttgtatttttagtagagacggggtttccccatgttagccaggatggtctcgatctcctgacctcatgatccgcccgcctcggcctcccaaagtgctggaattataggcatgagccaccatgcccagccctgactgccctttaagatgagtacataagtagtagtagtacatttttctttcacatcctggagaagatatactgtgttcactattgaaatgaaaccataaagctagagttaggaagattgaagaaatgaaaaaggagctcacatgattttgtctcaggagaggctcttccaggattctttggagatatggtagattccatagctggagcagggaaaggacaggatgagcctgtgggtgtagaaaggaagggagtgcttgaaagatgatgaggagatgtcagcaggtcacagaaaccctctgaaggaggctccaactggccaggctggggacaatttgggccccaaaataatgacagtaacaaattgtaactcattgaatgaaataggaatccatacattggtaattatataaataagggaataaaaccatgatgcaaaaagggatgtttatgtcatcacgcaaaatatgttcacagaaaatatgtactaattaaaagagggaaaagagtaactttacagtggatgaagcctgg

SEQ ID NO: 110053 - DNA, 1047 bp, Homo sapiens
gataatgatgaagataatcattattaccacaggtacttcctataatataagcatctttcaaattgtatgagaactttcatagaacatctgagtaaatgaacagtacagtgtgcatgaaaccactaagcaaaccaagggaagttaattttctttatatgaattgtaaacatgtctctagatatcctttatcagattccaccatgcgtaagtagtgtctaagttgccccatatttagagtttttcaatgaggttgtgttcctacttagaatcctaaagttcagctataacagatatattaataaaatctgtggaatctttaattgagcataatggtggctgttattttaacttgaggctttttgttgagctggattggaagtgcaacttattagaaattacagtgtatttattcctatttcttgttctttatgtgagagaagatatactttagtagactgaatacttcagagctgtatctcatttaccaataaaatgtgaaaacagtggtaaattccttcacttgggctaccattgtacaggcctattttaatggtatagtttgatatccttaatgttaaaagcaatatagcttaaagaggctggtaaattagaattttccaatatcctcagctttttttcctctcacagttaatttgctctgctgactccctacgcgaggtggcaacagctggcccttttactggagcttgtggggattagagagtcgggctcgcagcagcgtgctcggcctcttgcctctgttgactgttctttattgtttgatgcctgagcatctcccagacagcgagcaattgtttctggaaacttaaagtttgtttctcttgggagtagacaatgcttttggggcttgtctttgtgtttcttcactttcccagtctcctcttatccttcatcctgtgctttctcttgataattagaaaggagcaaagataccacctttttatttaggtctgcatgagattctaaaacttagaagtataggctatagatgaaagtttcttttttcagtaagccacctcagtaaca

SEQ ID NO: 110054 - DNA, 1029 bp, Homo sapiens
aacagcatacgccagggcctgttggggcgtggggggcgaggggagggaacttagaggacttaagtgcagcagaccaccatggcacacgtatacctgtgtagcctgcacattctgcacatagagcccgcttttgtttttgtttttgtttttaagaagaaataacggggaaaaaaaaggtttcaaaactcataaagaaagagaaagagagggagggagggagggaagaaaatgcttccatgtaactgcatcatttggtactttggagtccatatcctacttgaaactctaggatctggccctcacatttatgtagtgctttattttacagtttacaaaacttctgcttgtccatgtgtgtctgtaaagtcatatgaggcattatgcccattgttcagatagagaaattaacgttcattgacataaatggttaagcccattatgtaaatatttatggcaaagctggggctaatcatatgtgttacagataggactttttttaaagaattgtttaggtattctgttcatcattagtctctgggtttgtgtttgtggtaaccatagacaaccaagttcatataatttggcttcttttttatgtgatttttgatacgtgttaaggatctataacaatgaatttgcctcctaaagaggtacataatgttttcattcctccaaaaagataattctaggtttataaatctatgtatgctcagtgccagttgaattttgtgattgttcaatagaaaagaaattgtgacttaaaggtgattttccagtttaatggaataaatgaaattagtttagaagttatttttatttttctgagcctgattctcactcagttgtgataaacagcacctctgtaagataaactcggtgataaaccgagaacttctgaaatcagcctaacatgaatacctgttcttcttgtgctaagtttcataatgctttatcctaatacaccatttttttaagaaatggaacttgtatttcatttttgctttcatctcacctaattcataattttat

SEQ ID NO: 110055 - DNA, 1085 bp, Homo sapiens
acgggcgctttaaccatcagctgcctctcgaatggaagaacagtggtaatggattaacatcctattttgttgtactaaagtgacaaatcggaataatataattggtatggccattaggttcagtccttgaagataagaaacttgttctctgtttgttgtcttatttgtggtggcactcgtttaatggattaactgaggttgctcaatgttcagtttcttttccagaaatacaatgctaggtgttttgaaataaaacttatatagcaattgtttaaagttatcaattgtatataaaatcacagtagcctgctaaatcattgtatgtgtctgtagtattctattcccagaaactatttgaccatgataattcagtttatattcaccacatgaaagaaaaatgggtaacagaagaacccttaaaacaggttaatttggattgtaacgttcagtgaaagaaatttcaacccttcatagccagcgaagaaatttgccttggaagccaagtcagtaccagcttacctatttgattcagttgctgttttctcactctctatatccatttgaaattgatttattttagatgttgtatacttacgttaggctttctgttaatagtggtttttctcctgttgacagagccaccggattatgacacaggatgaggaagattaaggataatcaattgactaatttcatttagaatattatcaaacatttcaactaggtatcagaaaaaggctttctttcataagactattttaaatagaaattatttcaacaattaaagtaatgttgaccatccccctctcagctgaataaagaaaaatttagttcaatttattgcaatttaattacaatactaccttcacaacattttcatgtgttttaaataaatattttttaattggctaaaggacattcaagcaaagaaatgctttctttacttaaaatgtctatctcatttgctgccttttcactaagcctttactttgttaataaaagtgtccattgtgtgatgtttttgattttacagtttgctaaatcttattttcttggagttgctttttggtaacagccccattgct

SEQ ID NO: 110056 - DNA, 1815 bp, Homo sapiens
tacacatctatttctaaagaataaaacaggaccatatttatttacttctgtcaactatagaaagaaagaccttcagctgtatttccacagatttctcccaaggaaaaggctaatattagtcactactgttatcacatccctttgtataagttttaaaaagagatggagggagatcttcatttctttgaggagatcagtattgtaacgtatgtgaatagatgataacaattaatattactaaaagtcccacatgagagtcctgacgccctctccatgccccacagtaatgtggcttctttcatgggtttttttttcttctttttagctgatctcatcctaagcatgctttatttttccttgaaagctaggtatttatcaactgcagatgttattgaaagaaaataaaattcagtctcaagagtaaaccctgtgtcttgtgtctgtagttcaaaagtcagaaatgattctaatttaaacaaaaagatactaaatatacagaagttaaattcgaactagccacagaatcatttgtttttatgtcagaatttgcaaagagtggagtggacaaagctctgtatggaagactgaacaactgtaaatagatgatatccaaacttaatttggctaggacttcaattttaaaaatcagtgtacctaggcagtgcacagcacgaaataagtggcccttgcagcttccccgtttaacccactgtgctatagttgcgggtggaacagtcaacctttctagtagtttatgatattgccctctttgtattcccattttctacagttttttccgcagacttctttctgcaaattattcagcctccaaatgcaaatgaatgatataaaaataagtagggaacatggcagagagtggtgcttcccagcctcacaatgtgggaatttgacataggatgagagtcagagtataggtttaaaagataaaatctttagttaataattttgtatttatttattctagatgtatgtatctgaggaaagaaatctggtatttttgctttccaataaaggggatcaaagtaatggtttttctctcagttctctaagctggtctatgttatagctctagcagtatggaaatgtgctttaaaatatgcttaccttttgaatgatcatggctatatgttgttgagatatttgaaacttaccttgttttcacttgtgcactgtgaatgaactttgtattatttttttaaaaccttcacattacgtgtagatattattgcaacttatattttgcctgagcttgatcaaaggtcatttgtgtagatgagtaattaaaaaatatttaaatcacattataattctattattggagagcatcttttaaatttttttctgttttaacgagggaaagagaaacctgtatacctagggtcattatttgaccccatagtataaccagattcatggtctaacaagctctcagtgtggcttttctctgaatgcttgaatttcacatgccttgcatttcacagttgtactccatggtcaaccggtgctttttttcacatcgtggtacttgtcaaaacattttgttattttccttggtaaaatatataaaaaaggttttctaatttcactttgctgccaaggctgtcattttcattaatgctgccaacatgttcatatgaggcttactaagaagttataactaagctttagaactggaagagactttaatttcatctaccatctgattataaactcctgttactcactttgttattcctccagaactttgctcataaatgatacctactaattgtcgatcattggatatgtcaagtt

SEQ ID NO: 110057 - DNA, 1108 bp, Homo sapiens
agggcttactccaggccgcaggcctcctggaggagttaattgctgttcttcgtttctgacctggaaaggcccaggtgacagttcccattagccaggcttggcctgcctgatgacaaaagatggcaggaggccctcccctcccactttgttcagaagatacatcgaggtcaagtgtcccagcgcccccacccagctgccagctgaaacaggtggaatcgacctggaaatttatgttttttccctccccctcttctgcactttcttttttccttcttgaatatgttgaaagagtgaatcatttttgtctttattagatttcaccaagaattctagcgcctttcctagaaatgagaaggaagttttttcttctggttattttctgttacattttaacataatttggctgttctctgagggagatcaagtgacaacatttcttgaatcatttatcatagaaatatcctttaatgaatagcctcttcgaatgtcagaactgggcacaagcatctgatccaagtcttgtcttttccagacaaggatgctggggccgaagggaaaaggaatgaagttatccaagacaacagtgagtgagtggccacgctgagatttaccaagccagaacgcttcccaacagcctgagggtcggcacaacttcttgtttactattagaatactaccacttactgaatatttacctgttctagacatctttttttttttacaattgatttttgtatgttgatcttgtatattataaactcgctaaactcatgttttattacagtttagtataatttttattgttatttttatttttgagacagggtcttgttctgttgcccaggctggagtgcagcggcacgatctcagctcactgcaacctccacctcccgggttcaagcaattctgcctcaacctctcaagtagttgcgattacaggcacgtgtcatcatgcctggctgatttttgtatttttagtagggactgggtttcaccatattgcccaggctggtctcgaactcctgaccccaggtgatcctcctgccttggcctcccaaagtgctgggattacaggcgtgagccaccatgcctgaccaagctttttttt

SEQ ID NO: 110058 - DNA, 1022 bp, Homo sapiens
gataggtttttgcaagtacattcagtgcttacaggtttcacatggagcccaattttctgttaacctagaaagagagattcagcagaaggtgatgagtatagtggaaaacagtggttccatgcagtccaacaccacgtttatttcctgggtgtaagagagaaaattagtagaataagtctgcccaatgctgaacatctccctttttgggagtttgcagtcagaaaagattgtgtttagtaataaagcaaccatttctttttttatagtacatgttggccagtttctagttaatccctataaactttctcagttaaatcattcagtcagccaaggttgagtgacacatgacttccttgctttaagcaaaggggtcttgttaaagaatattacaatggtttaagagaaattggatcctaccactctgcatcatcaggaagactaatcttgcaaagaattaaaaacacatggggatttctgtgtctgatcctgacatagtaactggtacataacttgccttcacttaaaacaactacaaatggggaaaaacacatgaggcaaatgttttcagacacggagcaataggcaataggggaatgtgatttgggagacaagtgaactatatgacgtgagttccatggtcaccccagtttttttcccaaggaaattctcctgctgcaataaaaagagctaaggaggcagagattgaagctttgggatatagacatggctgaaatttgtggggtgggatatcagaaaagaagatactgcacagaaaatcaggccactgaagtctgcatggggatggactgtgggtctgtggctgagaactcagctgcccatacacaaggcctagcaagggtcacatgctgcaggactgggagctgaacagagaaaccagaagtcctgctttgctgagagacgttggacttctgtcccaagcagaacattttgaagattcagttgagattctaaaaaggttatgccttgagatgaagaaccatgctgtatagtaagggccagct

SEQ ID NO: 110059 - DNA, 1034 bp, Homo sapiens
cctccccagccccaccccccattccccatggaaggtttctctggagctgtagggaacttacctagcacagaatgcattatttggctctggtgtctgagaggccatagccaaggtgggggcttgccctacccaccctgggggattcaaacatcagacctgtctctccttttaatgagaacatttaaatcccaaaggcttcaagccacttcacaccagtcctcatcttacagaaggcccagtctgtgcaactacttttcagcatctcagtcctacccctcaaatcaaaaaatgaaatcttaaccctaggaggggatttctgttggttgggatagtgaactgttggtgtcctagctgattcaggtcatattcagcacaggcatttagcctagatatttacctggaatagaagccagctcagtaaatgcccaggtttgctgcaggtacgtttaaaaccctgcaaaggatgcttcaagttgatgcagtccagcaccctgtgttttaacggaggcagagaattgtggagaagtttgctgggcagggagcagggactctgctctgactctgccgccaactcccttgggaactgcggaaaggcacttgccctttcggacctctgctctcccatctgttaaacaatctgtaaatctcatgtctaaggtcccttccggttttgacattccatcattcaacgtgctgagaatgccaggggcagactgcgtgaaagagaaagtctatcgctttgggcaaatctatttttaggaacataacccaagaagataattagatgtacacatgaaaataaggtatttatgagattacaaaagactggttaaataaaatatagtatatctatatgacacaatcctatgaaaccattaaaaataacaccatagaatagtatagtcatggaaagacattcgtaatattttgttttgcaaaaatccagggcttttaaacaagacttcacacaggataatagttttgcaaaaatatatccaaaaaatatgcctagaaagagatctgaggggatctac

SEQ ID NO: 110060 - DNA, 1034 bp, Homo sapiens
gcgaggtcttgcacatcttttgtctaacttacttctgaatattttatgtattttgatgccattgcaaatgacattttgaaattttactttctaattgtttgtggttagtatgtcataatagaattgacatgtgtgtatttaaccttgtagcttgttctgttgctaaattccctacctagttctaacagtggctttatgtatctcttagtatttaatgtatgtatatatattcacatgatctgcagataaagaaacttttacttctttctgtccaatctttaccctttttattccaccttattgaactagcaaggggtgccagtacagttgctaaacaggcagttaaattactgatgatttacctcagcattgtggaaggtgtgttaaggtttcttttagcatgggtctatttcttatcctatggcacagtcctttttcctaaggcatggaatttgcggtgtgaggtgctcacctaagtgtctcccctctgcttggctggcattccaaagtctcccaaccctcaggacctctggtgtttctattcaggtttcatccccattatatctgttctctaataggcctagtggagttttaccctgtgcatgtagagtcctgttctcagccaagaaccctggaggactgcctgatacaaacttccggcaaccttcttgcacagatacttctcctcgggtaccttgccctgcagattccaccactcccgcactcccaagctccaatctctgcctcctccactaaacatgctcaccgtcctctgcttgtgcgccccctccttgcacggtgacctggtaactgtccacggatggaaagccagatggcatgcagggctcacttcatgggcttcccttctttcgaggatcacacctctgctgtccattattctatgcctgaaaataattgcttcagatattttgtcctgtttaatcattgcttgtggtggaaggcacatccaataccagtttactccatcatggccaaaagtagatttttacccataggtacttttgttaaaccgg

SEQ ID NO: 110061 - DNA, 1027 bp, Homo sapiens
aacatacagggttgcttattcagctttacatcctgaagacaagctgcctccctgcctcctactttcgtaccctagctctttggaccatatgtacttccttggactgggtccttccttcctgacatggatatcatggttacttgcagccctgagtaagtaaccaagactattgctaagtcttctggtcctcttctgacttcctagacgcagtcattctccttgattttctttttcttacttcagtccttgcctcttcccgttccacgtatttactccttcttagaaatccctactcttggagctgaaggtaactgcccatcccagtgtttacaccttctccatgacagactcatgtggattatggatattgaggggagtgggctttaggtccctttaaagtgtcttagttcttttaatttcccaagttcttttgggaaatgagttgacaggatgatacattccaacaagcattgtttttctcaaacatgattgtaaagccctggtccatttccacattttactcattttgatcattctttttttttttttccctttagatggagttttgctcttgtttcccaggctggagtgcagtggcacgatcttggctcactgcaacctctgcctcccgggttcaagcaactctcctgcctcagcctcctgagtaactgggattacaggtgcctgccatcacgcccagctgatttttgtatttttagtagagttggggtttcaccatgttggccaggctggtctcaaactcctgacctcaggtgatccgcccgcctcggcctcccaaagtgctgggattacagtcgtgagccaccacgcccagcctgatcattcttttcagactccaacataaagtcatttttctggttcctcttatttcaaatttaaaatgctaatgcctgaggaaaactgtttgaatcttgcatgcgatcctacaaggttctgtgtgttagtccacgcctccacgttaactgagcagtgactacccgaaaggcactggggtggacatcgagga

SEQ ID NO: 110062 - DNA, 1102 bp, Homo sapiens
tgacagagcaagaccctgtctcaaaataaataaatacatacatacataaataaataagtttaatttaaaaataaatttatttctgtagagatgggtctcactcttttgcccaggctggtcttgaactcctggcctcaagtgattctcccaagttgaccccccaaagtgctggaattataggcataagccactgcacccagcccattagtgtttattactagactgtgagttcctggagagcactggtatactcatttgcttcttacttgcttctgcccaggctggtttagtatcctactcatagaaggttcttagtaaccgcatttggtgaataaatggaggagagtgggaaggctgtgatcgaataggtatctcttgtctcctctttaccccttgataaatttcacaatcaagcaagctaaaaatggagatgtgtgtctccaccagacaaggtctggaccactctctgccaagacagcacgaagagcaggacactgccagcaaccaggtgggttgagacagagtaacccaagctgctagcccgtcaaatctctccagactgggaacaggattagtcctggggcttgggtctagcattgagtcaacaagcggaagtcatgttgccctagttattggggagagggctgtgagggccaggaaccaggcaggtcactgcatagtccatcttgaattcagtgaggcattccatagggccaatgacacaggagacatttgacaccatagggtataatatcaactctaggcagccgtcagggccagtgcccaggggatcagggctgtgtctttttctttgttattttttgtttgtttgtttagagctagtttttaaaaagtttaattgaaaaagtaatacatgcacatgatctaaaaattaaaatgattcaaaaacgtatacagtgaacgttctgcctcccaccatcaacttctcaactcatctccttccgcaggtgcagccgtcattaaaagtttcttttcccagagatgctacatgcatgcatatgcaatatttctattttttcttatgatgacttaatgaggctgttgtgaactgaatacagttgcaggtgttgatgacattgtt

SEQ ID NO: 110063 - DNA, 1158 bp, Homo sapiens
acaatagcctatgatctacagtgcccattccaactcagagaatctttacatctggagatctatagcagggctatccctagtgacatgcgtgaagaagcttggaaatggtgctgggtaggagctgagtgtgcagaatgtggaaaggcattctaaaccaaaggaagaacacgagtaaagatgatgaagcagggataaggctaaaatgaaatttgtgatctgatccacatacaagcacagtgtagtacagctggaatatagagaagagcttgaagacttatgagcaactatcccggtactcttggaggctctgcaaccacagtttgagaaactccgcgttcaaagttaaaaactgtcacctgaatagttaataacatcaaagattgtgaaagcaagtataaataacacagagattaaaataatgaggcaggatcagaaagtgagtgttatatttatctattttttcctgtatcactgaaacaaaaacataacatttcaaaattattgtgtagaactcctctcctcttccagaacaatgctcagagctttgcagactctggtttgcaaaaacatcatgaaaggggatagtggtagatgagatgagaaatgttgatcaggaggagatcacggaaagccttgaacaccaggcttcagggctagtcacttattctgcaggctgtagagttgtagggagtgagtgatactttatgagcaaaaggcttagtatgctgaggtctgtgtttcaggtttctttggttacagtgtgagggatggactacaggggtagaacagaggtcttgtcaggaggctggctcaatagccctggtggcaaggaatgaaggatgaaagtctgaggaccctgacacaaggcgagtgatagaggaaggctgaggatgaaaaatgaatgagacctgtttgttgactgccatggaggtcaggatgaagcccatattactaggtttctaggccacgtgatggggtgagtggtgattgtagaatcaccccagaggcagagcagcaattcaaaacaggatttgagacagagagagagcgacaaatctgggcttttatttgattcattctattttttccatgtttgaaagtaaaaaggataaatgcatctattccttggagttttgtaaggactgatgaattagcata

SEQ ID NO: 110064 - DNA, 1051 bp, Homo sapiens
aatcccccaacatgggtatttctctgaaaacagacatgcaaatgttgggcttgtcagactctaaaatgttttctttattcttgagaattacggcatcctgcctgctgagcctgggaggcctgacaaactgagcaccggcaccacggtagcaaagcagcagagtgtgggaaagggaggcagaggcacgcggtgggtaatcgggacagtgagggacaaccgccttccacatcaagccacccctccttggcaccgttaggttgtagcttcccttccaggaactggagatggggaacagcgaactgtcagataccagttcacagacatgctcatgatcactctgtaggttggggaccagctggtatcacttggatcctcgggccagctggctgaagcttattcctgccaacttgagtataacaatggagccctcgagagactgtcttgcatgggatagccatctgagacttctggccgggactctgtaggggtctcctccaccaagcgactgggatgggtgagggggttggatttagcaagtgcttcccaagagctgctaaataattgcaaagttcctccctgggtcttgctatgggggcctcctaagacccgctgtccctaggcgatgagttcacagctttgtgggagagagagacaagagaacatgcagctaacaacctgggctaactgcaaaaagagaagcgcaaacattctcctcaccctccaccacccccgaatatggtcaaaacatttataccaggtgagagcatagtataaatatgttactgcatctgcagtgctagagaagagccatttaatttttttttttttttttttagtttttggtttcttacccttaacccgaaaggatggaaacggaacaggaggtgacctgccctgcatgactgagggtgcttgcattaggcacagggtttcactgtgggtgcaagaggaaccatggaagggctgctctctgccccatccctggattattgttgtgaggatcaagtcgaataggggttatgcttagttttgtatgttataaatcaataag

SEQ ID NO: 110065 - DNA, 1059 bp, Homo sapiens
agacttggagcccagggatgagctgactgtgggaggggttaaacagagcaggaagggagaagacagaaaaccaggaaggaggcggcagcggtggcctggccatgctcagcaggccggctgttgggaggactaggtccccgcctgcctcacactgccacgcagggggatcccaggaccagcccccttccttctcagcctcatttcctcttgtgtgcaagacaatcaataggagtagaggctgtggccttcagggcttctgctgtgtccacgcctctgtccctacgacatggtgcacagagtcggtgctcgccgggtgaatgaaggaaagtagaaaaagaaatggaaaattcgaggttttctttccgggaaagcattagactccatctaagtaccaggacttagaggctcctaaagctcctaggctgcctctcactacgaagccaagcttcccaatgcaggaatgacttgcccaaggtcactttgggtgtggatggcagaaccagggccacctatagttttttcactcctgtgatcaaagaaccacccagaaaaaaatgctgttacagattggcatccactcttggaaatgcccactcgaagggccacatcaaccctcctcccctcccaccccctttaagggtacattatgacatttctgtgcagcccgtcctgctcccatggggcagaaagcctgaggaaggatgggcccaacagcaacccagcaacccaggggttcagcattttccaaggcccttgctccacccgagagccctaggcagaggcctggtcatctccctccgcctccaggctcaagggcccctctttcaccccaggacaaggactagccggcaggctggactcagtggtgggcagtctctaaatcactcatgcagaggtgggagaggccgcggcggtgggggggattttcatagattatactgaaagaatgacaatggtgagggaaaggggccggttcccacagtgtccagtcactcctgtgaggggctgcgggagccaggcctggccgcctctttctctctgggcagcagcacacacagt

SEQ ID NO: 110066 - DNA, 1480 bp, Homo sapiens
ggtgggactgaattatttaaaatttaatgtcaatttatcctgctggactataagctctatgagggcaggacctctaccgtcttgctcctggctgtatcccaagggcgtagcacagtgactggaatatagtaggtgctcagtgaacgtcttccgaaggagttaatgaatggagtgaatgcatgccagtgcacgggccgcagatgctcacagggggacacacacatgcacacgtgctcgtgctctattttcttagtgagattgctctgccacaggcaggctggggatgccaaaatttggaggacagctggcagggtggcatcatgcctctggaaatgacattctgggaacaactgacatcctttgggaagctagaatgatgccccttcccagccagtgctcccctctcctccccacctcaggcccagaggctcttccgggggagaaatgatgctcttgcagcaggtggcaaagggatcccagggccagtgggctgtcagtgggggcagggatgctgtgtggaaactgctgcctttccggaaacaaaagggccctttagagtcacttgatatcatgtcttcctgtctgggcctctgccaagcctccctcttcctactgtggaacagcaggcacaacagcgacctgacctgtgcctgctcctcctggggcactgctggggagccagggcaagcaccgagcaggaacagaggtgcctgggcaggctacacatgccaaggtgtgcccattaactgaagttctgattttaatttttgagtgatacatccacatattcacaattcaaaaagtgtaaactacatgctatgaaaagtcttcctcccaacctgccctccatccatccagtttcccctgccaatgttctcagtttcttaagaatcctacagatagtcggtgcatgtaccgccaaatatgcgtatttcctgcagtggtagaattccatataccctgtttgtatcttgcctttttcactttatgatatgtcttggcgctctttctatgggtccataaaagagtgtccttggttttttggtgtttggctacatagtattccatggtgtcaatgtttcatatgtctaaggaacattttatgggaaccttttgttcctgtacgaagtgaagagtattgaggagtgatagttagagatgccaaaaacccgaggcctgcactatccagtacagtaacacctgtctccataaggctactgagcacttaaaatgtggctaaccaggctgggtgtggtggctcacacctgtattcccagtactttgggagataaaagggggtggatcacctgaggccaggagttaaagaccagcctgggcaacatggtgaaaccctgtctctactaaaaatacaaaaattagctgggtgtggtggcgtgcacctgtagtcccagctactcgggaggctgaggcaggaattgcttgaacctaggagacggaggttgcagtgagccaatatcac

SEQ ID NO: 110067 - DNA, 1023 bp, Homo sapiens
ggaaggggaccctgcacctgggggtgtgggaggacagcctgagggtggatgcttagttctgagctcccaaactaaagccaaggactttgtcttgcttgtattggacagcgcccttgggtgctgagttaatattttacccagcttgcaaataagggttatctgtttgtctctgtaaaggacacgggggcaaatggctttctgcactactgctgttggtatgagtgctcattctctttgggcaaaggaaaggaaagagatggagccttatcactgctcctttttagttcattgatgtaggtggccaactttctgaaaaatggccccaggggactgtgaccctgggtggatctttactctgaacttaggaagcagcttcatgcagtagaaataacctgaagtttgcagtcagctaggagtgcattcaaatttctccacttcctagttgtggtacttagggaagtaccttcgcctcttaaagcctcagtttccccatcggtacggcaggcatgaactgctctcctggttgggtcgtgaggtatgaaggggagagcgcagtggtatctcctgtgcttgctggttagctctgagtctggatgtgacacagctctcagtggtctagagattgagaatcgaaaagctttcggttcatgaaaaaccatctcaacgtcagagctgggggcaagcagagaaacccagggtcaaccacttcatcggccagaagaggaaactacacctcgccctgcaggtcccctgtggccaccacacctgtcctcaaacctgcaaaaacaccacagaatggggactccggcacccccaggctttccggacctgtcctcagcatcctcctccccaccacctgacctggcgcttactctcccagctccatttcgcctttgcttttggacttggcccttgctagttcccagctctggcctcaggtccactcagcagtgactctgatcacatgcccggtgccttgctgctggctacctctgatgcacacaccccgcattgcagtggggc

SEQ ID NO: 110068 - DNA, 1048 bp, Homo sapiens
tgtctgttttacttccttagcccccaccagcagccccacgctcaggcccacccagtgtttagctgcgacaaactccttggccacaggagggaggcctgactggggccaaactctagggcaaagggttgcctaggccctgtgccatcctcttgcccagactgggactaagagacacctattagctccatttgagtctggttaccatcccctacccagggatggggtgctggtcacaacaggcaaagagacaaaatgaagtttttgatcacacaaagctaaagatctaatttcagctgctgactcatcccctaaagggcggcgttggtgcctccaaagggcttgggatggagtcaggagatctaaccctggtgcaggtttggccactaactagctgcatgtccatggactatgtctcaggttccctatctgcctaatgagagtaagaagaaggtttatctccaagggctatcaggaggcttaactgaggtgatgtctgagctgtggggttctgtagagatttagtttgggttgatgcaatagggtacttcagggtgcttgatatgctttaatagcaaatgttatatggcacttaccatgacgcgcaaggccctgttatatctgatttacatttatttagtcattgggtattcacagcagccctgtgaggaatgcactgttatccaacccccattttacagatgagaaaatagaggcaaagagagctaagtaactttccccaaatcttcccatgggacatggcatgtcccagtcccacctggacagaatcctttctcagggacccatatctcaaacccacagacttgattgggttttcttttcttttctttttcctttttttgtccttccattgtagaatacttcaactgtgtgagagtaaaaagaatattagaatacatttccaggaattcccattacctagctttattaattaccaactcatgaccatcaccatccccttcacaccctgaattattctagatcaaatcccagacatcatatgtacatatactttattttctatttattt

SEQ ID NO: 110069 - DNA, 1034 bp, Homo sapiens
tctatctgctcccaggagagtattaattgagcacttactatctgaccaaccctgtgccaagtgctgtgtgggatctagtggtggtggtgggggaagcctaacgtacaggagaatatgccgtgtaggtgctggtggtgttccgctgtgcaagcttcatccagacagagggtttttgcagctgggcctgaccagtccaccagcaagaaggggctggcattgttttgttgtcacaatcctggtacctgaggcacctggaataggctggctttttgccttcagcactctagatccccagctcgggctggaattctttcctaacccctactcctcttaactggggtttgggcagccaatctcttgccaccttcttgccactgctccctgtatcttcatctggggatctgctctcatctggatggccatcagtttccacctagcccctgtcccagccctgcaaacaagcaagaccaatgcagactcatcattgtcagcatgtcccctaggtccctcaacatgctgccatttctgtgtttcctcctcaggaaggggcaccttttccaaccaggcacccacctagaaacctgagaatcatctgaaatcatttcctctctgtcaccaccatcgcccaaatacagttgatttgtgagctctcaaatccaccggtttctctccattcccagttacaacctttgtccaacccacccatgtctgctttgctcaccgttgcagtctctgcacccagcacaggacctgtgaaatggttgctcgtaccatttgcggaatggaagatgtgagtgagagtgagtgagccaggggagacctgtcaggatggcctgacccttgtttacctcttaagtctcatctctctccttcaccgccacttaccctttacctggcagctctcctgagctccccgtacagcctgggttcttgtccacatcttccagaagcctccccttttcctgtttgaattagatggtccctctgtgcccccagtgccacatgcctagcccatttcctggggagcacgcatc

SEQ ID NO: 110070 - DNA, 1024 bp, Homo sapiens
aaaggaatcccctttacagttctcgcagcctgacctcagcatccctgtgaatgtcgacggacagctgcgcagagtgcagccaccgcggcagctctgccgggtgccagctggacgtgcttggcggccaggccctgggagccacctctcgggatgtcagaggagagctgcaggccgcccttccgtcagcaggaagcccagccacaaacacttggacaggaacccgagtgctggccagctgagcaagctctggtttctcttgcgtctgagggtttggcccagggcagaggaaggcgagccaggtgctgcaggctgcactgccggggccgcggactcccccttgggctgggaatgtgggttcaagggtgtgagcggaaaagcatcatccagactggggcagaaggaggtgcttcctggaggaagggcgagggagcagggaacacagcgtttaccagcgcgagtccagctggctgagaatgcgcaaagacccctttgtgatcgcgccggacaaagtgtgttccttggtccagtcctcagtccccagcacagaccctgggagcacgcactgcagtcctccagcacagaccccgggctggggagcacacactgcagtcctccagcacagaccccgggctggggagcacacactgcagtcctccagcacagaccccgggccggggagcacgcactgcagtcctccagcacagaccccgggccggggagcacgcactgcagtcctccagcacagaccccgggccggggagcacgcactgcagtcctccagcacagaccccgggccagggagcacacactgcagtcctccagcacagaccccggggagcacgcactgcagtcctccagcacagaccccgggccggggagcacgcattgcagtcctccagcacagaccccaggctggggagcacacactgcagtcctctagcacagaccccggggaccacgcactgcagtcctccagcacagaccccgggccggggagcacacactgcagtcctccagcacagac

SEQ ID NO: 110071 - DNA, 1154 bp, Homo sapiens
gctggccgcctgctggcctagctccaggccgatggggtggctggacaggcagggagctgcacgcagctttgcagttccagcctcaagagtgacggcagcctccctaggtacgggccactgcctggcactttcctcccctcctgcctcgggtggctagggtgtggattttggccggtgaacgccacgcatcaaactcgtgtgtggcagctgggggaccacccagccctaagcagtcggcccaccgcatttcagggtgggttgttttcttgctcggacttgtttttcctggcactgcaaaggtcacatgcttacttcgtggcagtaagtgtgaggcgcccccgtgggctcttagcgagggtaaagagatgctttttttttttttttttgcatacgcagaaagttacgtgggaacagaaccatgtataacccattaaactgcctgtcctgatggacgcccaggccgctcctacatgtcgataatgtgtacaagatgtgtagcgcttggggcggcaccagcagacgctctggccaagcacttatgttctaaataaccctcttaggcagcacttgctaattaataccagggataacctcacagcccgcggtgaacagagaagcctggaatctccaggaagtgggaggatcctctgatatccttaactcgtgatctcctttccagaatcacctccccacaaccatgtgtgtccaatctagcacggacacttctagtgaccggaggtgtgccggccaaggatcagtccgtcctctgttggaaagttcctatagcagtcaaaatctgccctccatagacgtttgctctagggccctcatcagaccctttggggtcagatagagtccaatcccttcttgtaggactgcccttggctattggaagatagttctcaccatcagggttgaaccacctgacacggttctcctgcacctggttttgacccccttccccattctatccaagctccatttactttcctagaaacatggttccctcggtttgctctgagtagcccacagggagagcgggacaggagagtgcctcgcttcctctgagcggtgggcagttctctccattaagtaagagaatgagaggtgagctccaggccccctacagctccctactggggctctgctcgggg

SEQ ID NO: 110072 - DNA, 1035 bp, Homo sapiens
tagaggaaacccttcctgactcacccggggtttccaaactatccctcactcctcggtcgtcgggggcaggaccccatcctggacctcagagtggtccatagggtggttccataggatgaagagttccggatagatggcccgggaagtcctttccagtctgaggctttgtgttatttgctgcagatggaggtccctcagtgccaccaagatccccccctggacatgacctcctctcctcccagggtggctggacctacagtgttgtggcatgacccaatccccttgtgagcggaggccaaaacacggctccagtcccagagtcctgggaaaaccaacaaggttgaagcatcagtcaatccaacatagagaggcaggttggaggggcttagagtgccacgggctgcaggcatgtctgctgacctctgtgcgcgctcacgctcccactcccagtgccctccgagcgaggtggtaacagccaagctgcagctagctcctggctttgtagctttgctttgaggcctgggatgcctacattctccccaaagcagttcccctaactgcctgccccctgagcaacagccccaacccttagagaatccaggggtgcatgcacagtggaagatgtaataggagtctaagcaaagccacagagagacacaggctgcagcccccaaccctgacagctgttcttccctgcatgacgggcagacacagcctcagcctggaaatgcccttctgggtgtcatctggtgacttctaccactcaaattttgggtcttaagggatgttagtcaagagagcaattgttgttcacagcccaggatgacctgtccttgatgcaccttgtcatgggcccatgtcctctcctgccagtcaccgagattccttggctcccttggcaaaccctaacctgtcagtcctccacacaggcaccccagggaggaggctgccttgggcagaggaactgagaccctcatctccttcacatctgccctcgggccccatgagtgagacaggctgaagcctcctcagatt

SEQ ID NO: 110073 - DNA, 1038 bp, Homo sapiens
cccatcagagtggttggatggagccattggcctccttttcttcagcgggcccttcaacctctctgcaccatgttgtctggctgaggagctactagaaaagctgagtggagtctcctttccaacaggatgatgcatttgctcaattctcagggctggaatgagccggctggtcccccagaaagctggagtggggtacagagttcagttttcctctctgtttacagctccttgacagtcccacgcccatctggagtgggagctgggagtcagtgttggagaagaaacaacaaaagccaattagaaccactatttttaaaaagtgcttactgtgcacagatactcttcaagcactggacgtggattctctctctagccctcagcacccctgcggtaggagtgccgcctctacccacttgtgatggggtacagaggcacttgctcttctgcatggtgttcaataggctgggagttttatttatctcttcaaactttgtacaagagctcatggcttgtcttgggctttcgtcattaaaccaaaggaaatggaagccattcccctgttgctctccttagtcttggtcatcagaacctcacttggtaccatatagatcaaaagctttgtaaccacaggaaaaaataaactcttccatcccttaaagaatagaatagtttgtccctctcatgggaattgggctgtatgtatattgttcttcctccttagaatttagagatacaagagttctacttagaacttttcatggacacaatttccacaacctttcagatgctgatgtagagctattgggaaagaacttccaaactcaggaagtttgcagagagcagacagctagagataactcgggacccagagttggtcgacagatgttagatgtatcctagcttttagctataaaccactcaaagattcagcccccagatcccacagtcagaactgaatctgcgttgttgggaagccagcagtggccttgggaaggaagccatggctgtggttcagagagggtgggctggcaagccact

SEQ ID NO: 110074 - DNA, 1065 bp, Homo sapiens
acacttgggctgtgacaccgttttgaagcatgctgggtatatgagtgtacattaaatataagtgccagccagcttgtctccaggagcaattcaagctccaccttttgcacgtcagcccaggcagtaaatatctcacgtacacttacaccaaagagatgggcaaatacccacactgtccacgcagacccctaagagtacaggcaccgttgtcttggtggacagattgttttctcatgccctgaaactcagccttagaatcctaaggtcttaggaatggacaggacaccagttgtcttccagtccaataccctaccaggcatgggagtcttctctacagcttgcttgccaagtgattgctttagcctctgcttgattgcttccagtgacagtgagcttactccctctgtgaggttgcccattttcagtgtgaactgaaatctgctactctataacttctgcacccgcttgacctctgaagccacactgagctaggttctttctgtatcccgtggcagcccttcagggatgctaggaaagtgattgtagactcctcacagcatctcctcctctggttatttattcatccacagctccttcattttaattttaatttaatttttttctcaccatgtcttagggtgctgacacagttccttcaatggatgctcagatgttctgttttctagatccccttgccatcctctagaattctttaggaagtcagtttgccattagcctttttgaagttcagagtggaactgagcccagcattacaggtgtggccacgtcagggcagttgcagggtgagaccatcacctccttttttccacatgtgatacttcttctattaatccagtctcagaccacactagcttttgtgggcagcctccttcctttgttatcgttagtaaaaagtcctaagtcttctcctagggtgaatattgagccactttttttggtgtattctgtttaggcagcttgttttctgttgctgggttctggacctgacatttgtctatataagtttttactttttttcagatgtgtccctagcataacctggcc

SEQ ID NO: 110075 - DNA, 4239 bp, Homo sapiens
atggcttaaagttcttaatacattagatattctgtggtaaagaatccatatctgcaagttatttaaaaggtattagtacacaagagtataggtatataaaactaaatgaagtcaatcatattgattatccccccaaaaaaaatataatctaaagaataatcagttcctaaataattgaaagctgcccttacaaaataaaacaaaagaacacacatttcgttgtgttgcccaggctggtctcgaactcctgggctcaagcagtcctcccacctcgacctcccaagatgctgggatttcggacatgagccaccacgcccggccaaagctgcctttttttaacatggatttttttttcccccattcgttgtgctcagaagtcatttcctcttatttttctctgctaatgtgtgctttaacaaacctgtttaaaacgacaagcctttaatcaactggggtgttttgttttgtttttttcttattttcttaggagtcagtggatcggtggggaaaatgctgcttaccctgggccctgggctgtagaaagaagacaccaaaggcaaagtacatgtatctggcgcaggagctcttggttgatccagaatggccaccaaaacctcagacaaccacagaagctaaagctttagttaaggagaatggatcatgtcaaatcatcaccataacatagcagtgaatcagtctcagtggtattgctgatagcagtattcaggaatatgtgattttaggagtttctgatcctgtgtgtcagaatggcactagttcagtttatgtcccttctgatatagtagcttatttgacagctttgctcttccttaaaataaaaacagaaaaatatatcgtcctaacagttaaattaacaatcaatccataaagtcctatatcttcattcagcaacccaaatattacatacatttccagaattttcttgattgttactttcagtgatattctttatattgggtacaggagaagtttggtgtttggtaggtttttcaacattagtttttgagactagtttacctcttcacatttatgctcacaaccctcttgttagaaaagtctgtgtttatatacaggctgtaagtttgtgattgataaaaagaagatgagtgttaattagcctccagtgaaaatatactgaaagcctgttttcatttgattccaatgtttcttccaaagaattctgtataaacatatgccaattccctatgatggtctagagttaggaatgagtgtttatggtgttgcttatagaacaactcaggtaatctccatttctggttttatattttctgtacaaactgcctgggttttatttttctaatcagcaaggtgcttcactgccttcttgagacgcctctcaaagctcttaaatggctcctgtgctatgtgtggtgttggcagtctaatttgcttctgttaaatgttgtagaacctttttcactaggaaataagattcatttctttcggcagtagatgtagattcatcttttaacgtttcttcaaatttgtttctgtcaggctttgtgttattttaaatggttttttaaaattttcttctatgttttcaattacctaaagacataggataatagttttttttaagttagaattttacctcataaaattttttgaggtttgatgtatgtctctgtcttatcaataatgaggcttaaaaaatactggatttgaatggctgccgttttttcaaagcaatatgaatttgatgagtttgttttatgccattaggtggcgccagaggtcagaacatgtctattttgaattggatcgttacaaatgagcatatttgatgcggaaatttctgggagaaaaaaaattgaggaaataaagttaaaaaattgacattcattgagccaaaagagatgtggagaaacatttttcacctttctgtttggcctgattaacatttaaattcttgccaaaattaaggtaacttttaaaaaacaccttttataggtggatccagcagtctggcaacgcccacagttaccacaacacagaaaactgatcgtgctataaaatggacgctaaactatgaaaacagtgtgacattgttctctgttcttccagagccagtaacatgcttgctcgtgctttctacttctagctgatcattcttttcccaacatatatttacaaatttaccaaattttacctagaattttaggaccaaatggttctcactctttatgctgcaaagacctggatgatgtttggtaactatagaaaaatagaaattacactcaggatcactgttactgctattgccactgatgattcctgcaaaaatataatcgaagttttccatcaaatgtataatatgctattaatacacattagatgataacagttgttccatgaatgattctatgaagctatgcatcttagacctcttgagctgtgaattagcactattttctatagttacttattctctggatcattttataatttccatattaatttcaaatatgctcgtgttattcttcagtgatttccacaattgtgcattttattctttggtttaagtactgaagcatataatgaaagtaattgctaagtagcagcttaaaaattcaattatccgattgtatttaacatctttaagagcatgatcataaagagctatttttgacaccccccccccacttttttaacatttagagttagtaagggttttatatctcttctgtccatattgttttcaaaggaatgaggtgtttaggtggctggaaaagcatttgtaggaagttagatttgaatatagacaaggtgggttattcacgttgagaatgttatttgaagaatgcctgtgaagccaggtgtgggttctactcagtgccatagatagactgagtcttctctcgtaggttaccattacatagtaattttgattctgaatttcacattaaattatttgagtttatacagacctaaattttaaaatctgtacatatattattttgatgtattaagatgaatattgctgatttaaattttatttatgcacatacttaaaggacagaaatgtctgggaaagtaattgttaaataatgatatgtaactttttaactttttaaataaataacaagatttttaatgtgtgtctccctcagggttgtttaaagttttttttctccctcaagtataaatagtggtaactatatgttttgtatcttctagcaccaactgctgtaaagcaatgctgcaaataatgcttgaatacaagtggctaagccaacaacagaataaatacttttatagtagttttataatcctgaaattcgaaagctttcccaattgcacttgcatctaaacaaaactgttgcagtttttactctatttattttgttccccatgtttatgaaagtcctgcacagtttcaaaggcatggtaaataatatatcaatgtttatgtagtctgttacagaaacagctatagataacattatccagtgaagagcaaaattcaagctttagaaaatattcatgcatgcaattttgacatatctaaaaataggtttttgtatatttatggtgggaggtggttgggaacttttaacaaaatggggtgttaatttttgtacagtctgtgggcatttacacatttttaatgtattaaaatttggtaattatgtgtacattaaattaataaaagttacttctagttatgatttgtgaattccctaagaccttggatttttttaagtaactttatatcagaaatgatactgcatctttatatttttaaaattgtattgctgctcaagaatggtaccctcttgtcaaaaaggcatacattcataattgtacattcagcattgtaaataatcttatgaaaccttttttgattgaagctattcaaaataaaaattttaatgaatgaaataacactttttttctgtgtctttattcatttgtttgctttttagtgacatgaatactgccctttgtggatttattttcctgcctaataatacttccccatttccttcttttttttttttaaaaaaaactggattttgaaggaaataagaacaacattctgcatatcatgccatgtgtgtgagcatcctggggaaaccccacagtcggatgcagtgtagagccaaatgttaaatgcgaggaggtctgagggcaatggtgaaatgaaatagaagagtagggacttataatctattaatagttgggagaatcaaa

SEQ ID NO: 110076 - DNA, 2610 bp, Homo sapiens
tttatattcaggattggtatggaagaagacttatgaaaaccacagcgccattataacatttttccttcaagcatggcattctgttttatatactgcccatgaaaacatttcctaaaagacattgctaagcgtaaacttgacatttttgaaagttctttttagtttctctgctaaactatgcatggtagcctctttccttctctgaggggatgaatttggtcactgaagcattcctttcagaaacaaactgaaagatccggttgctatagctactgtgttctgctttagggacttgtgccgtagaggttttggagagacccacatgctcattctgtgcccccgatgccctgtttcatggcctttgtgttacacagtacttgcctttctcccttcatcatcatcatctccccgctggctgatttctcattccagcatgcctgtagcaccttttattttctcttccagtgaattatattgtgtttgagaatgtgtgtggtatgtttgtgtttgtaaactaacaaacctatgcttgcatgtagtgtactttttgtgtatgatacttgggggaggtaggggtacaggaacaaaatgtttccaattatggtacagtagggggatccttagtgttcctcatgactttttaaaaattgtgacacgtgtacactgtttgtaatagggttgtgaggatatttttcaatgcataaaaagaatcctattcagttattgttctatttgcaaataaattaattttaattttattggttgacttactttccacaagtagggaacagtgaattgagatatgtgtgtgtttggctttccttaactcagcttgctacgtacgcattgctgttcaacctggcagactctttggacagacaagtcctattatgtttctgcttttttaaaaaaagtcagcagtcaacattagtttatttcctgtggtaatctaacagtgctacttaaaagtgacagcttttggccaggtgcggcggcttatgcctgtaatcccaccagcactttgggaggctgaggtggatggatcacggggtcaggagatcgagaccatcttggccaacgtggtgaaaccccgtctctactaaaatacaaaaaattagccgggcgtggtggcgcgtgcctgtagtcccagctacttgggaggctgaggcaggagaatcgcttgaacccgggagacagtggttgcagtgagcttagatcacgccactgcactccagcctggcgacagagcaagactccgtctcaaaaaaaaaaaaaaaaaggtgacagctttcgaattgatttaggaacagtggtttttttcccacaattagattgacaaatgacaccttgggagaaaagtaagatccaagtagtaaactgtcatctcagatgaaatattacgtttgttgtgtgcctatactggaaaggcattatctgttattttggatcacttgaagaatcctatacatagtgacttctgtaccttaatgctaaatattttcctgtggactttttttttaaggtgatgctgatataactctctttagttatgacagtaaaaaggctactaggcgagtaatcttcagactttccccgtccccaccccagaatgccacgtagcttacttttgtccaccttttttgcctttaaattcttggtagcagtgcagctgattgtgttttgttgacaggcttaagctagcagacctttaacattgagagcggtgagtcacgtttaccgtgctctcagcggggccagggaggagagggagagagtggtaggttcctgatggttgtttcaactggatgagaaagagctaccaagttaatatgaaaaagctttaagagctttaattttaaagtatttttgctcttctccattggccaatttagaaacatgtttcaaaatacatctatagctaacttgcctttttaaatcatgaggcattttgggtaacattagaatatgtagctcagttatgttctactctaccttgtgagattactgcatttagagctagttgtagcctggtttatatgttgattggcaaaacaaaatgacctggaatttaaatttcattttggagaagcaacagccaaaatcattacgaagtggctgttctttagaagtaaatataactactacgagtcctggtgtagtcatttatatttatttcaaatttcaattgagacaaattctgagggcccttttcagccctctattgagtttacatttctatgcattaaccagggactctgctttcttgttctccaaggatcatttatctaaggccaaattcactaaaaacatcaggattgatcagaaggatttcagtgacagcagagctttttgcaatgaaataatactaagcaatagtacttgttttatacccctttccagtcgtggagcaccgacggaaaccatcattataaaacagtattgttttttatattagtaaggatgaggttttaaaagacgtaattgacattaaacatgattgaagccctaattttgaccaaacgatatttacttcatgttttgagagatgatattaacagtaacaaggatacttgtacacagctttcttccaaaaatgatcatgcggctaag

SEQ ID NO: 110077 - DNA, 2656 bp, Homo sapiens
acctgtgttttgtgatgtacagtaaaatctcccatttaagggaggggggaagggggagggccattctccaggaaacacagtgaatattaatagcaagagagtttaatgaaagtataaaataataatcgttatggacttacctaatttcagcattgattactggaacatcctccttggtatttgcttttgagtgacctctagaggtcttaagtaccctttgattcactgtatattgtgtagttaccctcccgttaggattgcctttaggttagcgtctctaaaaggaggtagcaagttctcattggtggcttattaataagcttttgtctgctctctgaactactatcataattgactcttacagtaactataaaaatggaagagagagatacagttgtgatttttaagttaagagtttcatagcacaggcttttggatcaaaataaaggtaatttttttgagaaatatatatgcatatattttagtgataatagctctggtcttagaaattacacttaatttcaattaccccctaaaagatgacttggtatttaaatttgggatatgatgggcagcatggatattatggtactgaccttttgaagttgcccattgaaatgtgattttttttctattttatgggtgctaggaagcacatgtaagatactatattcttaaaatgtttctttttctacagtatcagttcatcttttcacagaaatgttacttattcttactacctaaagaatggtttgtgttggatgctgatgaaattatatatctatagatagggatatagaattagtactagatattcaatgaaaataaccattgtgaagaaagacttcaaattacataagcatcattttaatatgggaaagacctatttatacaaaagccatatttcatggaaaatttagaagtctcattttatcaagaattttatgatgatttgtatttgttacaaaagtcctatcattcttgatcatttggcagtattaactgaaattccatatatgaaaatcaaaatatccttttcatcaattatgcagcatgtgtgattttttaaaaaggtgcacattaataaaaaatgacttagtcattattaattcttaactcactggaatatctctcagaacttcttccttgacatggtcctttggaaagttgtgttcaaccgagacaaacaaggagagtatcggttcagcaccacacagccaccgcaggttggaactcagcacttcctgtcaattcttgctgcctctctaggctctctgcttgtgtactctgtattctctagcgtgttcttgttctgttatgtgttattctctagcgtgttcttgttctattacgtgttccttcagcctttttctctgtgcttggcatttcatttcttataagaagtcctagaaaattcatggcaaacatttgttagaggcttttcaagatcagaaatttcataagtctcctttccattccaatcctgatcttctatttgtgtaaaagtcttgtcctcaaaggtgagagttaatttttccatttcaatctactataaattttatgtttttgtttttcatgagtccccttagaagctaaatgagatttatataaacaaagtttgcaatgaaaactgtttcttcttggatcagagtccaaaggcccaaattctgaagaattatttctgatttcttgtcagttactgtcccttaatttggagtggctttttggctttctccagcgttgtataccttagtattcagaagatgatgtccttttttcatacaaaccgtggtttaggacatttgactttttgggtctgttaaacagcctgtcatttgaaaggtattgcaagttctgtggtaaagagagaagagaaacagaggaataaaacccatttcctagtgttaggatgttaaagtatagctcttgatacagatacagattggacttattttttaaacccatcctatgaatcagagctctttgaggcagctttttaggcatagagaatttgataaaatctcaccccttcattgccttacccatttttctttagagatgggtgatgtgctttacagataggagctctgagtctttcactcagccttgagccacaggaagctggtggagttgaagaggactccctggcatttttgagttgggttacccacttagttttagccaacttttacctaagtggtaccttcctgagctttattttggtcatccagcaggcctgatgtcctggtgtaatgccacaggcttgctttctaagagggcctgcagagtaccatttccgttttctaatgctttatggtgaataatgatggaatgcagtcagcctcagtttttttttttcctgaaagcagtgtaataccagttgtccctagtagtgcgtatgactagggttgtacaaggggctcaagtcgtttagcaaaatctcatctgtgtatacacacacacacacacacacacacacacacacaccccaacaccccaaccctcccacccccatatatatagttacctcactgcattacttcagaaggttatctttggcttatgtaatcaactctcatgtgaaatattcgtattgtattcctaggcctaggaaaacattccgatttttcatattctcccaagagatctctgacta

SEQ ID NO: 110078 - DNA, 1074 bp, Homo sapiens
gaatattgagggacatctcagcaccggggactcgctaggcatttgcatgagtcaacttgtgatgtaggtaccaacatttaaccagcgaggaggtaggctcagggagagtgaataatatttcctcagttagcactgaaaagtgatagtgcttgggtcaagcccattgtctctgttttcactctgctaaaattactcccaaaattaaaaaaactgaggggggcttattaaatatttcctacttgattctaattttttaagtggttgagatgtcggactgaagagaaaacccttcatactcttgtacctgttttatatatcttatattgatattgttggaccttttgctgtaaatatcatatttctatttgttatgatagtgattcagggcaattaaggtaagattggtttcttttgggaaatgagtattatgtttactaatgcagacattttttgcatgtgttctagtgcttgtaatacaacaggaagcgggttttggaattcttcacacgtagacaatgaaaccgaacttgatgaacataatatacaaaattatgaaaataccacagtgttttttatttccagttttcagtacctcatagtggcaattgccttttcaaaaggaaaacccttcaggcaaccttgctacaaaaattgtaagtttggcatttattgtgatttccaccctgcttgcccctttaaaactaatgtagaagagaataattataactgtctttgccacagtaaaccagatcttcacagatagaatcaacttagtgatttagatgtttaccgttttgttttactttcattggtagttgccaccctaagtttaaagttcaagctaccagtgttaagcactgttgtttttcacatcatagtgcctctggctccagcttttatttctgcaacccattgtggagggagttaggatgggaagtggagacggaggttcctcagcccactgttgggtgagttaggatcgggggcggagacggaggttcctcagcccactgcggagggagttaggaatggaagcggagacagaggttcctcagttggaacagtaggtattat

SEQ ID NO: 110079 - DNA, 1034 bp, Homo sapiens
tttatttattgtagagatggggtttcactatgttgcccatgctggtctcaaacttctgggctcaagtgattctcccactgtggcctcccaaattgctgggattccaagtgtgagccaccgtgcctggcctagttttatttgttaatattactgctgaatttcaatagaaatgtaaaaattattcctgaggcgtttttcaaaaagcctacactgtttacttttacagattatttaaatatgtacgatatgtggcttggtttttgaagattttttgtattaaagaattgttaggcaaaaacaaatttttaaagttcctaaatgaatctagttatgccttatatagtgatagattaatgtaaatacaaacctttcctctttttcttttcaatatagtgagtttaaatcctgcctggaaagaacttgtggcacaaagaccaccttcgggtcttatatctggggcccttctcttctccgttttgtctcagattatcatctgcattggatttcaatctttgggttttttttgggtcaaacagcaaccttggtatgaagtgtggcatccaaaatcagagtaagttggtcaatctatgtaaaaatctatataaaatatgtgcaacatatatgatataaaaatgagtttagaagttaatataaaagtttgtgccaggtgcggtggctcacacctgtagtcctagtactttggggaggccgaggcaggtagatcacttgagaccaggagtttgatgacttgagaccaggagttcgagaccagcctggttaacatggtgaatccccgtctctactaaaaatacaaaaattagccgggcatggtggtgcctttctgtaatcccagcaacttgggaggcttgaggcaggagaatcacttgaacctgggaggcagaggttgcagtgagccaagagattgttttttgagacaaagtttgcatgcaggctgctttaaacacttacataatttggcttgtatttgcctgtatatcacggtcacgcctgtctttgggaagatgttcaggcaa

SEQ ID NO: 110080 - DNA, 3948 bp, Homo sapiens
tgttcttattacctgtcttacctttttgttttgtatgatcttgcttttgtaattcatcattttctatgatatggtgctggtgttcttgcacagaccactagtcactttgtaaagttatttcggtaagtatttattgagccacctgatctgtgtgtagcaccgtgccaggtattgtgtagatacaaatagtgcatgactggaaaagattgagaattatatttggctttaaaaattgtgggtgagatgttttctttagcatataacgtgcttgcgttatttgaggcttcttttgataagtatgctccaattttgttatttttaaactgtaagtggaagaaccatacattatcgttactctgccagcccagtcatggagactgtagtagattctcagcaagtacatgtttgatacgttcacgtttccattttaatttcaatacatttaaaatattttgaaaattaggtgacagtatgttgactgctgtctctgtggccagagattgtggaatgattctacctcaggataaagtgattattgctgaagcattacctccaaaggatgggaaagttgccaaaataaattggcattatgcagactccctcacgcagtgcagtcatccatcagcaattgacccagaggtaaggtcaagatcgactgtccgttttaaagtttgttgatttaaatttagtctgaaaaaataaaaaaagtggtgcattaaaacacagtaaagcaaaaactaaatgaaaacagaagtcagggctattttttcagagattatgtttcattaggactgggacagacccaggaatctcaatgttcaaattttgatatttagctaagatgagaagcatagttttaaagtacaagaattccagatgtttatcgtattcttcaggtaactagtggtaaatgatgcaggtggtccatcatactcagttcatgcatcatttcaaattgaagctgatatttaattgagtttctttttactttgaataaatgtccggctttcatcatgttgtggaacatatcaaatgaaagaattcagttttagaacaaatatgtttaaaatagaattgttttacttggtttggttgcctaaatattgttcccaatgtctcatatacacaggctattccggttaaattggtccatgatagcttagaggatcttcaaatgactcgttatcattttgcaatgaatggaaaatcattctcagtgatactggagcattttcaagaccttgttcctaaggtaagtaatttgggtgtatgtgtgtgctcacatgaatgcatcgcaacagtattttaaaaaaatttgtattattgtttccagttgatgttgcatggcaccgtgtttgcccgtatggcacctgatcagaagacacagttgatagaagcattgcaaaatgttgagtaagtattggtgtcttttttggttttggtttttgatgaatgatggtttcatttcagcatcagaaaaataatttttatatgtttcttatactaatatttcatatttatatatataattgtgatctataagatagttcagaactttaagtgccgctttaaaagagtctcatgtgctttttatttagctaaagtacaatatccacagttttttctctatgacttcattctttcaggtgctctatcttgatagaagtggctaatcattttagtaaacagttatgtttcaggttattaagggataaatttttactgataacgttaaaagtagccatactaaagactgtaggcacaagcgctttgctctaaagatgaggaaattgagacaccaaaatgatttgccgataatgtgacagaaataggacaataacctagctcatttcacttgtggtctggtgctgtttgcaaagcagcacacctgtgttcattatagtgaaaagattcatagttccactgggggaatcttggtgtgttagctctttataatactgtaatagaaaagtcttaataagttaaatgttttgtagtttaagaaattaattaaaatcttaacattgttttgtttcttagttattttgttgggatgtgtggtgatggcgcaaatgattgtggtgtaagtatagtttttgtgatttagttttatagttcttactctagcctaaatcatattcacaaaacttaaccagttttcttaaaattattaggctttgaagagggcacacggaggcatttccttatcggagctcgaagcttcagtggcatctccctttacctctaagactcctagtatttcctgtgtgccaaaccttatcaggtagtacaaattaaaatttttctcatccctttttctctgtctctgataatacagaagagaaaattatcataaaaagtaacatgaatttgtttaatattagcagattagcacatttgagctgtaacttattagtaacagattgattgctactcctcatttggtttagttcttttggtggataagcactttgttgtagccgttgaatgttgatgttcatctgtcaagataaaattgtggtttggaaaaggagtttaaaatgcttctattcatatgccgacatttgatttcttttcacagggaaggccgtgctgctttaataacttccttctgtgtgtttaaattcatggcattgtacagcattatccagtacttcagtgttactctgctgtattctgtgagtattaacattgtgtgcagagataacacttaatgtgcaccgtaaattaagatgttgagcgtatgtgtttgattttgaatgcatccattagtaattgtttctgtgagtagtacctataaatttaccttcaatttactgtagtttgaatagcaaattgaaaaagttaaaatgagaaaagatgtttcaacagtggtttgttgaatttggagaatggtttgcatttggagaaaaagtataaacagcgatggccacaggtaccctatcagattttataatcaaagtgttctgacatcctaaagactcatggtgacactatcccatttgaccgtttgtagaaagtatcagaagggatggtattagatgaagatactaatttacaacgttgaatattttgagtaaatgtttgtgttttctttttgccaaaaaaaccatgttggccagggtggtctcgatctcttgacctagtgatctgcccgcctcggcctcccaaagtgctgggattacaggtgtgagtcaccgcgcccagcctattgaacgaattttaaggagatgccttttatactaatatactaaatcaaatatttataaatatatgttatatttagtttcagagacacttatatttcaatttttaagcaggtccgagtgtcatttttaagttgtcattatagggaaaatccaaactattaataaaacctggggacgctataaaaataattcccaaaaactaataatgtttttaaaattacttctgtagatcttaagtaacctaggagacttccagtttctcttcattgatctggcaatcattttggtagtggtatttacaagtgagtattttgctttgttattgatttttaaagtgtatgaaattctgatgtgacttattaaatttttgtaaatttacatcaacaattgtaacatagctcacacctctccagattccttgtaaatatgttattttattaccagttgtttatatcttgcgccaattttttaattgttctgtctctatttttttccctgaaatatttgaaaataagttttgagtcattatgctcttttgcctctgacaattttagtatatattttctaaaagcaaaaccattcttttatgtaactaaatacagttgtaaagatcaggaaatttaacattgatataatatctggtgcaaaacctatattcaggttttgtcatttgtgtcaacaatgtcctttatgcctattttcccgtagtcccctagattagaacaaaaaatatctccag

SEQ ID NO: 110081 - DNA, 1227 bp, Homo sapiens
ccccacccaagtgtcttgagagcagagatcatccctttttgtctttaacctcccagtgactagcatagtgcctgctgcattcttgatactcagttatttaaagaatagcatcttgataactatattagtaatattttcaaagacccatctctgggtcccaagtagatctcattgttggattgctaatggttcttgtgtcacattttcaggatcagtaattgttttatagaattgatctgagacttgataatgaatccacgaaaactgtattgaatgtgcttgtggcacagttttttctttttcacttaacatttaaattaggatatgttgtagagggcagtaaagaatagatttatgcttatttttggatactacacaaaatgaatattccttagtattagaattgtttagtgtacagtgacatacatttccaaatgattattatattgagatactgaactcttgaacacacacgtggtttattcagcatataaaatgttttcatttatagatattttaaactgcattataacttatagacatttttaattgtttagatatttcaagtttgtgtacataagttgcttactcaattgactaaaccattatgtgttaaaacttctttttctgcagagatgcaattgagaacaacatggattttatgggattaattataatgcagaacaaattaaagcaagaaacccctgcagtacttgaagatttgcataaagccaacattcgcaccgtcatggtcacaggttagactttataaaagaacacagaagcaaatggagtgtgacagagctgaagttatattatattgagggataatcagttataaaatcatattatatagtctatagtggtttcaacctaagttctcttttagctctgaatattttcccaagcgcaagataactttgtcatattctttttgaggtctagcgaatcctatttatagaaagtgtagtagaatagtaaaagtacggccgggcgcggtggctcacgcctgtaatcccagcactttgggaggccgaggcgggtggatcatgaggtcaggagattgagaccatcctggctaacaaggtgaaaccccgtctctactaaaaatacaaaaaattagccgggagcggtggcgggtgcctgtagtcccagctactcgggaggctgaggcaggagaatggcgtgaacccgggaagcggagcttgcagtgagccgagattgcgc

SEQ ID NO: 110082 - DNA, 1090 bp, Homo sapiens
gggattataggcgggtgccgccatacctgactaatttttatatttttagtaggggtttttgccatgttggccaggctggcctcgagctcctggccttaagtgatcattctgtgttgactgtttacctatgtttccttatgttattgtaacatcatgttttttccttagagctctttgaaactgttttcaatttgttaattattatgtgcccactatgtgtcaggcacattccaagaacagtaaatgtaattttttagaagtttattttcaccaattgatcttctcacttttgcccagtggttggatataactactaatttgatcagaatataatgagtcatagtaaccaagctcctcccactccacttctttcctaatccccagtactctccatgtccccccgtcaaatgacagtgtcatattcaaggattgtcactttgactgtaactgatacagacctaccttggaggatagcatttttgtttaggaatatttcatgatgtacctagcattttgtaagcagaaaggagtgtcacttggctgtcctgctaattctgcctatttgggggaggtggtgaggtctaagcatgagtttaaaaaaaaaaaatgaaaaacctctacccaaattatgtgatacatatgcatgtcgggaaccacaaatgggtataatattatatcctaattcctactaaggacacattagtctcttcttaatttatagcttcacactagcaagggtgctaggggataagacagtggatgcctttgccattttcccccataaacactaattactgaattgcctacagttctttttttttcttttgagacggagtctcgctctgttgcccaggctggagtgcagtggcacgatgtcagttcaccatagcccccgcctcccgggttcaagcgattctccttcctcagcctcctgagtagctggaactacaggtgcacaccaccatgcctggctaatttttgtattttaggtagagacagggtttcactatgttggccaggctggtctcgaactcctgaccttgtgatctgcccgccttggcctcccaaagtactgggattacaggcgtga

SEQ ID NO: 110083 - DNA, 1050 bp, Homo sapiens
agtacttaaaatgttaatattttcaggatagcagaacatttgaaaatatttaagaacatactttttaaaaatgggaagtagtatagaaggaatcttgaatcctgactttgaaaaacagttgcttgtttcttttccaaataatgttttgtggatgcttagtaaactttttctaactttagtgtgttaatagagttaatctgtactattttttcttgttttgtttcgtttttaggagctgtttgaacttccagtaagtgaagaatgtttacttcttactaagtatatttgttttgattctttaagaatattaagtgctttgtgcctcttttgaaatgatataggctacttatgagataggaattgttcgccagttcccattttcttctgctttgcaacgtatgagtgtggttgccagggtgctgggggataggaaaatggacgcctacatgaaaggagcgcccgaggccattgccggtctctgtaaacctgaaacaggtaaggaaatatctatgctttgggtacaattctggtatttgagtaaacttgtattagcaactctaacaatgaaatttactctttcttttaaaaagttcctgtcgattttcaaaacgttttggaagacttcactaaacagggcttccgtgtgattgctcttgcacacagaaaattggagtcaaaactgacatggcataaagtacagaatattagcaggtgaggttgaacggctttcctagtttcccagtcatcatcatttatggttatattagtcatgcacagtaatttgcatgtaattgagtatttattgaatgtatgaaaagatatctaatataatattgttttaggtgattgaagtaaaagtacattttccccactgcctgatttcctttcattctgggtttttttttgagagacagtctcaccccgtacctaggctagagtgcagtggcactgccgtctcgggtcactgcaacctccgcctccccggttcaagcgcagtggcgcaagtctcgggtcactgcaacctccacctccccggttcaagcaattctt

SEQ ID NO: 110084 - DNA, 1032 bp, Homo sapiens
agcctgttcttgacccagcggttctgctaaccatatctgagctctatgtacttttgaatcctttcttggtagcagaaaggaatcactggatgagcctgaaaattctggggactacaagaaccttttatcttttgcagagctagtctctaaacccaacaagttgtaagagtgaagtgagatcagtttctatttctttattctgcttctaaccctgaatgaagcaacccttctcccatgggttgctaggtatctaactcaccatctttgttcatattttcttttacttatgttagtgatccagtagtgctcatttgttccttggacatacattttttttaattattgaaaatggccataatgttctatttaaaaatggaaccatgaattcagttttatgaagcagtgcttgaatgttgtgtttttgtttttttttgtctcttttttttttccagattctggaagaagcaactgaagaagaaacagcacttcataatcgaattatgcccacagtggttcgtcctcccaaacaactgcttcctgaatctacccctgcaggaaaccaagaaatggtgagaaatcacttaaagctagataaaactgttggtggttacttatatttatttttaatttttttcaatttttattttttatagagacaaggtcttgctatgttgcccaggctggtctcaaactcctgggctcaaatgatccccctcaaccttggcctccccaagtgctgggattacaggtgtgagccaccacccccagcctgcttacttacatttaattctcattttgaaatgttgctagaagaggaagtcacaagtcctttatttaactcttatgcagagataggaatattttaactgcgtttatcagaaactacacctctgtgttgagatataattctcagtactatcacttttctttcctgtttactgagcagcttagtgccttgtgatttatacagctggtggttaatcctcttaaattgcatctgtattcctagaatttaataaaaagtatgtatga

SEQ ID NO: 110085 - DNA, 1047 bp, Homo sapiens
attaacatgtaacaattgcctttacttaccccttatctccagttattttgttgaagaaaccaggtcatttaccttgtggatttggccagttgcttcctcctgatgtactttaacctgttcctcttggccctccttatacagtaatccttccttttttgctttataggcatcctttattgattgataagataggttaactggtgcatccttccattgattttttttttgatagtataagcacgtaaatatatacccctctctgcccttacgcagaagatttgtgatcattgtttgcaccccctctcccactttaaccatatgtcctggaagccattctctgtcagggatcttgcctgtttctttttttaactctgtagaactccattatgttatatgtagcatagtttctaatgctgtgtggttgctttttatttttatttttgggtttttttttgaggcatcatccatactttgtgcatgtgtgcttttttgttttttagactggaactctaactgaagatggtttagatctttgggggattcaacgagtggaaaatgcacggtaaatattagttagacttgatagtttattagtttatttttaatattttaacatgtgcaacattcaaacataaaggaagtaatagacaactgtgtacctataccaggattaaaccgtggacatgttgccatatttgcttcagatcgcttcctttagaatattaaaatattatagaagttgccaaagtcccactgtatcccttccccaattcctactgccattctgaaattatttttgcatattttatattttttctaagtataaatctataaataagtatccatgaatgatatactgtacatatgttttgctgcttttttcccctctccaaactttgttttcaagatttatccatgttgatatgtgcagatctagtttattaattttaactgctctgtcttattccattgaatgattaaaccttgtctgttcttctactaagggacaattctgttttttcttcttttttctctgcactgttgcaa

SEQ ID NO: 110086 - DNA, 2619 bp, Homo sapiens
gtgtgtaggggtggatcggggtaggccctcacatctcttctgtacagtgctttccactgttaccattagttcttagaggtgcagggactatagcaactacttaatcttttttgaaattatttgaaactgaacaatgcaactgtttctaaatataaacaaatattacctttgagccacaaatcactttctggaattattgtgggagataatatttgatacttctatgtgaggaaattggtagacaaaaaattaagccatgttgtccacatatacaactctcagtgattattgtaaacagtatggtagcatttaaaatatttaacaatttaatattttttggtgttcgatactgattcctgtgctttcgtttaataatttgtaaactgtttttgttgttgttgttgttttttaaaggagaaagtgttccagtgacaaagactaatttgccaaatccttcagtggatgtgaaaggaataggagatgaattatataatccagaaacacataaacgacatactttgttttgtgggacaactgttattcagactcgtttctacactggagaactcgtcaaagccatagttgttagaacaggtaggaaacatcttaattaatctctttttgcatgtttcagcatatttgatacctactaaatgtttaaaaagagattctgggctgggtgctgtggctaacgcctgtaatcccagcactttgggaagccgaggtgggcggatcatgaggtcaggagattgagaccatcctggctaacatggtgaaaccccgtctctaccaaaattacaaaaaaattagccgggcctggtggcgggcgcctgcagtcccagctactcgggaggctgaggcaggagaatggcgtgaacccaggaggcggagcttgcagtgagtcgagatcacaccactgtactccagcctgggtgacagagcgagactctgtctcaaaaaaaaaaaaagagagattctgttttgggagataattctcattttcttataaaaatatcaataattgtcttctttttttgaaaggatttagtacttccaaaggacagcttgttcgttccatattgtatcccaaaccaactgattttaaactctacagagatgcctacttgtttctactatgtcttgtggcagttgctggcattgggtttatctacactattattaatagcattttaaatgaggtatgtatgtgggactcttaatagggtttgaacctcaattatttatcatatgcagctattgaggatttgaaatgtggctactgagaatgaggaactaaaattttaagctaatttaattttaattaatttaatgctaacaaagtcatgagactagtagctatgatattagaaagcccagctatagaacatttccattgtaaaggatacttcttttgggtgcctctggtttagatggtcttttacttggtcttgtgactttaaaaaaaaaaaacaggaaaaaaaacccccccacataatcaccaaaagctttattttctcttttttacctctgagatgtaatatacagtgttaaaatgatttgtggttagttaattgaaggcgccgcttgtcagaagtggagagtggtacagtaaggtgtgtgcacgctgagtcaatatctgataatgattgttgaccggctttgaagtgtgtcatgtgtgaagtatgtagcgccttgaaaatgagataagtttcttttgaaagtagctgtcattctataatccattgagcttttttattttgcagaaatatctgaagaaaaaaattatatatggttaatagatatgtatatacacacacatacataaaattgaaatatacaattgaaaatggcttacagattttcactaaagaaatacccatattaaatccgtaaataatactggggatttgacatttatttttgtgttaattgtaggtacaagttggggtcataattatcgagtctcttgatattatcacaattactgtgccccctgcacttcctgctgcaatgactgctggtattgtgtatgctcagagaagactgaaaaaaatcggtattttctgtatcagtcctcaaagaataaatatttgtggacagctcaatcttgtttgctttgacaaggtgggttcagtttcatagttactttcaaaggttacttcgtagcgtttaaatatttagatcaatgttttttattttctttgtcaacaaatttggacacattctgtcatgttcctctaattttccttttcctccacttatttggtatatgcatcatttttctataccataagttctcacttaacattactgataggttcttgaaaactgcaactttaaatgaaatgaaaccagttttaccataggctaattgatacaaatgagatttaagttcctatgccatattttggtcacaaaaaatcaccaaacttctaaataaagatctaaaacacttctgatattaatcattgaaataaatatgagctatacattcatttaagaaagaaataaaaacaagtaaggtaattatttacccagttgttttatttcaggctcctgggtagtgggagcgtatctcagcaactggcggaacgaggcaggaaccagccctagacagga

SEQ ID NO: 110087 - DNA, 1056 bp, Homo sapiens
gctgggattacaggcgtacacaccatcacacccagctaatttttgtgtttttagtagaaacagtgtcaaccttgttggccaggctggtttggtactcctggcctcaagtgatctgcccgccttggcctcccagagtgctgggattactggcatgagccaccatgcatagccaccattgaagggttttaagcagaggagtgataaaatacttgccctttggaaaaaaatcattctggcgtccacattcagactggtttagaggagagtaatactgaagacatgcccccccgaatcaaggtagcaattgcggagatgaaaagaaatgagttcaaaagatacttaaatgtgaccattgaacaggatttgactcattggatatgaggccatggagcagtgtctggctaggtggatggatgttggtgctgtttagttaaataggaaactggaagagaagcaggcttgcaagaatggtaatattttggacgtgtaacttgtctggcaagatgttgaagaggtaaaggaggcagcacagcatcatgggccttggaggcagaagccgctttgatttactcagaacaccaaatcagtctccattttcttgactcagactacacccaagagattgcttccttccctgtgcttcctggccacttgctactctagctaggaagatctgcctcccttagctgaagtctaagatgtgtagcttattgatgcctctcctcttcttgttctgctgttgctgaatataatggggatgccagggcagacataccattcaacttgaatcttccttacccactttgtatagtcttacatgtcattgataccttgttttctggtacgcctaaaaggagtagaacttcaagtggtatttaaaagctttaagaaaagtcaaatttttacttttttcttcccatctgaggaatggatttattttctttttaaagaaatccaaatttttaaaagaagggatcttatttttaaaacgaagatcgataatatctactatgtactaaatgtcattctttaaaagttgttccctcataatttagt

SEQ ID NO: 110088 - DNA, 3308 bp, Homo sapiens
taagaactattgccttaaagaaaatcaggccgggcatggtgtctcatgcctgtaattctagcattttaagaggccaaggcgggcggatcacctgaggtgaggagttcaagaccagcctggccaacacggtgaaaccccgtccctactaaaaatacaaaaaaaattagcctggtgatggatggctataatcccaaatactcaggaggttgaggcaggagaatcgctcaaacccagggggccggaggttgcagtgagctgatactgtgccactccgttccagcctgggccaaagagcgaaactgcgtctcataaaaacaaagaaaattgccaatgggctgtcattttgtttaaaaaaaaaatttttttttttttttgacttggcactggcccctgctgccttctggagaagtcatcaaattcagtgggaagaaatgtcaaacatatttactgtgtgtcttttgccagccatagaaacttaaaaatttaaacttactccattgattgaagtgaattatgaagcttagctttcctatgtggaaagtgtggaaaaggattggaattaagtatatgtaagactttctttgctttagagttatagctggtatctcagttaaaataagcataattaaggcggggggtggtggctcatgcctgtaatcccagcactttgggaggccaaggtgggcggatcacctgaggtcaagagcttgagaccattctggccaacgtggtgaaaccccttctctactaaaattacaaaaattagctaggcatggtggtgtgtgcctgtactcctaactactcaggaggctgaggcaggagaatggcttgaacccaggaggcggaggttgcagtgagccgagattgtgccactgcactccagcctggcgacagagcaaaactccatctcaaaaaaaaaaaaaaaaaaagcataattaagatattttgggaaaaagtagatgtgttagttgaagcccacttagaattattacagattttaggcattgtctgtgactcataaattctgcacttcaaaccaggtatgcatttagggaagggtttggcttgatgcttttatggagatggaagaaaatgaatagaaattcttaatttgactctaaaattgaaaaggagaaactatgtagctaaaaagtaaaatgttttcatctttggtttagaattctcaagttatactttatcttaaaattttaaagtttaattttagctattacagctttggcacagtcttaaggataatgatattattatataaatttgagtatttagagccatctcatctatcctgcaataaacatattgaatagcttcgaagttgggtttgagacttagatttgtcattgtttatcttaagaatttgagatttaaaaattctcatttgttatctcaatttttgttaagggtttctaaggatttgtaaggaagtcacacctttataaaatcaggcatatagaaaaatgaggcgttaagaaatttggatattttaaactttgtttaaagtaaaaactttggatttatttaggggactggatgaaggtgtttcttgtacgtcaatttatgaaaagcatagtgcaggactgacaaaggggatgcatgcctacaggtaatttttatccaactaaagttagatcttctcaaaattcctaaaagcagtagtatacataatcaaccctttaccatatagttgtacatattaacagatacttaaatattacagacatagtagttgagaatttattgatgttttatttgggtaagactgtcttagtttaagaattataaaaatgtgcaagctgatattttgaagttggtatccctgaaattataccatatttcatcagttcccaggtgcacgtttttccaccttttaacatctctgagattgggatgtgtcatagagttggtgaagtgtcgttcttgatagcatttttatctttcttgatcatataataatggtatgccttacaattgatagcaccttagattttctgaaatacaagcatgagttcaaattcaccgtaatgaaagattgtaaattgggagacataatctccttcattgtgttattccttgttaaatcataaaaatacaccagtgtattgcgtatgttaaagataaatgccactttgaaattcaataagaaattttcttatagttctgtaacatgttctttcaaaggggtagaacataaaattcactcatttagacttacatttcataaaagtctagaattactctatcatatagaaaatactattgtaacataaggaattaagtggaaacatttaaactttaaaagcattttcttttaaagtcgaatgtacaatgttttgaactaaacactgttagtgcaatattaaaaaaaaaataagatccctcaaatttatttggcttcttgcaaaaaataattgtaattcaaaattgttaagatctagtgtgttcaaggatgcaaaagagaaccttttgctcacatggtattatagactagtgggaaagatacttgtcacacataaagatgtgagacaaaatgaagttaagtgctaccagtataggtatctactattgacttctttgttttaaattctgtaggtagagagtttgaattatagaagacaggtgtttggagacatgaataagaacagtctgtggtttaagccttacctaatacaatgcctttcgtaaattatactattatgatataatgtaatactatgaatgtattttcctgttatagaaaactgctttatggagtaaatgaaattgctgtaaaagtgccttctgtttttaagcttctaattaaagaggtaagactattgattgtatataacttaacagtcatgatcaatggatgtgtcaatttggaatgagttgtgattaaaatattcttggttttctttttcctaacctctttttcatatttttacttggaaggtaaagacggaagacatttactctggtagagaaagaatctggggcatgtattcttaaaattttgtctagttttgcttttattacctgttgaatgtctagcagagttaggctcaccaatcttcattctggtttttggctaaagctcaagaattagttgtattaggtgaacacttttaggagtagaagtaagattgtttttcatcagttcctgggagtggccatgtaatgttgcttatgagcatagcatagtgtagtgattaggaattggaagacctgattttaatgtagttccatcagtaactagctctgatctttagtacattctctctgttgctcctttacctataaacttggaataa

SEQ ID NO: 110089 - DNA, 1058 bp, Homo sapiens
tggtccattaggactgtagtccagatctcggtcactaggccagctgcctgtctgctgtgtgatgctgatgcatttcagccttttttcttttttaaaaaccctaattggaagcattttataagaggttttaatatttagtccaaatatagagactaattaaggaattactcatgatattttatgaagtattgatgtgcttatcggtaaaatatgtcataaaaaccatgagcaatggaaagcaccttatgtttgaatttaagcatcctcatgaaatggtttaatatttagtgagtaggcgtgatgtttcctcaattagagatgaggaaataatgtcttgtaaagaatggaaaataaatgaaaatataggcagttttctataaaattgactccttaccgttatccctttctctctttaaggatgaattcaaaatgtggttttgtgcaaaaattcgcgttctttctttggaaacttacccagtttcaagtccaaaatctatgtctaataagctttcaaatggccatgcagtttgtttaattgagaatcccactgaagaaaataggcacaggatcagtaaatattcacagactgaatcacaacaggtattgtgatcttaatgtcaaagtttctttaaaaatcagaattgttacattttatgctatcatgtatattctataattttgtgtttgcagttaatgcttgagataaatttacctgcatataaaatattacatattactatatataatgctatatataatcctatatatagctgttaatagaagtaacagattacatatcacaagtgattatatgctttttggtgtaacgtttatttgtgttccacagattcgttatttcacccaccatagtgtaaaatatttctggaatgataccattcacaattttgatttcttaaagtaagtatcttccttttgtttggattgtattttgaatatcctgaaaacgttctagatagaaaagagtccattctagtattcataaaattgctgaggttttattttataatttctattcacgtattaattaacaactccct

SEQ ID NO: 110090 - DNA, 1095 bp, Homo sapiens
tttgatacatcccatgagcaagtgatgaatacatcactactttggaagaattcaaatttaaacaaaatcttattaaatattaaaagaacacttcgatggtataaaacagtggtccccaacctttttggcaccagggactggtttcatggaagacagttacgggtggggagggatggtttcgggatgaaactgttcagtctcagatcatcaggcattagattctcataaggagcacgcaccctagatcccttgcacgcgcagttcacagtagggtttgtgctcctatgagaatctaatgcctctgttgatctgatgggaggtagagctggggcagtaatgcttgcttgcctgtcactcacctcctactgtgtggccctgttcctaacaggtccgtgacccaggggttggggaccccttgtataatagacagttgatagaatgcagttgtatcgtctactaagatagaagatagttccctaacgtctgttccctttcttccctcagtgatcttccattgtttgaagcactggacctttaatccactgtaggtatggacagggaagaaaggaagaccatcaatcagggtcaagaagatgaaatggtaaccagctgttctaatttactggtgatgtgtgaagactttatctctgcaatttattattttagggactagaaaaatgcaattaacaacagtggcggcagcagctaactcaatgggcttctttcttcatcctgtgcttttgaattgggattgtgtaatatgtctattagttgcttttagtataattctttttttacctgtggtctgttaaaactgagaagaagtatgtttttgcatttggtgatttaagaggtaacattggctaatataatcctaaataaaagatttaaatacaatcccaaataaagatttctaattttgacttacaaaaattttctaaaatcagcttaataaaaaaagccaacttcaacttctctactttttgttggggggagccagaaagatgtcaggtgaagtataagatgccctgttaaatgtaaaagtcacataatgaagggagaaatttttagtataaatatgtccaaatgttgcat

SEQ ID NO: 110091 - DNA, 1673 bp, Homo sapiens
tgcaacctccacctccaggttcaaacgattctcctgcctcagcctcctaagtagccaggattacaggcgcatgctaccttgcctggctcatttttgtatttttagtagagatggggtttcaccatgctgaccacgctggtctcaaactcctgacctcaggcattccacccgcctcggtgaataatgcatttttaattttagttttttacttcagtactgctgaagatggcaaatactgactgaaggaaaaaattaaattaaaaatgtattattcaaaattgctttgcctgaacttttacttgattacaggtcgttatttaaatcacttcgtgaaattacctactttggaattgtaggcacgtacatagactatccttaaaaaaattcaacactctccacactcactattataatattgttacaactcttgagaaactcaggtttgaagcaaagatgtctttgaggtttggagatttctgtgtctgaaaacaactgatcttgttttaaggaatgaaatctgactaacttttagcatggtataggataaatagtatactttaattgtttgtagtaattacataatgtgaaaaaataagtaaactttcaaaaattggcatatttaatgtagtgagattttttttcccagtagcttcactttgtcccatactgtttttttttttttttttttaaactcacacagcaaatcaagtttattataaattcaaggaagggtttggttaagcacaatagcctataagctccttgctatttagataacatcaagactcaggcatgcactgtggaattggaacttcggtgagctaactagctaggatttattcaaataataggagctctacgagtgacagatggcagaagggcacatcttctgaaaacttactaaaaattggtgaattacaaaattctaaattttaataccttaatcattttgaaagcagttcagacagaaccgaaacagaaatatttggcataaaattccaaatttttatgcttagttttatttttattattaaaagccagcttttgaaagctgtgcaaatatcaggaattgggaagaatgatgatatagtgctactggtaagaaaaatttcttcaatttgttttctctgatatcgaatttgacttggttaaaaaacgtgtgctccagcagtccagaaaagttatatttctgtaagtaatgggtttatcaatttggtattaatgcttcaaatgtctgattagatatatagtagaattgtatttaatatgtatttttatcttgataagcagtgtattttaaatatgtttatgtggttttttatcctctcagtcattgaaataatcagggcttttacttatgtacatttaaaatttaaatatgtttttaacatacatatgttctaaatgtaagagctgttggagttgtcgcattggagttgactaaaagtttatgtgaaaagtgaattcttgggtaatttcctttgaggtgtataatatattcaaagtgaataattaattggaggtttttagagcaactttttatttgaattgtttatttttagcactttggtaaaatttgctaagacttaatttgctttaaaaaacaactacgttttagagaaattacactcataaaaagagtaatggtgtaatatggttaaaaaattgtattt

SEQ ID NO: 110092 - DNA, 1087 bp, Homo sapiens
aagtacctatgcaagaattaatggtatagtgtaggctaaactcttcttcatattgatcctaatacaggtaattatgttatctttcctaattatagcttattttgttatagctatcacattgttttgtaacatacaaaaaagtataattatacaaagactccactttacaaatgtaaatacagtcttggtttggtgtatattggatacaatggtcttccttaagcctaaacacagaaacaaaagcatattataagagaaagtccaagatgggaagtgataaagtgggtattgagtagagctttgttaaaatttagctggtatccttgtaaaatttccatgtattcattaaattatattatgtcattcttatttttaggagctgacttgaagttttaagttttgccctcataaagaattgtcacaatttggttattacagttggatgattctgattttttaaaaattctttttgtatatatttgtataggtattaaaattgaaattgttcaatgactaaagttaaggctttaaacgtattggggcatattttatttcaacagcaaaaagtagaactgattttgaactggacaaggttatcttctcagttactgtaaattttacaagtttgagaataaaataatatttagaatgctagctgtgctgtttatatttcaagatcattaaagcactcttggcttgtgtggtctttaaagatgggtttatcaaatatttatttaacattggtaggtatgtgtaattctcagaaaaaaaatctaggactgcaaaacaaagcgggataattccttctctcattcaacaatacaaggtgtcacagaaatctcagtgaagttttaatttttaaaactccagaattatatatgttataaacttaaacaccattgagaaattcagttactggaatttcttttatacttatttatttttgtgagtttttttttcttttttgagacagagtctcactctgttcccaggccggagtgcagtggtgtgatctctgctcattgcaaccctccgcctcctgggttcaagcaattctcctgcctcagcctctccctagtaactagga

SEQ ID NO: 110093 - DNA, 1513 bp, Homo sapiens
gctgcctacgtgtcattccttaaatttgttggtaaggctttttgatgtaaagtcaccccatgcttgactttctggtgaaaatgaaaaatactaatcttggttaagtgaagatgattttttcctggttttgaaaggcagtattctggtaagtaagagtagataatgcccatcaaagtgttgtgtaaactaaatattcccatacaggcgtcactattgtggttgttatagtgcctaaatacattgattgtggggtgtgtctgtgtgcgtgtgtgtgtgtatgtggttttttttaaatcctggatagtggcatacaggacagtcataggaggttagaaagttaacatttttatgatggttgtgctgtgaataaggtgattaacttcttcaatagcaacttatattactgtatttttgaagtatttgttgaatgtaaatgttacggcctttgcattgtctatgctgggttagcgtgggtaggtttcagattagacaaaggactcaagtagaaaaacccaaattcatgtaacttaaagttgacccaagtacctatgagttacatttatacatttgcaggattttactttttgtacagaatagcttcctagtgattttgtgcttctttgtggttggatttttcaaatcagaatctggaagagtgaaatatgaatcattctgtagtgtatgtagatcatgaggaaaactaattttgctttgtttcaaattgcacagtaattctgaagtgaaccatacagaagtaatgaaaaaaattatttttaggtttgctatcagtaagaaaaaacaaacatttctgaggtttatatgtttttaacacactgaagacttggaggtataacctctggaaaattttcttccactcttctttttttcttctctactcttccctattcctatattattccctagcatcccctttttctcatcctagcttttcctctccaccgtgctgcgctatttcagtatctttctatgcagaacgttactttttgttgtattatgcaactacagtgtaatctttttgaatactttaattagtaatttaaactcaacatagtcttagcaacagtgcacgttacttagctggcatgaccatagtctgagcggtgtggccagtgtgaagcatgagtgtgcagtgagcaccgcatcacagcagccacttgccggcagcagctgtaaggttgtatctaagcagtgtcttgattttagctatggtaaaatgagaattcatgaatgtttaaatttcagagaccatctttaatttgatgactgaaatgtcagcagttatttgagatttttattaatagcattacagtttcaaatgaatagttgttaatttgcattataatggaagacattaatttacatattactcaacaaaaactttaccttaactctgaactaaaaagtataatttttagtttgggggaattaggcttatttatcatttggtttgtttacacaagctgttattgaaactcttgatttgtcaatttct

SEQ ID NO: 110094 - DNA, 1433 bp, Homo sapiens
aggtcactaagggacctgggaacacaggatattgggagagctgggaaaggggaatagggatgagatgcgggagcatgccaaagacaaaattactttgttgtcaaattttgcccacaaaaagaagagggattccacccctccttcacccagtcttgccctgtctcctttattcagctgcactgctggatgcttgcctggttcccagcctttaaggtttttagtctataagttcaacgttgttggaaaagtgctctgatacctgcagaggtgggagaaaggtgggggcagtcctctgctaggagatggaagggacaatcaaagcttagtagcttgagctggtcctggaagagcaagtaggagctctttagccagactaagagaagggcattcttggcagaaggaatattctatataaagaagtggagtcagggaacagtagggctctttgaagaactacagattgtgttctaaatgaatgacatgtaaggtttgtaaggggcgagtgataaccactgatgaatggcagatggtgttgacaactaggcggggccagagtctgtaggatcttacatgtcttgcaatcagttttgactttgaccttggaacccagttgaggctcccttccgccccagttcctcatggcagggaaatacatcatgttgtgcgttgtaagacttcaaaactttgctagtgagaggcctgcttaatattatttaatctagttcaatttaattgttttgaaaaaaaaaaaaaacaacaacttactttgaaggtactcttttaccagtttgggaattgctactacagacaacgggaagctactgaagttttatgtagagagggaaatggtcatatctggctgcatacagacttgaatgagggagacgagggctcaggacctgaatcaaggcaaagctgatggagataggcatggtgaggtggatttgagaagggtagtcaaaagatgagtggccggttggatgtaggtgtgagataggaagagttcgaaggtgacttctaaattcctggcttggctttttaggcaactcatactcattaaaggagtagggggaattggtggtggctgggtggtggggcagattttttggaagaaagagaaaatgaacctattgagtgttagctgtctgcaaacatgtagttgaatctgtgggtctgaagcacatgagagattagtgctgaaaatgtgaattggtagttgccatcgcgatggtccagtagtgccacccctgatgagattgttacaaagagaagagcctgaggaatattaataggaaaattaagaagcgggcagaggaaatggaggcttggtaacctggctacctgcccagcaacccaggctagtgtaatgtgaactgcagctcagcagagttgtaagaggtaaaatgggcatttgtgggctatcttaggaatct

SEQ ID NO: 110095 - DNA, 1284 bp, Homo sapiens
atatttgtaaggtagaagaaggtccacagttaatcagttatcactagataactagtgattataaaaggagttaaaacgatttgtgttagtaggttatgcacagtgactcatgcttgaaatcccagtgctttgggaggccaaggcaggaggatggcttgaggccaggagtttgagaccagcctgagtgacaaagcaagactttgtcttaaaacaaccaaaaataatttgtattaatcaggttaaaaatagaggtaaaatgagatgacatgagtaaatggtaattggaaaaaatgatcactgttatgatagtttaaaaaatgactttatggtaatcagtaagaagggagaaaaacggaataaaggagagaactgtccaaataagtgtctgacactgaggaaggttgtttgaggatggtgattgctgaaaagtttccataaaatgattctctagagggaactatgccaataccatatctgttaacatcttagacccacagggtcatattggaacctttgctagagtctgagatggtaaaacattaactcgaatagtaaacgtcaagaccgcaaaattaatctgttaatcagaattttgtcttttttgttgattcttacacttactccctgtggatcttggttttaaatgatcaattgacactcagagactagttagataagaaattaaatttccagaaaaagtcacttaagtatgtaaagtagaatttcctaattatgtggtctggaaattgctgatgtctacagaatctttctcaagtttgaagtaaaaatacttgtaactgatgttgggtggtaaggtgaaagatggttctagctcagtgagtttttcttatttttttttcacaaaggagttgaacattgaaataaagaggtgtgagactggaaaataatgcggagagatcatggattatttagattagtgcctttttagagaagaggaaagtgaagtaagtgacagcataaaggatcctttatggtctaaccccagatcctttctctagcttgggtgttcctttcacccttgctttaattttgtactctgtagtaatggcacatctcaaaacttttgcattttttttttccagtgagagccaacttttaagggttgcctttgcttgcttgacagacttcttgaaacaaactatttttagtttgtttaaaatgagtcatggaattgctcccacatatgtgtctaagggtggtttcttcatagcatccctgttgctctgtttttttttttttccatttgtgaaataggatgaaata

SEQ ID NO: 110096 - DNA, 1004 bp, Homo sapiens
tataagcgactttgaagacagacagaaacctagctctgtgttaatgtgcttaacacagaggtttctgtctctgggtttataaggttagttgtatgtgactaggcaacataacatctctgaacctcagattctggtgataaatcagatatgtcatcttaataggtgtcacacactagatcaccttcttttagcacacaactgtgaactgttttgactgttttctttgataggtgataagctgccaactcctattccatttatcatccattcaaatatagctcagtttaactcttagatatgttgtactcatccttttctcccttctctctccctccttagaatcacatttcttattttttaaagttttaaaaacattttttaatactgcttcttgcagaacagggctgctcgataggcagtgtgcctggagtagccagaagaaattagaaattaaatttcttcttggtgttacctctgaatgtattctgaatatgccatatctcatctggatccaagaggtagctgatgggatttagccttggttttggaacatagtttttgtgaaaatgaagctaattggcctatggagagagtaaatctgtagtcgtcaaaaccatgttgagtttttttgagatagggtcttgctctgtctcccaggctggagtgcagtggctctgtcatggctcactgcagccttgaccttctgggctcaagcagtcctcccacctcagcttccagagtagctgggaccacaggtgtgcaccatcacacccagctagttttttttttttttgtagaggtgggttttcaccgtgttgcccaggctggtctcaaactcctgaactgaagcagtctgcctgccttggcctcccaaagtgttagggttacaggcatttatcactgcaccccgtccttttttctttttttttccccccagagaaagagtctcgctctctcactcaggctagagtgtagtggcacgatcatggctcactgcagccttg

SEQ ID NO: 110097 - DNA, 1514 bp, Homo sapiens
tggttggtagtcagagctttcggaaagtcctgtgggaggtggaggtcctgtgggcagaggcgtaggggtgctggcagggccctcgatgagtctgtgcgggaccctagctcgtcctcagccgtggagtatggagctgcttgccatctccgcatttcacagataaaaggagtgagtcccgtggaggaaaagtgacttctgacttgcctgaggcctcccactcggactctgtggcagtgaggactagaaaaacccagggccctttgccctagcagtgctctcgtggccactctcgctatggcctttctgtctctccattcccttcacagagtcaggttctggtggaagtatgacctctggcttttttggggaggtgaggggtagggatgaagggggagggaatcgggttgggattggcaggaactcagctgggggcttcccggtgtggaagaagctttgtgacaggtgtttattgtttcctcttcccatagatctgacagacatccctgaatcttggtgtttggacataggaggtatgaatcactcacataattagccgcttttaatcatcagtgtcttagagctatatttagtggttatattagtgcaaaatgaatgggtgtggagtcgtacacctagaaacagacttgtgttcctctatacgattctaactaaatgagtagaacatacctgggtatgtcatggctactttagatctatgaggcaggaagttagaatttaaggaatctaagaaatgcagggacttgaaagattattgcaaaataaagcctttaaaaagtatcgttgttaaaatgaaagtgtttcgatttgattcctttgaagggtgagtacgtaatgaacagtgctctatctttggttagagctcagcctctttaccaaggtacatgtattaattttgtttcactggaatatatgtgacattattttctctagaggtttgttgctttgcttaatagactacagttgccaaaaatcaatgtgtgtgggcatctcatcctggtttgcaacccctttaaggcaaatcagtgcttggaagttgttcgaagtagtaaacctattattaatgattgttgtagaacataacttttgctggtatctttgatttgcattatcctaccattagatcaggcagagagtgaaataattgagattttgagccttgttagaacaacaatgcctggctttggtcaggggattgggtaggaaaagtgacactatttggttgctttaaatttttttttttttttttgagatggcatcttgctctgttgcccaggctggagtgcagtggtgtgaactcggctcactgtaacttctgcctcctgggtttcagcgattctcctgtcgcagcctcctaagtagctgggatttcaggtgtgtgccaccacgcccagctaattttttgtatttttagtagagacagggtttcaccacgttggccaggctggtcgtgaactactgacttcaggtgatcttcctgcctaggcctcccaaag

SEQ ID NO: 110098 - DNA, 1035 bp, Homo sapiens
gtgacagagcgagaactccttctcaaaaaaaaaaaagaaggaaagaaaggtacgtgctctgggcactcagaggaaggagccgctagcctctgggtcagattctgacctgtggcgaaagggccagagaagagtccgtggccaggtagtgctcccggtgaggggagggggtgtgtgaggccgggcaggctgtgaaaggcctggactgccaccctgaggaatccagacttcatcccagtcagtggttctgagtttcagatttcaagggtcagtttaagttcaaccaatctaggggacttacaatggctaattgattattttgccaaataaggccaattaaaacccaaaccaaaaactcaacaccaactactgcttactattaccattctttcctaaaagggcatttaacaccaaaacagttgggaggacacaaactcataacggaagacagtcctctccccgcaccaaaagacagctggcaattgtctactgacatacaagcggccgctacattgtccttgtggttctcatttttccacagacagatggaaacctcctcgctgaatggggctgggaaccacagcggtgggaccaagagagagaacagctcagacctgagagttacgcctgtgtgtgatccaagctgtgacgtgtgttttattcacagacataaaagctcaaaatgaggtaaagtttatacaggtgtcagccgtggtgcccacgacagggcccacttgtgtatggccccactaacacagcaggatgtagctggtgctcctcggggggagaaaagctcccatgggcaaatcagtttgagaagcactgagacttttttttttttagatggagtctcgctctgttggctaagctggagtgcagtggcatgatcttggctcactgtaatttccacctcccgggttcaagtgattctcatgcctcagcctcccaagtagctgggattacaggtgcgaaccaccacgcctggctaatttttgtgtttttagtagagacagggtttctccatgttggccaggctgg

SEQ ID NO: 110099 - DNA, 1028 bp, Homo sapiens
tgttagccaggctggtctcgatctcttgacctcgtgatctgctggcctcggcctcccaaagtgctgggactacaggtgtgagccactgcgtccggccgtgtctatcatcttgagagtgatgggagtcaggaggcttgagtactggagactcagggtcagatgtgcattttagagccatctggggaagttgttgcgggtggcctgggggagaggagagtagcagccgagcagtcagtcagggccagttggaagcccgaggaaaaggaagtgtggcctaaactgaggttggagcagacggagaagcagagacagagttgagcgagttgggaagtggagcgctggaggggtgaggaggtgcgggtgagggaggcagggctccgggtgactccctgagttctggcctacacgaggggtcctcaggaggaagagaattgggaaagaggtgacgagaagttcaccccatgtcccactattccaccaagactgtcttgtcgaggtcaccgatgacctccaagctgctaagtccaccatcattccattctgagagtccacgcactcggccaccagctgctcctggcgtctgtggcccccactcttctgtgtttcctgccaccctcacaggctcttctttcccctcggcctctgctggctcctctgggtaagcttgactgtagagagggagtccaacgccctgtcccaggcaggctccctgctcctggtgggccctgcagtcccacagtcccctcgctctgcacaccagttcttgctgacttcccccattcgtgtctccgtcctttcccctcccctcagttcccatctcggctgcccagctgcccattcagctgtcaccatatggcatctcacgcttacctcgtccaacacagaattctggatttccatgcccagaccggctcctctccccatcttcctcatcttagtaaatgacgcactgtctttgcagtggttcaagcccaaaattcctctttccctggccacacccccatgcccatccattccttttgagagtc

SEQ ID NO: 110100 - DNA, 1114 bp, Homo sapiens
aaacatgctttttctcctgaatttttcccattccctagccaaggcctatatatctgtaaatatggtcatgaaatgaacatatttaatgagtcatctaatgagtttatatgtgtattatgtatataaactaaattttatatgtattatatataaactgaattatatatataaactaaattatatataaacttaactatatataatttaatttatataaaactaaattatataaatataatttgtatatatatgaactcatctaatgaattataatttagtttatatataactcatctaatgagtttaatataaactatttacaatttttattcatatatatttaaatatataagtatgtaatcagaaatatatggtgtttgtgtatatacatattcatatatatagtgactttctgtatataaaggctgcttacatagaaatataaatagtgcatatttccttttattgaaccaatagttttattacatattctccagaaatgtcctcttggctttaaaatttccagaatatcatctctcatttttcggatcttccccatgtgacctgggtcagaatcggggtcccagggagagaagggccgggcctcagctcttctgatccggtctctgtgttaggctgttcttgcattgctctaaaggaatgcctcaggccgggtcactcataaggaaaccaggtgtaattggctcacggtttggcaggctcccaagcatgacgccagcatctgctgggcttctggggaggcctcagggaccttttactcatggcggaaggcaaagtgtgagcaggcagagagagagagagtgcaagagggtggaagggaaggtgccacacacacatttttgaacagccagatctcaggagaactcactcactgtcgtgaggacagcacccagggtatggtgccagaccattcatgagatatccaccccatgacccaaccacctcccaccaggccccacctccgacactggggattacgactcaacatgagatctggcggggacaaatgtccaaaccatcccagtctccctcacgttctcccagcggacattggcgagccgctgcccagcgtcaggtgctgggcactgagatg

SEQ ID NO: 110101 - DNA, 1032 bp, Homo sapiens
cttgtaatcccagctactctggaggctgaggtggagaatcgcttgaacccaggaggcagaggttgcagtgagccgagattgtgccactgcactccagcctgggcgacaagagggaaactccgtctaaaaaaaaaaaaaaaaaaaagagtgtcttatgggcaggcattctccaggcatccacgttgagggaggccctgtgtcggccagtgctggggggggtaagatgtgagcaggggcgagcgcttgccctccgggagctcagtctcatggaagacacgggaatgtgaagcagcatctcctcacgcttcaagaaagatagaaacaaatgtttggggtttcagaagagagagaaggctcctacgctcttcaaatgagcaagggtgaaaactgtttacactgccagaccgtggggtggtggggaggcgtcacgttacctcagaagggagcgtgaatttgaggacacaggctagggaaaggccatcggcagaggagagcacacaggaaaagcccccacgtgcgaaagcgcctgagaaacagcaagacactgtggacgtgtgaccgctgctctgccaagtttcctctgcagacgactctgagacaactgttcctgtctcactgacagaacagtgggcaaacccaactccatggcaagtcataggcccatttagtctgaaaagaatcagctgggtgcggtggctcatgcctgtaatgccagcactttgggaggccgaggcaggtggatcacctgaggtcaggagttcaaggccatcctggccaacatgctgaaaccccgtctctactaaaaatacaaaaactagccaggcgtggtggcgggtgcctgtaatcccagctactgtggaggcaggatggatcacttgaatccaggaggtgggggttgcagtgagccgagatcgtgctgctgcactccatcctaggtgactgagcactactccatctaaaaaaaaaaaaaaaaattacttgcccaggagcatcttggttgaatagcagctccaggggaacaggattcagggc

SEQ ID NO: 110102 - DNA, 1072 bp, Homo sapiens
acaatttctaagttcactatctgcaagtccatatagaagaaaatctctgacagtaaattttcaaagatattgccagattactctcattttactttgtatttctttaaatactagtgaagttgagcatctttccaaatgttttgtgaccatttatttttcttctgggaatcacattttcctatacatggttctgtcttaatgatttgtaaaagttctttgttatatgtgctacacattttttccaatgttaatttatggtttctttggccccaaagaagttgacaattttaatagactatatttttcctttttggtttgactgggtttggtgttttacttgggaaggtcttctccctcccaaaaagataaaactatcttcctgtaatatttacttacttttttaacatttagatttttaatctgacgaaatttattgttgtatattgtgtaaattaggattctaactattttcttcgaaactggaaaagccagtcgacagctagtatgtgagggaactgagttttgaacgcagcctgtctgctgaagccgtgttcttaaccaccatgcttcgctgcttttctaattgagttagtattaaagggatcttactggggaaaaaaatgtaggtacatcattcagtaagaaaacttctctgttgctttctgttttgcaagtagtattgatagcgtagcattctcctacaggtagcctccatgaataaatgtttaaaataaggaggctgggtgtagtgcctcacgcttgtaatcccagcactttgggaggccgaagtgggtggatcacctgaggtcaggagttcaagaccagcctgaacaacgtggtgaaaccccatctctactaaaaatacaaaaagtagccaggcgtggtggcatgcgcctgtaatcccaggtacttgggaggctgaggcatcagaattgcttgaacctgggaggtggaggttgcagtgagccaagattgtgcctctgcactccagcctgggcaacagaacgagactccatctcaacaaaaaataaaataaaaataaaataaagagaagaaataactggagtagaga

SEQ ID NO: 110103 - DNA, 1215 bp, Homo sapiens
ttctgaatttcttactctagaaattctgcagacacttattgatcacctgccacatgccagacattccacttggctttaactaaaacgtgactgaaaattaaaaataattgtgtgttgtgattattcaaatgtccatccgatcagcctcacccagtgtggaagatgcgatggaaaccactgtctgtagatggggcagtgagggaaggctgggaacaaggggatgaaattttctgtagcatctgctgttaacagcaaaacatataatattaaaatgtgcataacttggccatttgtcactggagatgtgtctgaataaatatacccacaccacaggagaaaaaagatgtctcaacaaacacagcatggatttcaaataattttctaaagtaaccagatgcttatgctagtcttgccaccatctatgtcatatctttgagtcttttgatagatgtactgttttactgtttggtaacttctgagtctcttctaggtgggctaccctaatgttggtaagagttcaacaatcaacaccatcatgggcaacaagaaagtatctgtgtctgccacacctggtcacacaaagcactttcaggtatttctgtggtgctttgccacttgcatgcagctctttcttccttttatctgttgtatacccagctcaaacctcttgcttgtcttccagactctctatgtggagcctggcctctgcctgtgtgactgtcctggcttggtgatgccatcttttgtgtctaccaaggcagaaatgacttgcagcggaatcctcccaattgatcagatgagagatcatgttcctcctgtatcactaatatcctttctgctttggaaacactctagttattacgtgcatattagggcttcaggtttattttgggcatttgagggattcagatttgatgaagaattgaaaatactagtgatctgcacaagtttatactgtgagatagcatgagaacttcagaatagaacctcatttcctgatttcagcagtgtagccttgaagaaatgggagaatccaggtttcagatactcagttccaagttgcaaacctatttaacaatgccatgtaaccgtttgaatgaccttggaaaacttgcttaaccttcccaaatactttccttttctctaagtgggggaaaatctatctcacggttgattatatttaatcagtatagctaacatatattgaatacttgc

SEQ ID NO: 110104 - DNA, 1098 bp, Homo sapiens
gcagtggcaccatctcggctcactgcaccctccgcctctcaggttcaagcagttctcctgcttcagcctcccaagtagctgggattacaggtgtgcaccaccacgcctggctaatttttgtatttttagtagaggcggggtttcaccatgttggtcagcgtggtctcaaactcctgacctcaaatgatctgcgcaccttggcctcccaaagtgctgggattacaggcttgagccaccacgcccagccatcctctgtccatcttacaactcattaagtatttttactagagtggaaactgcagttatatacttctgagcgtttctattattttgtcaggaagaggcaaacagagatgatagacaaagcaacacaaccaagtttggacattccagtttcgaccaggctgaaatttcccacagtgaatccgaacatctcccagctagggattctccttcacttagtgaaaatcccacaacggatgaagatgacagtgagtatgaggactgtccagaggaggaggaagacgactggcagacgtgctcagaagaagacggtcccaaggaagaggactgcagccaggactggaaggaaagctctactgcagattctgaggctcggagcaggaaaaccccacagaagaggcagatacacaattttagccatctggtatccaagcaggagttactggagctctttaaggagctacacactgggagaaaggtgaaagatgggcaacttacggtcggactggtaagatgacatatgtcataacattgttaccacgtgattgtctttaatccccatttttcagtagctgcacgaccccaaagaccaaccaggcttccggcatcgtagggaacattgccctcttgttgcccactggcatcacgggattaggcagtgggatagacagagcccaactcaaaggaatcaacttcctcaaggcctgtgttggtaacatacctattcacattgaatgtattctccagtctcctttcagttcagcttttcctgccgtgtgaagtaccaagacagcagaatgagagagatgttaatgttgtcttcagacttcagcccagtgttctttgggcaccctg

SEQ ID NO: 110105 - DNA, 2453 bp, Homo sapiens
tattcctgggtttaaataagatactagcttcaatagtggcagctgtcagcaagtgatttactagttttcttttgaggccttaacatgagggcagattagggattgaatatttagtagactttgccgtggagtgaagtgtttggaatactcttttatctcaccaggacagtttaatagaagtacggtggatgtcttagcaatgaaacatcatccgaacccctctaggctgtatgagagcaatagcatgttatgattaagagcatcacctctggtccaggctgcctgggctcccattctggctgtgttacttactagctggtggccttgggcaagttacttaactgctctgagccttaagtcactcatatataaaccgggaataattataccttaaaaagttaatatatgtccagtgcttaatatattgccagggtttgctactctggccattattatgtggttagtaaaatccctttcacttcacggtgattggtctatctcgtgtttgtttttcagtgatattgtggtccagatagtagatgctcgaaacccactcctgtttagatgtgaggatttggtaagtcaagtttgacaaaattcaaacatcagtcctttgagtagcagtgccagcaccgcatccctcagcaatgactgtaggcatacattctgccctctctggcttcgtttagtgaggccttccctccttccaaggccaggagcttgcagaacgccactgttgagacagatgttttctcaaacaatggtgtccatctgcaggaaggcacagacacttaaatgagctttctagcttttagtttagaagccacttaaggcatttgccggtttcccatttgtcagggaacaccagttgaaatagcattttatttattttagcatattgccggtcacttcactttttaattcatcccataaggttctgtcttctcacactttagttatgactccctgtggtattttacaagtgaactaagtttatgaaacaccacaggggctgataactaacatgtgagagtcccatgaaataatgtaatacagctttgggttagttaacaaaacattgtataatatgtgaggtattcatatttctttttgagaactgtaatacatattatttatttatttattactatcttatagatctaattttttgtagagacaggatcttgtcatgttgcccaggctggtctcgaactcctgggctcaagcaatcctccctcctccgcctcccaaagtgctggaattacaggcgtgagcccccatgcctggcccagattatttttaaacccactggtgcataacaaaaatattaatggtggaacttcttttcaaagcttactgaaaggattagtataatgtgtcatgattaaaaatgtttaaattaggaaatgatttaaaactaggggcagtaaaaacttgtattgggatctttaatataattagcctcatttttttacttgtttgaagaggtctttctaaatctctttgtcttgcttaggaatgttatgtgaaagaaatggatgccaataaggagaacgtcattctgatcaacaaggcagacttgctgactgctgagcagcggagtgcctgggccatgtacttcgaaaaagaagatgtgaaggttattttctggtcagctttggccggagccattcccctgaatggtgactctgaggtaacctgagggacattttaggttggctttcaaagagggaattttgatttcttgttaatgtgcttcgtttgtgttttgtttattcttatggaaaatctgtgggaattagagtttttcctctgtgtgctggattaggatgacctatagaaagtgaatcacaaagttactttctctgtggttgttggacagtctgacctctccagtgttgttacacactgatattagctgtatttttaaatttttttaaaaggttgtagacaggaaattgtataggaagttccacaatgaccctgtaactgcttttaagagaagtcagaacacaagagtacaactgaaggatgtagtcagttctcaggacttgattagaatctcttttgactttgttttgaaaacagagaaactaagtaaccctaaattaggatataccacatattttatcttttagcccaaattttgcaaaagtagtttgggctttatttttacttttgaataaaataatatctataagagggccaggtgccgtggctcactcctgtaatcccagcactttgggaagccgagaggggcagatcacctgaggtcgggagttcgagaccagccctaccaacatggagaaaccccatctctactgaaaatacaacattagccgggcatggtggcgggtgcctgtaatcccagctactcgggaggctgaggcaggagaatcggctgaacctgggaggcggaggttgtagtgaaccgagatcatgccagtgcactc

SEQ ID NO: 110106 - DNA, 1070 bp, Homo sapiens
agggaaaggctttctctgaggcggaagaagggaaaggctttctctgaggcggaagaagggaaaggctttctctgaggcggaagaagggaaaggctttctctgaggcggaagaagggaaaggctttctctgaggcggaagaagggaaaggctttctctgaggcggaagaagggaaaggctttctctgaggcggaagaagggaaaggctttctctgaggcggaagaagggaaaggctttctctgaggcggaagaagggaaaggctttctctgaggcggaagaagggaaaggctttctctgaggcggaagaagggaaaggctttctctgaggcggaagaagggaaaggctttctctgaggcggaagaagggaaaggctttctctgaggcggaagaagggaaaggctttctctgaggcggaagaagggaaagggtttctgctgatttggggtccatgcaggctccttttactcaagcttgaggagggcttcggaaggcccacagtcattctcctggggaactggggaactgctgtggagcagagtagcctcttcgttggtgcctccttggtagttgatgctgtgtactcctgagaatgcccgttttctaatttccgaagagaaatggtaacaagtgcagaagtactgcagcccggaccttgaggacagcaccctccatcttcacacttaattacagtttttgttttgttttcagattttgtcctacttcctatattatctgtctttcctctttgttccttttctttttctcctggtttctgacttttacggaagaggccttcctcaggtgtctagtggtgtttatctgtctttaagaacaaagcattacaaagccggttgacaagcctgcctgtttaggtggaatttgccaactggtgagcttcactgtagggtgcctgggcaggggtcagttttattttgttggaataccccaagatgttaagatctgtaggtcttttccccagagccagtcagttttgtgtgtgtgtggttttgttttgttttttgagacggactttcgctcttgttacccaggctggagtgcagtggcgtg

SEQ ID NO: 110107 - DNA, 1061 bp, Homo sapiens
ctttttctcagctgccattattagatccaaattacctattttattttggttacttatatgaggaatttttttccttctatgattgtttcagaccaaactggaaccaaaatactaccccagaagaactcaaacaagcagagaaagataactttctagaatggagacgtcagcttgtccggtgagtattatagactctatgaagacttactttgaaatcctgagttcagatatttggcatgcttacacagccatttgtgttttgaagttttgattcttttaagaaggaaatggtagcattctgctaacaagtgcaaatagatgtatgcacaaacaagattgctaggtgcaaatgcatccttgcacagagatcgtgagttggttactctgctcagttccgggccttttcctttcattcccttctttggccattgggcatcctggagttgatcgctgctctcctgcacatttttccagtaagagtgtgggaaagaaatgactttgtgtgataggtaaacttccagggcataaatagcttcaggataaaatttgaatttggtggagtattgtctaaataaatagtatttttatggtgtctcagcaggaaatatataaaataatttgactctggatatttgtgcccagtacttatttttaatgtaataaatttgagcatttacactgctaaaaattgtctattataatctggcaaatatataaacttctcattcaaaaactaggctagaagaggaacagaagctgatattgactccatttgaacgaaatttggacttttggcgccagctctggagagtcattgagagaaggtgaattatcattttcttttgtgtaataaagacattgtagtgaagttatattcgatttggctgttgatataggcttataggctcagggtatgggaattaagctatgcagagggttactgagaattataaaaacacagcatgatactaccgtatattttgtatagtttttttgttgttagatgaatatgttgataagtgtgtgagaataatgaacattttctgcaaggtgaattctga

SEQ ID NO: 110108 - DNA, 1046 bp, Homo sapiens
tttcagtattcttctattgccattttactgtactgaacggtacttgaatgcttgtatcattatatgtacatacacctttgggtcactatgtaaaatgtatttcttattgtgggattatatcaaataaagttttgactaattttgactagcacagtcagacaatctgggttcaagttctacctgtgccatttagattttgactataggcaagttattttatctgctgaagccttagtttcatcatcagtaaaatggaaatacagtaaaattcacctcaaaagattttgaaaattaatgaaatggtgaaagggaactgcctattgtgaggtaagaacgtgttcctttaaacattaactataagtagtattgattctaaagggactacaaccaccctcaagaccatagactagttgcaaggaattttagagcttattggatgccaagagcagaagagagcagctgtatttatcaccctgtgttttttcatagttgcacacaagtgaactcaatgatggctatgattggggtcgtcttaatcttcagtcagtgactgaacagagctcccttgatgacttccttgctactgcagaacttgcaggaacagagtttgtagctggtaagttgtttattgctgagtgcaggtgagactgtcacatttccatctggggctgaggttttttttgttttttgttttgagatggagtctcgctctgtcacccaggctgaagtgcagtggcgtgatatcagctcactgcagctccgcctcctgggttcaagcaattcacctgcctcagcctcccaagtagctaggactacaggcacgcactgccacgcctggctaatttttgtatttctagtagagatggggtttcaccatgttggccaggatgttcttgatctcctgacctcgtgattcgccttccttggcctcccaaagtgctgggattacaggtgtgagccaccgtgcccgccctgagtcttgaacaatgagtagatgttcaaaggacagatgagataagaccttttacacagacaggcagaggact

SEQ ID NO: 110109 - DNA, 1089 bp, Homo sapiens
taatactggtaaaatcgagacgtaaaaggagaacttgagaacaagtcattctgctttcccctctcaagtttgagcctgaactacttgggctcgcttatcgtcacttccggggatcgaactgtgaatcccggaaactgcacgcgccgagccgggaagcttcgtccagcggtcgtgttgccatgggccggaggagagccccggccggtgggtcgctgggacgggcccttatgcgccatcagactcagcggagccgaagccatcgtcacactgactcctgggtaagacagaccatgtcatctttcttatcttttctgtctagcctgagtgctgcaaaattcggggtcaaaagtcagataagttttgcaggagggacgcctcagccgggttttgaaggatgagttggagtttctgccaagctgagtagcaggccctcctcctggcaaggcccagaacacaaaggtaggagaagcttgaaagaagagttagtgtggtgatgaggcgtggagtgagaatctgaagagtcttcaatgccaggtcttgagtacgtttgggttttgccctagaagccactgaagtgcttggaacttccagagcaggaaaaagacaaaacgtatttttgtattgatttgttcaaagaatggatcctccagaagcggttggttactgccagaaatataaaataattcagatccttgcctcatccttgcgaagcaccccctagtggtttagctcaaagataaatcattgatttttcaggtgtgacaagacctaatattttactaggttatagaaggatctttaaaaaaatgaatgaagtgatttggcttgtgttcatcattctagtcgttattttcaccattcattcccccgggaatgaatgagaacatgttgagtgctaagatcgtgtgctaaatttagttaaatatgtccctggagctaagtaagcgtgtgccactgtcacaccagctgactttcatccatatagtctgcagagtaaacagcatggagtgcttatcagtattcatcaggtcagagttactctggacattagattactggtaatttttattagctttgaagcaacttgtt

SEQ ID NO: 110110 - DNA, 1124 bp, Homo sapiens
tgggatgtaattggaggattggaccggtctccccgctccctcgaccaatggctgtcacgcggtccctttaagaaaccaggaatccgcccggagtcggagcccaaaacagatcctcttctctgctcctcccctgtccccgcgcggcgaatggttcgcgccggcctatatttacccgagatcttcctcccggacggcaaggatgtgaggcaggcgagccggacgccgctcgcagcaccggagagggcgcactgcaaaggcgggcagcagaccgtggagagcccgggagcggagctggacaccgcctcggagggaagaaatgaggtagcggcggttcccggacccggccatgcccgtcccctgttctcggagcccagcgccgtctcggccaggccagcccggacactgagcgggccgagcgcgagtccccggcgtccggcggagcgaagatgcagtgagtccccgcgggactgctgcgcggggcccgccgcggccagccggacccagcatccgaccgcactttgggcgagctgctgacttgagaccagcccaaacggggggctttccatctccagcacccctcggaggtggggagcaccggcccctaggcacactcgctgtagagtttccgcgggttttggccccagtcctgagggttgtgtgtgttaggggacccacctcacgttcgccgaggagttcctgcatattcttgcaccatcccgggtgctgttgctggggctctctttatttgcacgcgcgcttctagcttttttcctgacattttccactctacgctcgttctttctcccttgcattttgttgcttgcctgagactctttgctctcgcccttgcccaggctggggtaattctgtgtgcgcgcgtgtctcccccgcaccaaccttttttgcacactcgaagctgaatattttcttttttagagaatttacccgcacctcctgcggggttcctaagcactctctctgctcccctccccccaactccctaccacagggccgctcccagtagttttattcttcgatcttgcccgggccgagcctggcaggggccggtggctcagcgggcctcgcacccggcgctccgccgccgccgccgcccagctgcgccg

SEQ ID NO: 110111 - DNA, 1056 bp, Homo sapiens
gagagagaggcacccctctgggatgcgggtgagggaaggttggctgaagttcctagtctcaggccgtaggtgcctggccagtttcctgtttgtggggcagctggggcctgaggaggaggggttcacttcctcctcccaccccctgggagcggccctgcgctgtcactgacatctcattaaaaaaaaaaaaaaatttgctctcaaggtgtttgaggctttaatgcaaccctttagcccttggttctttttggtgcaagaattctggctgtttacctcagactcagacccctgaaatgttgccaaattcttcaaataactgtttggggggtggggggagatgaaagagagtcgcgttttgtttacagttaaagacatccaatatcttaaaaaggagttttcctttagaaacacacacacccttcctcttgctcaaaagatctcactccatgatactgtgtaaaatatttttgcactgttgtgaagtatttttgacttttttctgtacataactgtgttctcagagctgaatgtttatatcttttgctgtgcaaaagaaacatgtaaaatgttgttcagttgtatatacagaaatgtgtataaaacattttgttattttttaaaagtagcactgttctggttctgtttgcacgccagtggggagagaataaagaggaaaatttaacagaacaggtgagcgtctggaactgctgcgttggggtgggagaggctgtgtctgaccctgggatggtgtcataagacagtctttggcctttcctgtgcttggagagaattagggaaggaaggtccactttatgcgccatctggggccttcctggacctccacaactctgggtgctgtgtctgggaccagccttttcttgtattatcctgtatttttcagtaattaagttgtgtgatctttttctggtcttttggagaggccacggtgagttccatatcgcactcccagacctgtgaggttatttatggaggagtgacttccagatctgctgagattttactacctccttctgtgggccatgctaataatcaagc

SEQ ID NO: 110112 - DNA, 1007 bp, Homo sapiens
tctcttctctctttccttcccccaggcctctccttggtgtctgctgtccacgagcacagccctgtcttcagagccaggggatcaggaaacagcatgggtcatgttgagagacacaagctcacctctgcccacaggacgaaacagcctggcgggcacaggcctcacatccaactcctgggggtccctagcctgccctccctgaccctccatcctcacccagatcctccgctgctccccgggagccctcggcttgcacagctttcacctgggctgggaaagtctctcttctgcacactcgctgccatgtttgccaagcaccagacctttaagtaccatgtaccatttttttttcatatctgcataccacatgtactgttatttgcttgttagttttctttagagtgactctctttatattaattgattttacaagtgaaacgaaatgatgaaaaccagaatcacttgctataaatagacgatgcctgagtaacggaatacaataaaaacaaaatactatcattttagctcaatatcgttgtcttccaaagatccaggcttgagacctgccctgtgtttactgaatggaatatcaccatctgttcaagatgtaccaatgagactttctttttaaagtacactaaagaaaccaaagagaattgaaaagggcaaaaatcttcttactctgtgatttaatgctattcaacgttgtgtctgtatctacctcaaatcatttctcctccctcctgtggcccatatttcatgctttgataatcacagttctgcccaaatcctgacttgtttttaaagaccagctaaaaggttctactgcctccaaaagtcttcggagtcttttcttactacttctgcctatatctttttcttctttctctaacccccgcttccagccttttcctggtaatttttaattcaaagccaggcattgtatacatctgcatcatcaaacatagtcgttacaagtcacgtgtagctctttgaattaaaataaa

SEQ ID NO: 110113 - DNA, 1042 bp, Homo sapiens
ttcattccagacacattacagccacagaggtgaggaggattcaggtcctgcccgcagagacagttgcacatacagccagccacacaaggggcaagaagtagtctgtgctgggccacaggggcagctctcaggaggctctgtattgacttcacgcccacgctgtgctacattcatcacaaatctgacagtatgcaacaaaaagcaggccacaaaataatggatggtattaacagcagagtcaagatgtgggaaaatggaataaaatgagctctccaggtaccatctattttttagaaaatggaatccattcattcaggaagcttgatggataaatgaagtaggccagacagggagaatacaaatagcagcagctcctgtgggaagcctgccagcccctcgctgagtgcatgatctacaccatcacatcatccactgaacagcctgtgaagttggtactctgatgattcccattttacagatggagaaaccatgacacaggaatgatgtggctggcttacagtcacagagctagagccagaactcaaacccgggtctgtctcactccgaagtttctgctaatgacagcatggaaaagattcctcatttccaccagcttccttttaatcaaggcagattagacattcatgcattggctaatctaggctttgagtgtagtgacgtttatgtagtgcctacaaagcaagattagccattacacgttttgtcgttctggaaactgactcttggcaattcccagccaggctttatctcaacatacttcctgaaatctcaggccatgtgtattttgcctacagagtggctctgaaaataaagtaggctggaagtcaggtgactgatgtcatcctggactcgtaggcgattaacagtatgaccttggagaagtcaccttcctctggtttcagtttcccatttgaaaatgcaagaattgcagccattctaccactaggactagaagagacgtacctgggcattaagaggcatgctcagtgggaacagaggtgggtggattgcctgaggttag

SEQ ID NO: 110114 - DNA, 1842 bp, Homo sapiens
tcagtcaataatatcaatgttggctgtggtgaggacgtagcagaggatggtagaaagaatctgaggcttggggtccagagccctgggttcaggtcccagctctgccacttgctggtgtagtgatgcggattctgcaccccggaatgtggcagtgtttgcatgcaggctggctgtgaagacccagggcagcaggccggcaggctggttcccctgcacaccggactaactctgtcctctctctccacaggcacacattctggcagttccgccatgagaacccccagacccgggttgggggcccgccccccgaggggctgccgggcttcaacagcggggtgatgttgctgaacctggaggccatgcgccagtccccgctctacagccgcctgctggagccggcgcaggtgcagcagctggccgacaagtaccacttccgcggccacctcggggaccaggacttcttcaccatgatcggcatggagcaccccaagctcttccatgtgctggactgtacctggaaccggcagctgtgcacctggtggagggaccatggctacagtgacgtcttcgaggcctatttcaggtgtgagggccacgtcaagatctaccacgggaactgcaacactcccatcccggaggactaggcgctccccgtgccttgcccccggggcctccagatctgggggaaggacagggttccttgggacagacccaagggcagtgtctgacccgctagagagacaccgcagggaagtcctgtgattaaggtgctgagacctcctgccgggcaggtcactgtgctgaggccacccgccaaggactggcctgtgcactgctggtgcttgggaccttattcctccagggagcaggcgacacaaaggacacgcatgtccagtgggctgggaagcaagcacttgaagagaaggaaggggagaaagggtcccccttgctgtctgcctctgaggaatggaaatcctttagacccggccttttttggaccaatataaatttaatttaaattgacagccttccatttttcgagaaagtacaaacagaactgctttagcacccatcgagccccaaacgggtaaggtaagccaaggttttaatgaccagcccagtatctaagcttccaaacgaatgccagcccatcacatactcaccctgggaggctgctgcacgcgcattctcctgatgctcacgtcacttggtgtaggtttcaggatcgcctctttgaggaaggacttcaggaccaactggggcctgcataagaaaacttatctcattattagagtactcacagcttgtatctcccagctacatcctagaaccccattgtcctttattccaccaaaccagctccaggtgaccagactctactcagaaagcaaattcgtcatcaaagaacagagactggccaccacaaggacatgcaggagaactgtcgggaccaggaagactcattccaaaaagcccaggccgggcacagtcgtcaagcctgtaatcccaacactttgggagaccgaggtgggggtatcgattgagcctcggaggtcgagatcagcctgggaaacacagggaggcccccatcgctacaaaatattttaaaaattagccaggtgtggtggcttgtgcttgttgtcccggctacttgggaggctgaagtgggagggtggcttgagtccaggagttcactgcactgagctgtgatcacaccactgcactccagcctggacgacagagtgagacgtccatctcaaaaaaaaaaaaaaaaccaaaaaggaacccagcaattcccaagtgtgaccatgtgggcttggaagacatgtcactcatgggcta

SEQ ID NO: 110115 - DNA, 1022 bp, Homo sapiens
gatcagaagccctgcctgcgacaaactgaggacctctgttccctttctgcaaaaatgcaggcagtaatgtccctgggctgccagggagagggagccgaggtggagagtgtgagagggcttcgtgacccacgctgtgctgttgcgttggggggattggcggtactgcctgtttaggccattttgccatgggatagaagttcctcgcacgagctccaatactgtccacaccccgtaccattccttctaccccgaggctgatgcgattcctctacgagaaccagcagacacagaagccagagaaacccaccattcccttaggtgactgctctgtctttctgggttcatttggggatagtagggacgccttgaacaagggccccctgaacatcgctttgggtggggacagtcattgttccttttcaggctgtgtttctgctgcagcacacacacggggcagcttgcacgcccaatttcctgtccctcctttccttctcaggctgatgcccagaccagtcctttctgaccatcatcaaatacctcttcatcctgattgagtggtggtgctgagcattgtccccaaagagccacttgtgctgtggccttctcctggaggcatattctgtcctcttctctctgcctgcggcccccatctcctgagcccagcgagctcagtgctagttcactgtttgctcctccttgctgcagacacagaagatttgggagcgttcctgccgaggttggtaaggatacctggaacagtgggcggcctctttgctccccacttgctaggagtaaagccgtttaaaaagacacctgagcctctccgggttcctgctcctcactcaaccccacagtagatctggtggggaggttgagggctcagtgaatctgcaggtgcagcatcgtgtcctcagtgtcctgccccctgcttccacccggtgtcgacagctgcacggtccaccccacgcctgcctttccatcgttcctcatcagccctgtgatctttcctgtggccctgctgt

SEQ ID NO: 110116 - DNA, 1038 bp, Homo sapiens
actctccagaattccgtaccacctgcttggtgctctctgcttatggccggtacctccagccacctgctgggctcctccacattgctgttctctgggcacctgtttgggactcaacatggaattcccttttcctccgccccacacccactcctcccagctccgccatggctgtttctggctccgccgtctgagtagggatccaggcttaaagcccctccactgcctcttccccctcatctctgtcccttgcccctcccagggccgaggctccggggctgcatgtgactgagtgagggtgagttccccagtccctgcccatctgtttttacagctccagggctgcagatgctgggggaaggtcacgtgactgacaaccccaggcaggctgggcacggggagcggagggccaggagaagccttcgagaagggcatggcacatcctgaggatacggggcagcaaccttggggtcctggtggtgccgtgccatgtggaggcctcaggcctgccagctgcccttctgcagggctctggagaaacggacgcctgcagggggctgaagggctgccctgcaccaggtcagaggccttgccatcagggccattcaccccctacgacgtccagccccaggccgcgctttacagggccccacagagatgggctggtcatagctggtacagctttgggaacgagactgacactatgggtcacctttatcattccagactccaggaggctggctgggtggacgagggctgatcgctgaggagccgccacaacctaagcctgggcagggaggagcatttgcagcatcagctctgcagaggctgagcacctacagggacaggcagggctgctcctcagggcacgctgctgggcagggtcagcgcagagtcccggaccagcccagtgggggcatcttccccattccatccatgttattgcggcactgcctctgggttgagattgcaggagatgttgcaagggggagcttttggacatctctctgctggggtccccgtgccgccccctacatcatc

SEQ ID NO: 110117 - DNA, 1024 bp, Homo sapiens
ggggatgagtctgccgaccggactcccatgtcagctttgtgtctggacagaacaaggggcgaggaagcctggtcgggccactctgggcctgcatgcgtgtgggcaggtgtctgttggtcttgggcaaagggcgaggtgacactgagggcgtgagggaggaggccccaagagagcagggaagcgtggaagatgccagctggcctgggggcgtggatgtgggtttcagcagagtgcagacaggcagtggggcgtggggcctccttggggcctcgctgggctgtgtcgggtgcttgctttcttttctcctttgcctccttccaaggtgcgtccacagccagcgtttctttatgcttttccctcagtctgagacctaggaacaggagaggccagtgctgtgaatttcatgtttcatggcctccccagcaagccagcccacgaaattccacacagggaggaggaagaggaggaggaggaggaggagctgccactgtccccgaggggagcagctgacactctccccttgactgcaccaggccttgggggtatggcgcctccacggacgtgggctgggggaggataggctcctaattagtttggatgcgcttggagtcagggcaccttttccccagtgggcagttctgcaccctgaacagctgtggggagaagggcagcgggaggacggccagataattccagaagaaaggctccaggagtggcagcagaactgctgttattttcggaggagtctaattactttccccaggtaatggcttgaagtagcatctaattttatttatttatttatttatttatttttatttttttattatactttaagttctagggtacatgtgcacattgtgcaggttagttacatatgtatacatgtgccatgctggtgcgctgcacccactaactcgtcatctagcattaggtatatcccccaatgctatccctcccccctcccaccaccccacaacagtccccagagtgtgatattccccttcctgtgtccatgtgatct

SEQ ID NO: 110118 - DNA, 1053 bp, Homo sapiens
taatgtgtgtgctaaatatgtctctctgtggtcatgatgcctgggtggtgatggacacagatcatggctgtccagctgctaccccacacgtgagtccacgcacctgcgccagggtcaacctcgtatgtgtgaagctgagcacgtttatttatttcttagagtttattattttaatctcttgggaagggagagggagaggagaaaatagaccctcttcaacagcaagcggttgtttgagaacgcggtgtctgtctgccatgtcctcggttcccctggtacattccacgttaattacaccgtactctgctaccacagtttttcctttggtatccacagctttggaaagtaaatacattgtgattgtggaatggtctgtgcttgaagcaatgagatggaaagggagaagcagcagccctgccaagccaaggggcacatgtcccaagtcaacagggccgctcagggctcgggcagaacatgggacggaaagccctgaggcagcttggagaccccaggctgcaggccaggaggcccagggagggtcccacccgtaggtagtgttggaatgaggcagagagtgagttttccagtccctctgattgccatcaagaggcaccagggccttaactgtcagaacccataggaaaaaaatcactttcttctgatgacgggctctgcagcaggggccagcgcagcgaggagggctcccgagaccttgacagcatcaaggcccgtggcttcacctcctctgccactgtgaagagagattatggtcaaatatatacataacacagaattcgccattttaaccttttgttgttgttgttgagacagtctctctctctgtctcccaggctggagtgcagtggcacgatctccgctcactgcaagctccgcctcccgggttcacgccattctcctgcctcagcctcccaagtagctgggactacaggcgcgcaccaccacgcccggctaattttttgtatttttagtagagacagggtttcaacatgttagccaggatggtctcgatcttctgacctcgtgatccacccg

SEQ ID NO: 110119 - DNA, 1016 bp, Homo sapiens
caccacacacacgcacacatacaccacacacaccacacagacaccacacacactcatacaacacacaccacacacacgtgcactcatatgccacacaaccacacacaccatgcacacacacaccccctacacatgtacaccacacacatgcacactcatacaccacacacgtacacatacctcacacacacatgcacacatataccacatacacgcacacatataccacacactcatacaccaccaacacacacaccatacacatgcacacatacatgcacacttatacactacacacatgccacacacagacacaccatacacgcacacacacgctgctggcttgggagagccaggcctggttattccgccttctcgagagtgtgcctcaaggtgttcagctatagtgaaggcgctgctgggctgtcggcctctgctgtggaagtaccttgcctgtgccctccttcataaaatgatgctcctgttcaagagtggagatctgcaagcaacgaagagagagtatctggaggaatgctgagcatgaattttgggggtagtgggactgggtgattaacagtcctggctctgcccctttcgagttcactttcctgagaattcactgctttatcaatatattggaaataataatacctttggggttttcgtgagaactaaagaaaatacaggtaaagctctgaagtagtgcttacctcacaagataatagctgccttaattattatttctagccactgtgtgggacgtgacgttaccagtagggtgttgtaaggacatccttggatttactttctagcttcatggagggggagagtgaaattgagttatagtcacatgctgcgtaacattttggtcaatatatgatggtggtcccgtccgattataataccatattattactgtaccttttctatgtttggatatgtttagatagacagataccattgtgttacaggcatctacagtattcagtatagtaacatgccatgcaggtttgtag

SEQ ID NO: 110120 - DNA, 1059 bp, Homo sapiens
gaggcatttacaggcaatcaggatgttcactttgcatgtagagcaggcacgcgctatttgaatcaagcttccacgattggggcgagcaaatgatcttgtatttacatatttttccgaaggccactttacctcaattttaaatctttaagttgagttcctatttttgaaaattctgttttgttgtaactgaggtaatccagcctcaaggccctgtgaagacagcttatgttagaagtctgtctgttaatcttaccacgttgaagacagtggaattctgtgagaaaagataggcttcacgagtcagtaccagtggtagatgggtgggccagtgatagtataatactcgttcagcttggtcacaatcagcgtgtcctttacctgctgcttacagacgttcacagtgacagatgctcccgtcatgagagacactgagcaccatcagacacctgcccctggagcgccatcctagccagagagatacacacaggcccagcccactcagcccagccagaccctctccgccacctcctttccccttgctccccatccagcctctctccccatctcccctctctgctatggattgaatgtgttcctcagaaattcatacgctgaagccctaaccaccactccctcagaatgtgaccttatttggaatagggtcgttgcagatgtcatttgttaagatgaggtcctcatggtcgagcctaatccagtatgactggtgttcttataaaaagaggaatttgggcacagacacacacacacagggagaacatcacgtaaaggagaagtcagatcacggctttgcttctgcgtgctaaggaatagcaaagattgccagcgaaccaccagaagctaggggagcggcctggaacaggctcggcctcgcagccctcagagggatccagccctgccgacccatgatctcagacttctagcctccaggactgcggacaatcagtgtctgctgtttaagcaaaccggtttgtactttgtcgtggcagccctagaaaataaatatcaccctgcccccacccacatacacatacctcacac

SEQ ID NO: 110121 - DNA, 1046 bp, Homo sapiens
ggggcacagttgttgcaggatgattggctgccaccataagtgggcaaaatcatgggcagatcatcctgcttccttaattgaatcttggaatgcattcagaatcttcaacccaggggtctggcactcaaggcgtttgtgacctggcactgactcagtacgctctagccaaattgggcactcatggctcccagatgctgtgccaagctttcacctgcttatctttgcttgcactgttcctgccacctggagggacttctcttcacccatctctaccttgagaaatcctctctgtcattcatggccaactcagacaccccttcttcatagcattctttgcccgccggcctcaggagcaccctctggcactatcagaatgcccagggctcctttccacccttttctcctggccacaaccctttctcctggccacacccctttccgcctctttgcctggtcctgtgggtgctgtgcaggctccctcagccaagctcggcattcccaggcctggctccgagtaggtgtttgtggaatgaatggctaaaaagtaaagcaaaaagctcatgaaacagaggggaaatccaaaactgattaaagagaaaaaggattctaacaaaaaagaccgtgagtgctgggttcacactgcctgggttcaggtcctggctccactatttaatagccctgtgaccttggacaaaccagtaaaccgctttgtgcctcagtttccccctatgttaaggataagcgtactacctaatcagggatgttctgagaattaagattcttgaaaacatgtcagcttcttggaacggtgcctgcctcgtagtaagtgttaatatacgttagtgcaccactcccctcccaagctttcccaactccctggcttgtcgaagatagtgtcagaaactggcgtttttccgagctcccgccagatgttcacctccgtttccatcctgcagttgcggcgaaatcagtgggagatgttttcctgaggcggctccatccttactgtggaagggagaaaagacgggaaggtccacggaccaagg

SEQ ID NO: 110122 - DNA, 3178 bp, Homo sapiens
gtcggtgctcagtgacggagccacggagaagggaaatcctgactctgaatcctgaatgaaatgggtttcactctcagagttactaagcacttttcatggagccatccgaggagaacactgcagggataatagcaatgctaacgatagtcatgggaatacaggggtgtttctgttgctacagctgaacaggaataataatgttagttaatgttattggggtgcaccctgtgccaggcactgtgctcaatgcttgctttatatggagtgtcactgaatcctcacggcaatgctgtaaggtcaatatgaatattactcccattttccagatgagaaaactgaggcacagatggtttacacatggttcaaggccagcctcagagccaggatgtggtggagccaggattccatgcccagcctgaagctctttaccaggctttccttctctgtggccatgggggctggggcggggggggcatctgagcagcagagggcagtggtggggttgggaggggcacccccaggaggatggggcagctactgtgtcagagtgggtgggggtgaggcctttgctggacgcccaggctctgccctcctttgagtagatcatcttgtccgtggaacctggatagaggccttaggctgaagacagaggagaaatctaagctttttgttttcagagagaaaagagacagcatgtgagttttgagtggaatctgatcctagagacaggcagccggtaccccagtcacgagcaggaatcctgcgggcccagtgggaacttcccatcccaagggaatgcagggacaggctgctccccccgccccgcccagcccctgacctccccctgccttccctgcttcagccacaaaccccttgaccttgttgtttcaactgcagaacaggctccccagctattgttcttggagatgattctgtgatcttaggacctttgagaaaagaacaaacagctaggaaaacacagggtggttaaaagatgtttgtgatgtttgtgccgtatggaacaaaagaggcattcgggagactcagcattgttctgcggagtgaggacgaaacagccctcggaggcctcctctcatctgggggcatccagctcattgtcgtggaatgtagctccagccatcgcttcattgtcaggccatatactctgtgcggggcccgggctaggagtgtgtttacacttgattcacttggaatcctctcctggtttctgatccattctttctgtcttcttgttgggaaaagtggctcatgttatcacccagtcactcatttcatagcagctacccaggtcccttactggatacccttcatcgcctgtcctcagcaggaccaataaagtcatatttatacagcaatctaaggtcacatagtcattttatgtgatttcccttattggatttttatatcagcttcactatatatgttatttccttttttttttttttttttgtttgagatggagtctcgctgtgtctcccaggctggagtgcaatggcgcaatctcggctcactgcaacctccacctcccaggttcaagtgattctcctgccctagcctcccgagtagctgggattacaggcgcgtgccaccacacccagctaatttttttttttttgtatttttagtagagacagggtttcaccatgctggccaggctggtcttaaactcctgacctcgtgatccacccgccctggcttcccagagtgccgggattacaggcatgagccaccgcgcctgggcttatttccattttttcaaagacaaaactgaggctcaaagcagagaggtgacctgcctgctgatgtacagctaatgacagagccccagaggaacgcagtgctcttagaaccccactgaagattcctccttcagggaactacgtttcgaaagtttactacgtcacctccttcgggaattctgaaacattgtgtactcgtatctttacccgtgaaagctgtttctgggattggcgctgtcaactccaggcccaggtctctctaattctgggttggtaggttttgcattaatgagatttaactcaccatggttcatttctccctttgcagtcccttgtgtatgcccctggggcataggtgcctgtggcaagtctgtgaaggctgcattctcccccagcttggaatgcccagtgcccctgctgcagcccacagcccttcagaaggtgattgcaaggaagccaagcctaacctcatcttccgttccttctgccatgtccacacctggcgtcacctgtgcagcctttcctgcatgagtcatggccaggcaagctcggtgacatgcactgggagcccggtgtggaagctgggaggcagtcattgtgtagtcacgctagtggtggccacgggccatggggctcctaaggaaattagaaggacctttggaactgccttcctccccaccctgctctgtatctccttcagagtttttctgataggggtagtgctgacttgttccttgggaaggcttggagatttggggtcttcgcctgcatcttatcaaaatccctgtgtctcactggaggagtaagaacctgacctgccatcaggaaatgccttagatgagtgctcagcaccggtggcaggactggggatgtttagttaagataagagaaagcccaggggggcattatctctgtcttcatatgggacaggaaatgtacttgttccttgtggctctagggggcaggacgtggagcagagagcagaagcgttaaggggtgaaattcagcatcatgtgagaaagaactcactaaaaagtcattttcaaaaagtagaacatgctgccctgagcagagtgaatttcttcttcctggaaatttccaagtgttattccgacggggaggctgtggcccaggggcccaggaatgggaactccagtgctgagtggcactgagatggccactgacctttacacttattggcatgtaattagtcccctccacagtgtcctgtagtgacagctacccacaagagctgagctccgggcaggcaccacagagggaaagagggccagggacccctcattcttattgtttccctggatgtgtgcatgcatgtgtgcgtgagagaggggggtgcatggagtttttccctttgtttccacgctaccccgacccctactccacaccaaataactcat

SEQ ID NO: 110123 - DNA, 1995 bp, Homo sapiens
tggggctgcgttcgtgagcaaaacaaacgtggtccttgcccccacggaattcacagtctagagggggaggcctagaaacactagacaaattatcaggggaaaacaaagttattctgtgccaggcccaaagccccagagctctctcatgctgccatcgcaaaccatttcccttccaggtgagtcctaggtcttggatttatacccatcgttctcccagaagcatctcagtccagcccccaaccatctggtcagttcctgtagaaaaccttgtcattttccttaaagcagctgacaagcacctagaacattgccgtttagtatgagggactctacctgagatctggcttactgcgtaaccaccctggccctctgtctctttgtctgtaaaatgagggctgtggtctagacccacacttctcgaggtgagttccatggaacaccaatcccagaatgtgtcctggaagaaaagggtgtaatgatcaagtaagtttgagaaatacgtacattttattccccctcttctagattcacggagcacactaaaggctcctagaagtcctgaagtacacagtcctgtctagctttgttgagcgttagcttttttaagctttttgacccagatccctttgttcacatgatacctgttttcctgaggcattaggacccttggaatttgctgcaaaggtctttgaagggccttctgctctgtgtgctggaattagggttctggtgatgtcctgggcgggggacagaagttgatatggggcagtggcccagaccctgtagcatctggtgcccccctttgtgattatcgtgcccgcgtctgaggagatggctggctgtgaatttcctgcagtgggctccggagacatttaagatgctcactggtggtggcactgccttggaatccgcaatcattcttaattggtctcagaaccatcagctggcgaaagcatctgtcaggggaaacttgagcagcgttcagagtcccattaataattcagctgacgagctccttcagacgcaggccttgcagccctcaggactcactcgtcttctgcctgcagagatattccagggaggccttctctgttatatcaccgacgttagtgactcaggcagtagcacctccgtgttctcccagaatccccaaagcctcatcagtcaggagagggaagattggtacagattaagccctctgtaattccgtcagccggccaggagaggggggcttgctgacggggaggctctggggagtggatgctgatggcggggtttaggcagccccttatgctgtgctggggggatttgtccactatgatggataggtggtgggcccctccacttcttccactgcctgtagccattcaggaaaaaaatgtagggtttttttttttggtaaattagaggcttgcacattgaagatacctaaaaatattggttgaatgagttctagctgattagatctggttgtcattcccatttagtagaatgatagaatgacattgccgaatgggaacatggagatcatctcctccagctccttcatttttcagtgtaggaaagtgagatcagagaacagtgactttgtcaaggtcaccaagctggttcgttgcagaaccaggccagtgcccgggctcctggcttatagcacctggtcctttccagctggccacaccctgtctctgagcacagagggctcagtgtccttcttggagggctgcaaacagccccaggcacagtgatgtggagatagcagatgctcttcccactctgctgctgagccaccaaggggagcgtgtcgcccccgctgtcacactgatggggtggtgaggggagtttgttacgtgccgtcaataatgtgaaaccaaaaaagctggaaacttccttctttctctcagcttcctggctaatttgtggtgctggggctggcagtcgcctcccccttcctgtggagtcgaaggaccttgggactcatcccttctcacctgtttg

SEQ ID NO: 110124 - DNA, 1001 bp, Homo sapiens
acacccagccaaaagtaaatactttttctttttatccttattctgtaagcttttttccattttgtaagtttttaattttttaaaacttttttgttaaaaacaagccaaacacatacatcagcctaggcctgcacagggtcaggatccccaagacgtcactaggcaatggggatttttcagctccatcatgatcttctggcaccatcctctgttcgtgtgttctgtcgttgactgcaacgtcgtcacgtggtgcgtgactgtatacaatgctgcatggcaacaagttgccgagagtgtgcatctgggagcgtttggcacagcagctcgtccgcctctgcttgttaggcgtagcagaggtgactcaaatatgaaatgtttatcatgctggaagctgaacatctagttttcttggtgcagacacattcatttttagagttcaatagatgctgtcacttatgggacacatttctcctgaaggtctttgatcacatttgcctgtagaacttccagaaactcttggacacctattgaattctccagtgttttccttcttacttgagaagaaagttcccacccttcttccccctctcccactccccaccccaagggctggctcagttatccacctgccgatgtcagctgctggtactccagggccattcaggaaaaattaattttcctttttttatcagagcgttgggacttgcagccatctgtctgctcagcaggcggggcacctggggcttcagccgtctttctcttcacatttcatgccccttaatctgcctgattccttctcttgccaccctccttctgtcaggtccctgagaccatgctggtgcttacacttgcccaccacctccaccccaagcagggttttttatttatgatgttgtaagcttttgtttcactagaactcagcaggacgattcagtttacagaatgtagttacttctgcccttgttaaccagaaaatctagtccatcagaatatatggtttt

SEQ ID NO: 110125 - DNA, 1564 bp, Homo sapiens
gtggccttcctggcagctccctgcgtcctgtgagctgcccacttcaccttgtgtgcttctggccagggcttatagcagtgctgtcgtcctgtgtgcttgaacggtgctcaactgtgtgcaaattggttttacattcatattttaaatttgctcctcatactaattcagtgacataagaacgcaggtggttttatccttgttttgtagaagacactaagttttcggtaagttgcgttcacccggggccgcttggtcaggactagaacccaggttcctgggctcagtcccctgcctgtcccctctgcccctgaggtcctggagtgatggttcttagaccacatcctctatttcctgaattaggaaatagcagctcttgagatgttttgcagtctcctacccagccaccttatagcctgggtcactgagtcccatttatttttttgggccggggtgggttgcagtatacaggtgtatgttaaagatagtcttttcattcaaacctataggagcactgagggtcctacgttggcgtttgagcgctgtccgagtggatctctcatctctgtccacagtcacatttggcaaaggctgcatttctgctctgacgtgtggggctctctccagcaaaatgatgttatcgcttttcctcccagcatggtgacggccctggtgatgctgtgatcagtgtgtaattaaaggcagccgtgcatggctgctctcagactgttgctgagggcttctgatcattgggaaatctcagtggtgtaggttttagtggaaactgtatccagccaggccattcatagcttctacaccatagagggaatgttggtcattatcagagggcatgggtttcacttttttatgtctgcagcctgagtcgggtgaacctttctcttaccctagggaagcactagaataatgcctgcctgcctacctgactgccgtcctgccatccccgtctgtccatccgtccatccatttatccatctaaggtgacagcaaagatttactgtagaaaatctctttcccacagtaaaaacctcttttctacagtagaaagctcttccagtctgagtttccgtgtctgccccttcagtcacaggaaccccatcctgctatgtactgcaaaagcagctgacttctgccacagtgtcattcccgtgggtctcagcctcctggtgctgaggcctagggactgtgttccgagccagcctgggttctccagggaagtgtggaggtgcccagtgtgtcatctgccctggaaaatggaagccacttgtacttcactgtcctccctcccatctcccaacacccctttctcttcactgaaatgctgaacaaacctccctgcccctgctgactgactcttttttgataaggggatggaaagatagactcaggtgcctcgggtccagtcccttcctatccaccttggtttcctcctgtgtaaaatgagaaaggtgaattgaactatctttcctaactctagcagaccattatagattctgttgatatcgtcgcagaattctgggaatgggagggacaccgagggtatctcgcc

SEQ ID NO: 110126 - DNA, 1043 bp, Homo sapiens
tcagttggtacaagggaagaaaatagagagaggcagcactaacctctagccaagcacactttccatctctctgcagattgcctcatgtcaggatgttagcgtgaccgtcacgtctggaaggctttatggctgatataaattcaggtccgttgttcactaggcatgaagccctccgttgtaagggaaccagccatcaccctcattacgagatgcataaatgtaggacttgaagataaaagctattgggttcttttcgtctctctgacacctgaagatgaatttcttgaaccttgttctcgtgtttaaaaaaaaaaaattaaccaagattgagcctgtcagtttctatcagagttaaatctgagtaaaggagaaaaaagcttgccaccttttaaaatagtgattccttcactccctgggagttagaaaactgggctaagtgtttttgtgtagcccgtgtgacctggaggccgtgctataacccctgcaggaattactcataaaaagggagggatgtacctgccctgtggtagagatcagaagtctactctgaggttgttatttttaaataacatcagtggaaaaggtattttaaaaggaaaactctgtacagagaacccaagcgggattgtgttgctgtcattgtgaccgtctcttacctgatggctctgcctcccgggcaggctaggagctccgggatgacgtcccaagactcgggcgcatagcgggggctgctgaagatcggagtgtgaggctgagagatgaggtccaggtggagcacgtgaaaagcttcctgtgtctgaaaacacgactccttccagttcttttgtctgtctgcacattatgagtattttggtactactgaatccgtttttaaaagttcaccacgtcgtgcctgacacaggtgtctcctgaaagaatgagtgaggaagtgaatgcgtggaaggggtgggactgggaggcagcccttctgttctgtttatgccgtgcagaccaatgccaggcacttcgatgtttgttgagtgaatgcaggaacagatgtgtag

SEQ ID NO: 110127 - DNA, 1028 bp, Homo sapiens
aaaatcaataaatcaataaaaaaaaaaatggcccatattccccaaattgtcctaagtcctggaaaacaaagaaagactgaagaatcatttcagatagaacacgtgggacaactacatgcaatccggggccaggaactgtgtttttgtttttggacaactgacacattttgaatgggactgtggatgaaatagtattggggtgttactgctagtgtcctgactttgatgttgtactgttgttctgaaagagagtgtccttgtttcttaggaagtgcacgctgaaatatttatgagtcaaaaccttgttttctctttgttttttgcactcagctgcagttctgtcagtttggtgcattgtattttatgtctttaattaaaattaaaataactcaaatgttatttaattagaagaaaaactaatgaattaaatgaaattaaaatttaattaaaattgggaaatagactaattagtgctgaagtgcagtttggtaaacagaatctttgcaatgatggagtctgctgtgggaagtgactaagggggtttcttggtggtgaaatgtgtggggacttctgctccatgggaaggggagagtctgtatttccaatgaaaattggagcctggattctcagcacaggggccagtcctggacttccccaccttcctgtgtcattcttatcagactcataacaggaggggctcctctcaaccttggtaaacagagatgaaagcaatgaaacttcacctgtcagggaggaggcagctagagaatggggacagtaagccctgtgtgtgaggattcaatgaggcaaaatatgtaaagtgtgtagtccagtacctgagatatagggacttaattatctcctagatgatgctagatcgtccatcttttttagaagatatagtatcaacagcactaatataacgatgatgatagatcgtccatcttttttagaagatgtagtatcaacagcaccaatataacgtgacattttgttaggattcctggctcaggagacaggaaagctga

SEQ ID NO: 110128 - DNA, 1084 bp, Homo sapiens
gaccaattttgttaatgttaaaggaattaaagttaccaaccatcatgatggtacttaaaatatgaatgaaggtacaagtgttttaaaaagaaaacaaaactcaaactggctcccctggaaaaggaacatcccttttccttttggtacgtgttcagcgtttctgtgaccacacaattaacgcctggctttataactgaaatcacttgggaattcttttaagattgttcaaatcttccatcactgacagttaccaaactctgtacctggatgtttatcacttaactattaatgactccagtaaagtcacaaataactgttgtatgaattgcacagaggcaacctcatctcttgatattggactagaatattcagaaagcaaatttgccctgacctggcattctgggaaccagaccatgaatacagacctgtggggaagcgacctgttttggaagaggagagaaagggcagggcatggcgtctctgcctcatcagagcagtacacgctttttgtttgtttgtttgtttgacatccatggagatcgggaaactgcaggtttaagagtacaatcaagacaccaataatccagataccacctgcctggataaggttaaaatgtcttagtttccataggaatgccaaagtttttcgttcatgcaggcgtgtaggaaattaaaccccaagaaaggccaagtcagatttcttaatccaccccaagtgatgacatttgaagtctgggtttatggttggaaagtgaccgggtaaaaatagcactgactgactcaacaaatacaccatctcgggctcccagagctgttgatgtgtgcggacgctggtaacagaccccagggcttggccgttcagaacctgccctcctgtgggaagggtagggctgccaggagaacttaggcttgcctgtggcatctcctgcccaggtgcccagctctttccatgcccagttcccgaagcgtgcggtccaggctcaccctgtgcctttgctggctgttaactcagagggaagcccgttggctgcttttgctgttgggtttggatggtctgtatcactttaggcagtagcaagttcat

SEQ ID NO: 110129 - DNA, 1050 bp, Homo sapiens
tataagatatacgatttacaaatatttttctcccagtctgtggcttattttcattttaatattgatttattttttatgcacaaaatttttaatgttgaagttcagtttatcaatttttttattgtatggatagggctttttgtgtcattatctaagaattctttgcctaacccaaggtcaggaatattttctcctgcaacatttgttttctagaagttttatagttttagctattacatttagatctatgatccattttgagttaatttttatgtatgatgtgagataaaggtccaaattcttttcttttattaatttttttgcatttgtatatctaattgactgtcctttacccgttgaattacaatagtgataagtaataataattaccttcacatttttgttgaaaatatattgactataaatgtgaggatttatttctgaattcccaattttattgcattgatctataagcctttcctgtgccagtatcacaccgtctggatttctgtggctttgtagttatttttaagatcaagtagtgtgaattttccaactttgttattatacaaaattgttttggcttttttaagtttttgcatttccatatacattttaggatcaattcatcaatttctaccaaaaagtctgctgggattttgatagtaatttacatatcagtctgggaggaattcccatcttgacggtgttgaggcttccaatgcatgaacatgaaatgtctctccacctatttagatcttctttagttttctcagcagtgttttgcagtttttagtatgcgagtcttgtactccttttattaagtttattcctaagtattttattattttaggaatggctttttttttttttttagacggagtctcgctctgtggcacaggctggagtgcagtggtgtgacctccgcccactgcatcctccacctcccgggttcaagcgattctcttgcctcagcctcccaagtagctgggattacaggcgcacaccaccactcctggctaacttttttgtatttttagtagagacagg

SEQ ID NO: 110130 - DNA, 1190 bp, Homo sapiens
ctgtgttgcccaggctggagtgcagtggcacgatctcggctgactgcaaccttcacctcctgggttcaagcgattctcctgcctcagcctcccgagtagctgatattacagtcgcctgccaccacatttggctaatttttgtatttttagtagagacagggttttatcatgttacccaggctggttttgaactcgtgaccttgggtaattcacccgcctcggcctcccacagtgctgggattccaggcatgagctaccgtgcccggccaggatagtgactttgataccatcaagctgagaacgtttatccccacaaagatccttcgtgctgccttttacagccacacccacctcctctgacccgtagcaaccactaatttcctccttcatttctgtatttcaagaatgtgtatcaatggaatcctaaagtatgtaaccttttgagataggccttttttctcaacataatcctcaagaggttcattccagttgttgcgtgtcagtaattcactttttaattgctgagtcgtatttcatcatgcgaatataccagtttgcttaaccatccatttaaggacagcttggttgtccccagtttgcggctagtatgcataaagctgcattttgttgtatggacataaatttttatttctctgatataaatgcctgaaagtacagtagctgggtcttttggtagttacttgtttcattttataaaaaattggcagacttttccagagtttggcgatttgccagagtttggcagacttttccagagtttggcaaaatcccaacagcaatgtttgagtgtttctcaagtcccttctaaaccagaggtcctctctccctccacctctattttctgacttcgcaactggggaggaaaatttgtgctctgatgatcttgcgtgattgggattatcttgcatgtgaaactgctttataaactgtccccagctgggtctattagtgcttcctttttgtgggtgtatctgaaaacagtgtcacagaatcttagcggagggctgtagacatttattcactgtctgcccctgcgtttcctagcctggctggattctgcagggctgctgggtcatgagggttgccacaggtcaagcgtgttaatgaagttcgtcttggcttctgcagcacattgcgggttgtgggtagtgagatacttgagttgcctg

SEQ ID NO: 110131 - DNA, 1052 bp, Homo sapiens
tccggctaattttttttttttttgtatttttagtagagatggggtttcaccatattggccaggctggtttcgaactcctgaccttacgtgatctgcccgctttggcctcccaaagtgctaggattacaggtgtgagccactgcacctggccatcattactgattctttatcttctttatattcccaacatgtagctttttaaacatttaggcaaagtaggagttatcctatatatcaaatcattctgagtctttttttatagatgaagatttgaagttgaatcttcatttcaacccccatgaaagaaattgtacaaatgaagctatgtcatgattttttcagttaatggctcacgtccccattttctgtgtaattatagtctttgaaaattttttgaatggttttattgagtagatgaacctccgttcactttctcatttccctgttctcagctagctagctgctttctatattttctagtattgtaaattatacgatggatatccacatgcatacagattattttctctcattaggattcttccctatgatagctcccaagggtagcattactgggccagaggtgacccttataaggccagggtgtgtcaacccccagccgcccagggttgtcgactcacacaggtgagcttctgtatagtttgaagcctactggtgtctgtacagttctaagcctgttagtgtctgacctctcacatgggccacctcaggcagccacttaagagcttcgagacagtggctgtccccactggacaggaaaggaaagggaggagctgagaggttaggccgcttctccgagttctccagcgatctgtgtcctccttgccctgggagttctcagtccggagcttatgcccattctgatgtccagatgtggacacccagcctcttacacatgcccagccctgtgaaacttacaggacttggcatccttgcctgtcttctgggccccatgtcgcagccccacagaggggacctggctgggatagggttgggctggtcaaacccatgagttttgccctgatcgcccc

SEQ ID NO: 110132 - DNA, 1052 bp, Homo sapiens
atgtgcttccagcaattcttttttatttttaggcggagttttgctcttgttgcccaggttggagtgcagtggtttagcaatctcggctcactgcaacctctgcctcctgggttcaagcgagtctcctgcctcagcctctcgagtagctgggattacaggcatgtgccaccacgcctggctagttttgtatttttagtagagacggagtttctccatgttggtcaggctggtctcaaactcctgacctcagatgatccgcccgcctcggcctcccaaagtgctgggattacaggcatgagccaccgcgcccggcagcaattcatttttacatgtgccccaaagccttttcctaagaaaacagttattaggagttactaaaatttgatagtcataaaataaaatgagcggtccttgagtttcctgtggcgtctggggtgtgtcctgccaggaagtctggcctggcacacttggcagcactggggagttcctaccgagatcatttggaattcctgcagtttttggaaggacactctgttttcagacatcattcgtgctgtcttgagtttgtcatgattcttaactgctgccttttttgcattcattgttttttaatcatagaaatgagtgttgttttgtgctttggttgatggttttgttgtcatgtaattgctgcattcttgttacattggctattctgtttctttcatagcattcgtttttctccaggaaagtgagagtggagtatgggtggagcctgaacccttggtctcacccaggagggctgggtcagaaaagcctgtgctcctctgagttcctcctggaggtcctgtctagtgtttgccccagaaatccaaattctttttctgtgtttaaagctctcctcccgccttcccttctgtagcatgagggtcatccttctgtacctaaactatttttaaaatgtgcttactttttttttgagacagagtctcactctcgcccaggctggagtgcagtggcacaacctcggctcactgcaacctctgcttcccgggttcaagcaattctcctgc

SEQ ID NO: 110133 - DNA, 1063 bp, Homo sapiens
tgctctgtgcgccggtttgtcttctgttttggtttctagcctgacacagcttttggatctcacccacttgtgactccctgcagtcgtctgtgttttgtggacaatgaaaggctttgctccacgtccactgatcggctgctccagaaggaagctttgcagcctcctcagctgcaggcccagagtcatggctccctccaacccattgcctggccctgctcagcccacttggatggagctgagtccccagcccgactgggtcctgctgggggctgagctcgtgggtgcgagccgtgtggggtagggaaccccgctgctgtctcccacctggctctgcactcctgcagccccagtcctgccgtgactgtcacagggatctccaggcctggtcggcggctccctgttgtgcgagcatggtactcggaaaccgccttttctgctggtttagtccgactgaagctccttgctgagggactgcattccctctgcaaacctatggccttatgggtctttctgatgctgctgttatcccctgctctgtccgcagtgctggtgaatttcccagcctggggcagttggggacagggtccgagtctgacttctttctctttcctgtgcagcgggtgtgggaatgggcgtgtgtctcttgaatgagtatggtgttggctacagatgggccgctttagatcctggctctacctcatctttctgggaggtggggggtagttgtttacattctctgaaccacctcctctctgtagcaggggcccagtcctatcacctgccccaaaacattggtgtgagggcgacgttaagtgactgaatgtgcacagcgcagctgtttgtgcttgacgcgtgctaggtggacccttaggcactgccctggccccgtgaaggccctgcaggtctgtgtcccacccttggtggctgtgcccagctttagcatgccacctcatggtcctgctcagtggctcacctgctcaccctgtgtcaggtcccagcctggcgcaggtggctgcccctgaatctgggccttgcgagcctgttgcctggatgcccaggttcc

SEQ ID NO: 110134 - DNA, 1099 bp, Homo sapiens
cagctaattttttttaactgttttgtagagatgggatctcaccttctttcccaggctggtctcaaactagtgatcctcctgccctagcttcccaaaatgttggactgcagttgtgagccaacacgcccggctgtgcatgtcttttatagcatgtattcattttttcatgtattcattcatagggtgttgttaagtgcatatcctgtgccagacactgttctaggtacttgtgaacagcagggaacagaacaagtttctgccttcatggagcttaaattctggggttgcagggaatgtataggagatggatttttaacaaataaatatggagtgagtcagattgtgatcaattctacagagagaaataaagcaggctgcagagatagcaagtgtgtggttgtcagtgtggggagttgttcgccgtggtgcacgggtggccagggatggctccacggataaggtgccatttgtgcagagcctgaaggaagtgagggagccacagccctctgggcgggactccgtccgaggcacctgcaagtgtgtgggcctcaggttggagtgtgctctgcatgtttgagcaagtaactatcctgttaacttgtttgtagtctctctgtctccctcctggaaggtaatctccagaaggcagagaccttacctaccttcatctattgaggtttacgggaaccccatagatgccatccttatttcttggcctgagttggaaatgatagagcgggcaagcagtctcttaacctgggacacaagaactggacagacttctggaggcacagacagctctggcagctgcttgcctccctgcagggatgggcaggttctgcatacatagatcctcctgccttaaggaggagttagtgtgcaaggaggagaggaggatggggcagggagcaacaggccggagtgtttgtccaggagagcatcctccatagagaagcacagaacaatgaagaaggggtgcttcctctttttcccgtcgacactatagtctcagcactgtttctggcacattctctgttctcaataaatatttatagttgactaataactatagtgattaaacccaggatatcctagaaga

SEQ ID NO: 110135 - DNA, 1145 bp, Homo sapiens
aaagactccaaatattctggagaacctggataaaagtttgaagggctagattgggatttgaagacaaaattgtaggaaatcttacatttttgcaataacaaacattaatgaaagcaaaacattataaaagtaattttaattcaccacatacttatcaatttcttgatgcttccaaatgacatctacagatatggttttgtggacatctttttctgtttacataaatttatccacttaaaatgtgataatgtggagacaaagcaagatttgattacataaacttttctctgcattggtcttttcactatcttatttgctaacttttcttatttttcttcaacctccccaccctccattttttggatattaaacagggaaagcttgctacattataaagattgttggcaccatttattttacacaaaggctaaaggttaacttttggaaatgatgagctacttttatatatgtgtttactcatgctttgtgatatttctggatcattccagtcataaagacttattacatgtactatttcttgctacctgtgaaaaggtatattttaaagaatgtataaccaacagtccatttactttttattagtatgtagaggatttgtatctaattcatgaatgtagttttacagtagtttgtcattgtaaatggagcaaagtacattatcttctaaaatgtacattatgtaagaattgtaaatatacttaagtaatttgtatgccaaaaaattacaataagtcaataaagatctcacctctggcttagttctttcatggtgatttacattttcttgtgaaatacactgtgaacatatctgtcaacagcagttatttttaaggtactattatttttaaggtatttcttcccagccctttcaaatccacattcatcctatttgctgattacttcaatcaagaaatccatttggatcttttaagtatataattctctttgttcacagagctgttatagcccctaattcattggcaaaaagataaaaggttttttttggggggtggggggaggggcttgctctaagttttttccattatgattgacattaatgttcctaatctatgcagcacattcccattttatccttttagtaaacagacacacacacgtttgtc

SEQ ID NO: 110136 - DNA, 1387 bp, Homo sapiens
ttttaaaaacttagagctgtccaggcacatagaaaagttaactgtctgaggggaaatagaatgtggttaagtttaaagaatatgcttagtattataaatgttgagtgatgagttgtttaccatttataataaactgttaaatgtatttctgggaacattccatggcagcatattctgggttgttgtttatgtgttccaatgtagacaaattatatttgccttgggaaaaattctaagtaatcaaaattatatttaaatattaaaaaatcacattgaagttcaatttgtgttagctgtattaaatatcttggtcactattgttcttgtaacatttgcttttgacaacacattttgagatctaagaaaggtagtacattaacagtgcattaattaatgttttgttagaaactaaatgttaacaaaaagttttgtgtgtatgtgaaggtggcaacttccttttgtattatattaacactttttaaatgtattcagtcagtgaaaccaatgattattatagcaccaacactttcattcaaggaagcatttgagtcttataatttgttttgcatggtacaatggttctactaaaatatacttgtgtaataggtactagatgatttaaaaacaaaaccggagaaaccatttaaaaagttccatagcttgttatacaaaatatgcattgctaatagtagaagccatatattgccattgtactgttgtaatacttaacagtgctcatctggtgctacctgtagactatttggtattaacgtctgctagacccttcttcctatttcttcttgaatgtataatgtgtgccttttaagttacttctagtgttgaatggtaaaatctttgtggtatttttgtattatactctgcactttacactttcttggaaaggaaaattccagactatccagtttaaatagtcttttaaaaatatttataatgtttacaataaatattttacatattttaattcaacatctgcaaattagaaaaaatattttatatggtttgttgctatttaatgttgctctatttattttctatcttttagaatggttaaaatgagaatagcaatgtttgtcttttgatgtggaagtgaacttttacaaaaccatgggtataattggattgtcttaccagctgttccaacgtatcaaccttttattttagtcatgtcaatatgagttagatgttactctcagccacctgttaataatctcttcttactgtttttttctttttaaagtagactgatgaggtttaattgattgattcaggtcgggaataaatttccagggctaaatgaaaactatatagagatgttaatagttgctttttacctagactaaatacaaaaagtgactagaaagtatta

SEQ ID NO: 110137 - DNA, 1032 bp, Homo sapiens
agccaggaattgtcaggcatctggaggaagcaagccactagaggtattgcggggatgctgctgcagtacagctaaaatgcagtcgtcagaagatttttgttgtcctttcttatgagaattgtatgaaggtgagatacttatctttgtacctcagattgctgggtttgataaactaaaagccagattattttaatggcaaataaaacacaattacattagtacatgtattacctgtttatagactttatttatgacatttatattatataatgtcatctaaaacactattttatttatttttaggttacgtttagcaagaatgaatgaagagatgcgggaatcagaaggactttatggacagccaggtcaatattctactaataaccatactgaaatgcagtataagaaatgcattcaggaatttatcagtttacaactggaagattcatagttctttagcaaactaatgtgatactatagagtttttataacccacttgtaaattgtgagttgttagctttgtactgtacttaactgaatccttgggtggctaatcccgggcctttaaacattcgtaactcttcctatgacagtacacattgacttgctctatttcactctggctgctgacttctttatttgctgtacggatgtcttccatatacattccagtgaaatgaatggaatggtaaaaatattcttcatatacttacagcagcaaaatagttgttttctttttggaattctttttagctgtcaagtgaatataacaaaattgttttctttttgttattcagggaatttctataaattacgttcagggaaaaaaaaaatcaccatgtgtctggcatataaaaagccagtatggaaaataccaagaaaaagtttactgatgagttttgtactacaatctaaaaatgagttgaagatttaaaatgaaaattcaccaggtggagaagtccatgatgtgagtggagctagtttgaaaggctgagggcaaaggtctcattttatctaaagctaaagctttgc

SEQ ID NO: 110138 - DNA, 1026 bp, Homo sapiens
cagtagcaatcaaatatttaaaaaaaatcataatatgttctgaactggctttagtattgtctttgcttcaagagatgggttagaaaatagaaggaacctctgtgctattaatagtagtggtttctgagcaccacttcggttgtttcaagtttttttgcagtggaagagaattccgataatgaaagtatataatgtgttttgctagttcacaaactgcaaatgaatctctattagaattagttcttgggaagaaaataatataatttataatttctctgccttggctgagggatattttttgttttggagagaaggaaatggaaatgctatttgagtaacgaaaaccaattgtttttaaaaagaaatgtattgttgtttcttgttatttgcttttgtctatagttatcctcttttttcctttaagggctctttggtgacgtgtgagttcctcctacagaatggtgctaatgtcaaccaaagagatgtccaagggcggggaccattgcaccatgccaccgtcttagggcacacagggtaactgcagtgctttcatatttaaggagactttatttgaaaaattattttgaattaatgttttagtttttcttaggttaaagttttcaggtagtgtttgtaaagagatgtgttccatgacttattttgtcacgatggaatttgaaagttaaaaaaaatctctttcagaaaaagctactattggttttcagatacaaaaatttcaaggcttactttgaccttaacttgtcattaaatagatcagttttagtacttaactttctctgttattaaaattgtgattttgtcagacaacttaagcctgtgtttgtgtttatgtatgtatgtacatatacattatttccatagcatgcacacacataacctatttaaagataatttgatgactttgtaatttttagttttttccacagggtagctaaagtcaaattctaaactaaattcttactttgggttgttgacattgtgtcttctggagcgatagtaagattc

SEQ ID NO: 110139 - DNA, 2332 bp, Homo sapiens
ttcacagtccatgagctgtttttaagtcttacttttccttttcttagaaatgttagtaacaactagggccgggcgtggtggctcacgcctgtagtcccagcactttgggaggccaaggtgggtggatcgcttgagaccaggagttagagaccagcctggccaacatggtaaaacctcgtctctactaaaaatacaaaaattagcagggtgtggtggcgtgtgtctgtaaccccagccacttgggaggttaaggtaccaggatcgcttgaacccaggaagtggaagtttcagtgagccaagatcgcacccctgcactccagcttgggtgacagagtgagactctgcttcaaaaaaaaaaacaaaaaaaaaacaaaaaaaccacaatgaaatgttaataacaactaggattattctatagaaataattaaaaattatattcccttttacttaactgattaaagttttggtcaatgttactagtttttttaatttataatagcaatggaggagtgatagtgttgtaagacacacaaatcttagtataataattgaaaaaatgttttctacctaggatatatgacgtttttccttaagagatgtaaaattaagagtttatattttctttcctcagtttataaaaatcgatgttatgaaaacgtcattcagaagcagatcgatggcagaggaactgggtttcagaaatacatatgatccttaggttaataatcagagggttagctctttgacaacaacataagttttaatactatttttagaagatattgtcctaagatgcagctggtcaagagaagttaattttttgaagacctcagaagcgtgaaaagtttacataatttgttgttcagtaaaactcttcgtagctttcatcaaattacagaatttactatgatataaaacaaatgattttgtatgactacagttcaccctacttcaaatgatttttacacaaacgctttcatcagtatcagagattgtttccattgcatgtcatcccatgtggcagggttgcaccattttgtttgtttgtaggtatttccttaacatttctaaccaactatctgtcccaaagtaaagaaacccagaagttcttccttttctagcctacctcttgatgatttgcatttagaggcaacccagctcattttatctagatgcttatttaacaaatgtcttttttaatggtaaaggcgattcctctttaagtgacaagaaaacctaagtctgtctagtaaatggcttaaaagtggaaaagcatcttctagtcatgacatgagaacagctttggataattaacttaatttttaaaaatagaaattctaaatacaatttctaatgcttcatattagtatcaatgaaaaggtagaatatctgctaattgattaataactaatgttacaatagaaatcatctcacatgaaactaattttaaaataatgattcaaatactgttttacctttcatgcttgataagaagttttgctttcttttctgaatggcttttggctgtgaattttttttatgcctttaggtcttttattgttttaataaattagaattagtaaatatgtaatacatagcatagatttttcttctaaaaaagatcgtaagtaaattgtttgtctaataatttacagtaatgagcagaaccatataaatagttgagtgaatcatttgtagtaataactttgattattttacttaggagtattttatatgaaagtaaggccaagctaatttgtgattgtctcttgttagatgtcggttctgacatgattagttttctgttttgcttatcaaatcaaactcttactgaattatctgctgaaaagttgaaaataaagcacaatttatttcaatgtttttctgtatacaagtggatactttttttttttttttgagacggagtcttgctcggtcgcccaggctgaagtgcaatggcgtgatctcggctcactgcaacctctgcctcccgggttcaagtggttctcctgcctcagcctcctgagtagctgggattacaggcacctgctgccatgcccagctaatttttgtatattttattagaggctaggtttcaccatgttggtcaggctggtctcgaactcctgacgacctcaggtgatccactcactttggcctcccgaagtgctgggattacaggcgtgagccaccgtgcctggccacaagtggatacttttattcacgatatacatttatgccaactttatgagaaaagcaattatttcttgggaaagagttcagttatttttgaggaacctcaaaagctgtaaatttgtactttaaaacagtt

SEQ ID NO: 110140 - DNA, 1370 bp, Homo sapiens
gtaatgtagtatttgaagaactttttgaatattcctgaaattttcagagtcttaagagttggaattaattgtacaaatgcatatgtgtataaaaagttaataaaatgcaacagatacttttgattattttgttaggttcagagcttaagcttgtttcttaattcttgctttattttcgtatcatgctagtcctttgcttattttgcacatttttcgttttcattcttttaccacctttcccttatgttttaatcctgccccgttttttcacacgacaggaaaaagcccgatcacatcaggtaccaaatggcttccttccctttaccctcatcttactccagtttcctttttggcacgagaaagctcataattaacttgcattccagttggattacttgcaatggatgaaaagtctctttatgttttaaattgggaagaaaatataactattttatttgagaaatggaattataccttttagttgcacatctcctcaatttgttttaatctgtaaaggaatctttgatttatttataattacccaaagaagatacagattgagtaatttacttttttttttaaacatatcttatttttttgaaaagagaaataaaggctggatgtggtggcatgcctctgtggtcccagctactccagaggctgaggtgggaggatcacttgagcccaggatttccagactgcagtgagctgtgattgcaccacgacactccaggctgagtgacagagtgaggccctgtctctaaaaaaaattacatatatgtctaaacaaataaaaatatagagggaaataagctagtaaactctttttaaaaatttgagcagtaactaggattagtccttttggtaaaaccatattgattatgttgaaagaatacattgtcagttcgttacctttttttgttttgccatttattttctctgtataaaaataaattgaagtaaaggagcattcatgttcaggcttttaatttttaccagttgtttacctatttggcacttacatgaatgtgtaaataaacccatcatctgtatagttctagtgataacgtttctacagatttagaagtttgacttttactcatgttcttgattacaagagcagtctgggactagtgatcaaacatggtaaaagataactcgaattttttgtttatgtattttttcttttcctgcccaaattttgtcatttggaagctctaattagtatgttaatattaataatatttaataatttataaatttaatatttacaacaaatatattttaaagtataatatttagaatttaataaaatgtgtattatattgagttatttcaatttgagatacaaagtgataccttatttttct

SEQ ID NO: 110141 - DNA, 1055 bp, Homo sapiens
tagaagttggaaaaaaaaaaaaacaaaaaaaacccagcttgactggtgagtctttataataaaggttactcaccagtatgttttcatgatataatggcagaattgaattttagccttcagatttcaaagcaacctacttaaagtttaacaaagtgaaaatacagtaaatccatagaaacataccattatgttaagaagaaaagaaatgaacttccatggactactacaatgagagatggtctcagacttcaaaatgaagcatagtaagtgttagtagaatattgcactgccatttaggacaatagaaggaagtcgattttgatttatacatgaaccttttcattatgattaattttctgaattacattggcatagatattaaaatgcagctaaaatcaagtaaggaataatggttaaattttcagttgtagacattacctcctatttacaaagtgaaaaaaacaatgcctttggaaattaggctgtttttaaaggagatgccatctatgtgtagtgaaatggcagttattgactagaatcatagattgtagagccccttattttcagtaaagaaatggagcttcagagacatagtcactttttcaagatcacacagctggtttgtgaacaaattgaggggcaaaacctggaactctgaactcttcctcaagtatcctatggcatttttcttacttgctgtgaaaattccaaaccatctttattttgatagaacaagatacaacttcaactatgaaaaaatacttcattttaaaagaacttcctgaagcacttacgttattaggaaaaattatggatagcaaattaatatcattttcacatgctattgaagaacgtttgccaaaaacactagtaaaattctgacttgtaaaagaatatagcatataaggccagtcattgtggctcatgcctctaatcccagcagtttgggaggccaaggcaggcagattgcctgagcccaggaattggagaccagcttgggcaacatggtgaaaccccatctctacaaaaaacaaatataaaaattagtcaggtgt

SEQ ID NO: 110142 - DNA, 1147 bp, Homo sapiens
aggatcttggtgcacaggtaatgttgcagtatatttcttgattctgttttatacattggtatttgtatttttaaagaaatttagcatattggaggtgtactagtttgttctcacactgctataaagagctgcctgagactgggtaatctagaaaggaaagaggtttaattgactcacagttctgcatggctggggaggcctcaggaaacttacaatgatggcagaaggcaaagggaaagcaaggcatctttttcacaaggcagcagaggggagaatgaacgcaggagaaactaccaaacacttataaaaccatcagatctcgtgagagctcactcactatcacgagtaccagcatgggggaaaccgcccccatgactcagttccctccaccttgtctctcttgacacgtgaggattatggggattataattcaagatgagattttgggtggggacacagccaaatcatatcaaggaggacttgatgttttatttacttaatgaagaatgaagttggatgctatagcagatttatatatgggttaaatactcaaatgtttgcgttttgggtatacccaaaaaatgaaatcaaaggtaaaaagaaccttatgttatagtttgcatgtgaaggtattgaaaaggagaatttaaaaacaaagtgtttgttttgcagtctacataactggacttatatttaaattttatacatttggataattgagttattgttccaatttgcttttcagttgagttatagctcttttttatttcctgaaaacttgtatcttgttatttgaataaaaaaattttagaatcttaaaattatagagctcttgggaactttttcatttcatgcagtcacatgtggcctatctatggctatgtgtaatagtattttttttttttttttttgaggtggagtcttgctctgtcacccaggctggagtgcagtggcgggatctcggctcactgcaagctccacctcccaggttcttgccattctcctgcctcagcctcctgagtagctgggactacaggtgcccgccaccatgcccggctgattttttgtatttttagtagagatggggtttcaccgtgttagccaggttggtctcgatctcctgacctcgtgatctgcccgcctcagc

SEQ ID NO: 110143 - DNA, 1044 bp, Homo sapiens
cactctaatatcggttaaataaccagtttttcttttagctcagaaatgtacgagaatttcactggaatgtttgtcttaactgtgttttgcaaaaggatagttgaaggatgaaaaagcttgagctttgtttttatttgctttttcgaaaagtattaaaccattaaaataagctttacaatattgcattatggattagctttaaaataatgcatgggtgattaaccacgtgtgttttccctcagattaatgttcttcaatcaaaaaggagatcagaaatcctaaaatcagtaagacattaattgaaatgatgttttaaatattttaatatgaaactaaatgtacgtatttaggtgttgaaagagcatctgctatatacatgataaggtttataattgctcttctttttgatcttcatttgtgtttcttatgtggcactggacttctttttgtctccttcatgttacagttgtttgtgtgtctcatctgttgatacactgtgaggtccataaaggtagactctatactgttatgtttttgttttcttttatcctcatatgttgctttacatgcactagatgcccagtaccatttggtgaataactaaaaatgtttggtataaaaacctgtgagaatatttcagaatttgttttgaaagttatcaacataaaaaactgttacacttaggtttttaattttttcttacttgttttgctttaaaatttttttcccagcctctttcaacatatttacatttttctctataatttttggcattatttggacttcaaaaatatttgagattgaggatttatatgaatagtatcatttggagaatttttcccttaaagttgatggtgggtcagtcttttggtttgttcttccgtatgcagttacaaaaccagtgggatgaaatttggggatcacttttttccttgagcctcttcacccacttgacaatgaatttttttttttttttgcggtggggagccctatttttggtcttaaagctaacgaaggccgggtgtggtggctcatgcctgtaat

SEQ ID NO: 110144 - DNA, 1880 bp, Homo sapiens
acctttgctgcagccctaagtcttactgtttcttgtctggagtattaaagtcttctcatgaaattggtctgccttgcattgcttttacctgccctgtcactaattcactctctgttttgtgatccgggttactcagacttctccaggccagaaggaataatttttgcctctgccttctctgtgttgccgtatttttgtacacattgcagttagactacttacgcatttattgtaaatatttatttatatattttttctatttctagattgtatccctagcctctagtccagtggttagaaaatagatatgtagtaaatgttttttgagagagtgaacggcttaatgttacaaattttatactgggaggattagctaaaattttcattatttttaaacttacacattattttcttggatgtccatatgtaagttaggaatcctcacactgcctcctcatgcccaccacccccaacaaataactattagtttgtttgatttttctgatgggaattattgtatcattttatggcctttatttcatttatgtctactttagagagtagtaagtaatagatatccaaatgtataaagtttgtcttgcttttaactactctaaatatttgagtttacttttttcctccaataatttaaatgctatataatttaaatattatataatataaaaatcctattttatatagcattttatttttatatataacatttaaatttaaaaattttatatagcacttaattttttcaaatagaaaaaaagacatatcaaacaggcattttaacattattcagtgtttgagtagtaggctatttgcagcttcttctttacttagagcatttgaaagtgaatattgtagttctctaaactgaataggctttgaaatacatgcagaagaaactagtcttttgtttctgtttttgtttttttgagaaggagtcttgctgtgtcgcccaggctggagtgcagtggtgcgatcccagctcactgcaacctccgcctccagggtttaagtgattctcctgcctcagcctgccgagtagctgggattacaggcgcccaccaccatgcctggctaatttttgtatttttagtagagatggggtttcaccatgttggccaggctgatctcaaactcctaatctcaagcgatctgcccacctcagcctcccaaagtgcaaggattacaggcgtgagccacctcacccagccagaaactagtcttatggttaagtaaagttacttagatttttcttgttctgtttttttttttaatttagtgctttaaaattatttgataaaatacagaattcagtgggaaggacatattaaaaagatattgtataatcttttgacagtattggcaaagagtgaatgattctttttttaaacatttcattaagctgatagataataacagacaaaaataaaatgtttgttgtgaatttctggagttgggagagatcctctaaaaggcaaatcttttaatttattgatctttcagtaaatttagtctaattaaaacatttacttaaaatctggccgggtgcaggggctcattcctgtaatcccagtgctttgggaggccaaggcaggaggattgcttgaagcgaggagtttgagaccagactgtgcaacacagtgagaacctgtctctacaaaaagtaaaaaaagttagccaggtctggtggtgtgcacctgtagtcccagctacccagctactcgggaagctgagatgggagcattgctgggggctaaggcaggaggattgtgtgcccaggagttcgaggctgcagtgagatctgatcatgccactgcactccggccagggtgggcaacagagtgagactctgtctctaaaaacaa

SEQ ID NO: 110145 - DNA, 1047 bp, Homo sapiens
agaaagatgaaagaaagagaagagcccggtactaaggcttagacaatgcctggaacaataggtattagagacattttttttttttgaatacatggttgattaatcactttagctatctgcgttgatagactaatattgaaatgatcactaagctatcatacagtttacttacctttcctccaaaatacttttgttgttgttatcacacagcctctggatcctaaatggtcaacttttctggtacaactctgctacgaatttactttataagctgaaggaaaaaagaatacttttcaattagtctgttttgagtttatcgatgaaacaaattgaacttaactaggtcacctcatatagttactgccaacacttgttcaactaagtaatttgtaaaactatcttcaacctgatgaattttttttttctttttcagcttgtgaaactttgtattgcaatgattgatactggaaaagccttttgtgttgcaaataaacagttcatgaatgggattcgagacctggctcagtattctagtaatgatgctgtcgttgaggttagtattactaaaattgcagttaaaaatgaaaaaaaaaagcaataagacattaaagaattgtgcattcatctacctgatttatagttatggtgatacttaaaattagaagtagaaaagtggtcaccccttggtgctctcttgtatgattctgttttctaagagaaggtgatggttgatttgcattgcgcattatctagcatggctcttctcacctagtttctcattgttgtggttagtttattaagtttacttgctgctaggtgagctgaagcacctgtcagagggcctgagcaggaagatcaagatcatgcctactagtagctgcttataggggcacgcagagagcattaacctaagtacagcgtcttaactgtatgtatagggggctgtataggttctgattagccagcttatgctcggttagcttagattccttggtatactatgtggtgttatatttctttcatgagaaataataactggtgaagaaa

SEQ ID NO: 110146 - DNA, 1075 bp, Homo sapiens
ctcaggactttgctttagcatctctctcctttcccttctctgccacctctatcttaagtagataaagatttttttttttttttttactaagtttgtttcttagtaaaacaaaacaaaagcaaacaacaataggaaaacctctccctctgacaaggaagcacaaatctctattgaataattaccatgtgccagtaagtttgtgctaagaatcttttttttttttttttgaatacagagatagggttgttgaccaggctggtctcaaatgcctggcctcaagagttcctcccatcttggcctcccaaagtattgggcttacaggcatgagccacgcctgtgctaagaatctttatgtgcattcccttagtctttttttttagtaaccatatatggtttggtaccattgttatgtgtgatacagaagaagaaatggaagtttgttgaggttaagttcactcagtctcacttagatgtttaagtatgacagtaggttgaacctaagcagacttagctgagaaccctatattttttgccgtaatattttactattaacctgtctctctttgtttttatggaaacttttaattatttttgaatttaatttgttgcataataccacctatgtagtacacaatttgaaggtaaaaaagtgtgtacccagtgaaaatcagtcattttctaatctctttcctagaggaatgcactgaactagtttctcttgcgcccttgtgcaattttcttttttttttgagacagcctcgctctgtcactgaggctggagtacagtggcatgatctcagctcactgcaacctctgcttcccgggttcaggcaattctcctgcctcagcctcctgactagctgggactacaggtgcgcaccaccatgcctggctaatttttgtatttttagtagaggtggggttttgccacattggccaggctggtcttgaactcctgacctcaagtgatctgcccaacttggcctcccaaagttttgggattacaggcgtgagccaccatgcctggccttttcacaaaattttctaagtatataaaagtatttgtactcttcag

SEQ ID NO: 110147 - DNA, 1109 bp, Homo sapiens
gggatacatgtacagaatgtgcaggtttgtaacacaggtatacatgtgccatggtggtttgctgcacccatcaacgcatcatctaggttttaagtcccacatgcatttgtcctaatgctctccctccccttgccccgcacctgacaggctccgctgtgtaatgttcccctccctgtgtccatgttttctcattgttcaactcctacttatgagtgagaacacgcggtgtttggttttctgttcctgtgttagtttgctgagaatgatggtttccagcttcatccatgtctctgcaaaggacatgaacccattcttttttatggctgctcagataatttttaaatacacttcaatgtattcctcttttttgtaattaaaaaaagttgagataaaattaacctaacataaaatccagtatttcaaagtgagtaattcatggtttttagtatagtcccagtgttgtacaactatcaccactatctaattccaaaatatttttcaccccaaaaagaaaccctgtatctattagcagtcactcccaattctcctctccctctgtcttctggcaacctaatctactttctgtccctggatttgcctattctgaacatttcaaataaatggaataatacaatatttggtcttatgtgactagctcctttctcttagcatgtttttaagagtcatccatgttgtagcatgtatcagtcctttgtttttatagctggataatgcatcattgcatggatgtacctcattttgtttatccattcatcagttgatggacatttgagttgtttcccttttgtggctgttgtaaataatgctgctatgatccctttcagagtactcttaatgttattacatcattatttctcttcagagactttcatgtcccttccataatagctactctgcagaattctccactattttaagtctgaccatctatattatttgtcccgtatctggcctataaaaccctacaggggaagttacacaactgtttggtgaaaccaactgatggtgctacacattcctggaattcttgatataaagcagtttcctccagacccagtcaggtgcctttcttgttaccgttagtggct

SEQ ID NO: 110148 - DNA, 1028 bp, Homo sapiens
cggagggaagcgcggccgcagccacgtgacttccttcccaaggaacctcagctgccggcctcccagcaaccggtgcgtcccgcctagcgacgcccgcgcatcccggttggccctcgggggcggttgtggcaaggaggtgcccacggtcgcgctgctcattggctcgggttgccgtcgctcagacccgttgcccgggcgcccgcaggcggtgctgccggatgccccgccccttggccgccaggttcgtggctggctggccgctgctgtcactccccggccgtttccctgcggccagcgctctacttggggcgggaggaagaggggcgggactggggcctgactagtcgtcgccgtcttcgcggctgctatgaccagcgggcgaggcgcccttcgcagctccgcgcaacgctagtcgcggccgtgcgcccgccgtagccgtctgcgtcccagcgcggccgctcccgcggccccctcggctttgccagcgccgcctgcgaggcggaggcaggatgaagatgactgtggatttcgaggagtgtctgaaggactcgccccgcttcaggtaaccggcacggccgcccggcgtcaccgcggagctgccttcccggcgctgggggcgtgaaagccgggcccgcgcacccggaggaggccccgccgtccgctccttccgacggggcgagcggctgttgccgccgtttcccaccctgcgagggcactgcagtccccaccgagccctcccgaggggcgacgaagtggcggggacggggacgtcgcctctcatttctttccttgccctctgccggggcggagcgccccgaaggccggcgcaccctctcccgctgggggaaatggggtgcagccgcgctcccgaagtcccgtccccttcgcgggcgctcgctctcgcccccttcctcctctggctgctcttccttcccccttccttccgccccttcttggtttccaccccctccccaccccctctttgagggagctttcagggcatcctcttgcagttcatttagttcctc

SEQ ID NO: 110149 - DNA, 1051 bp, Homo sapiens
cttccacttgcaggtttatggaaacagcagtatttgaaaataaataaaaagtgggagaattccttgctgttagaagaatgtggccattattttgattttttgaatgagatatataatcaaagtactgctgaactgtgagtgcagtattctaaacatttcagctaggaataccactgatttagaaacaaaactgtttgtctctggtttctgaatttaaaatgttgggattacctgtttaaatctgtcttgggggatgtagagattaagtctgtacatgtgcgtgcacatatattcatgcaccctctgattttggttttcttgtttctgagttcttagaaagtacccacatactcttttttttttttttgtagaagtagctgtcatagagtgaagaaaaggataagactttaaacagttgattctttttgtgttttctacaaactattttttgaaatttaaatcacaaactcattttctggtttttagaaagtagatgatgatttcagaggagtaaggcatgccaagcagcatgctcagtggggttttaggctgtcacatgcagctgagaaaaggtatgttcaagtcataagtaggtaattgatagggtatgaactagtcaaaatatgaaccattatgattcaagttagattttcctctggagagacagatctgaatgttcagttctagccaaggtagattttactttcaactttttaatcagtatcactttctgtgcttaactatttggtgttaccttgtctgttttcatttgtctaaaattctgcagagatgactaaaatttgacataatggtgtaaatggattgttaaggtaactttcagttgaagattaaagcaagatgccattttccccatgactttggttttgtttacatttttccctttcagttagtatacactacacgtactgtaataaaatacaataatatgacaattgcctgtgtgtggattttattttattgttacttagctatctcaagaccataatccatcgaccacttgccctggataccaggagtggatcatggatta

SEQ ID NO: 110150 - DNA, 1300 bp, Homo sapiens
cagtactttttgttattccgtaatatgcttcaaccttttagtctatttcatatagcctttcatttccattatatatcccatagtctgtttaacttatatttaacttgagcaaacttcatcttacatagtagctgtggcatgtttttattatccatttttatttttattttgttttttgttatagaggcagcgttttttgtttgtttgttttaacgccatttcttttgaaaaataactatggcattttgtccgtctctgcttataagatattacatttcacatatttagtacataaatatattttttgtttaagtttaatggaggattaaaattttgtattaggtcagtgcctgatttttcttcactggagatgaagtacaccttgcaaaggagtatatcctgcttagcattataaaacccacaagaataggataagacttagggaaataagtaccttatttaccccctaccctttttgggcccttaacattttaccagcttttcagatctctaagttctatagaacccattagttttgggacagtgccagtctcctcccttccccctttcctcccccattcacacaattcattggagaaaatgacatgtttggactcttaggtgatattttatagctttcaggtaataaatatgtatctttttatagctctggatattggagttgtcgtaaactcttacctttccacctgtgacttacagaaatgttcaatctgaaacctgtttgttttatcagcaagtagacacttctgttctttagactatttaggggagtgtatagattcttcaatttcagtctaaatcagcctacatgaaatataccttatttgtttttaaaatttttatatttgcttgtcatgcatgctaatagaagggaactttagccagggttgacaacatataacaaattatgttgactttttcttttatctttgcaggatctactccaagtgaccaacagcaaaacaaattacgaagttcatagacgagatttgttcaacactgcaattgtttgttagatgtaaaccctgtgactatagtacgttgcttcttgttcttcacaattcatgacttaagtaccaaaatgcataccagttattatatattgccaagaattaaatgataaacttagagactgattagactgaaaatgcctaatcgatatatatattcttgtgcctagtactttaccacaaatacagtgtaatatcatcagtccaaaactgcattacttttgtaaaaacactggttaatttgtataagatattatagagctttttat

SEQ ID NO: 110151 - DNA, 1038 bp, Homo sapiens
gcacattgcactccagcctgggcaattagagtgaaactccatcttgaaaaaaagaaaaaataaaacaacggtgaataattttaatgctgttcattggtaaaatagctggcaattttatattggcccccccttttctgttgtttttttttttttaattttctgatctaaggaagttaaaaaccttaaaattatgtattcataaatagttgctctagtgtgatcagttgtgttgctgccagctttatgtttctatggtgaagactaaaatgaaatattttggagtcacttcaccattactttataatacgtttttcttaaaattactctgaaaatgaggttacgtttttagccaacaatgtcttaaatcatggcagtttcttaacaggtaagaattgttttaaaggattttttcttaattataaaaatagaaaataataaaatattaaaactacttcattgttccttgactcagaattaaacactgttaattgctgagtcttatttttctctctgtgtgtgtatgtgacaggcattgtacatagtaaatatagtatatggtgttgtaacttgctcttttgtcaccatttaactctttctggataattttcccatagctttaatctttcttcacaaatataatttctaatggctggatatattcttgttcttccattgagatgaatgccagatagtaaatattttaaattttgcagggcccagtggtctctattacgaactactcaactctgccattgaacacaaaagcagccttaagcatgacaaaaacaaatgagcatcactgtttcaataaaattttatttataaaacaggcatgggccaatccttgagctcaaacttcctaagtttacattttgcatcttatagaaaaaaagcgacaatttgaaatgaaaaggaagcttcactacaatgaaggactcaatatcaaactagccagacaattaatttcaaaagacctacatgatgatgatgaagatgaagaaatgttagagactgcagatggagaaagcatgaatacgg

SEQ ID NO: 110152 - DNA, 1050 bp, Homo sapiens
acagggccttgttctatcactcaggctggagtgcagaggcgcaatcaaagctcattgcaacctcaaactcctgggtttaactagtgctcccacctcggccttccaaatagctaggaccacaggcgtgtaccaccatgcccggcacgtttctgctctcttgccttttattttcctcatcaggttatagctagcacattaatgatcttcagatgtttttgtaagaatcaacagttgaataaggcgcttaaataatatcaaaacatcactgttaatttctttgtacatgattgttgcatagattagctgcagctgaaggcttggagccaaagtatcggattcaggaacaagaaagcagtggagaggaggatagtgacctctcacctgaagaacgaggtagtttatttcctttactgctttcatcatggtgctagtaatttttgctaagataaatccattatttggaagatgagcaaatggttttcattttggggacacacaggggaggagaatgaaagcaacatctttataattcagatactacttgtgtgttttgttgtgtaatagttttttacccctgatttcaagaatatggggaagtattaccatctttaaagtaattataagtattattttctttgtactttttagtgcagagtagatactcagtaaatactttttaaattaatgcatttcaagtcattgagcgtttggacggtcttaaagtgggtagctgaaagagctaatttcccagttgcttatgctttttgtgttgttggacagtgatgcaacttaacaaatgaaccaagatgatcagatgcagagtgaaggtctttattaggtcccatcaatcaaaaggagcagtagtgtcacaggaagggagatggagacagccctccccttcacagggatggaagagggtctcgtaggccattcagcacatacacatttaaggcattgctgcctgctcgtgctttctgtttccacaagtaaaagtggttacccgtggaggctgggagaaaaggagtatgtcttatcttgttgcattttata

SEQ ID NO: 110153 - DNA, 1084 bp, Homo sapiens
atgtatagattttgacttgcattattttataggccaaatgaaggctaagcatgtcatagtatggtaatgttttgaatgcctgatatagatactaaatattgtgtttttaatatgtgggcactaggtgttctatatttactgacattttattgtagttacttaatggtttttaccctgagtcagcttctattccaagaaagtatatgtgaaaatagaggttggccatcaaatagaagttgaaatgttaaatttggacatttgtgaattttgatattcaggtttatctttttctgcattgggaaaaacgttttttctttttaattttagcaaaaaatcccagaagtgggatgaaatgaacatcttggcgacgtatcatccagcagacaaagactatggtttaatgaaaatagatgaaccaagcactccttaccataggtaatgttacgtagacgtcattcctcttgtgacttacttccattttgcatttcatatgaacgtctggataacagcctatttgaatttgttttattgtagatttgttactggagcactagtgaagtcagtaacctaactgcaatttgtttagtaatggtttaagtgatgtgtaagtttaaaattaagaaagccattttgtacattataatggtagtagtaaatgtttatttgttgcacctcagtggttgctagctactaatggtgcatatattagttttaacttccatgaaaggaagatgagatatgggcttgtttgcttcccaagtagaaatctggggtttactcagtctctttgcagagaagcataactgcatggatggtaacccactgaaagataggtgtcattattactgtttatgtcttcattttttaacttaatgtaatattgttgttcagatcattacatgtaatttttgacaatttcaagtctcagaatttcctaaatgaattgtgaaattacattacgcagcagtaaccagtatgaagacaaaaataatgcaagaagcattatgagaagatgaggattctaaataagtatagatacctaattaagataataccttgggccgggcactgtggctcacgcctg

SEQ ID NO: 110154 - DNA, 1048 bp, Homo sapiens
aaaaagtttgttttctaaaagttactttttgcttacttgtaattgcttttattgttaagtcttactttaattgttcagtaacgatatcaggcttcgaagtcttatattgtgtcaatctatataagttgaatcttcatttaaagaaagaaccatttcttgaaatgtgcaattaaagttaaatcaccttgaagcaaaatcttgcttcccattccagacacagtcacaacttatcaaatgagcaagtcacaagcaacaagaagttccagtaggtcttcttaaggtggcaccatatgagctaacaaagtaaaagtgagaagcggtgacgttttcagcaccagatttaggctgtaggaaaaccagtcacccaagagggtgggggaaaactgaaaccagcaggtgctttcaccatcatggcagatctgccatgtaaatggtggtgcccctatttttgtctgcagggatactgacctcaaaggaggtcatacagttcatgatggtactgggattaagctcaggctcactccttgggttttgctattccacaactaatgttaattctgccatcactttagagatgccgactttcatatccagtgtcccctgctgacagtttcttctacttcactaactttcgaagatttcctagcatttttggagtctgttttgtaatacccttatttaaatgcttgtttttgcaagctattgttgtctttttttggatctgaataattgtactaatttttttttctgttagtgttctgttgagaaaacaagttgagtgagactttgaatatttagaacttaaaatttcatttacagaagaaagtaaactaaatggcaaacaaactgggaaaaattgaagttatataaaatgtggtttatataaatctaaagagctcaaatttatgggaagatttctgataggcaaaggatgtaaacataattcacatgaggaaattaggcaaagaaacaacagttttaaaatactgttttatacctgctgaaatggaaacacacacacacacacacacacacacacacacacaca

SEQ ID NO: 110155 - DNA, 1083 bp, Homo sapiens
tgtctagcaactcccacgctcatggatgcttgaatcttacattctctcacacacaattttccaacttctttgggctaagccacgttaaatggagtgctgggggagtgtgatgtgtaggtcatggaattaagaagacagaatttcaccagaacataactgaagcaggagaaccaagttagttaaaagataaataacatccaggcgtggtggctcaagcctgtaatctcagcacttggagaggccaaggtgggaggattgcttgatcccaggagtttgagaccagcctgggcaacataatgagacctcatctcttaaaaaaaaaaaaaaaaaaaaaaggaaagaaaagaaaaggaattaaaagataagtaacgtaactacagaaggctcaaatgtagcttcagggttttcagcagcaggaatgtggtccttactggcatttatgttatttagctgttctccagtgtgagtttcttttggtccatttaccaagtgagttactctttatctctgcttctttagtttctgtttattcttaacttggatctgctgtaatttcccgtgggcccaatctatggattggcctctttctttctgtaattggttgggatttacattcaggtctttctgcctcaaaagccactatactagactgactcaactgcatagggctgcctcttctgtagtatctgtggcagggtagattcacttaaaagggactgacctgtcgagttagagttacagtcctgtctttaaagagaactatcaaaccctaattcattgaagttcatgatgtttggttccaagtggtaaaaaggatgggttttttaatgatccttgttatgtgactgtaaagcaaataaactaattctactagtaatacaatatagtcttagtctgttttctgttggtcataacagaatgtctgaaatgataatttataagaaactgaatttatttcttatggttctggaggcttggaagtccagggtcttaagggtgcatctggtgagagcgtttttgctggtggggactctgtggagttccaaggtggtgcagggcatcacatggcaaggaagctgagcg

SEQ ID NO: 110156 - DNA, 1084 bp, Homo sapiens
aggcagttcggctgtttacacgggcgaaatggaaagaggagatacccgttttcttcaagtcagctaacctctctgcggagtgacgtcacctcgagtctcagtctgctgatctaaaaaataaaaataacactacggcctcacaaggtggtgggacgagggtgctcgagagacgcgcgggtccgggaagcagcaagcccgggcgctctcccgcaggttctcagagacagctcccgcctcccagcgccgcgcgggggcggggcgagcagcccgggcgggacggagggggcggggcgaggaggtcggctttgttctcgccccgccctctccccgcctcctccctagatatcgcgagagggcgggtccgcttggcttcggcgtcgcgtcgctcctgcgctggagctctaggccggcgtctctccgcgagccgcgggtcaagtggcagtggctaagggtgcgcgagtagccgccacccgttcggcgttggctctggcgtcggggtcgttgtgtcgtgacaaccgctgcggtagccgtttccgaggcagcagttgcggccgctttagccctgagcgggatctgcggctgcctgcgagtctctgctgtgccgacccttctcttcgcggaccccacgccaagcagcgaccctgagccgacagccggagcgcccggcaatggcggcctcgacggcctcgcaccggcccatcaaggggatcttgaagaacaagacctctacgacttcctctatggtggcgtcggccgaacagccccgcgggaatgtcgacgaggagctgaggtgagcgctgggagggacggcctgggagcccctccttcccgccgggcccgttacctacccagaccccaggggcgggcgggcggcgtggatgcggctcgggtgccgctcgagtctcttctcctgcccggctagccgcgggtgggagcgatctttaagaaggctgggcgatgacgtttatcatgcttccttttttttttttaagcatttgggcatatataatatttttaaacatcatctttgaactttctgtaatcgggaacatcaaagaatgaaattgaagcttcagatcttcga

SEQ ID NO: 110157 - DNA, 1031 bp, Homo sapiens
tgtgagatacctaatgacaggcatttgcctctgggttctgagctaactgaggaagggacacaggcaatagagaaagcaccaaatattagttttatttccgacgaagatacactagagagttcaacccagaactgtgaggctttctaacacgaagagtgcttgaaagcccctttcccacctgcagggtagacactgaagtcatcagctacaaaagttactccctgcacttcctacttctcatctctgccactcctccaccccacaccagtcaagtgcctagagcggggaggagaggaagttctaattttatagaccaagaaaggaatgctgggaggagaaaacagttcttctcacactatgaatatggacaactaacttcacatgtacaagccagaaataactgcccagtgtcgtgaaaataaaccagatacacacgctctgtaaactgtaaagggctttatacacagtttctcttgttatttttatcaagaagggagctaaagtgcaggtgggctgagtgacgcaggccatcactgaactcattagaagtagagttgggacctaaacctaggtctccaaactctcaactgagtatttttcccatagggatcagggacggggattggagtgaaagctaactattacatgcataacaaggattagatgtttgcgttaggccttgtaggattatgggagattatggaaaaggatttccaagtgaagggaactggaacatagaagaaggcctgaatacaggcatatcacgaagtcaggagttcaagaccagcctggccgacatggtgaaaccctgtctctactaaagatacaaaaaattagctgggcatggtggcgtgtgcctgtaatcccagctactcaggatgctgaggcaggagaatcgcttgaacccaggaggtggaggttgcagtgagctgagatcgcgccattgcactccagcctgggcgacaagagtgaaactccatctcaaaaaaaaaaaaaaaaaaaaaaaaaaaaaacgaagaagaagaaggcct

SEQ ID NO: 110158 - DNA, 1020 bp, Homo sapiens
gatataaaactggatacacaaagaagccacatcaaccatatagtcggtacttaataagtgtctgaatacatgaattatttgattaatgaattaatgaatgctgggtcacaggaggtgggtcatgccagagacaaaacagattaattgattgaatgaatgagagagcagagattggggtctctttgacctgtagcacagatgccagcctagctcctcacctgtcttcaccccaaggctcagccacagcaggaggaggaggaccagccacgtggcagcaggcatcaagcagagatagaagtgctgcagcgtccaaggcctggtctttaaatatccacccatcccagccagcccacctggttcctccctactcctggggaggaaccagcagacacctgggcagtcactggcagacagcaggagtgacacaggtatcccagctgcttgaaatagctcacccaagcagaggtaattttgacatcctggaaactccagcctccaggggaagaatctgaaaaaccagagtgacaaaatgacagcgctcacaggaactttgcagattatctaatctttttatttattttattttattttttgagacagagtctcactctatcgcccaggctggagtgcagtggtacgatctcagctcactgcaacctctgcctcccgggttcaagaggttcttctgcttcagcctccccagtagctgggattacaggtggctactattacacccagctaattgctgtatttttagtagagacgagttttcaccacgttggccaggctggtctcaaactcctgacctcaggtgatccactgcctcagcctcccaaagtgctgggattacaggcatgagccaccacacctggccaattgacttttattagcattcatatacaggttttgtgtgaatatatgttttcatttctccgggataaatgtgcaaaaatgaaattactgcatcatatagtagttgcacattcagtcataaaaaaaaacagccaagctgtttcccag

SEQ ID NO: 110159 - DNA, 1581 bp, Homo sapiens
tgcacctgggacgcaggcactccgtgtcacctgtctgtcactgtctcgggtggttcttactgatttgcacctgggacgcaggcactcgctgtcacctgtctgtcactgtctcgggtggttcttactgatttgcatctgggacgcaggcactcgctgtcacctgtctgtcactgtctcaggtggttcttactgatttgcatctgggatgcaggcactccgtgtcacctgtctgtcactgtctcgggtggttcttactgatttgcatctaggatgcaggcactccgtgtcacctgtctgtcgctgtctggggtggttcttactgatttgcagctgggatgcaggcactccgtgtcacctgtctgtcgctgtctcgggtggttcttactgatttgcatccacataggctttgggctctatcccacctgtcgtcttcggattctctaatacgcaggagtgctcttctgttagtttactcatagtttattaaagtacagagaaaagacatccaggatgataaattttacagtccttgccggggactgccagcttccagtggtgttgcctggcaccagtgtgacccccggtgcctgccccgctgaaccttctgtaaactgtttaactgtgctggtggtttcccattctctaggcgctgagatgcgtctggagagccagagggcctgcctgaaggaatcacctgagcctgtccgtccaccaggagtggggagatgcccccatccagtcctggaggacccgctgctcctgctgctcccggggatggagcaaggccaaggctgcgggaggctgggagccctgccctgcccatccctcctgcaccagcgctgtccctgcacactttggttcagtcccggtgcccctgccaagatgtggaaggggccgggtgaagacaggcttgagggctgccccagcaggctctgggtatgacctgcctctggccctggtcctgggcggggcctgtgggtggagtagtacccccaggccctgccctgggtgacagactgggaggaaaccaggctggacctgggcaggcgggatgtgttggccacagggagaggcggaccggcacccggtgggacctcctaggactgggccttcttccagggggcccctggcagcagctggggtgtcgggcagaatgtgacttgtggccttaccatggacttgaatgggacttggctggcctcaggatcttgtgcctggaaatagcctgaggtggctcaggaagcggagaaagggtgccagaccattctctggcggggaccagggcccaaggccccagggctggaaggagaccaaggggcagccgccctggagggacatcagtgcttcctcttccacccaattcccccacgcggttccatgttttcccaccagcctgttggcgaagttgctgctccggcattcagtacctgcttcttccagagaaataaagttagtttctattttatgttacttacttgtgcctgcctgtttctttgcctgttagtcagcaagctccaggccccaagcgaggctccccaggccaccagcatctgctccgggcagcaggccttgtagcaccac

SEQ ID NO: 110160 - DNA, 1034 bp, Homo sapiens
tgagcttccgcggctgccctggcctagcatgcctgccccccctcgagcccgccccccggagcctgggcttctgctcacgagtgtggccctggcttccgcctcggcctcactccctcccagacctgtctgagcttctggagcacgagtgtggccctggcttctgccttggcctcgctgcctcccagacctgcaggcgctgtctgggctttgtggccgttggtcaggagtactgtcctctccaaggatagtccttatagcccctgatggcaggaggcggctccgtgcctgcactaatggtgtgccgtgacaggggcggggatgagggctcactaactcgccagggcgcaggagcagggccgccggggtcttgtgctggtggaggcagcgtcaggcaggagccagtgttgcttgctgcagcttagacggagcgaggcggggctcaccggcccacatggggctgccgggcagagcaggttccgccctcctgatggagtggtcggaggtgcgctgagaacctggccgccggtggctgacctcagacctcggggggagttgggagtggagggttgctgggggacacttggctttctctcccacgtgccacctcccctcgtgtcccagaccctgcctgactgccttcctgttgggctctccctttccatcacagaaccaacctatgaccctgtgagcgaggaccaagaccccttgtccagcgacttcaagaggctgggcctgcggaagccaggcctgccccgagggctgtggctggcgaagccctcggcgcgggtgccgggcaccaaggccagccgaggcagcggggctgaggtcacgctcatcgacttcggtgaggagcccgtggtcccggccctacggccctgcgcgccctccctggcgcagctggccatggacgcctgctccctgctggacgagaccccgcctcagagccccacgcgggcactgccccggcccctgcaccccacgcctgtggtggactgggacgcacgcccgctgccccccccgcccgcctatgacga

SEQ ID NO: 110161 - DNA, 1015 bp, Homo sapiens
ctggaacccagccgaggagtgaaatcaagtggccagaagaggactggggccccggccttgccagggaactgaggggtgaggaggaggtgtgggcggggcgctggccccacagacctgaaagctggcgttgggtcccaggtctgctgggatctttctggtaaccgtggacaggtcatgttgcctgctgcagcagcttccagcgtgcctccttatttgcaaaccatagggaaagctgcctgacccacctagagagttgtgggtaaggccgtgtgcaaacaggcctgtacggggcatggtgggtcacgggggctgttggggaggagggccggtggcacacagcctggtcctgaggcctgagctccatcccccttctgccacagtggccagggtgtgaggagggtcccagtgccggggctgccccgccacgcctggcgttcaccgtgccatctctgtcgcgcagggccgagaactactggtggcgtggccagaacacacggacgctgtgtgtggggcccttccctcgcaacgtggtgacctccgtggccggcctgtcggcccaggacatcagccagcccctgcagaacagcttcatccacacagggcatggcgacagtgacccccgccactgctggggcttcccggacaggattgacgagtgagtactgggcggggatggatgctgacctggccccgctcgggactccagggccctcagcacggcacgcgtgggcggaatctgctcttcaccctttcgcccgggcttcagcccccgacccgccactctcccctcctcaccctggccttactctcgggaagctgtggaaccctaggaagcccagcctggtgggggttctccaggggaatgttctccaggggagtgttctccaggggagggttctccaggggagggttctccaggggaatgttctccaggggagggttctccaggggagggttctccaggggagggttctccaggggaatgttctccaggggagggttctccaggggaggg

SEQ ID NO: 110162 - DNA, 1067 bp, Homo sapiens
ccacctgcttcccttgctctcagcaggagcctgtgtgcctgccagtgtccccaggggtgactcagagtggcctgtgtttggggcgtgtgtctctggagctggtgttttaggtcaccgcccgggcaaggcgggcagtgggaggggccgggagcggctgctcctgggagggttgtgggtgtgccccgccccgcccttccgtcgaaggcccccgttggccccagccgctggttccctgtggctgctgctggtggggctctgggggctccttccccctgggccaccagccctggcttggaaccacagcacctgccctccgtgcctggagctgctcaggaggtgggaggtgaggggcaggaggccacaacagccggtgaggcttgggagcgggcctgggtgtcggtggtggcagagcttgactctgcccccttgtttcttcagtccctgaatatctccatgtttgtttggctgcctccgtctccatgtctccaggcggatggctctgtgtgagtctttgggcctgggtgtgcatctgtgggtctgtgtttggagttccctcctagcctggccttctcttcgccgtggcttcccacttgcgaagctgtgtccagtatttgtttcctggtgcggagtctgggaggccacctgccgcagctctgactgagtctaggctcagtccttctcagggtaccaggctgtgggcagaggggagacacctagatgtttcgtgctgtgtctagatttggagacacaaatgatgactggtctttcccaggggctcgtttggaggaaggggtggctggcagcacttttgttccgcatacagagcgggtgttggaatccattgcgggtccttggcctggtctggccctggagcctcggcttcctgtggtgggtgggagccaggcatccgggttatccctccaggcctgggcgcctgggacccctagggagaagagcgggcgggcgttttgaacagaatgtccggcattagttgagccatttctggactaccttcggcccggacgggaacgtggtgctgagatttccagagctggggcagccttagg

SEQ ID NO: 110163 - DNA, 1035 bp, Homo sapiens
ggggcctgccctccttctctagcccttgccacatccacttgttccgaggctccagacctgggaagaagggactggggctctggagagggcccctcccaggcaggcagatcccttctttggaggccaggcatggcagcagccgctgcagctgtggatgggctggagggaaggcgggaagtgaagggctgggcgctctgtttgtcgtcaaactctgcacctcctcaccttcagatcctgcataagatcgacaaggagggggagcggctgccccggcccgaggactgtccccaggacatctacaacgtcatggtccagtgctgggctcacaagccagaggacagacccacgtttgtggccctgcgggacttcctgctggaggtgagggacaggtcagcccaggagagctggggtgttcaagctgaggggctacccaggcgtcagtcccagagttggccacgaccttcctcttcctccaggcccagcccacagacatgcgggcccttcaggactttgaggaaccggacaagctgcacatccagatgaatgatgtcatcaccgtcatcgagggaaggtagggagtgcagggctgggccccgccctgggatcgcttgaagggcacaggtcggagggacctgtggacagatctgtttggcctccaagattcccttggccacatacaggctggcggttgggcctgaaccctgcagtgtgaggggaggacaggcctgcctccgtcttcctagtgcctttccctgcccagcttccctccaccaccctttcccactgggctgcagccctggctgtgtggttgggccaggctgcctttatggaggggtagggagtggcctggcctcggtggcagcagagttctggactcccgtgcttcctcctctgctcctccccgcttctctccctgcttcttcctggcacagggactcagccatccacctgggtgcgtttcagtagctgaagcagcccagcctgccctcttgcagctttccatccttcctgctgagcccaccaccccctcccagg

SEQ ID NO: 110164 - DNA, 1050 bp, Homo sapiens
gaggcagaggttgcagtgagctgagatcacgtcactgcattccagcctgggcgacaagagcgagactgtctcaaaaaaaaaaattccattttataacatttgaatattctctcatcatactggttatctcttactttttggttggtatttaagcccggcattcccccaggaaggggaggtgtggccgacgatggctcctgagggccagccgtctgcccttctccagccaggcctcacgcagagcacgtaagcccaggcactggtgacatgcttacccacccagatgaggagctcacaggcagggatcgttgagccgagttggagggtggagcaggttggctccgcgtgtctgggacctggcaagtcctgagtccttgcaaatcccgctctgggcaggtgagtgtggctgtgaagtgcctgaagcccgatgtcctgagccagccagaagccatggacgacttcatccgggaggtcaatgccatgcactcgctcgaccaccgaaacctcatccgcctctacggggtggtgctcacgccgcccatgaagatggtgagtactgcgggcgggagggggcgggcagggagagggctccggtcccatatgtgtggttcggttcctctctccatcctaaggtcagaggcgccctagatcctactttggtcccccaacctgatggagtaaaggggtccacaggggcccagcctggtacgggctgtgtctgctgcggtccagtccgggtctgtctctggattttgctggtgctcagtgtcaagagagttactcccatgggaggggctggccactgagtttaatttggggaatttatgttttatttatctatttattttgagatggagtctcactttgtcgcccaggctggagtgcaatggcatgatctaggctcactgcaacctcggcctcctgggttcacgcgatattcctgcctcaggcttccaagtagctgggattacagccgtgcgctaccatgcctggctaatttttgtatttttagtagagacggggtttcaccatgttggccaggctggtctc

SEQ ID NO: 110165 - DNA, 1103 bp, Homo sapiens
tgtctgagcgttggggccagtgtccagcgtggggtggtggacctgtctggacccagaacgtctttgcttggcttccctcctccctgaccctctctaatctctgggtttctctggtcatctgtccctgctgacagcttccttccccacagcctgtccccacctctccccacaccttgtcctaatttgggtctgtggtgtagtgagtccctggtctgactcagtggaactttgcccattgtctggaagacaatgagagaggaagtgagccagccgtggtctttcctccccacttctggcttcagggctgggttggggggtgggcagggccgaacagctgcagtgggattgggcagcagagattttcctggctgcaatccggcaaaggggctgtctcttgggatcctttggcttttcctggaaacactgtcctggtcctttgcccgggttttagggaaggatgagtagtgtcgggatggtggaggcaggagaagagagcagcgtggtttgctgagatttaggggtcttggatctgccactggctcctgataggtccctgggcggtcagtggcctccagatttttgttgtgtcttcagtgaaatgataccggtccccactgcccagctcacctcccggggctgcaggaggcaccggagataatggctgtagagggtcttgtaacctgaacattgcttgcaaacataaggaattctagttactgggaggaagcacagggcagaggccagaagaggccctcagatttgaggcaccctagcccagacggataaggatccaccagctctgggggcgtgagacccaagctggcaagaatctgcaatctggagccaaggctgtgggtgcctcagtggaggccgagtcagaccgacgtggccagctttgaccctcatggcctcctttcttctgtcccttgaccttcggctcctccctgtccaccctggcctccgagtctcctccacttttccttccgtctcagccctcagctctaggcgcccctccagagacccagctgtcttcccaggccccttcccagcaaggactagcttcatctgaaccacacacacactcacggttcaacctcagacta

SEQ ID NO: 110166 - DNA, 1091 bp, Homo sapiens
taatgagagggggttgccttcactgacatttttgcaaatagtggacttctgctatgttctgaataaagcaaagtccattttcccttaagtttacacagtagtttcattccaggaaaatttattttatattaaaactgtaaggccaggagcagtggctccccagcactttgggaggccagggcaggtggatcacttgagctcaggagttcgagaccagcctggccaacatggaggaaccctgtctccactaaaaatacaaaaattagccgggcgcctgtgatcccagcttcttgggaggctgaggcgggagaattgcctgaacccgggaggctgagtttgcaatgagccaagatcataccattgtactccagcctgggagtctcactctgtctcaaaaaaaaaaaaaaaaaaaaccaaaaaactataaaagtactttcttatttatatataaagtgggatcatattctaggtttgcatgatcataaacaccttcatgaattgagttgtgtgggatttgggacagtgcgagaatgtcctacgcattgcaggctagctcacgctcttgtcccccaaccacccactgaatgtcactaaggcccccccaaatgttgtggcaaccagaactgtcccatagggggctgtgcagcctcatgagaaccattccagtaaagggttacagctttaagtttggaaaccacccggctggcccagctgcctggcccggtcgccgaggtggaagagccaggatttgaactgagagtttctcattcccctttgttactctttgtacttccctgagctgcctgaaaaagtcggaactggcactgtgttggcagggccactgggaactgtgggggcaggaggctcacgctgggcccaggctgtgtgtgcctgcttctcagtgctgctcactgtgatgggagctggggaggaggccaccgctgagtgggggagggggatggcttggtccccagccgggcagctggccttttttctctcgcctgttcctctttggggattgagcatgggtccggggctagcctggccacgccctcagctctgacacaccttacgcagacagggatgggttt

SEQ ID NO: 110167 - DNA, 1225 bp, Homo sapiens
tttttcagccagtgtcagagctgctcagctggggagggagggagagagggagagagagaggcaggcaagagggagggcggccgggcgggcagttgggtggggaagccggggagtagggctggactgtgaccactgccctggagagaagacagaaacaggacagaggatcccggctgcagccagcgtgaggaaagctctgctccctgccagaccggccagctgtggaaacccagcggggcttgcagcagagcggaggggcccaccccgttcttcctcatttcccacccctggtgtgggatttggggggctcctgggcagagtgcgaagctccggagccgaggccactggatccccagtgactgctcgggggggtcccgctgcgtggagatgccggcagcacgtcggttccctggcctggagctctccttccctctcctggccagactgcggcgacgcctgtacacagtgagtggggggcaggggctggactgctggggactggttgggctcctcagcaccagcacttgactgagaggcagaaagcaagactgggagcggctgagggaccccgccagtgagggcttgacggggagtccgggccaagtggcctctcctgcggctgctgcattccttcttcttggcctgtgtgtttgcacgccggccacagagtagtgacggacacaggtgtgcagactccatgaggtgcgggggccaggaccatgcagaattggagagtgtttgaactctggaggagctgcagccatgccctgtgctgcacaaagaaccttgggctggagggggacttagaggggaggcggacccctgcggagtcaccctggactgagaccctgaccgcttgcctcaccagcatcccggagttccttcccgtcctcccacatgcatcccctgtgcagagctgcgctgttgctgggtcagggagcatggagtgcacagctgaacagaggtgcattagctggtgtttcagggagagggaacaggccgggctgtgctttctgaagagcttcaggggaggggcctctgggtctcccccagccctgaccaccccgggcatggctttgagctgttttcaggagcctagaggagggggcctggatccttgggagttggtggtgggaaaaagaagaggagccctggagactgctctccctgcgggagactaggagcctccatcctgaggctgagccctggagggggggggtcactt

SEQ ID NO: 110168 - DNA, 1012 bp, Homo sapiens
gtgcgtgcccagcgcacagcgcgtgcggcgttgcgggagtggcgcgcggggaaccggccgcgggggcctcggggcgggggcgtggcctgcgcgggaggcgggcgctgggaggcggcgcggagccggctgagcgcagggccgagctgcggggcaggtgggcgcccggcgttctgggagcagagtggccgccggggcaggctgggggcggggtgggctgcagccccgggatgcctcggaggagggggtctcagatggagtcggacggaggcccctctgctgtgggcttctcggatggccccttaccgtgaatacgggggactcgtgaatccccaaggccccagttggtggctctggggccctggaggcgggctgagggctgagtggagcccggttccgcggccggcgaaggcagagccccggctctcggtgggggtcagcccggggctggcacagctggctcactgggagagggtgggagccgcgccccggagaggaggaacggagctgggacgggctgcaggagggaatggccgcaggccggcaggaggaggggcgcgaccacccggccgccggccgatggcggatgaggctatgggggctgagacgcagtagcggccctgcacttctggaggatgctcgaggcccggccccccaggacgcagggcagtgacgctgccggtgccgctgcggggcgggggctgcgggcgctgcttctctccctgaccgcagccgctgggatttggggctccatgggggagagatctgcttaccagcgcctggctgggggcgaggagggaccgcaggtaatggggaaggctaggggatagccagatacctgggccccagaccccttcgtctgctgtgagccgggctcagccctgccccctgcggcggcctcaggagtgagagtgtctgctcctgggccaggggacagagagcggtgtgtttatgtgggtgtggcggtggtgacttagtgatgctggcatctgcctgtgtgtgcatggatcccctg

SEQ ID NO: 110169 - DNA, 1090 bp, Homo sapiens
ctctctcggtgagctgggatcctgacagacccaggcccccttcccatcaccctgtgtggcagcccgcgccccagcaccccttcgcagtccgatgagaaggcaccttccttaagaccaatgtcaggctctccctctgcctgagggactggctgagttgttctggttctgagatggctttgggggactgagttgcttagtgggtctggggtcggagtggttgtgatgacatggacagcccctcttcccagaaaggtgctggcgtctctggattagaaatcatggggggaggcaaagccggggctgggagagggcaaccaggcttgttcctggcacccactgggaaagcaacctggcagcagctcacgggggaagaagcagccaccgttctccagtgttcctcacaaagactgagtccttctcagcagacacacccagggcccctgccaggttctcccttcagggcgacagatgtggacagatggttcccttacgatgtacagaccacagcagaggtatacagaccgctccttcagcacaattatgtgctgatacaaagagttacaggaatagtgaccctttaaggataggaacgtgatggataatttaaactttttaaaattcttggccgggcgcagtggctcacgcctataatctcagccctgtgggcggctgaggtgggcggatcatgaggtcaggagatcgagaccatcctggccaacagggtgaaaccccgtctcaactctactaaaaatataaaaattagctgggcgtggtggcgcacacttgtaatctcagctacttgggaggctgaggcaggagaatcgcttaaacccgggaggcagaggttgcagtcagccgagatcgcgccatggcactccagcctggcaacagagcaagactccatctcaaaaaaaaaaaattattttggctatttttcacatgtattattgtgtagttttactactcatgttttcaagcatccctccaacaaaacagcagagataaccatttgtggctaggaaatgggaatttacagaagagatggcatttgacttggatcttgaggagtgtgtgggagtttatcatgtag

SEQ ID NO: 110170 - DNA, 1594 bp, Homo sapiens
ctgcaggagcgcggcggccgcggccacgagcccagccggggggtggtgtgggggccgccggacggcgcgggctgggggcgcccgccgtggtggacgggctcggcgggctggcctgtggcgcaggaggaggggctggggccccgcgggcagcaccaggagaagggcggaggcagccccgcagtgcaggagcgcggcgaggcccgggccggggtgcaggagcgcggggaggggagcccgcggaggctgctgcagcagcccgaaccggcgtccgagtccggggaaggcccccgcgagcgcagggaggggccggaaagttccggcgaactgggggagcggcagtgggagagcgtcgggcgggaggcggtggtcctgggagcggccccggcgccccgaagccgccccgagctggtggggagggcccggccggtggggccccgggggcctgcgggggaggggcgcctgggggtgcaagaggcgaattggctgcccggggtgcaggagggacaggtggtgcgggctgtccaggaaacctacctgaacgggaaggagccccaggagggagagggacccggcgaggggctcaggacccggaggcgccggcggaggaggaggtggtgactggcaggcccgggccccacggtacctccggggctgaaggggacgcaggatgtaggggcatggggagtcgggcgcagaagagtgcggggaaccgctgagctctgggagccactgcctgagggcaggccgcggccggcgggaacctcttctgccgtctcagcctgggcgtcgctgaagctgtgtctgcggggaggcagcggaaggcggcaggtaaggaagcccagtcctgttagctggagttggtgtgcttggaagtgagaggctgcaggtccctggcgagagcgtagactccacactgccctcgttcttttggcctttcatccctggagggaggaagcagtgcagttttcagcggcaaggcaggacctctcccccgccagtactgtgtatggtaattggagtgatagggcatcttcttagagtctaggcagcaggcgggacgtctgggtggctgccaggtctgtgcagagggaagagaggggtagccccagggaggagctgcaggacggtcccccctccacctgccccccgatggcagtaggggtgcctccatgctatatgctctgcatggtgcagtcaacacacaagtcctcaaaacacgtcccacagaagggaagagggcagcgtgggattaacagaaccttatcttgtaaccctgttggtcacgtgagctgagatgagtgtgacagctagtggcttgggtacggcacgagcctggcccgcttctgccacgccgtcctgtcacagctgatttaccctgagggcccagagccaaggatgattagtgggcggaaggagggagagcaactggtgagccctctcgtctctgggtgggacgacccagcgttagaggggcgggagaggagggtgcacttgcaccccagggctctgggctgcctctgtggccccaccctggggaggtttgcagatgggccgctgtggtatcatgggctctgcacctgtcaggacaggagct

SEQ ID NO: 110171 - DNA, 3042 bp, Homo sapiens
aaaccccatctctactaaaaatacaaaaattagctgggcgtggtggtgcatgcctgtaattccagctgctcaggaggctgaggcaggagaattacttgaacccgggaggtggaggttgcagtgagctgagatcgcgccattgtactccagcctgggcaacaagagcgaaactctgtctcaacaacaacaaaaagccgggcacggtggctcacacctgtaatcccagcatgaattgcttgaactcgggaggtggagggtaccagtgagccgagatagcgctgttgcactccagtctgggcaacaagagcgaaactctgtgtcaaaaaaaaaaaaaaaaaaaaaaagtctgatcggcattcttaaatttgggacattttacatttgaagtgaactgttgttttactacaaaagtcacagggctgtgtaaattgccttgtgtgttgttttcgtaggtggagtatcacttcctctctccctacgtatctccaaaagagtctcctttccgacatgtcttctggggctccggctctcacacgctgccagctttactggagaacttgaaactgcgtaaacaaaataacggtgcttttaatgaaacgctgttcagaaaccagttggctctagctacttggactattcagggagctgcaaatgccctctctggtgacgtttgggacattgacaatgagttttaaatgtgatacccatagcttccatgagaacagcagggtagtctggtttctagacttgtgctgatcgtgctaaattttcagtagggctacaaaacctgatgttaaaattccatcccatcatcttggtactactagatgtctttaggcagcagcttttaatacagggtagataacctgtacttcaagttaaagtgaataaccacttaaaaaatgtccatgatggaatattcccctatctctagaattttaagtgctttgtaatgggaactgcctctttcctgttgttgttaatgaaaatgtcagaaaccagttatgtgaatgatctctctgaatcctaagggctggtctctgctgaaggttgtaagtggtcgcttactttgagtgatcctccaacttcatttgatgctaaataggagataccaggttgaaagaccttctccaaatgagatctaagcctttccataaggaatgtagctggtttcctcattcctgaaagaaacagttaactttcagaagagatgggcttgttttcttgccaatgaggtctgaaatggaggtccttctgctggataaaatgaggttcaactgttgattgcaggaataaggccttaatatgttaacctcagtgtcatttatgaaaagaggggaccagaagccaaagacttagtatattttcttttcctctgtcccttcccccataagcctccatttagttctttgttatttttgtttcttccaaagcacattgaaagagaaccagtttcaggtgtttagttgcagactcagtttgtcagactttaaagaataatatgctgccaaattttggccaaagtgttaatcttaggggagagctttctgtccttttggcactgagatatttattgtttatttatcagtgacagagttcactataaatggtgtttttttaatagaatataattatcggaagcagtgccttccataattatgacagttatactgtcggttttttttaaataaaagcagcatctgctaataaaacccaacagatactggaagttttgcatttatggtcaacacttaagggttttagaaaacagccgtcagccaaatgtaattgaataaagttgaagctaagatttagagatgaattaaatttaattaggggttgctaagaagcgagcactgaccagataagaatgctggttttcctaaatgcagtgaattgtgaccaagttataaatcaatgtcacttaaaggctgtggtagtactcctgcaaaattttatagctcagtttatccaaggtgtaactctaattcccattttgcaaaatttccagtacctttgtcacaatcctaacacattatcgggagcagtgtcttccataatgtataaagaacaaggtagtttttacctaccacagtgtctgtatcggagacagtgatctccatatgttacactaagggtgtaagtaattatcgggaacagtgtttcccataattttcttcatgcaatgacatcttcaaagcttgaagatcgttagtatctaacatgtatcccaactcctataattccctatcttttagttttagttgcagaaacattttgtggtcattaagcattgggtgggtaaattcaaccactgtaaaatgaaattactacaaaatttgaaatttagcttgggtttttgttacctttatggtttctccaggtcctctacttaatgagatagtagcatacatttataatgtttgctattgacaagtcattttaactttatcacattatttgcatgttacctcctataaacttagtgcggacaagttttaatccagaattgaccttttgacttaaagcagagggactttgtatagaaggtttgggggctgtggggaaggagagtcccctgaaggtctgacacgtctgcctacccattcgtggtgatcaattaaatgtaggtatgaataagttcgaagctccgtgagtgaaccatcattataaacgtgatgatcagctgtttgtcatagggcagttggaaacggcctcctagggaaaagttcatagggtctcttcaggttcttagtgtcacttacctagatttacagcctcacttgaatgtgtcactactcacagtctctttaatcttcagttttatctttaatctcctcttttatcttggactgacatttagcgtagctaagtgaaaaggtcatagctgagattcctggttcgggtgttacgcacacgtacttaaatgaaagcatgtggcatgttcatcgtataacacaatatgaatacagggcatgcattttgcagcagtgagtctcttcagaaaacccttttctacagttagggttgagttacttccta

SEQ ID NO: 110172 - DNA, 1037 bp, Homo sapiens
ggtcttgaactcctgacctcaggtgatccacccacctcggcctcccaaagtgctgggatcacaggcatgagccaccacgcccggcatcttatgtctttcttgaaactaattgtaactgttgaaaatggaacttaccaggtggaaataactaaatcctgaagtaccttgaaccaaaatgttttcccctatagggacattttcccccaaaaggagaattgaactggaaacaatatagtacataggattatataattatgttcaatttcttaatgagaatggttttcttacatgctgggctcaaatatgagtgtatatcacagtccatagagcttggaacccctgtgcaaggtgctttcggagtcttgagcttatctgcgagttccttttatcagaatcttacttaacgcacgttaaattagaaaggcatacaaaagaatgtccttagaaataaaacttctcatagcgaataatgtctgtttcaggaaatgggcctgagtttacagtggctgtattctgctcgtggagacttcttccgtgctacttccagactaacaacagatttcgggaatgctgagaaaacagacagatttgtcatgaagaaactcaatgatcgtgtcatgagagtaagtgaacttttgggaaaggaggaactaaagtatgtgtaaaataaccgataaatcttacacttctgcaaagtggacaaactctaggagtctagaattcctttaagaagggagcattaatggtttagctgtcattttctgtttctgctgtctaattcagaacttagtcaaacctagtctttttggaagagacttgctgtaaaacttccatgtatgctccaatggggaaaagaatctgaacacatttaaagttttcctttgtaaaatgaatcagtttcctttaaaaaaattttttttttttttgagacagagtttcactgttgttgcccaagctggagtgcaatggcacggtctcggctcactgcaccctccacctcccaggttcaagtgattctcctgccttagcctcccgag

SEQ ID NO: 110173 - DNA, 1100 bp, Homo sapiens
ctctagcctgggtgacagagagacctcgtctcaaggtatgtttcatgtatcttctcttttttcattgataaaggcccaaacttcccagagagaaaaacatacagccttaaggaatttggctagaagtctattcagggcatatgatacgatagaacagggattctgtagaacctggaagaaagtagtcactctaggagtaggttagcttgagagaagtagcaagaatgtacttaaagcagcagataatgagatagaattggggtaaattgcggtaggaatatgttagaagcaagggtggaactgtcgtcactgttacctcgatggcgaagccagaatgtgaggctcttgctcttagaactcacgtgagtaccatagcctcgcgttgtcttgcaggacacagattatccttatttgggtaccaccatggacacctataaggaactgattgagaggattcctgagttgaacaaagtggcacgagcagctgcagaggtcgctggtcagttcgtgattaaactaacccatgatgttgaattgaacctggactatgagaggtacaacagccaactgctttcatttgtgagggatctgaaccaatacagagcagacataaaggtgagcactgattccaattacgtttttattttgctgaatgtcaagtattttgaaatgtgatgtgttcctgtgtgttcctgttggaagggtgattgtagccatagtacattttaaagtgaactgaggtataattgtatgtagaattggtaacttgtttgagagaagtcgggaggctgtggattagagacctaggacagagctcagcaggtgtttcagaatccagagcagtgtcaggttttctgtcactcatgtctcccaggcagcccgtcagtaggacacggaatatgaagatctcagcaaggagttgggctgtgtgcctctcgggcgtgacccggatggaaagacagcacagctagcaggattccatctcgtagtgatctgcgcatctaaaagtcaaatattctattaaacgaaactgataagcagggtgaggtggtgcatacccgtagccccagctacttctgctgaggcaggaggattgctgg

SEQ ID NO: 110174 - DNA, 1016 bp, Homo sapiens
ttaaaaattgaccattatgactagaaaatctattctaagttattgactagaccagtgataagcaaatttcttaagggggcagataataaaccttttgccaggctatacagtctctcttttagctgttcaactctgtgggagcaagaaaacaggcacagactgtgcgtagtgaatgggcatgcgggctgtagtttgccagtccctggagttaactttaaatgcaatcaaacagccaacacttactaagaaataagtccttggacttaagtagtcagtaaatttaattagtagtgtaggaaaaaagtagctctactagtaaggtaaaattaatattctcatgtgaatttttaattcccagagtttttagtcagatttgaagtaaggctcttttatccttaatacatatactgtgcttttacctttctactgatgtgctaattctagaaaagtttagaagctgattatataagttctttcttcctcttttttcttttttaaagatcactatgttgtagttggggcccagagagatgcatggggccctggagctgcaaaatccggtgtaggcacagctctcctattgaaacttgcccagatgttctcagatatggtcttaaaaggtagagtacaaattttgattcttttgaatattggtgcactgcatacagttctagatgttatactgtgctttgctcactttgcctgcattcctgtggttctcatgctagactctagttcttaaatacaaggcagattgtcttttgttgtagctgccttttcctttgaaacagctttccataaagtgtcttaactgtgctagaaatcaccagtttctttgagacagtggagttactgagccctagtgcttagtgtggtggatccagagtgataaggtggatcatagtccctaagcaatctatttgaaagcagtagcatacctctctactcatgtactgaggcctaacagctattgaaattttgttctgtttattcatttattcattttttgagacaga

SEQ ID NO: 110175 - DNA, 1116 bp, Homo sapiens
aatggttcaccactagagagtaagtttttttttgtttttattttgttttgttttgttttgtttttttttgagacaggacttgtgctctgttgcccaggctggagtgcagtggcgtgatctcggctcactgcagcctccgcctcccaggttcaagcgattctcctcctcatcctccttagtagctgggattacaggcgcatgccaccatgcccagttaatttttgtatttttagtagagtcggggtttcaccatgtcggtcaggctggtcttgaactcctgaccttgtgatccacctgcctcagcctcccaaagtgctgggattacaggggtgagccacttcgccgggctgagagtaagttttgtttatatgtcctcttaatctgtaacttcactggacaggagtaaaccctgggcaaggaacaataactcagaacttacgcctgctttctgattctaggaatatggaaggagactgtccctctgactggaaaacagactctacatgtaggatggtaacctcagaaagcaagaatgtgaagctcactgtgagcaatgtgctgaaagagataaaaattcttaacatctttggagttattaaaggctttgtagaaccaggtaaagaccgcccccccccccccccgccccgctttttttttgttttcttttctgttcctaaggatgtggctagagaaggagcgagtgtaggaatgctggcttggcttggttttatgaagtgctcaatcttgtctgtcctaaagttaattgtttatgtgttagtttcttttttttttttttgagaaagagtttcactcttgttgcccaggctggagtgcagtggtgtgatctcggctcactgcaatttccgcctcccaggttcaagccattctcctgcctcagcctccccagtagctgggattacaggcatgcgccaccacgcctggctaattttgtatttttagtagagacagggtttctccatgttggtcaggctccatgaggtcagagctcctgacctcaggtgatctgcctccctcagcctcccaaagtgctgggattacaggcatgagccaccgcgcccagcctatgtgtcagttttattgggaggtaataaggcc

SEQ ID NO: 110176 - DNA, 1500 bp, Homo sapiens
ttttttttttttttttttttgagagggagttttgctcttttgtccaggctggagtgcagtggcgcaattttggctcactgcaacctctgccttatggtttcaagcgattctcctgcctcagcttcccaaatagctgggaatacaggcgccagccactgcgcccagttaatttttgtatttttagtagagacagggtttcaccatgttggccaggctggtctcgaactcctgagcttgtgatccccctgcctcagccttgcaaggtgttgggattacaggcgtgagccaccactcctggcccgttactcttattttgcaaacaagtgagttaatttttcaggaagcaattaataaattaccagataaacaatttgaaatatttggaagtattataagtttagtcctctgtaaccatttggcctttagcataatgtccaggatgtattctcatttcgtatgatcagatcttcattttctgagctttatatgttttcttttaggttgcaaatgctgaaagcttaaatgcaattggtgtgttgatatacatggaccagactaaatttcccattgttaacgcagaactttcattctttggacatgtgagttatttcttgagtaaatcaccgttttgagttccttgagttgttcttggattcctgtattagcagaaatagcactgtgtcttccttaactgctcttttttctgggagggcgttagcagtaagcaagaagatagattacattgactttgaggctttattatttgttgctaaaagtactttgtcaatagtgccttgaatttgagaatttccatatgccatgaaaacaggagtcacattgtagagccactcagatttttgaggcttcaagttggtaaactaaggttgggctgcagccttataccaaacctgaatcttacagagaagttttgaggaagtatgtgatggagtgaattgctcttttgttttcctaggctcatctggggacaggtgacccttacacacctggattcccttccttcaatcacactcagtttccaccatctcggtcatcaggattgcctaatatacctgtccagacaatctccagagctgctgcagaaaagctgtttgggtaagtttttatttgaaagcggtcttgcatagtgaggttttatgattagggaagaacggtaatatgttgattaaaatgttaaacatgatgataattttccacatttgggaatttggaggatggttagctgttaccttggtacagatataaatgaatttttctctataaagagatcttaataatggactttggacttataaacacaggagaataaggagacttataaacccagtgaattccttgtgcaagattcctggcatagcttctgctcaagtacttctgtgctgaagcacgatgcctatagcagcccattcagttagtagagagaatctgttagaattcatattgggataaaatcctattccccgaaacatccatttgtctgga

SEQ ID NO: 110177 - DNA, 1082 bp, Homo sapiens
ttcatctggactcttatgagcttaggaacatcatgacacatctaaagttggtgtatgcaagtcactttgttgtaatagatggtgttttaattttgggacagatttattatcagacctttcagttaaaacctatttctatgatgtcctcaaggctaagattgttccaggcctccagtcccatgaccagcctacataggcctctttaatctaaatgcccttcagatgaaaggcagcatgggataaaagcatgaaagacataggaggccaaaaatcttgattttattccaatagctctgacctaaaagttgtaaagttttttagaactcatgtcttttttaggccttggcctccttttatctcttacttgggttgcctgtcttaggtttgatctataacactcttctgtctcaagattttagagctgttccgataccataatgctcattaaatctaatgtctttgttctagggtaaactggtccatgctaattttggtactaaaaaagattttgaggatttatacactcctgtgaatggatctatagtgattgtcagagcagggaaaatcacctttgcagaaaaggtgagtatgagttattataatattaaatacagtacttttggtatcttactcttcaggtaagtgatatttcttgttaatattcttacattctgaaaatcagcaatcttaaactctcataccagataatataatttattaaaatgctcaacaaatgaagtaagttccacttacctaatcagaagtgcttaagtgaaagctatttctctgtataactcagttttacgcatatacagaattcagctaaaagcatgttttataaaaaggaaaattaatagccaaacatacacaaggaactagagtggaacatatcaaaagacagtggtgatttctgcatttttaaaaaaagtggcagggctcacacctgtaatcccaacactttaggaggctgaggtgggaggactgcttgagccctggaggttgtgagatgtgactcgtgccactccagcctgagtgacagtgagactcaaaaaagtggttgtcttagatgggtttttgttatt

SEQ ID NO: 110178 - DNA, 1091 bp, Homo sapiens
gtacaccagaccttatggttaaagtgagagtatagtccaccccacaaaaatgtaagaactaatatgctgagtaaatagaaagaagtatgggagatcggaccaaggagcagttctgcttcagggtattcagatgcttcacaagtaggtgagaattgaaactatgcactctgttcagcacagtattactatcttagattttatagtagatctggaagctactcatttcccctaaaactatcctaagcagatacattgtgttatgatgaggctcttgaaggagtgctttgtagtgggtaaagaagctttgaagttacaagatttggggcaaaattttttttcttttgtgatattctggtcagtctagaagttttgggtcacagttcatttatctgaactatgagggataatattttgctttcaaaacaatttgtttaatccttgacttaaatgtttattttaaagtaaacttaagttcatttaaaaggcattttctcctccaggctgctgaatgaaaattcatatgtccctcgtgaggctggatctcaaaaagatgaaaatcttgcgttgtatgttgaaaatcaatttcgtgaatttaaactcagcaaagtctggcgtgatcaacattttgttaagattcaggtcaaagacaggtatgttgaaagatggtaaacttatttttatacaagtagctattttcaggtgtgctaaatatagcaaagactttttgttagtgttgttggcttttttttgaaatggagtctcgctctgttgcccaggctggagtgcagtggcacaatctctgctcactgcagcctttgccttctgggttcaagtgattctcctgccttagcctccagagcagctgggattacaggcgcacgccaccacgcccagctaatttttgtatttttagtagaggtgggatggtctcgaacttttgacctcaggtgatcagcccgcctgggcctcccaaagtgctgggattacaggcgtgagccaccgcatgcggcccaaaggcttttaaaataaaaatcaagcttaagatttagaggtaaatttcctcaagccaaataatgcaagacatactaaat

SEQ ID NO: 110179 - DNA, 1190 bp, Homo sapiens
tacaggcatgagccactttcccgtccactttatgcctttttaagtgccactaggaagacaatcatgagtagattctatacctgtcattgaatttaatctggttggaaagagagacccatgaattatttcaatacgacgtgcaagtgttttctttttatttatgtatttttttgtttgctcccactccaccaggaagcaaatgctacgctagaaaatatccgcaggacactggcggtgcagcagctcagtctcatgtttcaagggggtcttttggaaaaaactacctatgttttgaataggtagctatttgaaataaagctagtatataatttattaagtggtttaaagtatacaaaactgagatgcattatatactttaaaactacttagaatttgatgaaaaccagtattttcaaggcttacctgaaaatattaacagattaacagggatagattacaaatgaaattctgagttcagctctggaactttgtctctttaggatttatgattggctacttgggctattgtaaaggggtagaaccaaaaactgagtgtgagagactggcaggaaccgagtctccagtgagggaggagccaggagaggacttccctgcagcacgtcgcttatattgggatgacctgaagagaaagttgtcggagaaactggacagcacagacttcaccggcaccatcaagtgagtgccagctgctgtgcaagtatctagacaagtaattcaagaattatgataggccacggggaaacaataatggtgacactgtggggaatggcttgttagagaagacaagacttgtcatgtttagctaaagaggggaaggggcctgtaaaaaactgaaactatactggtaggggaaaaggtagaacttctctggggagtctcctttttcttaaaaaattaataggcccttgatgttttccccatctttgtagcttattgcttgctgtcattctctggctctgatttttcttcttaacctcttgtaacgttgtactaagctctgctttgctgacaaggacatcagtagcttttctctgttttaggaagcaacacatgccagaagtagcctttttcatctccttgatcatgggtaactgcctgccttaagtctctagtgcttcttaatttctgtgatactcacccattaacccctaggccagtcagtatccaga

SEQ ID NO: 110180 - DNA, 1175 bp, Homo sapiens
tttctgtcttctatcttatgcttagtcagaatttctgcttatttataactttgttttattcttgctcccttgctcccaccaacatcatggtctgggttactgcatagtatcctgaactgatttgtgcccctagtcccagctactcaggaggctgaggtgggggaatcagtagagcccaggattttgaggctgcagtgagctgtgatcacaccactgtactccatcctgggagagagagggagaccttgtctcaaaaaaaaaaaaaaatttacaaaaagggagagactgactgagaagaccagtgtgaactagcccttgactgggcccagggaagaatgttggtttgaaaggagaacaccctaaggaatatatagcaagttatagtaatggcccaataacaagcatatacctaaacgagcttttcctaaacattcccgtgcctgttcttcatcatgcctttttccgcaacacagtttggtggagaaccattgtcatatacccggttcagcctggctcggcaagtagatggcgataacagtcatgtggagatgaaacttgctgtagatgaagaagaaaatgctgacaataacacaaaggccaatgtcacaaaaccaaaaaggtgtagtggaagtatctgctatgggactattgctgtgatcgtctttttcttgattggtgagaatgaccattccaaacttcaatgttttctataaccaactctgggaagtctgttatgtcagctcagcatatagttattttgtaccttattttttttttttttttttttggagacagaggcttactctcttgcctaggctagagtgcagtggcaccatgttggctcactgcaacctcagcctcccaggtttaagcgattctctgccttagcctcctgagtagctgggactataggcgcccacgaccacacctggctaatttttttttttttttttttgagttggagtctcactctgtggctcaggctggagtgcagtggcgtgatttcggctcactgcaatctccgcctcccaggttcaagcgattcttctgcctcagcctcctgaggagctgggactacaggcgtgcaccaccacacctggctaatttttgtatttttagtagagacggggtttcaccatgttggtcaggctggtctctaactcctgacctcgtga

SEQ ID NO: 110181 - DNA, 1050 bp, Homo sapiens
ccaccacgtccggctaatttttgtatttttagtagagacagggtttctccatgttggccaggctggtcttgaactcctgacctcaggtgatccacccatctcagcctcccaaagtgctaggattacaggtgtgagccaccccgcccagcagtatgtgtcacttttgtctactcagaacatagtggttcgtacttataattgcagcactttgggaggccaaggtgggaggattgtttgaggccaggagttcaagaccagcctgggcaacatagggtgaccttgtctctacaaaaagaaaaaaaaagaattatgtatataacaaactttaaaaaggatcccacttaatttagttgtcatgtaaactatggttaaataccttttctagaaaagtgataatgtattttaaaaatttaatgtatcatttagcctggtaatagaaagctcactaatctgatacagtagtatctttctcaataattctctattctgatacctaggttcttctgtgtggcagttcagaatgatggatcaagctagatcagcattctctaacttggtaagatattttcagttgtatttctgtgtctgcaagaatgtgaaatatacaagcatgactttaactgagtaagcatgaaataataaccccaatctattatcaggtattcatttacatttgaattggtagtcttgaggcataactgatctcacaaagagttcagccttcagtagggttaattatggaaagtcttggaagaattctcagagtggttctgggtgtggtagacggggacagcttagtagataagacgaattaaagccctgatcaaaatgttttagtaggagaagtaaaaagcaaaggcttgcggggcgctgtggctcacgcctgtaatcccagcactttgggaggctgaggtgggtggatcacctgtggtcaggagttcaagaccagcctgaccaacatggtgaaactcggtctctactaaaaatacaaaaaaaaaaaaaattagctgagtgtcatggcgcatgcctgtagtcccagctacttgggag

SEQ ID NO: 110182 - DNA, 1339 bp, Homo sapiens
cagagtttcacgcttgttgcccaggctgtagtgcaatggtgtgatctcggctccctgcaacctccacctcccccaggttcaagtgattctcctgcctcagcctccccagtagctgggattacaggcatgcgccaccatgcccggctaattttgtatttttttggtagagatgggatttctccatgtttggtcaggctagtctcaaactctcaacctcaggtgatctgctcgcctcggcctcccaaagtgttgctgggattacaggcgtgagccaccatgcccggccatcgctttgtgttcttaaaattaatttaaaacaagaaaacttgaggaatgatggttcagatgagtgttaaaacttgcaagatgttttttcctagaaaaggatgattaaaattggttcagggtggggccttccagttctggctctaatgattgggtccttactgttctggtggagtggtagtgataagctttttgtaacagaaggggcaaaagattgtgcttctggctgggcgcagtggctcacgccttcgatttccttgggatgttcttatcaagtaactaatcttagcactttgggaggccaggtgggtggatcaccctaggtcagaagttccagaccagcctggccaacgtggtaaaatcccgtctctactaaaaatacaaaaattagctgggcatggtggtgggcacctgtaatcccagctactcggagtctgaggtgggaaaatggcttgaacccgggagggggaggttgcagtgagccgagatcctgccattgcactccagcctaggcaacaagaccgaaactctgtctcaagaaaaaaaaaaagattatgcttctaagaatatggtctattgcatatggacactggtttttaaagcttgaatttaaaaagaattttttgtaataggttttagagctttttctttttcttttttattatttttttgagatggagtttcactccgtcacccaggctggagtgcagtggtgccatctcggctcactgcaacctccacctcccgggttcaagcgattctcctgcctcagcctccccagtagctgggattacaggtgcccaccaccacgcccatctaatttttgtatttttagtagagatggggtttcaccaccttggccaggctggtctcaaactcctgacctcgtgatccacctgcctcggcctcccaaagtgttgggattacaggcatgagccaccgtgcctggccagaaagctttttcttaatgccagttataataccctttgctttacaatttgcgtatacctcacagcttgctttgtgccgtgtgtgtttaatatgccctaagtgt

SEQ ID NO: 110183 - DNA, 1004 bp, Homo sapiens
cgtgttacaggcattaattagatacgggtttctgtaaacttacccttcggctctggtacaacctgatcttgccatgctctgcctgttcgccttgtgtgtggattctgttttctcaaggcagaatccgactgaacgccgcaggtgttcacattaagaatattgctagcagttctcactacaagacgggagccataggagtgacttatttgtgaaagatacttggagattagcggtgtggtcagagggctgtgctggattgatgggcgccggagaggccgattgtgtcacattctgctggacagttcttttaaggttgggagggtgggtaagaaaatacattctgattcggctcttttcggataacgctttccctctgcttactgcttgtagagacctcacttacccgggggactggattctgcagctttttccattttcttccccgttgataagaggattaaagtaggaaattgtatttggctaccccatgcttatatgctaagcttactgtgaaaattaaggttaggctgtctagagtacttgtggaccctgctggttccccccgccccccggccctgaattttgggttacaatatgcttctcaagaaaactcagagttaagataatttttgtcatcgattttgcaaggttatatatagcatagcatccttcaatttcctttggatgttcttatcaagtaatggtggctgtaaacctagcctgtgttgaagattgttagatagacagcagtttggctaactccgccctaaggcgaggcagttacttgcctctgataatgtatttaaatgtcatggagcaagattcccagctaaacctgaatcgatcacaatgctagttaaaaatgaccctcggctgggcgcattggctcccgcctgtaatcccagcactttgggaggccaaggcaggcggatcacctaaggtcaggagttcgagtccagtctgactaacatggtgaaatcctgtctctactaaaaacacaaaaa

SEQ ID NO: 110184 - DNA, 1006 bp, Homo sapiens
tggaggagggtcagtaggaagagcactttaggaatcccccctgcaggttcccagcccttgagtgacacctccttttcccagggggctgatgcctcaccttgatgtaagatgccagggtctgagaagttgagtgaaacaagactgaagaaggtaaggacaaagagggagcctgtgataacaggaaaggcccactccccgttctgagccagccacctgcaactgagaccagaggcaggctcggtcctgagcaggggcagcccaaagcccccggcccaaggcctgtggcttgctcaggtcaggacccacagaccttcaagccagatctaaaaatccaggctccaaatacccaggcagactcataatggctccaccaaatgtcaccagcatgaccagccacccaaagctcccaaaatgcacaggcacccttgacctctgcgcctttgcacgtcggttcctggaacagaatatccccttttccctgcccgcacccttgacctctgcacctttgcacgtcggttccctcgaacagaatatccccttttccctgacctctcccccggtcttctgcactcccctgcctccatcctatcatcttctgtttccctggctgtctctttgtgggaaacctaacggcttgcctggaaaactcacgggaatgcgaagaagaggccactgaaaaagaccagcagcaccacattgaaggcagcaaagaggctagggaggaaccagggacgtgggaccagaggcaggggatggggctccttcaccagcggcgtggcatccgttaagagtgtcatggctgggcctccttcgcctccaggggaggtcagagccaccaggcttcctcccccagcccagcttccagagctccatggccacggcagcctcagagccgcagcccagggtgaaaggaaagaaggcccagtgtgacatcacagaggctgggggacctcagcagaactgtctgcagccctgctctagctgcctccggtgacaggcacttcca

SEQ ID NO: 110185 - DNA, 1049 bp, Homo sapiens
agtccaggtctggagaagagaaagtttcatacccaaccttgtggtctttccttcggtagtacattcgtgtcagcacagtcattagaaaagtctccagtatgaggaggtggcaattcatcactgcagtgtagggtgaaatacagcgtaggttatgctgagttacagaggtggtattttactagcagcccgggcacgggagttgagcaacactttctccagtttatccccaaatcaggacttagggatacgaaattgtcataaataacacagcgggttaatggtagagccagaaccggaagttggctgtctacttctgtgctctgaggctggcatacagtccatttcttatgtgtgttcaatcaacatgggcttctgttttttaaccattcccattcctctcccaggagctgaggactgaacccatggcttcctgggttggccctcagggctggcctcaagctgtggggtttcacttctcttctgtgtgatcagagaggtcatagtttccttaaagcctctgttgggatttcccgaagatcccttctgaacactctgagcagaagtcaggctggcctaatgtctgttctggggccccttctttcctgactctccccgtctcatccatcccacgatgggacaggaggcttaacgtgctcaccttgagacctggttttagaggaatagggaggcgaacaagcaatctgcccaccgttggccaagactgagaagatggagggctgtagggcagtcaggatgaggagaacctgcggaacataaaagagaggcaagggtggactgggcctgccctcacggcacagaacgcagccagcccactgccgggccttgcccttccgctgggcaggttccacccaccgtcagatctgtgcagtcacagagggttgaggctctcacttcattaaaaatctgtgggattttcatctttaggcaaatgacattcttattttctacccagtagtttattagagtttctgacaagatataagaactgattaaagggttcatttttaattccctttctcagccatggc

SEQ ID NO: 110186 - DNA, 1354 bp, Homo sapiens
acagcctctctaacacacatgaagtatatgggtaccagcaaactaaacctggagagaggagcttcaagctcctcgactgtgccatctggcatttattcactgcttgtagctgagtttctgtggtcacaggagcagccgtgacttccgttgtccactttaaaacatttgctttagatttcagtttatcattttgaattaactggagtacaaaagtctgccaaggaaatgttaggtggtccagtccagtgtgaataaaacaggaaaacatgtttaaggacttaattgatgcagacacgcacagcaggtttatttcagagtcaaagatcttggtcacctgttgtactgtcccttctccaaagtatgaacatactgtttagtgagtgttgctcctgaaggtatacgctgcattaggaaaagcgttatcacccaggttcaaccacctttagaagacttttttccagttggggaagatggttgcagtcctaagcagtgggagaagatgggagaggtcggtggctgaggaggtgctaagcaaagaggactccaacacacaatttatgatgtggtgaaccagtttgcagtgatgagctcacacacaacttcaaaggcttcacggtgatgaacgagaatgagcgctatgacgcagtccagcactgccgctacgtggatgaggtggtgaggaatgcgccctggacgctgacacccgagttcctggccgaacaccgggtaagaaactggacacatattcccattccttgtttcagaatcccctcaactctcaaagctgctggcacgtaggctggttttccactagccgtgttttacttctacctcttatgtaagtttcgtaggagatgacagtgatattactagtgataacagtcacccctgacgtttatatggggctggatggtttgcaagcacttttacatccattctattccattttctgcccacagcaatcctgtggtgtgtttgtcatttccgctttacatatgagtaacaagggctagagaaaccaaataacctgctccaagttacaccattggcagggctgggaactgaactcgccacaagttacaccactggcagggctgggaactgaactcgccacaagttacaccactggcagggctgggaactgaactcgccacaagttacaccactggcagggctgggaactgaactcgccacaaattacaccactggcagggctgggaactgaactcgccacaagttacaccactggcagggctgggaactgaactcaccagttacgagaccttccccccacaccataggcacatctacccttagaacatgccagtctcctgagaatatccatagccccagg

SEQ ID NO: 110187 - DNA, 1029 bp, Homo sapiens
ccttcacttcttgaagaaggaaaaagtcttcctgattgaaaattggtggctgggtgaggtggctcacgcctatgatcccagcacttttggagaccaacatgggtggattgcttgatcccaggagttcaagaacagcctgggcaacatagtgagacctcatctttacaaaaaataaacaaaattagcctggtatggtggcaggcacctgtggtcctagctactctggaggctgaggtagaaggattgcctgagtgtaggaggtcgaggctgcagtgagctgagatcacaccactgcactccagcctgggtgatagagtgacaccctgtctcaaaaaagaaaaaaaaaattggaaagatctgagatggtgttagtttcagttgcctgtgctgctctcattccctctttagtactaacattctggatgtgtgtgtgtgttgtatttattttttaggacagtttattctgcgttgtagcagcatttggctgtttctactactgaatgaatctttgaaaagctggtaaaagacatgaccatgaagaaatctgaactttttaatattgttaaatatcttgacaaaataaagatgttagtagtttgacaactgaatctgttgtgttttaggccttatatttttaatgttttgattttgttacactatgttctgtttctttctttccttccttctttctttccttccttcctctctctctctctgtctctctctctctctccctctctctctctttctctctttctttctttttttttttgagacagagtctctctctgtcgcccaggctggagtgcagtggcacaatctcggcccactgcaacctccgcctcttgggttcaagtgattcttctgcctcagcctcccaagtagctgggactacaggcaagtgccaccacgcttggctaatttttgtatttttactagagacggggtttcaccatattggccagactggtctcaaactcctgacctcatgatccatccatttcagcctcccaaagtgttgggattaca

SEQ ID NO: 110188 - DNA, 1027 bp, Homo sapiens
ttgtggccccgacccaggaactgactcagcgcaagaagacagctgactccctgtgattccatccctgatcaatcagcactcccggctcactggctctccacacccaccaagctgtccttaaaaactctgctccccgaatgctgggagagactgatttgagtaataataaaactgcggtctcccgcacagccggctgtgcgtgaattactctttctctatggcaattcccctgtcatgacgaatcggctctgtctagacagcgggcaagtgaaccccttgggcggttacagcctcaagtgatccaccggcctctgcctcccgaagtgctgggattacaggtgtgggtcactggcacctggccgtctcccaaatctttcagcctcaggaagccttttgtggcatgactggttttctcagcccaggccctgttcgtcatttatgtcctcagactcccatttgctcctccctaggagcatcaccgacaaagtaacagcaagtagctccatctccagtagagccacactccgcggttattaacacgtctcaaagaggtgaagcttcagtgctttcatggcagcgaccgtgcctctgttgccctaggaggctcgccacatggaaatgaagagatagtcccaacgctagccttacgagacccgtttatctcaagtacatgatttcttaaagaagtgtcttgttcagccgggcgcggcggctcacgcctgtaatcccagcactttgggaggccgaggcgggcggatcacgaggtcaggagatcgagaacatcctggccaacacggtgaaaccccgtctttactaaaaatacaaaaattagccggttgtggtggcgggcgctgtagtcccagctactcgggaggctgaggcaggagaatggcgtgaacccgggaggtggagcttgcagtgagccgagatcgcgccactgcactccagcctgggcgacagagcgagactccgtctcaaaaaaaaaaaaaaaagaaagaagtgtcttgtccataagataatcattgaa

SEQ ID NO: 110189 - DNA, 1027 bp, Homo sapiens; identical to SEQ ID NO: 110188

SEQ ID NO: 110190 - DNA, 1027 bp, Homo sapiens; identical to SEQ ID NO: 110188

SEQ ID NO: 110191 - DNA, 5397 bp, Homo sapiens
ctgagatctaattcctggccaggtgtggtggctcatgcctgtaatcccaatattttgggaggccgaggtgggtggatcacctgaggttgggagttcgagatcagcctggccaacatggtgaaaccccatctctactgaaaaatacaaaaattagccaggcatggtggctgtctgtaatcccagctaatggggaggctgaggcacaagaatctcttgaacctgggaggcggaggttgcagtgagccgagatcacaccactgcactccatcctgggcaatggagcgagactctgtctcaaaaaataataaataagatatgattcctgcctgttttatccagttagagagacacactacacatgaaataattggagagcatgtaaatgtttacctattagttcaaacttagaaaaagggaagaatatgttttagttagcaaagtcttaaacaagactgaagtggcaagcactgtagctcacgttttcttttgactcacctttttctttagctccaccttttgtaacttctagatttggggcatgaagttctgccactaaggcataaccagtacccaagtaggaaaggattattgatccctggagtaaagattcctagcttgcggggatctcactattgatcccccggagtaaagattcctagctcgcaggaatcttacttgcacacttagggaaaataccagagggagccactagcaaccgaaaaatgaaggaaagatttaatttctctacccaggtacaaatccaatgcatagtatagtatatgttatatgcagaaagggcactggaggtgtgagagccctttgggtaacagctctgctagttgttaccttcacacttctctttcttcttaatctctggtttctcgtctgaaaaatgagataattggactagattaatagttctcagccttttctagaacaacaaattagattatctctgaagtccttttccaaaatttcatgcttccagtctctccccgtgattgcgtattatccctaggctaattaaaagtgtgctggttaatcagtttctttactttttttttctctcttttttttattctgtgttcaggtatcatttgaccaacaacttgctcttaatcttactgcgatgactgaaatctccaaagaggagagtatagtagttataggtctagtaataataatcttgtaaacaattcattattttttaaaacttaatgctgtgtgcctaatcagtgttgagtatgactaaaatgtaaatgagaaccaaatatgacactaacgctggcactaaattttatttttacttgtgtacttaaagtactttactggcctgttgggaaattgatttgtataagattcacacctggttttggcagaaacagctttttaaagatacaattaggctgacttaaaaatgttttttattccacagaatgtatctttattatgtcattcttaccgtctctctgccttttttgaccatcatgtaactacgcagtagtaaatcatggggtgcaggctgatgaattagtagtctttgtaaaactaaaatgtaatgagcataggaagagacagctcttctggtgaacatggcagttttccggtaataccagccttgatgaataggctaaagacagctgtgtactatggacattcaacttcactggattgcctggcttagcttttcagttattgtcttgccgtgaaacatggtgttgcactgtacacattttagaatagtggcaagaatgttctttagaactgcagataacccaacagagaataccataccaatatatcggtttctcctgttacatagagatttggtatttcagtgatggttatggtttttgactcacctgtgtgtcagtcctgctagagagacagtatagaatcaagaatttcttgatgtctttttaaaaatagagattataatggccttgctagttgtcctgtgaagtgacagacccttaattagaaatcttttaatcctgctttccattttacttctccaccatttatttttaacattcattctctgaaaatagttatgatttttagtgtaattggctatgtttaagaaattccatttcaaagtcttaatatgtaacaatcttcattttttataaaattgaaggacatttttgaggcaaacttacttttatagctcattttctccctagttaaggagaattctctggtttcatatagagaatggctagctctgtgataccccaccctctttgtggcctaccagttgctgttgtgttgcttaaaattgcagatattctcataaacatgatgatttttggcacaggcctttctttgctattgatttcaaaataaagttgggcaatccaatttgaactactttaataaacataatttagcattcctgtaatgagaaagtattttcaaaagataaccagatttatttctaggattagagatggcaaataccaatgatagtatttttcccaagagcaatcacagattaatctataaatatgagaagtcgcattattgtacttaattctttggcaacaaacagcaagtttttattgtttaattgtatttcctctctagagatcacaatactctgggtattttatatcccttctaaaggtcatttgggttttcaaatgggaagaatagtcaagctaagctggactaaacctaagtaatattttttctcatcaaaagaagttattaatctaactgggttagcatgagtcattcattttttagacatgataaatgggaaacatatcaaatcattagataaattctgacctggaattgaattccccctttcttaaaatctttttaatttgcttttttcatagactcagtatggaactcttaactgataagggagagattcttgatctggaaccgttccctgccattctccttttttctctctatctaggtagctggttccatagtgcccgtcacgagggtccatttcagtttgatgacattagactgcttacactcagctggatgccttgctgtttgcagcaacatgattttacagtatgcttttctcaaagctttgcattcttaatggagatatcaaatggtgtaattccaaatataaatatgtttatgacactaatcatatgcttttaacaataactttttgataacttattgccctgtaagttaaaccttacacggagtgactgttgccatcagaaaatcccctttcacctgctagagagagtgaaagtagtgcgtggcctccacttttcagttaacgagtagcaagcttctagtaggggctgcttatctgacccatgtggggtcttgggccttgttactttcctgggttcgtcccttcagctggaaaggctgttgaaaacacttgccaggaaacagtaaagctgtgagagaatcttctagtcttagatatagagaaatgagtaccagttgatgctaacacgatacttagactttgaggggcttccatccaagctttggcatgaatctgttagacacggttttcttcactcctctgataatctttttttccagaatggttttttgttgttgttgttgttaacaaattctaaacatccagtgttactttttgttttgtttgttttgttttgttttgttttgttttgtttgcccttcaggaaagtcctttttcgagtaggtattgattgttccctggaaactctcagcagtgtctgtgcaggctctgtgcatgctttgtatgagttcggcttgaacaatgcatttgaagtcacctgggatgtccagttctggcatgtcttcattgattgtgtttttaaacatgtttcatgtttcatgtcattttccaaacctcactttacatcttactcagagaagttaatcaaggaatgaaatttctagggggatagggatgatgagggtgggttgggggcttgagtgaagtcaacttggggtatttgctttaaagtgttttctaaagcagttcctaacagtatttagagattccctgggatgtttgtggctcaacttattctggacaaagtgtgtgtgggggtggtcttactgagatttgcattcttaatgcaggacaggctctaaatttcatctgtactctaaatttgtgattgaatccaagaagataacagagacagtgctcctgttgtaatgtttctggcaagtgctccctaaaatgcacatcgaattctgttttctgggccttttctccaatggtgctaggagataccgttgatttctgcagctcttctcagtggtgggaagaagtctttgggattgttgagcaaggggcagctggaccatccactaaatttttttgttcaagacacattagagaccctcctgtatatctagtaagtcataataaaggtgcttgggaaagccttaaatttgaagacacatggaggcggtagaaaattaaacttgtaagaggagaaaaacatgccattaggtaacgcagagttgtaactactggctaagactcaatggaacttccacttgctctaaaaccagggaaatcttagataactgggtgtgatctacctatagatctacctagtctataggtaataatttccagaaggaggatcttgctgtcagttggggatcctctggtttggtctgtaccaaattgtgaatactcttgctgtgttgtacccagttgctttatattaatactgcaacttgaaacggggagggtggggggacaatggggtgggggagggaagggagtgggacgataagtcttttgaagacatcagctcactgtgctgagagagggaccaaactcaaggaaacctctgatctatacattcaactgctgcatttttttataaatacatgtaaatgtcctgttgtaatatttgatcttggaaataaaaacaaaaacttttcagtattagttttttttgtgttgttgtttttacaagataagactctggatattactttcagtaatacaattgagattccaaaagcttgccccctcacgttctcatttaggtcagttactattgattgacaaaggttactttgtagtcccgttgttatgtgtaacgtttgctagccttttttctgctctttgtggtatgtcaaacattcatggtaaacactctgtaaatattagtccagttgttacagaaacattgggtaagctaggcttgttaggtaagtatgattctgtgtttgacatacttgggcgaatattcagtgtctgttctttcagaccagcagtaattactaatggttaattaaggacttagcttaattgaaggaaagataattactaaattaatgggcaaaaaggagatacgattatatggtatgacagaaattgttattgctgctggatgcagtggctcatgcatgtaatcccagccctttgggaggctgaga

SEQ ID NO: 110192 - DNA, 4684 bp, Homo sapiens
ccagtttctgagaaggcaagaagagattcagtgcacaggtggcaagattgggtgtaggcagaatgaaggacatatcttccttgataaaagggagaaaggaaaacggataaaatgttttaaaatgagaacaataatttaattttatgaatagtgactgggtatatttattggggagccaaataataactgtgtatttcagtatcacttaatggctgtaagtaattggggtcagatttatctccccgtccaaaggtttatattggcccttccccaagggcaagctttggttatatgaaagaagaacttacatttaatagctgatctaatatgattaaaaagagaatgttttctatttaattcactaatatgctctttcctctttttccgtctaatggctttgtctttctcttgtttttataggctttggtgaagcacgtgcagtctaaaggatacccaaatgaacgttttgaacttctcaccaactttcctcgaaggaaattatctcatctggactatgatattacattgcaagaggcaggcctttgtcctcaagagactgtctttgtacaggaaagaaattaacaccatggcttgacctctctcagcttaccccttttttcccttttcctgtgagatacatgtcactaagtatgcattttggctcataggaccacagagccaaagttgggcaagcaagtcaccttccttctcttatttcttgatctctcctataatcagtctctttctccccctttgtttctttctcctcttctgttttctcgctccccactccgtacccttctgcctccccctccccccacacttttctttcttacctaatctggtgaccaaactgaagtgtaaggataagacctctcctagtactagcagcaggaattgtgtgttccagtaagtggtctcttgcacggcacttttttgggatcaaatgttaacgttactccccagactcttcgggcaaaggaatggctagattcagagtaagaacaaccctcccttttttgtaagtccccgtgtttagcagggagaagaaattctctaacatgggtttggttttgttgtgttcttcatgtggaaatgtcgcttaacaaaatatccaggcttttgtttacgtggaaaaagcatcccttgtaatgattgctcatcatacttaaaaacctttttcaaaggattttcatgttcccagctataaggactatttccatgacatgtgttattggcagaatgagtgttaaatatggagcatatagcatggggtgactttcattgtcctaacctgagacagttttccttattactctgtattgatcctgctagtccaagaatggacatgaagtgaacctatcgtggtgactgggataggaaggtgcttgctatttttgccagcacagcatattagttcctttggagccctccattgtctgagtctgcagtgatctgtaggaaggcagctggtcaataatcatgtagtacaatggcttggaattgtaaccactatggttattgattgtcctgtgttgtttcaggcatacttaggtatgtccctggggaaaaagaaaaccattcagctgagagttgctaaccatgttcttttggttagaaataatggttcattttttgcccctggttggaatagtctctaaaaggctctggtgactgaattgaacatgagtccgcatgctgttttctttcaaaaggtatcaaaacggaaagcctctctaaggggaagacctttcaactccattcagaagacaacatttagtaaggaggatggcggaggttactagtaattttcagatgtcttgggctttttctgccaacaaaacccaaaatcaaattagagttggtgaaagctttcttcagtgtttttagaagaggccatcttgaatctgtagaataccatttacacatcaacttcaccctatgctcatttcgtattttgagcttaaatggagtcctctgaagggggggtagtcgtgattctggtggcaaaactagaacttttaacttgtaaaatgaaaaatattaaatggacctttttgtcagttgaggatttagattgattcttttatctgaggagcgtatgttcctcagatgttgcgtagagacctttaggttttcatctactttaagattgctctcttggcaattaggggatttgggaaaagaagaaaaaaagatgccatgtgttgctagtacacagttataggatatggtttctaatggttgaattttgaggaactctccctaaagaatgagttttatatctcctcaaggaaatcatggaaaaatctgtttattcttcagtgagtccttttgaattaatgttcttaaatttttttctaagtctgtgtaagtgcttatgtataagtatataattgtataaatatttataaatatatttatataattacggtttcatttctaccttgagtcaaagttctgtctttagattggtgactgagtaatacttacactttggtgttttttcttaggttcttgaggcttacttaactagcagcttctgatttattgagtgaaagatggttttcatgttaattcctcagttgcatctctgaacttggataacatacttgccgtttgaaaaatagagctgtatactgtcaaaggtgcactggagggtaaaacatttgttggtagtagacaagctcagaaatccaaaaattcagggagggcacagggtaagaagagaggtttgctcagctttgtgctctgatggcacccatctgtactccagcaaagtcatagctgaagcccaaatcgctcaaacgtgtgaagtcaatcatttttcctatagggctctgtttccttttctttaccttctagcttctcttgataaaacagttgggagaactgccaacgtgttcatcagtgagagggtgtggttctttccgatatgttcagcacgtgcatattcatttatgagaaaccaaagtaacttcttcaactcgggttactgtgggatgattaagtagatataaagtgatttaaaagacagcatggtactttcactcagcttaacatgcagctgggatgtctacaatacaagatgtggtgggttttattttattttattttgaggcaggagtgtaattatcttagggttgatataaaggcccatgggaagagttacggattgtacatgggaagaatccataaggagtattgccttgctcaagaatttaatccgctgacagtatgcttcttccagtttgccttacttcctctgcaagtttctttgctccttagggcagaggttttattgaatagattaaatgaggtcagtaagattagttaaaaatagtcattccttgtgggtgttggacacagcttgaaaggagtgtttaaaaaaaaaaagctagggaggaaaagaacaagaaagatagacttcgagagtgataagagaaaaatacagggagatggaatggaaactaccaggaaggccgggcgcggtggctcatgcctgtaatcccaacactttgggaggcggaggtgggcagatcacctaaggtcaggagatcgaggccagcctgagcaacatggtgaaaccccgtctctactaaaaatacaaaaattacctgggtgtggtggcgtgcacctgtaatcccagctactcagaggctgaggcaggggaatggcttgaacctgggaggcagaggttgcagtgagccaagatcgcaccattacactccagcctgggcgacaaagcgacactccatctcaaatttaaaaaaaaaaaagaagaagaagaagaaaactagtgggaaaaaagtgagaggaatacttttttgaaattggtatcggaaggaactggagaagagaaaacaacagtgccaaatgagaaaagaacaggaaacttaatactaattggcatgcaccagatacttttgtgtacatttgcctcttcaatctcccgaagaatcgtacaaaatgtatactttcttcccatgttaagaaaacaggtatagagaacttattcaggactcatagctagtgagtggcaaatcagaattggaatccagagtccatgctgtggtctccttcagcaagagaatcaagctacccagatgattctcttctcattgtttggctttgtaaagtgtcacttagttttgttcccataaatatagaggaagtagttgggttaaagttgtgggatttgcactatgcctatacatttttatttatgccattattttgagaggctgattattgcttttttaaaatgatgcactggtgaagatgtgaaagtaaaattgccacgtggcattatttgccaagaataaatgaaaagggtaaaaaaacaattttttctttttttaaacatttttcagaaaagatacaattaccttttttaataggtgagcgccaccacgcccggctaatttttgcatttttagtagagacagggtttcaccatgttggccaggatggtctcgatctcttgatctcgtgttccgcccacctcggcctcctaaagtgctgggattacaggcatgagccactgcgcccgatctacaattctgttttctgtgtcccatccataccagattattgaaccctctgtgtgtatgtttttaaatcttgtatataattctacttccttgacttacaagtcaacaattagctattgagttctttatag

SEQ ID NO: 110193 - DNA, 1231 bp, Homo sapiens
ttgggaggctgaggcaggagaatcgcttgaacctgggaaggctgaggttgcagtgagccgagttcgtgccactgcactccagcctgggcaacaagagtgagactccatctcaaaaacaaaacaaaacaaaacaacaaaaacgtgtgtgtgtgtatatacacacacatatatatatctccattccaatttggctgtgtaagacacagtccttgctcttaaagtagaagggatacagtcagcagaacataataatgaatggcaagctattatatttcttatgccgtttgacttgttttttggtttaacttgttctttttcctgtgttttatgactccatctcacaggagagccttatagatgcaagtgaagacagccagctagaagctgccatcagagcctccttacaagaaacacattttgattcaacacagacaaaacaggatagccgctcagatgaagaatctgaatctgaacttttttctggcagtgaggagttcatatccgtttgtggctctgatgaagaagaagaggtagagaatcttgccaagtccagaaagtctccccacaaagatttggggcatagaaaagaggagaatagaaggccgctgactgagccaccagtcagaactgatcctggaacagccacaaaccaccaaggattgccagctgtggattcagagatactggagatgccacctgaaaaagcagatggagtagtggaggggatagatgtaaatggtaagttacatttagacatactttacttcaaacttagatattggggccgggcgtggtggatcactgaggttaggagttccaagaccagcctcgccaacatggcaaaaccctgtctctactaaaaatacaaaacttagccaggtgtggtggcacgtgcctatagtcccagctacttgggaggctgaggcaggagagtggcttgaaccagggaggcggaggttgcagtgagctgagatcacgccactgcactccagcaaaacacttgagtaattgctgaatggctgtatttatttacatatttatttaaactaatattctgtcttaaactcctgtatcccgttttttttttttttttaaacccttcctttaggaccaaaagcacagctgatgttgcggtatccagatggaaaaagggaacagatcactcttccagagcaagctaaactgctagtaagtacaggcttgctttggttcagttccgaccactgcaata

SEQ ID NO: 110194 - DNA, 1849 bp, Homo sapiens
gttggccaggatggtctcaatctcctgaccttgtgatccactcgcctcggcctcctaaagtgctgggattacaggcgtgagccaccatgcctggcccataatcttaatatattgtgatttattaagatgtatatggttgagagttatgaatgacatagttgacagataacttgagcaggaagaataatacctcatctgaactgggaaaggaggaggaatgggtcaatatgtttatggtaaatttccagagagtgctggaagtgggaagttgaaggagttcaaaccagatttattttctttttagtgtaggagtgagatcttaatacataggccggaggtatatttggagagctaattgatgttggtgtataagaaggttatagttggttcttttcttagaggctgacttttttttttatatcaatgatttaacaggtttatcatgacagtgaggaaggtcagagatacatacagttttataagttaggggatttcccctatgtttccatattggacccacggacaggtaagatttatatcagcacgcagcttttaacctattacttgtctttcagttacctaaatgattgatctttaatatttgactggatctgttttcagaattgcagtaatttaggtgaaggtttcgtttttttccctttataattatttaaacatctattgatgtatgtatttaggacatctttttctggcaacattgggagatggtagtattttatgtttgtgcagttctgttcttttgaagaataactgatatgttcatcttaccttttttaagggattttttaaaagtttttttaccagctgggcgtggtggctcatgcctgtaatcccagcactttgggaggccgaggtgggcggatcatgaggtcaggcgatccagaccatcctggctaacacggtgaaaccccatctctactaaaaatacaaaaaaaattagccgggcatggtggcgggcacctgtagtcccagctgcttgggaggctgaggcaggagaatggcctgaacccgggaggtggaggttgcagtgagccgagatcgcgccactgcactccagcctgggcaacagagtgagactccatctcaaaaaaacaaaacaagacaaaagttttttttatcattaaaatattaagattgcccagatactagttgtaatcccacctgagaagcagagggtggagctggttttattaattgatggtgttttatatagatattgctttgtctgaatctcttcttcctaaatggcagtaagtgatagcagcagataagatagttgccctatcattacgggtgggaatctgttaggtgagtataattgatgtgacttctaggttatgaagacactatgtagcataagctggtggagaggatatgtctttacagtacactttatgcatgtgctgaaagagatacttaatgagaatgttcagaaagatcctagatattatatttacagatcctggtttttaatgtatgcatatgctgaaagagataatgagaatgttcagaaagattctagatattacctttatagatcctggtttttaatctatgcatatgctgaaagagatacttaataagaatgttcagaaagattctagatattacctttatagatccaggtttttaatctatgcatatgctgaaagagatacttaatgagagtgttcagaaggattctaggtattatatttatagatcctggagaatgttcagaaggattctagatattatatttatttatagatcttggtttttaatccttaggtcagaagctagtagaatggcaccagttagatgtatcttctttcttggaccaagtgac

SEQ ID NO: 110195 - DNA, 1026 bp, Homo sapiens
gcggcgggagaatcacttgaactcaggaggtggaggttgcagtgagccgagactgccccactgtactctagcctgggcaatagagttagactctgtctcaaaaaaaaaaaaaaaagaaagaaagaaagaaaggagagagagagagagagagagagagaatcagctattataacaaataactggataaaagagaaatgagttcatttaaatttgagcagtgcttgaaatggacagtatagctataaatgcatatgcgaagtaaatatatagaatgtataaatgctgaaaactctagatgtcgtatctggcaaaaacttagtatttttaatgaaagacaacaacctctgaacaactacggaaacatctgtcactaagtagaaattatttctaacaaatgtgtaactttactcttgcaggccaaagagtgtggccagatgcaaaataagtggctgatgataaacattcaaaatgttcaagactttgcatgtcagtgcctcaaccgcgatgtgtggagcaacgaagctgtgaagaatattatccgggaacatttcattttctggcaggtgagaaggagagttaatcagaagttttgtagaattttacttttgtagtgtgggttgttgagggaaaggaattgggttataatgaattaagacatttaaaaaaaggtaaagccggctgggggcagtagctcacgcctataatcccagcactttgggaggctgaggccggcggatcacctgaggtcaggagtttgagaccagcctggccaacatggtgaaaccctgtctctcctaaaaatacaaaaaatcagccaggtgtggcagcaggcacctgtaatcccagctactcgggaggctgaggcaggagaatcacttgaacccgggtagcggagactgcagtgagccaagatcacaccattacactccagcctgaacaatagagctagactccatctcaaacaaaacaaaacaaacaaactgtactgttcagtagaaatatattgtaagctgtacacataattta

SEQ ID NO: 110196 - DNA, 1006 bp, Homo sapiens
tacaggcttgtgccaccacacccggctaagttttgtatttttagtagagatgaggtttcaccatgttgcccaggctggccttgaactcctgacctcaggtgatccgcacatctcagcctcccatagtgctgggactacaggcatgcgccactacacctggctaattttttttttttgagatggagtctcacactctgttgcccaggctggagtgcagtggcgcgatctctgctcactgcaacctctgcctccagggttcaggctattctcctgcctcagcctcccgagtagctgggattacaggcatgctccaccatgcccggctttttttttttgtatttttagttgaaacggggtttcaccatcttggccaggctgatctcaaactcctgacctcaggtgatctgctgacctcggccatccaaagttctagaattatagacatgagccaccgcactcagcctctcccatgttacagttagtttctgaatatgtgaagaggttactttgattaagtgaatattttcagttaattttctttgtatccttgggatagggaataccaccaagtcttaagattcctcttatctccctttgcatttttttttttcagagtcaacattagatctttgtatttgaggtcaagcatattgacagcaattccttcaattgacagaagtttgtgtttttttttttttttttttcagtgtgattcatgattatggctaactgaaactttcatccttctgtattatagttcggcaagaacaagaattaagaaatggaggagctatcgataagaaattaactacccttgcagatctattccggccacccattgatttgatgcataaaggcagctttgaaacagtaagttgttggagagtcagtgccttaactatgaatccttttgcattttcaatgcctttttttaaaaaattacttgttttagagcaggtctcgctctgtcgtccaggctggactgcagtgacacaatcatagctca

SEQ ID NO: 110197 - DNA, 1046 bp, Homo sapiens
atgaaaaccttaatatttaaaaaaaaagtccaggcatggtggctcatgcctgtaattctagtactttgggaggccaaggcaggaggatggcttgagcccaagagtttgagaccagcttgggcaatatagcaaaaccctgtctctacaaaaaatacaaaaattagccgggtgtggtggtacgcgactgtagtcccagctacttggcaggctgagatgggaggatcacatgagcctgggaggttgaggttgcagtgagccatgattgtgccactgcactccaacctggatgacacagagtgaggcctcctgtctcaaaaaaaaaacaaaaaacaaaaaaaacacaaaaaaccacctaatacagaaacttgaatagcaaatattcatagttgttttgggagagcatatttatcctcattgtataaaacatgttttctcaattgtgttgaaaaatagttttgataaatgaatatcttttcctaatgaattgccctatatataacttggcttagatagtttgtattgctaattgattaacatttgataatggctcctaattcctaaagtgtgattttctttattcacttttttctgttccatccttccattcttggtagctgacagtcttggtacagataccctcagataatgtagtaatcaagtcttttcgtgtaaggacaagtgtactacttaatccacccctctaattgatgcatttcatcagattaaagtttgtttatagaacaactgagttgtctgagattgagacaattatatatatatacacacacacacacacactgtaaagcgaggtataacaataatggaaagttttgtttaggtaaaagttttctttctttctttctttttttttcttttctttttttttttttgagacggagtctctctgtgtcgccaggctggagtgcagaggtgtgatcttggcttgctgcagcctctgcctcctgggttcaagtggattctcctgcctcagcctcctaagtagctgggactgctggtacactccaccacgcccggctaattttctt

SEQ ID NO: 110198 - DNA, 1050 bp, Homo sapiens
taccaggatatatttttatttccccaaagttttgagcttaaagtaaaagggtggtagagtgtgagtttagatgaggaaaggttaaagggctagctgtgaagttcctaaataggaaaagtacctaaaaagcagtgtttatagtgaagcattatgttttaattacatatgaagttatacataaatagagatttttctctttttttgttagtcttcaaaattttgtgtataattttcacttgtaatacatctcaggctaggtgtggaggctcacacctataatttcagtgctttgggaggctgagatgggacagctatcttgcaggaatctacttctccagatttgtacttcatttgagatcatttaaatttctgccaatttgttctttttctacttttctattcttgttatgaaatattgcaagtataccaaaacgttcagagaaggattgctctttattaatcacttttaaggtggcggcagagcgacgggccagcgaggaagaagaaaacaaagccagtgaagaatacatacagaggttgttggcagaggaggaagaagaggaaaaaagacaggcagaaaaaaggcgaagagcgatggaagaacaactgaaaagtgatgaggaactggcaagaaagctaagcattgatattgtaagttttaggagggaacgctaaggtatggtcatcccttggtatgcgctgctgcagaacccgctcatgggaagagtcagctccttgtatttccaggttctgcatcccacaaatattgtcttttccaccccaggctggttggatttgagtgtttggaacctgctgatacggaaagctaactattaacattccgattgctttgactgtggttttcaaagaacagaagagatggcgttgccataattagaagctattgataacatttttgctttacttaaagtaaaattgttttgcatattgttacatatttgctctaatccaggtttttggggttttttgttttttgagacaggtcttactctgtcatgcaggttggagtgcagtggcacaatcacgact

SEQ ID NO: 110199 - DNA, 1010 bp, Homo sapiens
gtattcctgtttgcctgaccctgagagcgcctttttgcttcaagacgtgttggatgctcctgttctccgaattctgatacgcttctgggcataatactgaaacacaaaactgcttttgctctctctgtggttggccgaaaataggattctttttcgtgcaggtgtcgttgtttagtcggctttactaacatattgaaatggctctacccaaagacgccatcccctcgctgtccgagtgccagtgcgggatctgcatggaaatcctcgtggagcccgtcaccctcccgtgtaaccacacgctgtgtaaaccgtgcttccagtcgaccgtcgaaaaggcgagtttatgctgtcccttctgtcgccgccgggtatcgtcgtggactcggtaccatacccgaagaaattctctcgtcaacgtggaactgtggacgataattcaaaaacactatcccagggagtgcaagcttagagcgtctggccaagaatcagaggaagtgggtgagtaaaccatggcgtgtttgttggccaaaagccgcaagtctttgaaaaggtgaatcatcacttttccatttaaaaagtaaaaacaaaccaaaaaacccgactagtatttgtctaaatagttctcagaggttagggggtttatgggtccccaaatgtcgatggattataaagtcaagggcaagattttgtccattgtcaaaatgcccgcgctgtgttcgatgggtgtttgttgtgttaaaaattaaagaattgcccgtctggagccttcttttttttttttttgagacaggatctcgctccgtcctccaggctggagtgcagtggcgcgatctcggctccctgcaacctccgcctcccggtttcaagcgattctcctgcctcagcctcccgagtagctggggttacacgcgtgcaccatcacgcccggggaatttttctgttttttagtagagacgggatttcaccatgttggccaggctgatctcaaactcctgacctcaagggatccg

SEQ ID NO: 110200 - DNA, 1307 bp, Homo sapiens
tgacctcaagtgatccaccagcctcagcctcccaaagtgttgggattacaggcagtaagccactgtgcccggcctagatagttttcagatcaacaaaggtgaatctgatttgcaaccagggttatgaaccactggtctcagaagacgtagctttgagggaagtggccacagtcaatgatgggaagagacaatgggaatacacagtgggatagtagagatgaatgatgtttcataaacataaacaaggatgccatgaccctgggaaataacattttttggaaaataatttttaaacttttgaaattatttttttctttttttgagacagagtctcgctttgtagcctaggctggtgtgcagtggcgcgatcttggctcgctgcaacctctgcctcctggattcaagcgattgtcctgcctcagccgcctgagtagctgggattacaggcgtgagccaccacgcccggggaatttttgtatgtttagaagagacggggttccccttttacctcgttgcactcctgagagcaagatgggtcaccagcagctgtactggagccacgcgcgaaaattcggccagggttctcgctcttgtcgcgtctgctcaaaccggcacggtctgatccggaaatatggcctcaatatgcgccgccagtgtttccgtcagtacgcgaaggatgtcggtttcattaagttggactaaatgatcttccttcaaagggttatccaaggcatctactcaatgaaaaaccatgatcattctttgtacataaaataaacatttgaaaaacccaaaaaaaaaaaaaaaaaaaagagatggggtttcaccatgttggccaggctggttttgaactcctggtctcaagttatctgcccgcctcgtcctcccaaagtgctgggattacaggcatgagccaatgtgctcagccctggaaatttaaaatagattgattgtaaagaaatctacttgggcaaaaaaattttaaatttgaatactgaaataataatggttccttagagccataaagtgtttattaacaagaaatacagttgataaaagatatgtatgattgcccaacttacatagaaaagaaaaaaatggaaaaagttcaggtggtgactagtcaagttaattgattattaaggatatcaaaatctctgggcggggcgcggtggctgacgcctgtaatcccagcattttgggaggccgaggtgggtggatcacctgaggtcaggagttcgagaccagcctggtcaacatggtaaaacccccgtctctattaaaaatgcaacaatcagctgggtgtg

SEQ ID NO: 110201 - DNA, 1049 bp, Homo sapiens
gtcaattaatagaatagaaactagatacaggaaggagaagcgggctgaaataggaaagccttcttggaggcaccaggactgagcttaagccccttggatgggtaattgggtaatgtgaaaggaaaggaaggcattccagatggaaagcatttcaatgatagtccagatcgagtttatttagttgataggccttttgacctataaccagcatagactaaaactagcaaatttgataatctttggttttacttgaagagatgagagcagaaaaacctttagaaactggcagctgcttaacaattacactttaatggagtttattaatcaaaaattattcaggatcttgtttaattctacctaaccgcactctagttttagtcccggggtagcattccactggcatgttatggcagcatttgattattttttaatactgctgagaacgtgcactactgctcattctcagactactttaacgattttattagaagctgaataagcatgatagttgagcaaattggctagcattttgtatgactgtgtaatttcttcttatgtaaaggtgatgctgtggagtcttcaaaaagcccgaccactctggattacaaatttacaggaggatgaaacagaagaaatggaaggcccacagtcacctggtcagctcttaaaccctgccctagcccattctatctctgtggcttcgtgtggtaatatttttagttgtggtgcagaagatggtaaggttcgaatctttcgggtgatgggagttaagtgtgaacaggaactgggatttaagggccacacttcaggggtatcccaggtctgctttctcccagaatcctatttgctgcttactggagggaatgatgggaagatcacgttgtgggatgcaaacagtgaagttgagaaaaaacagaagagtcccacaaaacgtacccacaggaagaaacctaaaagaggaacttgcaccaagcagggtggaaatactaacgcttcagtaacagatgaggaagaacatggcaacattttaccaaagctaaatattgaac

SEQ ID NO: 110202 - DNA, 1024 bp, Homo sapiens
cgatggcggcgccggccccgggggctggggcagcctcgggcggcgctggctgtagcggcggcggcgcgggcgcgggcgcgggctcgggctctggggccgcgggggccgggggccggctgcccagccgggtgctggagttggtgttctcttacctggagctgtccgagctgcggagctgcgccctggtgtgcaagcactggtaccgctgcctgcacggcgatgagaacagcgaggtgtggcggagcctgtgcgcccgcagcctggcagaagaggctctgcgcacggacatcctgtgcaacctgcccagctacaaggccaaggtgagagagccccgggccacaccgctgcccccagtcccgctccccggcgtcgttcgcggtgtttctcatccgagcttctgagtcagaagcttcgcctcaccagcccgcctttccacggctccagtcagtatcttcctcacctccccccaagataaagattctcttttctttggatcgaagttctgctccttaacccatcccacttccgtgatccacttttcaaacaactaggtagtttgcctcactcattcaacttttgacagttttccccgttaaagacagaccaccactcttgtaccttttaatgccctcatcctacttttctccccggcctccagatagacttcattatattaaataatcccggccaccttaacatgggcttagtttctaagtttctaagtttctagtttgctttcactccacgtttatctcatcttttccaagctctgatttttaaccatttgttttcattattttcccccaagttctctttagttccctccactatattggaggcttacaagtgagtgtagttctagtcatcctgctcacttacaagatacaggcttttatagaacgtccacgggcaccacctaacatactgctttgtcctgctgttattggctgtttccttgctaactttttaatagttccacattgatggtgtctctctttttctatttgtcatctaacgtgctgat

SEQ ID NO: 110203 - DNA, 1008 bp, Homo sapiens
accaatcactgttcattcacacattgtaggacttcccttgaatattttgaggataaaagattaattcaaaaggagtcaaatagtctagtaggaaatctttcagtctagtagaggagagaaaaatgtatagaaagaactgctaatgtgtggtagaaattgctccttactgttacagacataaaaaagtatactagaagttcagtgaaaggaggaatttacaaactgagtggaggattggaggagatttgaggttgagcttatatttgagctgaattttaaagatgaggaggagtttagtattttaggaagaggaagtactctgagcagaagcaggacaagaggaaagtaaagggtttgtacaacatatatttttatttaaaaaaatgagtgccaggcactatgctcatttgcagatgcaatggcaaataaaacaaacacagtctcttaatggatgtcttgccttatggagcttacagtctagtaggggaaatggatattaatcaaataatcacacagatgtaaaaccgcatctggtaagtagtatgaaggaaaaatacctagtgctctgattgtcagtagtggaggatttaacctggtggagaggtgagggaaggctttctcagatccatgtactgagacctgaaggatgataagtaggcaaaggggagagagaacagccttccaggagggaaccttatgagtgtgagggatggaaaatatgtcaatgtggctggagcacagagagcaaaggtgatgctggtttgagataagatggaagaagtggactgggaccaaagcgtagggaagccattttgagttgtaagcaagaaggatttgaggtgtggggattggtgatatgattattttgcattttaagagattatttctgactttagtatggagaactaaattgttggttggaagaggaccttagaaatatggtagatcaattaggaaataggtagtggaggagatagaaatgggcagatttagtaagtaaaatctata

SEQ ID NO: 110204 - DNA, 1050 bp, Homo sapiens
ccacacccagctaatttttgtatttttaatagagatgggttttcaccatgttgcccaggctggtcttgaactcctgggctcaagcaatccgcccgcctcagcctcccaaagtgctgggattataggcatgagccactatgcccggccagatgtatgtcctttttttatagatgtttcttcctgactagaaagcttcccttctgatttttctagatagctttcaggataatattcttaatattttcaacttcttgatttgtgtcttgtttcttctagctacacccttggcagattttcttctaaccttttgatatctgtttgcagataggagaaagaattcgagtcatcttggacatggaagataagactttagcttttgaacgtggatatgagttcctgggggttgcttttagaggacttccaaaggtctgcttatacccagcagtttctgctgtatatggcaacacagaagtgactttggtttaccttggaaaacctttggacggatgacagtggctttcttgtgatgacagacagaatggaggagagatctgcttatgggaagtagaaccatgaagtgactgtcacacatgcatgtccaagaaacatcctgaaaacacatgaagtcgtaaactggagaagcagctctacagcagagattatcttcgtgtttcctctttctactgggccagaaaaatcctcagggttgcagttggttgagtgggcagttgacatatgcatgttgcacccgatgttgtctctaagttagcaatgtgttatttccagctttaaaggtgagattgtagagatgctgtcaaagggataaggaaatagcaagatttttaagtagtgtgtttgtgaagactgatcccattttacaactgcctgttctttctccagtccttttttttccagccagcttgactattagaaaagtatgaaactggttgggttttatttaatatttttaatatattgagaagcatggtctgcctggactgcacttctctaaaagtgagatataaaattgtgcagctattttaaaagttg

SEQ ID NO: 110205 - DNA, 1062 bp, Homo sapiens
tcactaaaacccagtagtagctctacaaaatcttaaactgctgcagtgctcaaggagatggaatatctttgtcattggtgctgaggagagcatttcggtagaagacagttgcgcctgaagattgagtgtaaatcattcaaaccagtggttctcagtgttggctgtatacactttgtagtcactttggaatgttggaagacacatcgatgcttgggttccgtatgccaagattctgatgttggtctggaatatgagctggtcataaggatttttaaaaactttctggtcatttcaatatgctgccaaggttgagaaccactgttgtaaaattcaccttgagttttctcatctgcaaaatagaaaaaaaaaaatccttgctccctcccttcactacctcacaaggatattgagggtaaaggagaaaataatgggaaagtgcttgtgccgtggatgaaaagtgctattaaaagtcaaaggagtgttctgtttcaattcatagtatgatcagggaaagtgtaactgagtatactttgttgacttgggaaacctggagcactttctttggttggttaacgaagcatgcagatgtggaagcagacgttactattatccctactatggtcttctgtcatactgagacaggctgttttaattacctggttttacataggaaagaagaaatattaaggcttaaagtttgtaatgatcaatggctcataattcattaaatcttttcatacaaggaatttgtggttaatgtcatttcatagttgccattattttctcattatttgacttaaatgttaagccatttatttcatctccctcattcacataaagtgtagatatggattcaataagacaccaaaagaaagtaagatttacccagttaatatttaaaatcattgttcagtgattaggcattttctgccttttagaattatttgactggagaaagagtttcaaaaatagcagagccctaaaccataaagaaactactactgtataatgaacttttgtttgtttttggagacagggtttcactctactgcctaggcaggt

SEQ ID NO: 110206 - DNA, 1621 bp, Homo sapiens
aattgtacacctaaaaatggttaagatggtcactttcggccgggcgcggtggctcatccctgtaatcccagcactttgggaggccgaggcgggtggatcaggaggtcaggagtttgagaccagcctggccaaaatggtgaaaccccgtcactactaaaaatacaaaaattagctgggtgtggtggtgagtccctgtaatcccagctactcaggaggctgaggcaggagagtcgcttgaaccttggaggcggaggttgcagtgagccgagatgattgtgccattgcactccagcctgagccacaagagcaaaattctgtctcaaaaaaaaaaaaaaaaagataatcgctttcatgttttgtgtattttactacaattaaacattttctaaagaaaaaaaggaaagaaagggggtgattttctcaaaggggaattgaggggttgttaccagaaggagaaacgaatgtgagtgagtaggcgaaaccaaccaatttccagagcgaacggagtcaggtgctgaccccaagccaatgtgtcttttctcactttaatgcctgagggatttcagagtgaacagagtgaagaaaggaggaagtggaacctcgtcatggtcctcacccacgaggtgggcgcgaggagcaggctggtactggataggctcaatgtggccacaaagcctggtgaggtcacagggactcccctcctccagccccaacccaaaaggttgcctaaggcaggtgctgcgccatgtgcaccaagcaactttctgctgccacctccaagaaagagaaggaccgggaggggatttctcccaggagagagagcacataacgctccgtcttttcacctgtctgttctcaagcaggacctaagtgtctaaggcaaccccacacccacagtgcctggcaggggcccacccatgggtacacatcgtgttctcctaagctcatgtcactccatttcagatgtcaactggacatggactcctgctgatcctccctactgtcattcactcctctcctgctccagccctgatccctgaggtctcttctacccttgcagtgtctcccctctgtggtcctcaggcaccaaggctgagccctttccctcggccctgcagtgtctcccctctgtggtcgtcagacaccaaggctgagccttttcccttggccctgcaggctcagtggggagcagggctttccctgcctggccctggaccacctccttcaacttcagcaagttagcggtctccctgtcaccagccagcctgacaccctgagacctcctcatgggcctcggccgttctcttgttctaggttattgggcccttcctcaggtccttaaactgatgcttccattcagcttctcatctccttccaaatccccagttttcttctaggctctctggctagagaaggttagagccattttgaaggcctctgacagcccccgtcttgctttgtctccacagaaggccatggtcccatgatacactcaggggtgctgttcagaatatcaggcaccgcatggcacagctacttgggaggctgaggcaggagaattgcttgtaccctggaggcggaggttgcagtgagccaaggtcacgccgctgcactctagcct

SEQ ID NO: 110207 - DNA, 1074 bp, Homo sapiens
attatatactaggcgttgggaagacaaattggatgtcagggctaacacttacattcaagtatgtattcttaaagcatagctgtcatggtttttaacctcttttagtaggaacctataaccactgtgctagagtctattccaatatgacatagaggttacaagctagactggcctggtttaaacccagccccacccttagctggtgacattggggtcactctaggtcatagtttctccatctgtagaatatatacgtaataataatatctaccaataacatcatgctgtgttgactgatgattaaatgggttaatacatgtaaagcactcaggacagtgcctggtaggtagtcagtgctacgcgttttatccgttatcactcatattattattaatctctgctatgtttgacctccagcattctcttacagaggcaataaaggattaactacacagtagttattcaggggttaccaggcacaggaagaggagagataaatgaacagcctttcagagttcaggcaaggccctctgcttgacactttctggcccagtgggcaggagtagagaattggctgccaggaagcccaaagagtgggtttcctgtggctcttccgagttgaggactgagaattggagagtctgggtgccctccactggccctcatcacattatccatttgaccttattagaaagtggacgttggccaggtgcggtggctcccgcctgtaatctcagcactttgggaggccgaagcaggcagatcacctgaggtcaggagtttgagaccagcctgaccaacatggtgaaagcccgtctctactaaaaatacaaaaattagccaggcatggtgacgggcacctgtgatctcagctactcaggaggctgaggcaggcgaatcgcttgaaccagggaggccgaggttgcagtgagctgagatcgcgccactgcactccagcctgggcgacagagcaagactccgtatcaaaaaaaaaaaaaagaaaaagaaagtggacatggtaagcttttctgggatggccatatggtccttctacatcacttcagcggggccaca

SEQ ID NO: 110208 - DNA, 1048 bp, Homo sapiens
gtccctggcggggaacaccatcatgcggctggacgactccgtcttcgagggcctggagcgtctccgggagctggatctgcagaggaactacatcttcgagatcgagggcggcgctttcgacggcctggctgagctgaggcacctcaacctggccttcaacaacctcccctgcatcgtggacttcgggctcacgcggctgcgggtcctcaacgtcagctacaacgtcctggagtggttcctcgcgaccgggggagaggctgccttcgagctggagacgctggacctgtctcacaaccagctgctgttcttcccgctgctgccccagtacagcaagttgcggaccctcctgctgcgcgacaacaacatgggcttctaccgggacctgtacaacacctcgtcgccgagggagatggtggcccagttcctcctcgtggacggcaacgtgaccaacatcaccaccgtcagcctctgggaagaattctcctccagcgacctcgcagatctccgcttcctggacatgagccagaaccagttccagtacctgccagacggcttcctgaggaaaatgccttccctctcccacctgaacctccaccagaattgcctgatgacgcttcacattcgggagcacgagccccccggagcgctcaccgagctggacctgagccacaaccagctgtcggagctgcacctggctccggggctggccagctgcctgggcagcctgcgcttgttcaacctgagctccaaccagctcctgggcgtcccccctggcctcttcgccaatgctaggaacatcactacacttgacatgagccacaatcagatctcactttgtcccctgccagctgcctcggaccgggtgggcccccctagctgtgtggatttcaggaatatggcatctttaaggagcctgtctctggagggctgtggcctgggggcattgccagactgcccattccaagggacctccctgacctacttagacctctcaagcaactggggggttctgaatgggagcctcgccccactccaggatgttgccccc

SEQ ID NO: 110209 - DNA, 1026 bp, Homo sapiens
acggggtttcaccatgttagccaggatggtctcgatctcctgacctcgtgatccgcccgccttggcctcccaatatactgtggccttctattttaactatcctacgaccactggctctgtgggccagggtttcaccctcacacaggtgctatgcacttagaaggcattctttttttttttttttttttttttttcagatggagtttcgctcttgttgcccaggctggagtgcagtggcgccatctcagctcaccacaacctccgcctccgcctcccgggttcaagtgattctcctgcctcagcctcctgagtagctaggattataggcacacaccaccacacccagctaattttgtattttagtagagacagggtttctccatgttggtcaggctggtctcgaactcccgacctcaggtgatctgcccgcctcggcctcccaaagtgctgggattacaggcatgagccaccgtgcctggcctagaaggcattcttgctgaagaaattcggcggagggaaggattcatgcaggctggagcaacagggaaagcttcacaaaaggagttggagttgagtgtgtcctcaaagggagatttgtctgtgtagaagggagaggaacgagcattcctgacaatggctcctggacataggagcatttgttgggatgacacggaggaacagactctcactggaacacacatctcttcaatgaggtggtgaaatacatcatgggaaggagcctgtctgtaccagaactcttacaacctattaagtgcaattagcctcgctgtagccaaagggatgttgattttgctcagcagattgttattcaggatccccagggacagtggtgctgtgtgggcaaagcagcgtgggcagcagcagcgtgggaatgggtgtgttcactcccgaagcccaggacagataactccacttcttgtttctgtagaaagaagtgtggcaagagctgacccgaggaagaagctttgctcaataggaaatgagctatgatgatgaaatgaggaa

SEQ ID NO: 110210 - DNA, 1024 bp, Homo sapiens
aaaagctataatatcacttttcttctcagacatattctccagttgaaagtgtttaatatctctacaaagtgatttttaagttaaagaagtcaaaactgtatctgtccttctcccaccacactgaaagctcaatataaaggaatggttctacaaagtaattcattccaatcaagccatttagctacttgactataatggagataatattttcagggttcagagtttttgttctgttttggctgttgcagtagtttatggcgtatatgatgtacgtggtacgtatgtggtatatagttttcttctctctcccagattgcaccagagctgctgaacaattaaagaataatccgcgacacaagagttacctagaacaagtatccctgaggcagctagagaagctattcagttttttacgaggttacttgtcggggcagagtctggcagaaacaatggaacaaattcaacgggaaacaaccattgatcctgaggaagacctgaacaaactagatgacaaggagcttgccaaaagaaagagcatcatggatgaactttttgagaaaaatcagaagaagaaggatgatccaaattttgtttatgacattgaggttgaatttccacaggacgatcaactgcagtcctgtggctgggacacagagtcagctgatgagttctgataccaaacactcaaaacatgcattgggctagcagaatatccatgtttattaccagactggttctggaagaagctgtaaagaatactaaatatgttgggttataggggattgaccatgttacttttcaaaaccaggacatttaaagcatctactatgtaggtgcatgaggagtatgggaaaaacagaataaaggaatctgcctttaaggagcttacaatcatgccgggtgcggtggctcacgcctgtaatcccagcactttgggaggctgaggcgggtggatcacctaaggtcaggagttcgagaccagcctagccaacatggtgaaacctcgcctctactaaaaatacaa

SEQ ID NO: 110211 - DNA, 1034 bp, Homo sapiens
gtaaatatccagttgtttcagtgccatttgttgaaaagactatcctttccccattaaattacgttggtacctttattgaaaattgtgtgaatgttattggattccattccttttcattgatctttgtctatttttacaataatgctatagtggcttatgacatgaattatgaaagatctaatggatgattctgacatgttataaatatttcatttgaccttataatctacttttggaaaatgaattttgaaatacagtgttttcactaataggaatacagtgttatgttatctcatttaacagttgaatgaagagatttactttcaatgtacttgtcttacagagaccttttaatcaaagtgaagtttggggaaagcattgaggacttgcacacctgccgtctcttaattaaacaggacattcctgcaggactttatgtggatccgtatgagttggcttcattacgagagagaaacataacagaggtacagttattaggggattttttgggagagaaattaatttaggggtgctgtagtttggattaaggaaaaatagtaggttttcttttcattttgttaaagtgtataaagtgacatttttagagatagactgggcatagtctttgacaagtgagtgactcttgtcaggaataagccaactaaactgagctagttaaatgctttttaaggtggttcatagttcagtgactaagaaaattatctgggtgtatgtgtatgtcttgagaaaattaatgattaataaatagtgcctcaacagtaactttgttaatgagaatgacatataccccaacatctgggtaagtttgatatgtgaggagaagaaactaatatttaatagatgtctatatgccagatatcttcattttcttttaaaaagaaagatcgtgtcctgcaccctttacataaattaatctttataacaaccctggaggtggaatctccattttatatatagggaaactgagggctgggtgcagcgtcttacgcttgtaatcccagcactttgggagg

SEQ ID NO: 110212 - DNA, 1049 bp, Homo sapiens
tatttaaaagaaaaaggaaataaaaatatccaattaaaaatcaaagaaatagtggtctcaccttatgacatttattttattttactatttttatttatttatttatttatttgagacagagtcttcctctgtctcccaggctggagtacagtggcacgatctcagctcactgcaaacctccgcctcccgggttcaagtgattgttctgtcttagcctccctagtagctgggactacaggcacctgccaccacacctggctaatttttgtatttttagtagagatggtttagtagagatgttggccaggctggttttgaactcctgacctcaagcgatctgcccgccttggcctcccgaagtgctgggattacaggcatgagctaccacaccgggcccatgacatgcattttcaatgtctaacttctctctctctctccataggtatataagaatgtgattctacaagttccagtgggactgactgtacatacctctctagtatgttctgtgactctgctcattacaatcctgtgctctacattgatccttgtagcagttttcaaatatggccatttttccctataagttttatgtagttaaatgcttcctagaaacctaaataagatctattaatttctgacgagaggtgttcttctagaattaattacttttatcttttgtcttcatttgtggccaaaattatgtttactagaggaaatttgggatcattctcagctaattccaaaatgtagtgctctattgcatggatccttggtaatcctcaagcatcagatgccataaggggaaacttaattctgctaaattaatgtttattttgtgagaagtgactttatcttcatttggggtagaaaaattatttctttatgtagtagagacaaattattctcattttgcaagtactttcaatttaagctacaaattgagaaaaccgttataaataagaataaaataggccaggcacagtggctcacacctgtaatcccagcactttgggaggccgaggtgggcggatcaccagaggtcaaga

SEQ ID NO: 110213 - DNA, 1123 bp, Homo sapiens
tttagataacttaggtgaagttaagattggtttttcaccatgtttggctctcttggaaacacacgcacgcacaaacacaaaacgttgccactcaaccttttaactaattctttaaagataagtcatccaagaacagaagcgtgtcatcgtcagtgggtgtgaggttgtacccatccttgtatcttaattttagtagtactctccctgggcagtgtgagcgtgatttgttgtcccttgataaataacgaactccggttgatatcattatctcacttctgcgttacaggcgatgtgtcctttctttgttttcttttttaacctttataaaaagacaaaatggttaggcctaaaattaaactacgaagagctgtgttttggatcaaggttgtgcacgtcacgttttttcccctgctgtgttcgactcttccgctcttataagtaggcaggatattgaaatgtacaagaatttgctctggggattttgtttttgtagggttgtccaatagaataacactcagtaaagttacattgggatgaaggcagtgaatagtaatttttaaagcaggttaaaacttgtcaactttgccagaaggtctgtggcttctgtaaagcccactcatgctcgtgtatatatgaagagcctttttcatgttctgttaggagtatggatttcaggcaactttttcactgtgtcatcctcggctattaaatctttcgagctacttattagccaagcacattgattgacacttattacggaaagtgaacctgtaatagatgtaggtcttaaaccaactttccgatttggtaacaggttgacctaaattcagtgtattttgtgttttcactaagtagcccattgttacctttccctccagcaaggctctgaaaaaagtggctccaatactcagcttcaatactgtcatcatttcttaaatagtagtatcagttgtccttaacttaatggatgttttattggcctgagggattaaggtgtagaaaggttggagttttgttggagtttgaaacttggtctgtagatgttggcttctctgccagtttcttctaatcagcagatatttttatgaaggaagagttcctgggtatttcacttcccttaggg

SEQ ID NO: 110214 - DNA, 1019 bp, Homo sapiens
gaggctgaggccggagaatggcgtgatgaacccgggaggcggagcttgcagtgagtcgagatcgcgccactgcactcccgcctgggctacagagcgagactccgtctcattaaaaaagaaaaagaaaaagaaactgggtcaacttcaagactttaagtcgtaaaggtttccatcagtttggtataagagttgagtttccagactaatcagagggagggtgttaattgcaaattgtgtgtccaagctcttcctagtatcctttttgtgccttaacagagcagaataggaaaggaaaaaaatccctcattgcccccaaaaaataaaatactggttgttttcttctgtgatcagagttgagtttcatcacttcttcccttctagggtcacctgcctggttaagggtagtcagtctgaacattcattcaggatttcagtgttccagcctactatctctgagtttctttagtacttactccatgtatcccatgtggttaggagctagagtcctgcgtttgaattcttgctgttctactttaccctgggcaagatatacattcttttcaagacttgcttttctcacctgtaagatggggataataataataataccaatttcacagggatatttagatcaaatgagggaatgcaggtaaaggattctgtaattataggtcttaataaacgttagttaatagtctgttcttacatgctgtagagtcgatactcctaaacttagaattaaaactgccttctaggccgggtgcggtggctcacacctgtaatcacaacacattaggaggctgaggtgggccgatcacttgaggtcaggagttcaagaccagcctggccaacatggtgaaacctatattctctactattctttagtagagaatttagtattctctactaaaaataaaaatattagctgggcgtggtggcgggcgcctgtaatcccagctactcaggaggctgaggcaggagaactgcttgaacccaggaggcagaggctgcagtgagct

SEQ ID NO: 110215 - DNA, 1057 bp, Homo sapiens
ttgaggtttttgtgatcatcatgtactacttttattatataagaataaaaaaaaattaaccccaaacccctcaaatttccaggcgcttcctgttgcccagaccctgcaccattctggccccactcagcctagttttatttcccactgcttgccagctgtgccctgtgatctccttgctgtctcatgagctacgtggtacttatgttcctgttgcctggaatcccgtcttctggtcaggaagatgatctgcgataaataccgagaatactcgcgttagatactgaatagtgagagtttagactcacgacctggggtgtcatcttgaacatacggtgcttaagggatgaggtttctgggtcagttttattggttgtgatgaacaagataaatggagcatttgtcttagcttctagaatagtgaccttaaaagagatagaacagtgaatgtatcttcaaacttgcctgggtctccactagcctaaagaagaaaaaaccctttaattctgatgctgtcacagatgaaatcctttcattcactgatttattcattcaagaaataatgactcatcacctactctgggctaaacacagtgtccagtgtgatggtgatgtaatggtcaacaagatagatactcactgggtccttgcctgtggagtttatacgtagttagagaagacagacattaaaagaagaaatccagtgtgatgaatgttgagataaaaggaaataaaccaatacttgtggcagtgaagaggtatcagaggtttcctgagagaatgacatttaagctagtacttgaagtaggtgtttgccaggtggaggtggtgggcagaaagtagagtcatcagttcattctggtttgtccacggctttcctggttttagcacgacacgtcccgtgtccggggaggtcatgtgcgaaagcttcagatggcaattaaagaaacagtaagaatagaaaaaacttaaagcctgaagagggaaagactaaagtgagatgagtctagaaagttagacaggagcctgatgatgcacgcactgttgggctttacctaag

SEQ ID NO: 110216 - DNA, 1046 bp, Homo sapiens
aagttgtaactacaaggttggagtgaaatcagattggaggggtgctgtttgatacccttaatagccaagcatctgtctctgctctagaggtgcacctccccaagatatcctataatttgctggtcagaacatatttttcctctttggaattaaaaaaaaaaaaaaagatttcatgttgtctgtctttctattgagaaggtctcttagaatccattgattagaccagtagcttttggtagtaccatgatgtttccatttgacttttcaaacatttttcagctgaccattaccagctttgttgggggtaaactcaagagagttacatcttttacacattgatttttccagattttgcaaatgtcactataaatggataatattttctaattgggagttgtggcaggggtagttattactgttttttgcttgttcgtgctattttttactttgttactaattgtattttttccaattccaggccatttcataattctgaatcatgtctgataacggagaactggaagataagcctccagcacctcctgtgcgaatgagcagcaccatctttagcactggaggcaaagaccctttgtcagccaatcacagtttgaaacctttgccctctgttccagaagagaaaaagcccaggcataaaatcatctccatattctcaggcacagagaaaggtaaatagcgcttctggctttcagagtctcagcattggtttattattgtatgttacccatgttgataacttttatggtgagaacattaaaacagatcatgaaaacaatcggtgctaatatacaggcactattaaaaagactagtttattttaaattgtgatttttaaaagaataaaatgtaaatttgtttctcaccctgcttgttatggccaatgaatttctatattcatctcctttgttttctgagaccttggccatattttaatgagatttgtgacacttgagggagacctgctattataagaatggtgagatagggcccacagtcccctgtctgaaatccctggagccaactgtgtt

SEQ ID NO: 110217 - DNA, 1191 bp, Homo sapiens
tcctcgtggattttattctgtgaaacactcggttttggtgtagaagggagagaacttcagtatgtgctcagtacatcatcttgaaacagaagagtctaaaaggcaaacaattgtatttccattttttaaaaatcataatgaccttaagacttttgccatctctaatgtaaggcctgatctagagataattcattttattccactaaaaaatttacatcccttactgctttccttactaaaaaaacagctaatatttttataaaaagaaaataaagactctaggatgttttcacttattaattactggttttaattggtatcaccaaaaaactcgaaaattatccttttggatcgtgccgttttaaggcaacttgacagaacagatcttttttccatgcttgctaatgtgtgtactatgtgaataatcagagatgagtgataaagcagatagtgtccctgctcccacgacagcaatctcaaaccatggtatagaattacaagccatgaaaagtggtacagaggcagtgcacaacatgtgtccaatctgcagtgtctgggaaggcttcctaaggaggtcataatagagctgaagactgcaggatgggtaagggaaacgatagttacaaagtgtgttccatgcccgggaagagcctgtttcagtggcccacctacaggagggatcagagcacatccatggagctgagtgccgcccggtgttactggaaagcagagagggaaggacagagaattacagcagggtgtatgtaggcactacagacagcagaagaggctgaagaggtaggcagtgaccaggtcataaagggccttgtattctatgctacagagctcacattttatcctgtttcctggggaaccattacagatttttaatcaggggaaagacctggccatctctctgttttagttaggagagaatggtaggtatatagaaaaaaggttttgttcgaagtgtgagagtgaagttggaaactagttaggaggcttttgctgtagcccaagtgagaaatggcctaactagtctactagtttaaataatgaaaatgtcagtgagccatttgactttttaaaataagctttattcatacagctagagttggatggtattgtctttattaactaaagcaattttcacatctagctattcaacctataagcaccttcacttctggt

SEQ ID NO: 110218 - DNA, 1074 bp, Homo sapiens
tctgctttacttcatttactagtttcctatcagccagtttttaggggaaatcttttctagaataactttgattctagtgtgttttctagaataactttgatcctaatatgttttaggaaaaatataaacataatatgccgggcatgcggtggctcacatctgtaatctcagcactttgggaggccaaggcaggtggatcaggagtttgagaccagcctgatcaacatgatgaaaccctgtctctactaaaaatacaaaaattagccgggcatggtggtgggcacctgtaatcccagctacttgggagactgaggcaggaggatggcttgaacccgggaagcagaggttgcagtcagctgagattgcaccactgcactccagcctgggcaacaagagcgaaactccatttaaaaaaacaaaagacaaaaaataaaattataagtgcctttactagtcttgtttaaataggctgattctttctctttttttctaatgccccctaggaagtaaaaagaaagaaaaggaacggccagaaatttctcctccatctgattttgagcacaccatccatgttggctttgatgctgttactggagaattcactgtaagttaacctagttcgggcccatttataacgtttaaaatagcactcaaacattttccttcattattaaatttgaaattaacatttcaggccaggtgcggtggcacacgcctgtaatcccagcactttgggaggccaaggctggcagatcatttgaggtcaggagttcgagaccagtgtggccaacatggtgaaaccccatccctactaaaaatacaagaaaattagccaagcgtgggggtgtatgcctgtaattccaactactcaggaggctgaggcaggggaatcatttgaacctcggagatggaggttgcagtgaacagagactgtgccattgcactccagcctgggcaagaagagtgaaactccgtctcaaaaaaagggaaattaacatttctatctatacgttaactatgaattcttactgctttttgctttttataaaagtgttagtggttggatatatcgtt

SEQ ID NO: 110219 - DNA, 1110 bp, Homo sapiens
caggtcatggtggtatgcatctgtaatcccagctactcgggaggctgaggcaggaaagtcacttgaacccaggaggcagaggttgcagtgagccaagattgcaccactgcactccagcctgggtgacagagcaagattccgtctcaacaaaaaaaaacaaaacaaaagcaatatgtattgcatttataaccgaagaaaaaccaaaggtgaatctgatttcagaaaagtaacttaaggaaatgtaacatctaaaaataagaggaaagtatcaaatctaaatttaaatgggataatgataaccccagtttagtatttatggtgattttctttaaagaagaaagaatcccttagactttatggagtgctctgtgaccgtgttgagctatcttaagtggatcaaagatgttcttctatttttaggccttgtacctaatagcaactaatggaaccccagaacttcagaatccagagaaactttccccaatatttcgggatttcttaaatcgatgtttggaaatggatgtggaaaaaaggggttcagccaaagaattattacaggtaaatttaaaaatgatttcatttgggggaatagttgacttttttggtaaccgacagaaagctttcctagggctaataagtagatttcactactcattgatcaccagcggtatggcagctgctgcaatttagggtttcatcctaccatgctgagcaaactaccgcaaggacagaaaaccaaacactgcatgttcccactcataggtgggaattgaacaatgagaacacctggacacaggaaggggaacatcacacaccggggcctgttgtggggtggggggagtggggagggatagcattaggagatatacctaatgtaaatgatgagttaacaggtgcagcacagcaacatggcacatgtgtacatatgtaacaaacctgcacgttgtgcgcatgtaccctagaacttaaagtattaaaaaaaaaagtgagggtttcatctgctgtgaataaaattctgacaaaaccgtaatgtgcagtttgtgcatcgtatcaatcctcagacctgtttacagtttgtgcatcgtatcaatcctcagacctgtttacagt

SEQ ID NO: 110220 - DNA, 1723 bp, Homo sapiens
atttgcattttactttgctgactttgttgtaatagatcccattcattgtcccctttggggtatttccaatacttgaatggcagattggagtttttcagagtatgtgtttcatctgctagtctttctctccttcatagcttttcttttcctggacttgctccttttgagttgcttttgcgtttctcatgcctaggcaagtgtaatagaaattatgtagctccttatgttggcaaaggagctctatatagtttcactttgtataaaagttaggaccagctgttgttacatgtaatattttagttcagaacttgacctgaaggaagggaagaaaagtatgtgatttttaccttttttaacaaatgtgaaaaagtcagttttagaaatttcgtggtagtaagttcggcatttgttacatgtatagagagaagactaataatctctatttataactaaatcattgagatagaaaaagattcccattgactgtagacttcttcccattttgtcttcccttctgcctgtttccccttcaggcttggctctaggaaccaaagtgatttgttgttgttccaacctgggctttgtgactttggttagtgccactaccttcttccctcctttcccccttcaatttggaaataaatttctgtatatgttgcaattttaggtttaggtttgttctttttctttttcattaatcctctctcacctcacagataccccctcccatggcaaataatataataaccagtgaattttcaggaatttaaaaattagcttttttccacttaaaggagaaaaatatttgggactagcagcagaggcagtaagagatgtgaaccttggtgagctctgatacagtgagaagagattatactcatgaaagagaatgttagtgttacagagaagcagccgatagcaaatcgactgtagagacttggcggcggtggcattgccccaggtcgtcagcagtgtggtattatctatgagaacttgagcgacagagtatttcttgatgaatttatagatcatttgagatgttgagttactttagtttagttttgttttgttttttcaaataagtagagactattgtaaaaaacgagaaaggaaaatgaaatgtgcgtgttgatagcaataatttgtttcttttaaagattctaaaaggtctgagacctgtagcattaattatttgagtgccctcccttctcccctcccctcccttttctcttctcttttttcctctcctcttcttctcctttattcattgttttgcttttggagtgggtgttgttcaagtatctgtggtttggttctggcattttgttcccaccatccccttcccccattaacttcccccctgcttgccatcctgcagtagtataaatcatgaataaaaaataattttgctgttgtagtatacattggagaaactggcaggttttatttccattattttatttccactatatctatgataagatgcaattataaggagagaagtgactgttttttattgataaggcaagattttcagaaaaatgagtaaaataattaatgaaacatatttagagcacttaatggtctctgttttcaatataattcttgatttcatttttctctggaatatattggccttctacagctattactgaattatagaaactggtttatttctggcagaaagctgcagtgccacctgagttccaaattttaccattct

SEQ ID NO: 110221 - DNA, 1056 bp, Homo sapiens
gtggataaactaacctctaacagaaatatactttggttaattttgaaatgtgtcatttttaaacaatcttaaaagtaatacagaattgtgatttattaattttaaaacattcagaacttgttgaaagaaaaattatatctgaatcaagattcatgttttttatttttattttttttgatacagagtctcactctgtcactcaggctggagtgcagtgacatgatctcagctcactgcaacctccgcttcctgggttcaagcaattctcatgcctcagcctcctgagtagctgagaccacaggcacccgccaccacacccagctatttttttgtatttttagtagagacagagtctcaccacattgcccaggctggtctccaactcctgagctcaggcagtctgcccaccttggcctcccaaagtgctgcagttacaggcgtgagccactgcacctggcctcatgttttttaaataattgccttttatatttaccctttttgtcatcactttagaatgaaaattcccatttaaatctgaaagttaccttaatagtcctcttgtgttattaggacagtattattatagtacttatttattttattttagatttaaagttatcttctctttttcttttttcttctgctgcttttagggacaattaaaactgggaaactatgaaacatggaacattttatcctacctgaaagtaaacgagtaattgtgaagcataagacactgaggctaatacaactctgtcttcatgtgttgactgcctggcacatagtattcattctcttccctttaacatagaagtgtccagctgcgtacagtctagtaaccagcaactgtaaacgaacctgtgcctctaacaagcgattctaaaccacctatgagtatttcttttagggctcacttaaatacatgtttgtatatactgtattctagccagaataattttagatctgatcaggtagtagctaaaattagaaaaaaacaaaatagatgcttaaagaatttgcatccatttttgagtctaaatcttttaaaatatactg

SEQ ID NO: 110222 - DNA, 1051 bp, Homo sapiens
tttaataaaatctaatattagcgaaggctctttagtctagaaagaaaggcaccagtcactgcaggtagagtggaagaaagactatgaaacagaagccaatattctaatttcagcttgacaacagtttactcagaagtgctgtattacctttctgtgtataagttttctctggggaaaaaaatggaggactgaacacatgtttacctcagttccctctccaaatcacactgaggttacagaaatcagtttttttttgttttttttttttttgagatggagtttcgctcttgtcacccaggctggagtgcagtggcgcgatttttggctcagtgcaacctccacctcccaggttcaagcaattctcctgcctcagcctcaccaggagctggtgtcaggtgtgaggattacaagcaatccttgcaccttggcttcccagagtgctgggattgcaggtgtgagccactgcgcctggtcgaaaatgattcttaagtttatttttctcagaggcaggtgtacagcaaatggctttttgttagactactcatgtcctccctcctctccagttttcattgtgatgaaaaccttggtcagataagatttcattgtgtccaatagtctaaattgaagtatatgtactctttttttttctcaattttctgccttagttactgtgaatatgtcttcatgaccttatttttagatagaaatataacttacttctcttctttacagctgcatccagatctcattatgcatcagaaaaatgaaaaaacagaggaaaattctatggaggaaaggaatccacttagccttttctgagaaatggaatactgggtttggaggctttaagaagttttattttcaccaacacttgtgcattctgaaagctaagctgggaaggccagttacttggaatagacagttgagacatttccagggtagaaagaaagctcttcaaatccagaaaacgtggatcaaggatgaacccctttgtgctaagaccaagttcaatgtggctactcaaaatgttagtactttgtcctctaaagtg

SEQ ID NO: 110223 - DNA, 1045 bp, Homo sapiens
cagtcatagctcactgtagccttgaactcctgggctcaagcaatcttctcgccttagcctcccaggtagctgggactagaggcatgtgccactgtgctactatacccagctagtttatttttatttttggtagagccaggagtcttgctatgttgcccaggctagcttgagctctgggcttagctaaagtaatcctctcacctctgcctctcaaaattgctgggattagaagtgtgagccactatgtctggcagctctttcagtctgtatgttaagctgcatggttatcaaaagaatgtgcctcagaaccgtctgaaaggtttataaaaccagattactgggccctgccttcagagtttctgctttaataggtctgggatgaggcctgataatttggatttctaacaagttcctagatgatgctgacactactggtcaggtgaccacactctgagaaccacagtgctaagggaacagttttatcacctcaagttactgaatgagcactttaagatcacaatatgtttaccctctaagatgagctgatataccacttacttataagtcagaaattcaaagccaaggacgcaggacctgatactctgtacagccagggtaattctgtggtactagaaataatcatgccaaggcctttttatggttactgtaacaacaggagtctctaaatccacatccttcacatggagttagttttgtaatccatctcccttgagttcaaggtaattgttacctcattttttcatagcctctttcagctttttcacctgatttagagagatttgtcaggttgcttctctacttgattggattcaggtagtctatttactgccccattccaaagctgactatagaccacagctgtaaggtcattccaataaaactttggaacagcattttctgtaaaccatgtaatgtattttctatattttgatcattattatcattattattattttttgagacggagttttgctctggtgcccatgctggagtgcagtgatgtgatctcagctcactacaacct

SEQ ID NO: 110224 - DNA, 1054 bp, Homo sapiens
gcctattttttcatttattttgtaattggccaaatagcatcttagctctagatagaacagcagcagtcaaaaccatataggaacagtttatgtcatgaaaatcctccaaagtgttagctgagaaaaggactagaagaggaatctctggctgaggagaggatctgtctaggatccagatccccctctgagatactccacttggattttctctgcttttcccttaaaactacatcttgaatgtggttagaaattgtttttctttgatcatcttagagctaaaattggcctgtatctgcaaaataactcctgtagaataaactataacctaatggaatcaattgacaaaatattagtgttcagctaataaacagatggtgggatacaaaatcaagaaaaatgagtaggtttccggattttcctgcactaccaagaaccagtaagaaaatgtaactgggaataagattccatttataaaagaaacaaaacataaataacccaggaatatgccctaggaagaaatgtggaaattctttattatgaaaactcctaaagctttaagtacttaaaagaaatctgtacaaaactgtaaaagtatttgaatgaaatatggaaaatgttatgttcacagagtggggaaggacttcttaacatggaaccaaagaaaagacataaggaacaattggataaatttaaccacctaataatttaaaacttctgtatatcataaagttaaaggacaagcaacagacttggagaaaatatgtatgatgcaaataacagacaataactatccagaatacatggaaaactcctacaaatgaataaggggaggataaaaggacataatagaaatggacaaaggctaatttagtaaattttaggaaaaatgcaaatgaccatttaaaaacacagagaggtgttcagccttaccagaaattatagaaatgcaaatgaaaactacatcagttaaattttttgcccattatgttagaaaaagtgatgctattcaagtgtctatgtaagtgtaaggaaataggcattctcatattttctg

SEQ ID NO: 110225 - DNA, 1052 bp, Homo sapiens
ttctgaattgggaggaaaaccaaccaatgtatgtatgagaaactcagaagtctgaatagaaaaacaaagtaaatggcagaagattctcgagtttatgcccgcgtaggtttggagtgttgaaaaagctaaaatgtttagtttcacttggccctgaggtatggttgagaaggctgactgccagcagttgaggattgagtccgaccatgtttacatgcagggttcccaacaccagtggtgacactgggaagcagccccagcactttcctctcctgagtcctccagacccaaaatccttaatgtcaaaccaggtcagtgtttcttactgtgtttcaagtcgttaaaaagactgagagtagaggcactttatgctgctataggtggggttctgtcagcgttaggaaaaaatgacagtttagggtaaggaagatctcataatgagtttttcaaacataattatgcaaacatgagatttttcaaaacatgccagaaatttgcctctgattttttttttttttttttttttttttttgtgggggtgtggtataccaaagtagccagtcactgggctgtcagttcaaaatgtcttgtacttcagagtgaggaagtgtttcagttcctcagtgacagaacctggcatgcagaagagacagaattgttcctgtaagaaaatcaacgccgagagagagctgcccaaatccagtgactcttccacttccagtctcatgcttcatagggcaccttgaggtgtgctgcccagtgtggcttagactaaatgttgagtttgggttttttgtttttttttttttttgagtcagagtctcactgtccctcaggctggagtgcaatggcgcaatcttgcctcactgcaacctccacctcccaggttcaagcgattctcctgcctcagcctcccaagtagctgggattacaggtgtgtgccaccacgccccaccgatttttgtacttttagtagagacaggatttcaccatgttggccaggctggtcttgaactcctgacctcaagtgatctgcccgcctgggcctcccaaag

SEQ ID NO: 110226 - DNA, 1021 bp, Homo sapiens
ccttctcttgattagggtgccttggaatgtacagaacctaacttgaatatacagcactggtttcttggataagaagtgtacagtgatctaaacttgcaaaccaaaatacagagatgatgggaccaaaaattatcaacaggaatgtccaagaaatatgatcagtgtagccatggatacgtgtcatatttgactctatgtgcttccaaaccaatcgcaaacaggcctgggcaagctgaattactgtctttgaactccatctggttggattagctcttgtactttttaacaactcagcttcatttacatgttgttcccctatttccagaaatgtttggaaaaatgctagtgttccttaatacttaagatattactcacgcgcagatgcggaaaacgccatgcggtacataaatgggacgcgtctggatgaccgaatcattcgcacagactgggacgcaggctttaaggagggcaggcaatacggccgtgggcgatctgggggccaggtatgcaagaagggtctctgggctcagccattgcctgggattccagtcacaatgacaggtgttttggcaatttgtatttactcttttgtaaataactttgtgtctataaccttggcttgaagtggatctgaaaaccacccaacggtttgggtgaattttttttttaaaccgtgaaatggtatgttctgtacgtttctaacaagcaaccattcttgaacttctgctagggctaggtatcttccacctgcaggaacatctaaaatgaaagcaaaacgcactgaagtgagctgaagtgcatatgtcctgcttgaaatgttcacattgtggcatctgaacaggtttcactgtttgtctaacatgtttgtgggaggcatatttgttacaccattcttttccatactgtaactctggattctttccattaaaggttcgggatgagtatcggcaggactacgatgctgggagaggaggctatggaaaactggcacagaaccagtgagtggtgagagctctgtcag

SEQ ID NO: 110227 - DNA, 1089 bp, Homo sapiens
gggtacctgtgaggacgtcacagtccttgggccggatgaagcctctctgaataagggcacccacggggacatcccagcctgcagggctgccgaaaccggcgtggcaggagcgcttgccccgaagctcatccaaggtgaaggcgtgggagctgtcccgtctcaccacggccaccacgtagtacgagttgctgctgtcttccgctggggagagagggactcacgtgaggggcccctcatctgagagcccgggcaagtgcctgggggggtccttccttcaaacccactccttcctgtctctttgcctgagctatgcaggccaaagagtacccaggcctgaggccagggtgttctgggagcaggcccagcgggggcccctgcctgcgtcccctgtgagaagcagcctcttgcctccactttccagccttgtcttcctctggccccagcagtccttccccacaggggcttctttctttccttaaacccaggtggtatttttctcactacccaggaggaaagtggaggcgcagctgaggctgcagaagcattttcctacagcccagagattgctcacacccaggtggaagggacccaggcctctgaggtcaccagtaagaggacagaggccaaagccccagcccaggcccctgagaaggtgcaaatgagctgccagggggactctgaagggccactttccatggctgcttagggccagaagaggctgaggaggccccagtagtccaagatggcaaactacgaggcctgctcttgtatggcctgggttgtaagctaagaatggtttttatattttgaaaaggttattgaaagagagactgtctgtcgtctgcaaagcctcatgtatttatcctctagtccttcacagaaagtttgccagccccttagagacgtttgttgaatagttggggaaactgaggcctggggcaggaggggcaggcctggtgacaggcagccactatccccaggagagaggcatggagcttttgaaaatggctgaggggggcactcttttatatttataaaaatatccccacctcccggctgaggccaggcggcaggccctgcactcacggg

SEQ ID NO: 110228 - DNA, 1039 bp, Homo sapiens
agggatggaggtggagacggaggccgggtcccctcgcgtcggcgccccggggagtcagggcccgggatggtgggacgggaggcgggacctcggggagcggctcgcggggatcgcgggcggcgaccgccgaggggatggagttcgtggcaccgctgtggccgcaggcgacgcactcatcaatgcaaacgatgaagccaccgccacccccgccccgtctgaactttgcagtttcccgcctgggtggtggggggcttggagcgctgcggaggggagggcagttcgacttcccaggcctccgccaggagtggggaggggagggctgtggcggaagcttcagtctcggcccttgggctggtggggctgccacgggagggtgacctggtttcgggcggagtcatgcgtttccctccctcctgcacaggcctctggcagtgctggctggggcagggtgaatggcagaggagctcaggcctgaaagtcatcggccccaaggggctccagcaccccttcctctgggcccctagcctgggagctctcggggactctgacccggtcagatcctgaggcataagcagaagtccactgaggatgtgggtgtctcaggctctctacaagggggtttactttcaacacagaaggtggggtttttatctgctctctcagaagatgaagcaggctcagagaggcttgaacctaccctgatgggtcctcagcctcccctctgtgcctgccgtcttcccttggcagggcctggcactgtgcccaccgagggtggctttgcagccagcatcatcgcagacactccccgaggggacagggctcctggagggcagcccacccacagccccctcacctcactctcccgtcccagttcatgaggaaggcccagggacactgctgggtgagggaacctacacgagcaccctcttcgggaggcctggagaggggaagaagcttccacttccagggcctgccgagactccctagccagtgctcccaccaggtgggggtagctgagaagcgacctgtagaccctccc

SEQ ID NO: 110229 - DNA, 1028 bp, Homo sapiens
aatatattttgtttcttttgccacctactcctaactttttgtttggtttttaaattaaatattaattgaatagacttatcttccttaatcatgtgaactgaaaatgggggcatggtggtcatgaggaggaaacatttagggaaattagattataagtaaaagtgtgggcatattctcctcttttctacaaaggttttcaaatggttcctgaggttttttgttgttgtccgtgttgttactgttgttcttgtcatcaggtttgattttggtccttgccctttccttctagttctccttttattaataggaaggcaggcaaaagccccatttatgtgtgtgttttcccctcagacagctttcatccactgctctgcactagaattgcacaaatcttcatggtgagcaattttaagaaatgttagtgaaaggtagaaattatttcacaaatcagtttctctggtccttcatattaataataatatttggcttcccattgctctttggagttgtttattaaatatgtgtttttgacaacctcctcattagtttcttaaatgagtactggtttgtaaagaattatcaacattatccattccatttatgaagaagaggagaacagctaataaactgtattgtaaaatccatatgttaagtgtgtcttgaattttgaaagaaaaaatatattttgcaagctaacattttcttgaaacaatttgaggcatcatgtaacttataaccgaatccaagagccgttaggcagcagagtgtgttaccacattgaaatacacagtgctgctgttagactaaatgtcgtaggttgttaaccacatagaaacacactagtatgaagaaaactgttgtaaaatctcaagagcttcagaaactgccttacaagaccgcagcataagctattttgaagtatttaccaaatagtcacatgttgtaaaatatcaagtggttataaaaggatgccatttatatattaaaatttacataacattgttttctggatgtccttgttaagtgat

SEQ ID NO: 110230 - DNA, 1034 bp, Homo sapiens
ccactgcacccggccaaagacccattcttttataaaatgtccctccctcaatttggatttatctgatgttttctcataattcgatttaggttctgcatttggggcaggaatagcaatgaagtaatgatgtgtcctctgtgtatcatgcaaggaggtttacaaagtctacttgtgccgttacttatgatgctaattttaatcacatggttaaggtgtctgcagccttatgctttcccagtttccctggtttactaaccattccattaatgaatttacaaagtaagcaaaatgtatatttcccaagtcagttcctgactgttttctcctaaaataaatccttgcgtgctgttgtcaacctaaactatgaaatgctctaaaataaatccttgcgtgctgttgtcaacctaaactatgaaatgctctgggattctgtcctgtgctgttggggtgcatcaagatgccaaacccacgaaccaagtattttgtcaaatgaactgagtcttcagggacattgaggcatgtctgcatttagctcaaaaggtagaagtctcacaaaactgatactagcgaatatcatgttactgaaaattcttggttattcaggcgttcctagctatgtataagtgcttcctacctacatacaacgtctttcttctatgcacatcatctcaggtaccaaatagacagtattatttaaaatccccctttgacattttatgctcagtttttcagaccatggaaatctacacctatgatgctcttccaagatcactgggcatttttttgtagtttagtaagtgacttatttaatttgcaattctcaattatttcatttatatgtaaacttttttacgagacacaaggttccactctgtcacccaggcaaatggtacaatccaatggtacgatcatagctcactgcagttgtgaactcctgggctcaagagatcatcctcctgtctcagcctcccaagtagccaggattacagacacacaccaccatgcccagctatttttttttttttttaaataca

SEQ ID NO: 110231 - DNA, 1374 bp, Homo sapiens
agtctcactaccaatctccattattccagcatgatcccagaccacccagagtttacacttctgttagatcatctttctagaatgctactactgggattatatcacttcctacatccagtttctgttctgcccttctttgctctgcttccttacaatttctacttcaaagccatctgtaaaacactagactttattctgtcatttgcaatgtaaagaaacattatctgcgaaaacaccaaatttaacttgattgaattatcaatatgacttctagcagaagactaagtaaagtttaagatctgagtcaagattataaaagagcaagttacgcatctttggttgatggtagagtgagatggagagggaagaaaaaaattagtcataacagttaaggatatttttgttcgctggtgaaataaaatacattgatatttgttgaatgtttattccttttaacatgcagtttatctttatagttaattatactcgaccagtgatcatattgggacctatgaaagacaggataaatgatgacttgatctcagaatttcctgacaaatttggatcctgtgttcctcgtaagtaaaccaaacaaaaacatttaattgttactcttaacatttcctgtcactgtgtgtgggaaaaatagatataaccattttttaatggtttgtacttattttatcagttactcttccatcctccatattattgtcctttctcagatttaaattaatctgttctgttgaactttacaaaacgatgtaagtagaaaatggatttattgtggttttttttttaatattaaacactttcccaagtttttttctgttaaagatacaactagaccaaaacgagattatgaggtagatggaagagattatcattttgtgacttcaagagagcagatggaaaaagatatccaggaacataaattcattgaagctggccagtataacaatcatctatatggaacaagtgttcagtctgtacgagaagtagcagaaaaggtaagcatcagactaatcccagaatatagcttctaatcagatatgcctttgacagtatgcaagactggtaggatagatacagcactaattagttttgttaatgtgatgaatttgcttacctaaataattaattttccatggcttaggaaagtgcatacaagataaaacaggtaaataaggtaaacaaagaaagtgaaaatagaaatgataacatgaatgtaagagaagttattttcaggtcatttgctagagatagaccttttgtttaggcctagctctccagcatatattaaaaggagataagggccgggtgtggcagtgcacccttacagtcctagctactgagaaggctgagttgagagaa

SEQ ID NO: 110232 - DNA, 1854 bp, Homo sapiens
ctttaattaaaaaaaaaaaaaaaagttaaaataaaaattcagatttccctgtctcattgaaagttttatttttattttttaaaaataaaagtattagtctttgtttaattgaagggagatatttattgagagaaaacttgagatgacatttacatggatgagaagagtgcctatggttttaccaaacaataaagtcgtgaaatggagtcacttttaaggagggccaggcagtttctggctgggtgtgtttgttctcattgtcttttttatgttttgcaaaagccagccagtgccagtcttatcaaagcagagtttctaagaaatattagttggttttaaaatgcaattgccaccatcggtgccttcccttccagctgagacatctgaatttatgacttctaatattagttggttttaaaatgcaattgccaccatcagtgccttcccttccagctgagacatctgaatttatgacctttacaatcctttatctatatgatctcagaaacatggattttcatcttcagaaacaggagcaaagctggattgaaaataagatcatctatttatttttaattacaaagacatcccgtcattaaaatgggcatctatttgtttaaatatagtttgtcccctttgccagttaacgctgtttcaaaaactgaaatagtgccaacagtattttctcctttgagttttatgtctacatttggactaattcagggtcacttagccctttttgtcatattctacttgctatttataatagatttgttcataaactgtgttgtacaaaaataaggcattgtccttaattacaggagttttcctttgctaatatatatttattatttgaaaaacttaaacgtttcaaagaaaaagaaaatgcttttaaaaaattattttgttatatatggcttatatctcaacatttcattttgattatttgctttttaaactcatgacactgttttattttttttcattgtcctgcaatttcagagcatgtaacttctaatgccagcgatagtgaaagtagttaccgtaagtgttttaagttacttgttcttttgtaatctcgagtaatacatcctctgcaggggtggagggattctgagtgatatgttataaaaacctgaagttatatgatcgttattttaaaatcagggagagacaagtaaaattctgtacttgaaaaataaaatcatactatatatgtagaggttaatttataaaattttaataaaataaaaatattatttgtgtacatgatacatatgtatatgtatatgtattttttgtaagaagtaaatatctagttaaatgggggaaaacttgtattttgaccttctgtttagtaattggttttaacatgagcactaaaataatatttttcagtaatgctaaattatcattagctttatttccatttttattctttgtcaccaatactgatctgggtcatgtcattgtttatcaccagcacttggtgaacggaagaaataaggaaacattttcaatgatcacctgaaaaataatactaatttttcttttgctgttttatattacattcttggttttattaagtgaactgcacaagcatgtgatgttttaaaacagacttgggcatgggagaaggggagggtacataatatcagttgtagcaccttaaaaattaaaattacttttctaactttctttttttactgctgtctaatatgaaagtaatcttgattacagatgagtatggctgctcaaaaggtccatcctgttaatatcagtccctaatactttttcatgttgacagtatatacttttaaccgtcattcatttggttgattatttttctacaca

SEQ ID NO: 110233 - DNA, 1019 bp, Homo sapiens
acgctttgtgtagacctgaattcatttgttctttattctgagaagaagagagtcaaataaattattgatttccctgttaacagtagagaaaacagtgagagaaatcgtcttatcaaacctaattttgctaaacagaactaatgagagtacaatggaagtttgggagaatgcagctaagtcatcatttgcgaaaagctagaaataaaaacccgtgccgctttcatgctttaagggaggtaattttgaaaaagctcaagggactaaaactaggtaagattcctttaacagagactgaaaggaaacataactcaataaaagatacataaggtgctcagaagtaaaattatgacataagatttgagacaaggtttgttcttattacatgtaggctttccatttttacaactttccatgttgtacaacacctcaaaaatttcctcaggcacgtaggtttcctgttacatatgtcttttctttcttctcactttaaagacgtacgcatagttgtgcagagcttctaaatgccaaaaacagacttattttcatttgcattacgaataagatgtaagagtagtttcattgcttcagattgatgatgtagtattagaggagagcagaagagaaacatgatgtactgtatcaggaagaagcatttgagtacaatgataaaacttggttagagagatttgagatagatctgttcatcaaacatcataaacaggctgggcgcggtgactcacgcctgtaatcccagcactttgggaggctgaggccagcagatcacctcaggtcaggaattcgagaccagcctggccaacatggcaaaaccccgtctctactaaaagtacaaaaattagcaaggcatggtggtgcacacctgtaatccaagctactcgggagggaggctgaggcaggagaatcacttgaacccgggaggtgaaggttgcagtaagccgagatcacgccactgctctccagcctgggtgacagagcaagactcaggttttttttttgttttt

SEQ ID NO: 110234 - DNA, 2070 bp, Homo sapiens
taatgacttttctgttagctcatcgtagccacaaaaaaagagataaaggaataactgtggtcaggccaaaataaaatgaagataatgaataaaatgtaattgagcagcaaagtaacattaaataacttttgctgtagagcacttaatacttgaaaatttttctggaaaaacatggattagtataaacaaatgttagcttggtttgtactgtagtagtaactgatttgcctttttttgtcaagtagcatttttatttttaggtataaatgaactatgctgtctgaaattcttaagtattttcagttgcaaaatgttagaatttatacaaaagtagaaattcactttatatgagattaaagtaaaaatcatatacaaactgcacactgtggtcataggagtcagcttccacagagctgctaggctgggcctttgtacacacagacagtagacatccctttgttttgcccctccttctcttcttcagcagtcattcaatgacaagcgtaaaaagaacctcttttcccgaaaattccccttctacaagaacaaggaccagagtgagcaggaaacaagtgatgctgaccgtaagtatgtggatccagtggtcaactgaaaataaaatggagagggacctactgccctgcagttggttgttaccatggagacagtttcaagagctgcagcaggttgctaattgtcttcaagggcaacttaacagttataaattaatttgtatgccgatcttaactttttctggcaccttaggaattcttaatttaaagcaaacattatttttcagttatatgtttataacttgaacatataaatatgtataaatgcagttatttgaaggaaagatttttatgaaaaacacattcatacattcaaagaatattttagaggaagaacatgaatacatgagaagctacctgttgatttctaggtataacatggcgagtctgataactggattctctggaatcattacattttaccctatttcttcattatatgtagacaatctggattttacttttaaaatagcaagaaatggtctaaaattttgcttctgtacctgaatcagccttcatgctagaactttcattcttttggtagattacagttagcagctagctcatttcaaagttctagaaatatgtaaaaatgctctgtaagatatatgtacctgtaatggtcttggaactgtctcttactgtagcaccaattttatgcattactgacaactattttctttgattatctttttattgcttgctctctggggactaccctctacaggagatccctgacgacatgggatcaaaaggcctgagtaagtgatcaaaatactcccaagttattttttaacctccatctgcagacctaccttattcagatacattttgagattcatggtagtgcctttctggcataaggaggtgtatgatttagattgcttttagaattttcatgtttatcacatgcttgggactttatttctgtaatacataactttttgtttttatttttcacatgtcatttgaaaaattctcttgctcgtaactatattttcctttttgtaatttttacgacagttacttttgctaggaacttttaaaatataaaaacttttaagatttttttaaatgtaccctcattattagaatgtagaaatatgcttccttggagttttatgttccccttttttttgttaaaataatttaaaataattttgattatgtgttagaaaagcattactataaaagtataaagcacaatagaatactacgcaagtagcagtttattgaggggataggttgtgtatctcttttttttttttttttttttttttgagaaagttataagttaccacaagagtataagaactattttgtttttcctttagctaagatgttgcctttgtttttggtttttgttgctgctgttcttgtttaattttctagctagttacttaatcttcatgtaaagcttcacacagggtctagtatgtagaagacattcaataaatgttggcatgaatgaatgaagcaagaagccattttagcaaat

SEQ ID NO: 110235 - DNA, 1052 bp, Homo sapiens
caggcagatcacctgaggttaggagttagagaccggcctggccaacatggcgaaaccccgtctctaccaaaaatataaaagttagccaggcatggtggcgggcatttgtaatcccagctactcgggaggctgaggcacaagaatcacttgaacctggtaggcggaggttgcattgagcccagatcgcacctctgtgctccagactgggcaacagagcgagacccaatctcttaaaaaaaaaaaaaaaaaaaaaaaggtaaaaaattagccaggcgtgatggcttgcacctgtagtcccagctgctccagtggctaaagtgaaaggattgcttaagcccaggaggtccaggcagtagtgagccatgatcatgccactgctctccagcctgggtgacagagtgagaccctgtctcaaaaaaaaaaaaaaaaaaaaaaaaaaaaaggaaatatatcaattctttcatcatatattttagaagtgtatttatttttccttcactttaagtccttctgcttgcatctaaatacttgggctgtcgatagatgagaaagatggtacaggcttcatcccgtattggtggatgtaattcttaataatcctgaactcactgcagtggaatattctagcagtaagcctggagaacaaactgaatacatgttatgttaaataccatttatagcaatgttttatgtttggggttttttttaatactaaacaaaatttttataagtcttctgataatatttgaaatgaatgtggaatgttaactcagcaaataaatttactctgtacatctctggtatcactaagcactcagacttaaagctttaaaatttaaaagatgagaaatatctttggttcaagaagttaaatctgagaaaattatgtgttacattccattttttagaaatgataaattcctttaaaattgtagctttcagaaaaattccaaattatatagtgtgatctgaagcaatattaaaatagaaatttgtattagaggaaaaatcccaggtaaatgctcaggatttgaaaaatgtgaattttttaa

SEQ ID NO: 110236 - DNA, 1031 bp, Homo sapiens
gaattcccctgagatagcttatttatgagatctgcttcatccaaatcattgtctggaagttcttctttaagagctttttaaagtagtagtagtaagatagccagcaaaaatagttaatgagatcataaagaaatgtttattataactagttaattcattttaagtcgattatgctgtaataaacatctttttcttattagttgaatttatacctatttcgtaactatttctagacctttatttatttacctgtttgtagaagttgaaaagtaatattattaaattataatcaagatttataattatgattttcgggcttataactgctgttggctgtatccatatatttagcatgatccaactatttggctagatctttcagttgatgacaaatcctcttttagcaatgcagcaatcagcataacttttttccagaaatagaacatagtctgctttaaattcggaaatgcttcctctatgccttgttgagtcagtagaaaccttacatcttaaatatcaaggtcagagctcctaaaaattgtcttggttcttggagtctcataccttacaaaggctttctgtgcctacacccaataataaacactgttggcttcactggagagatttttttttcattttgtacaaaaattctataagattgtgttttaaagcaagcaataatgtaagaaagatatcttgagacctctgccaatttccacattcatgagtagcattgcagaatataatcttactcccgtaaaatacagtaagaaaccacaactaattatgccatttcgttcttgaatgtattcaaaacttaccttttcttaaatagaactatctctttcttagacctcttctaaaataacataggaattgtaattcctacaattcttggctttcaggaataatatttacaaatatagacaatttaagttgctgaattatgtactaaacaaaataatgattagaaaacaaagttgagttgtaaatgctcacccactaaatgctagttttgtggtgctgttgat

SEQ ID NO: 110237 - DNA, 1046 bp, Homo sapiens
tgtgaacaaatggaaggaataattaatggacagaatagtcactatgttgatctagtcgtacagtccacaactaataaatcaaatatatcagggaatttgttttcctacatgtatctaatcaaagtaaagagaagaatgtatcttaatactttttgtttattaatttcaaactctctggatttgtctattttagaattcaatataacttaccattggattacaatccaagagcgtttttaaaatttgtcttgtgatattgaaagaaacaaataatacaatacagtattttcatagcaagttgattttgctatttcttttttgtcttatcttgtatgcagtgcagaattgaactgggcattatttggcctactatgatatatttaattacccaaattacatatactttcagaaccctatgatatgttgattaatattataacaagtgattatggactttttttcttctgactctagagccctttttgattatgacaagactaaagacagtgggcttcccagtcagggactgaacttcaaatttggagatatcctccatgttattaatgcttctgatgatgaatggtggcaagccaggcaggttacaccagatggtgagagcgatgaggtcggagtgattcccagtaaacgcaggtatgcctgtttcttaccacttgaatgtgaggcaacataaataattgatgttcttttaaattttttttaatttgtgacaacatggatggacctggagtgcattattctaattgaaaaaagccagacacagaaagacaaaaatcgtatgatcacatttttatgtgaaatctaaagtagtcgaagtcatacagagaagaatggtggttaccaggggttaggaggatggggaaatgagatacaaagtttccgtgacacaagatgagtgagttctgcacctccaacatgtaagcatggcaactacaggtaatagtactgtacttgaaatttgttaagagggtcggtcctaagtgttcttaccccccaaaaaaaggcaaccaggtgaggtaatggatatg

SEQ ID NO: 110238 - DNA, 1050 bp, Homo sapiens
caataatcaaagcatctagtgtattaattattattataggtttcttccttaatataaaaattagaataaatcctgatttttaaaatttacacttaaattcaacagtaatataagattactgctgtctgatgcatggaaattgtcatttaattgactaaatgtggtataaactttaaaagagcatgtagaaaaattctaactcagccaattctaatttatggtacatttaggttattaataatttttttttgaaatttatgtgttgggcaaaatctttcgcatattactattttaaggttctaaccacatttaatcaattataggacagtttacatatttaatacgttatcttcaaataacttattttttgaaaatatatcaatttatttctctttttcttccatcagaatacagtcgttttgaagctaaaatacatgatttacgggagcagatgatgaatagtagtattagttcagggtcaggttctcttcgaactagccagaagcgatccctctatgtcaggtaaatttttttacttctaattatggcaaatcttaattagttatgcatgtaaattattttgtatttttcactataacttacttagttttaccgtaagaaaatatattgccaatcagtgttgttttttattattgattctctctgacagtgtgcctttcaagaattggaatattattgtattaataattttattaatgaaagttatgtaatccttgaataatgatgatataataaaggaagaaatttctgtggaccagaaattgttttcagattgatgtgttagtagtgactacaagcttgatgatatcatgtctaacacttagatttaacctctgtccttttctaatatattttccattcaagtaacatttaattacctggcaatttccatagtagcaaaggaggcatatgtaaataataatttaaaatgtgaatagcctcggtaaataatgcatatttggaaaatttctacatgcattttttaaacacttgggagaaggcaaatatgttattttcctataatatata

SEQ ID NO: 110239 - DNA, 1036 bp, Homo sapiens
aaatagtaaaattaaaaacaaaggtaatattgaaaagtcatcacttcctagttgttttctaggaagtaaaataatagaaacataaaccagtgagactaacagaaaatacaaaaagagggttgggcgcggtggctcacgcctataattccagcactttgggaggctgaggtgggcgactcacaaggtcaggagtttgagaccagcctggtcaacacggtgaaacccctgtctctactaaaaatacaaaaattagctgggcgtggtggtgcacgcctgtaatcccagctactcaggaggctgaggcaggagaatcacttgaacccaggaggcagaggttgcagtgagccgagatcgcgccactgcactccagcctggatgacagagcgagactctctctcaaaaaaaaaaaaaaaaaagaaagtacaaaaaaagatagtagatttaaaactgaatcgcccaaaactcctcctctccctcaaaaaaattaggaaagccaaaccaaaatttgttaaaaatctacaataaaactagacaaaaagatgaaagatatcctatgaaccccaaatataagctgatgtaaacaaggtattaacagctacaagaccatctgatatcagcatctgtgcaaggggatgcaacaggagaagcccaatgttaaccagtcctcacaagaaaatgcagtaggtaaatttgagaacaccaagtgaactataagagtttttgtacaatctgcatgttgagtgcaaggaatctacactaagatatgaaggggccacgagcagtctgggccctatgacacagttaaccagctgtagttccctttccatttaaagccccacactaaggaagaactgctgggaataaaatccaaattgagtaggatagggataatagagccaaaggaaatagaaggttcagattaatgggggtaagtaaagtttcaggaaatctcacagtgtctgaggtcatgtctttaaacacttgagagaaacaacaaaatagagagttctagagctgtgaagttagaaaacctatc

SEQ ID NO: 110240 - DNA, 1019 bp, Homo sapiens
agtagtgtgattatcaaaagggagtggttcatacttaaaagtccaatgcaatattctagacaagagactcaagtgaagaagcatgaggaacagtaatcaaggtgcaaatataacttattttttagtttgtaaaatatgcaaagagattaaagactagataagccattcactattacagtttccctctttacggccttaaataggcactattagaaagtaataaaaataaatggcaatgaaaggtcactctagaagcactgcctgaagactagcagccttggatattcccatcacaaacaaataagaacactattctttctgctaattttcatcccaaacacaattactgacaacctattaagtttccaacattgctaattctttatgaaagaaaagagacaaacactcctatctgtcctaaagatcactgcctagaatcaggagtctgataagtaaaaaataataataatgctaacaataatgtaatcaataaacgttaagaacagacattacttagtacacattttaatgttgaatctgtaatataaaagacgtgtacaaattacaaagcaaactctatagtgtcttattactatattgaataatatgaaaaagatctacaatgctttttcaccaatttttttctacctcattagaattctttgggattaaaaagacagttaatctatacatttcagtgcaggtagtaattttagatgaaagtaaattttgtgtgtcagaatatcaaggatatatagcaaacaaacaaacccacccaccagccaggcaaaggggatcacgcctgtaatcttagtacctagggaggcagatacgggaggatagcttgagtctaggagttggaggctgcagtgatgtacgttcatagcactgcactccagcctgggcaacagagtaagaccctcctgctaaaaccaaaccaaaccaccacttattgaattctgaacacaaatcaaataactgccatatttttatggtatatattagataaggaacatata

SEQ ID NO: 110241 - DNA, 1080 bp, Homo sapiens
aggattcattgaagagcctgaaatatacatgttttatttttacaaataaattaccactccttttttaaaattaatactgcttttctttgaggcttggtaaattgtccttaggaattagcttagtaaaactaagttaagaaaattcttatgcatattttaaagtaacattttatatgttccttatctaatatataccataaaaatatggcagttatttgatttgtgttcagaattcaataagtggtggtttggtttggttttagcaggagggtcttactctgttgcccaggctggagtgcagtgctatgaacgtacatcactgcagcctccaactcctagactcaagctatcctcccgtatctgcctccctaggtactaagattacaggcgtgatcccctttgcctggctggtgggtgggtttgtttgtttgctatatatccttgatattctgacacacaaaatttactttcatctaaaattactacctgcactgaaatgtatagattaactgtctttttaatcccaaagaattctaatgaggtagaaaaaaattggtgaaaaagcattgtagatctttttcatattattcaatatagtaataagacactatagagtttgctttgtaatttgtacacgtcttttatattacagattcaacattaaaatgtgtactaagtaatgtctgttcttaacgtttattgattacattattgttagcattattattattttttacttatcagactcctgattctaggcagtgatctttaggacagataggagtgtttgtctcttttctttcataaagaattagcaatgttggaaacttaataggttgtcagtaattgtgtttgggatgaaaattagcagaaagaatagtgttcttatttgtttgtgatgggaatatccaaggctgctagtcttcaggcagtgcttctagagtgacctttcattgccatttatttttattactttctaatagtgcctatttaaggccgtaaagagggaaactgtaatagtgaatggcttatctagtctttaatctctttgcatattttacaaactaaaaaataagttat

SEQ ID NO: 110242 - DNA, 2820 bp, Homo sapiens
agggtaggcatatgtttagtctccagcggatactgctgaacaatttcaacagtataggaggcaattaagaccccagtttttctacatcctcaccaacccttggtattatccatctttttaattatgaatagtatgtatatgtataaagttatctcatgattttaatgattattatttattcatttattgctggttgttcctgatgattaattattttcagcatttttgcctgtgcttattgctttgactcttgttcaatgcaatgtctgttcaaatctttttacatttttccattggttttattattgatttaaaggaagttttatgtatttgagaaataactctaatcagttacatctgttgcagatgtcttcactgagtttatgttttccctcaaaacaatggtactttttgatggataaaattttttaattccttatcagtcttttctattaaggtagtgcttttagtgacctgttgaaatttttcctatccttaggtcataagggacttgtaggagctttattattttgcctttcacatttaggtccgatccattttgatctaatttttgcatgtaatgagagattttttaatatgcagatatataattgatctagcatcatttattgaaagaccatttctgccactgaattgcattggtgcttttcttttaagtgaccacatatatatgaacctatttctaggctcttctgtttcattgaactatttgtctttgtaccacctgcagtctcttaattatcataattttataataaatattgatgtaaagtaaatcttaattttgttactgttcaagattatgttgggtctttgaatttcctttttaattttaggatcaaaaacattacagatcggtttaggaagaattaaattgagtttcttaatcagtccattaatatgaatatctcttcttttattgaagtccttcttacattctctctgcagtgttgtatagtagaggttttatatgttagatttagtcctggctatttgatgtttttcatgctattataaatgtactactttgtaaatgtttctaattttaactgatatataggaaatatctgttttgtatattaattgcttagtcaacaatcttgctaaatttgttaatgttaggttttataggtctttcagatcgtctacgtatataaccatgtcatctgtgaacaatgaattttacttccttctttcctatctttatactgttcattttcttttttcttgtctgatgcattggtaagacctccagttcagtgttgaacagaaatggtgataataaatatcactgtcatgttcacaaactgggggacacagtatttcaccattgtatatggtgttaccagcaggtcttctgtagataccctttttgtattaagaaagttaatctttattcctggtttatggggagtttttatcctgtaagtattgaattttatccaattatttatggagatgatttttctcttttattttgttaacgtgataaattacattgattttctaacgctaaaccattcatttgtggggggaaaaaacccacatccttataatatatattatatatcattgattttgaactgcttatattttgtttaggtttacatctgtgttcacaagcatgaacttaacgatagtgtcctgaaatttttctgtcttgtaatgtttcagaatgttatttcatctctagatgttttgttgaattttccaatgaagctatctatctgtctggccctggagttttcttgggaaggattttagttctgaatgcattttccttagcagacacaagaatgttcagattttctttctcttgttacctaagaggactagataacatttgatttttttttttttttttttttgtggtgattgtcaagcattgatggaggggatgtttctcacagaggcagccttgcaagtgagcagatgtcaaaattggaaaacaatttttgtactagttagaaaaatatttttagcaagaatagtaaaagaaatagggaagatcatagaagttatacatgaactatagaagataaagagccacaatgtttataaccaaaataaggtagtcaaaatatgatactcaggaataaaagtaggaaaaaaaagaagtctgttgaatctaacagagaatacagtttctctgccgacattaaaatgttcctgttttttacagtatatattttctcgcttttaacttatattctctttagctgcatggccttgctacttctgatttggacaccagtcttttcccattctcacttcaagctcttctacttgcttttctataaaatcttatagtgttgaatcattcatcttaatatataagaaaaatgaattaggcactcttgtgcttctctgggggacctttttacataagatttggggtataagaaatagtactgttttatctgatccttctttgaggccgtcatttctttcataggaacattaatttttagtctctgttgtctgagagtatgtggtacatgtgagattaactgccccagaaaggatgcattgactaaagggatagtctggatgtgtcagggaaaatgtatattttctggtttgggcatttgactggatttcttgtctagttgttttttttgtttcatctaaatatgaaaatgcagcaaaagaatttaagagtcaaaaatcagtaaactctggatttttaacaggctagtgattgtagaggttcacgtgggtatctattgattgagggctacataccaattcacttgaaaatcccatattcttactgaccacccaggaaagactttggac

SEQ ID NO: 110243 - DNA, 1026 bp, Homo sapiens
cttaggcaactgtagatgtgggtttcgttgtacacttctgcatatgcaattcataaacaatctgtttgtgttttttgaaaagcacttgtgtttaaattttttttacataagtgagttttacttgtcagttcttctgaagcctgcacagtcaccctgctgtcaggctattcagcttactctctatccctggctgtggtgatctggtgttctcttcatcagtctggctgtagtcactgaagactttagtgcgaaggcccattgtcgttttgccactgttactcatgctgtcattcctggtcatgtccaaaaaccacactaatgattcatccaacaccctgactttttggtttcttcatctctttctgactatcctgccctccacttcaactcagttacttgcttctaagataatactttagattttgttatctataattattaactttcatcacctctaaaataccagtttgatcatcccattgtgtgactacaaccctcagttcattcacctctattctagcaattccatctcattttgaccttcagtcatttgacattattattttgttgccccttgtctcaatttttctatttgtattagcttagattccatggtttctcatgttcacttcattgcacatcttcaagtcctttgcccccttcttcttcgcagcagaatcccccaacactggtgcaggcaaactctgctatttcatttatggttcctaaaaagcagaaccatggagaaaagcacaaaattctgctttttacgtatggccataaatcatagatagtgccttactcttgcctgcagtcctactacatttccctaattcactctcccactctaaagaatttttctctcccctcaaaccttcacttgccatctactattcatgaatgatgatctcacttcatatttcatataagcacccagaagagaatttccttatttttccactttcagatatacctatgtaattatatttttaccccgaaactcgactttcacttgtgttttaatgg

SEQ ID NO: 110244 - DNA, 1049 bp, Homo sapiens
tgtttatgcatgacccttttttattttacttcacttaatagtataatgaaacctagtaattacccagcccaagaattagaacatcaaccattttgtgtttcttattcctttgcttcttaaaaattgtttaatcaggccgggtgtggtggctcacacctgtctgtaatcttagcactttgggaggctgaggtaggtagattgcttgagcccaggagtttaagaccagcctgggcagcatggcaaaaccctgtctctacaaaaaatacagaaattaaccagacctggtgatatacacctatagtcccagctccttgggaggctgaggtgagaagatcacctgagcccaggaggttgaggttacagtgagctgtgattgtcccactgcactgcagtctgggtgacagagtgaaagcccatctcaaaaaaaaaaaaagtttaattatatacatatgcctaaataattttgtttagtattatttgttttgaagctttttcaaaacactattgcactgtatgagactttcatctccagtatttttttcactcaatattgctttactgagacttacccatatcattgcttagagctaaagttcattcattttatctctacatactattccactgtatgtctgtactgcaatttatttgtccagtcttcatcagtgtattagtttgttttcacactgctatgaagaattacccgagactgggtaatttataaaggaaagcggtttaattgactcaccagactcaggaaacttacagtcatggtggagggtgggggaaagcaaacacgcccttcttcacatgccagcaggagagagacgtgccagcagtggaaatgccagatgcttataaaacaatcacatctcatgagactcactcactatcaagagaacatcatggggagccacctccgtgatctaatcacctcctacaaggtccctcccccaacacatggggattacaattcaggatgacatttgggtggggacacagagccataccatatcaatcaataactgtctcagtccatgttccttagg

SEQ ID NO: 110245 - DNA, 1053 bp, Homo sapiens
cagctctgtcacttattatctgggtggccttaggaaagttatttacattctttgtgcctcagtttctccatctgtgaaatagggattaaaatatatattaagcttacaggtgtcatgagggttaaaataccaagaaagtgcctggcatgtggttagtgctaaataaatgtttgctatttttataaagtgtgtcttaatgcctacacagaataagcatgcaggaagtatgcaaatggtagctgtaattattatttaacatttttatataatctattattttcactatttcttttgttccttttgctggcccttgggaaatgtttgtatttgtttatattagtttttgatatactttcttcatttatgttttctggaattactccagaattatttataattctctttaccttaaaaaagaagtaacaaaaaattggtaaagtggaaaatttatatttaaattatatttaatttttatttttaatatttaattgttttctcagggtcaatgactgtatattacgagtaaatgaagtagatgttcgtgatgtaacacatagcaaagcagttgaagcgttgaaagaagcagggtctattgtacgcttgtatgtaaaaagaaggaaaccagtgtcagaaaaaataatggaaataaagctcattaaaggtcctaaaggtatgtggtaagtcaaactaagataaatctttaagaaatctctgagttaaatatacctatgaactttatctgtgacatacattccaagtacagtattagtaatattctacagaacttgagtggattttaatttctccgttatttctactgatttttgtcttacgtagcattttagaatatttacatttctaccaagattgcagcatttgaaaagttcctttttttgcggggtttttttgtttgtttttttgaggcagggttttgccctgtcaccctggctggagtccagtggtgcagtcatggcttactgcagcctcagcctcctgagctcaagcgatcctcccacctcaccctcccaagtagcttggactgcatgcacacac

SEQ ID NO: 110246 - DNA, 1861 bp, Homo sapiens
tctcctaactttttatattattgattttttatcttttcccagggccttttaaattccttttgtttagttaggactatacattgtatttttcactggttgaagaacttgagtacctaagtaatttggtaacctcccataatccactggtactgttcttaagattcaggtaattcatgaagttagattgaaaaacatttttttattaaaatagaattttaagacaaatggtggtagagtgggtgtttacactgtttaatactaacagttaaatgataggtccacatatatttgcttacttgagttgcctgaaattcagttagaacattcttcaagaaataaacattttttaataccattggttaaatcaattatttttaaaggctttttgtagcagtcgaaccctttctgtgaagaacatattcagaaatcttgtttctccagttcataaaacaagcaaaaagtagagctgctttggcaaaatttactttgctgtcaagaaaattcaccaatgttaagttctcaggttggtctttcagtcagtgtgaaacaatgccttttgctaatcgggtatattggttaaacatgtcagggactgatggcagctatcacttagcagccacaatttggtcatttaaaaataagctgatgtcaagttagcagaagaaaagcaccatcgccacccccttttttaaaggctaaaacagtatatgggttttgcctactcagaaataacagcgggaagatcacttcagcatttgtctcttaggagagatgtgccctaccaaacatggctgaggtgcagtctaaaagaaacagacttacagtgacacctctgcagatgggtgactaatccaacgacaagttgcacatacttttaaagaaagaactgtggagtatacttcaaaagtccttggtgtattttcttgaacctcacctgttcagcagtaatgcctctgaaaggactttcctccagaacaagtccatttaatttagaatctttatattactcacccatatacctttatttgttgtgttccttatgttagtacagtttctgcgtcctttaatgacaggaacctgtccataaagataaatcatattcagtctcaattttttttcttctatcctcagggaaattcagggcttggtttcagcattgcaggaggtacggacaacccacacattggagatgactcaagtattttcattaccaaaattatcacagggggagcagccgcccaagatggaagattgcggtatgttttgcgctttttattgtgatgctgaatccactttgtgtatttttcttgaagcagactggataagggataaatacaaataacaaacacgatcatgataactagcatagggtagatgctttaacaacattcaagtcaatgaatgagataattatgctctaagcattgtgttcctgttttcatttagactccagttttatcttagatattataacattttgaataacaaatttggttgatggtttaaatctttgtgagcatatttatagaaatcatgagtttccctttgtgttttcagatacactcacagaatattttccatttcctctctggctgggaaacatgtgtataaacttatttaagtacactcacagaatattttccatttcctctctggctgggaaacatgtatataaacttatttaagatacggaggatagaggatcacacatccatgttgaatcccacaccacaaagactatatgcaaactttaaataatatattttcttattgactagatgaaaataacatttgtctctgtttaaatttagtgttccattttggaagatatattttgcaaactttgattttttgagggtca

SEQ ID NO: 110247 - DNA, 1764 bp, Homo sapiens
cccagcactttgggaggccgaggcgggtggatcacgaggtcagaagatcgagaccatcctggctaacacggtgaaaccccatctctactaaaaatacaaaaaattagccgggcgtggtgggcaggcacctgtagtcccagctactcgggaggctgaggcaggagaatggtgtgaacccgggaggcggagcttgtagtgaaccaagatcacgccaccactgcactccagcctgggcaacagagcgagactccatctcaaaaaaacaaaacaaaaaagatccagctgtttaaaacagtgatttgggcagtggggaatactaatctaagcgattaggcagactgcattgacagtattccattccagaggaggttgaacaaggcctgaacaaaggtattagaaatgagagtgaagaggtgatgattttccaaaaaattaaggtgttcaaatcagaaacagttggtaactgattagatgtgtggatcaagacagagaaggatcggaggttgaaactattaaaagctgaatgtacctatcctggatttgaaagtcatgataccacgaatgttgtcaactcattaatcacatttgtatttttccattccttgaaaatcttccccagaattattaaaatgaagctattgtgtttgattactgtcgcattcaacaggttttcattaataaatcatacaaaaattttgccttgccattttggattttacactctgaagtttctgagctgcttttcttttcccctgtaggttaatggcacagatgcagattatgaatatgaagaaatcacacttgaaagggtaaaaactattatcttaatctgttgttctagagaactttgtaatatactgctttttcatacagaatccaagggagatctctcaaaaacagaactatatgatattttctaagttcccagttcataaaattggccaaggtattttcaaaacatttgccttttctttagtaaccttatttttttaataaactttttattttacaatagttttagatttacaaagaagttgtaaagatagtcccaagagtttccatttactctggattcagcctcctctattgttaacatcttctattactagagtacatttatttcaactaagacacctgtattcatacattattattaactgaagtctctatttccttactttttatgttattctctctcagaggcccatccaggaaactacattacgtttagttatcctgccgccttagacccctctagattgtgatagtttctcagatttttcttgctttttaattttgtttatattgtttatatgcatatgataatgaagtattgttcgtattaagtaagtagtatactagtaacatggtcattatatcaattttcttttctagcaaaataaccatacttctaacagacagagctgtattaaaaactaattatggtatacttgcccaatcagaaaatgacttgaaggtgcaattcagatgtgcaaattttcttaagatatgtttttccctcaagaatatctgcactcacgcctgtaatcccagcactttgggaggccgaggcgggtgaatcacttgaggccagaagttcaagaccagcctggccaacatggcaaaactccgtctctactaaaaatacaaaaattagccaggtgtggtaacgcagacctgtaatcccagctactcgaatcaggagaatcacttgaacccaggagtcagaggttgcagtgagccgagatcgcactctagcctggg

SEQ ID NO: 110248 - DNA, 1064 bp, Homo sapiens
actgcattccagcctgggtaacagagtgaaatcccaactctctctatataaatgcctttataacatataatctctaagaggaaaatgtctatagatgagaaagaagagggaacaaaatagtaatagggtttgaatctaggagaatcacaagagttaagaacccaaaagggtagtagagatgggcttcaaaagttctcaaggaagaaactcctggtccctatattagacctgaattaagggctacattttatagtatggttaagaaagcaaagtagcttatgtaggttttgttatttctcttgcagttatctatcattgcataacaaactaccctgaagcttaggggcttaaaagaacaacagttcattttttctcataatgaattggatggctctgctttacatggtgtgggttagggcacttgacaaggttgggaggtccaaatagccttattcacgtggctgatagttggtggtgctgactgctggttaggagtgtagctggggcttttggccaagggttttggttctctgttggttagatctctctgtaggctgtttgagttttactcatgttatagctgctgggttctaaagaaaatatattccaagcaaaggcaaataatactatcaggcatcagatgacctagtctcagaaatcacacagcatcatttgtgccacatttattttagtcaaagctagtcacagggcttgcctagatctaattgaagaggaaagagactccttttgatggtagggtgatttagttatattgcaaaagaatgtctggaatggaagatgtgagccatcttcagaagtagaatttatcacagtccacatttgatttagatagagttttgcccagcctcatatcacgagaaattttaaaggaaggattcaaacccatgttcatctgattccagggacttgtttcaccagtggcctttactgtaggagttaacttctttcaggagagactaggaaataaattggagggagataaattgtgaccaagatatcttgaatggtgactgattttgacataaaacatgtaagtgaaattt

SEQ ID NO: 110249 - DNA, 1072 bp, Homo sapiens
tgcacgtcaggtactggcacataatcttagccgcccatatttttagtgttatctcatatttctctgagacagcaaactaaggaacaagttttgttttgtttttttaaatgaggatatttattgaggatacacacaaaaaagacctatttattctgcatagcttcactttaggttttaaatacactacggaagttcatgaaagatagttttaccatttttgttgtgttatgtgagaagccaatgagtgcacctcattttccagaataagtgtgttcctaattagtgaagtacaatgtgtacattataaaattaaaataatggactaaaatatccgtccccaagtaaaatttaaaatacatactaacatataacccaatttcaacatattaagtgaatatgtattcttaaaagatccactactttacatttagatgcgttaggatgtattagaaataaaaacagaagaaaagatttagaatctagtctgtctttgccactcaagctagttaccctctctgagttttatacccccttcatctattaaaatggggggtaacgccaacctgactcctttaaaatgagtttgagagtcaggcaaattagaaagatacatagatgaaaactttttaaaaagtatatagtctttcatgatttgtagaacacttttatacttttcagagtactttcacattgatcatattgtttgtactttatgaaagtcttctacaaatcagaattatgcttattatacagagtggcacagataaaggtaatatttaatggctgcttaatattgcagaaagaacgtggagtttatagtcctacccgactccaccacttcctagcttcacctgtttctacgtgtgatggtgtggaaattactcaacttctgagagcctcagtttctccacatagaaactgagtacagagtaggtgacagttactagttcttcttactgggagtgtaaacacataatctctgtgatactagcctattaaatccagaggcttatttgcaccctagagtaaatactctgctttaaaactagatgttttaaacctttatttctat

SEQ ID NO: 110250 - DNA, 1482 bp, Homo sapiens
aatttccttgtgacggtgttaatatcatagcctctgttgccatggaaacaagtctctgaaggcagcctcagaggctaatgattccatgatgttgctgtggatagaaacaactgagaccgttgctagtcacatggtcaagattttttttaaaacaacaacagaaaaactttagatctcatcttattgagtgatacaaatggagcaaaacaaggatgatggcataacagtcactgtctaatgaaatagttatataagatttttcaagtttaaaatgccatactgaattctgtaataaccaaaatataatggttactgtatattgctgcttcattatttatgttagaatcttaagtttgacattttctaatttagaatcttatacagctccccggagttttaccctgctctaaaacctttgcccaaagcatcctgtgatcagatctgatatctttgctgttcctcatcagtcagccttcatttgattattatttgtttagagctgcatttttgtttcaagtgaactaaatgaattactttgttgttctgtaattgtttgttaccagaattggttatcagttgtgattagggaattgtgtgtgttgatgcgtcgttgactttctcagcggtgttggccttaaggaagaggcaggggcctatgttcttcaaggaacttggtcagtgccctgtagagagggggatgggttaagatgctgtaaactgggaatttttttaaatggtattcacatcctcgtctaaagaaggtgattctagaagaggctcagagacagagggttacaagtgggattaaaatgtaacattaaaggattcatggtttatcataaagggttttggagagcacctgcccagtggagaaaatttttgtgctttgctttgaaatttgacataagcatgtacttttgtcttattttggctatcaaagtagattattaatcagctattatcctattgttagggctggagactgttaataagaaaacatattacatttgtgacattttcaaacacttaaaaaataaactttagtgtccttaaaagaaccaaaccaaaacaaaaaacaacagaggcacaaggaagcttttagaggtgatagatacgtttgttactttgattatggcagtggcttcatagatgtatgcctatgtgcaaactcatcaaattctataccttaaatatgtgcagttttttatatcacttctacctcagtaaagttgtttttaaactagaataaaattgaattaaaaataacgttagactttcatgactttgacacttttgatgactgcagctagttactttgtaatgtatcactcaatttgggtttgtctgatgtttaatgattagattcaagttatatacctttggtagaaatatcctggaagtattgtactctcattacattttatcacatgatatatgattttgatttttcccgttactggtggtgttaactttgatcacttg

SEQ ID NO: 110251 - DNA, 1684 bp, Homo sapiens
ctgtatagtgtcttgattgtttagatggcgtttctgtcaaggatagataggcaaaaagaagtttcacaggctataatttatatattctaaatatattcagagaagttttaaagttaacctttaaaataatgtgttaataacagtgctgaaaagtgactgaaccatgcttatgggatcagggcaagtcagcctgagcaacatttttctcctgtattttcaagtaatgtttgtttgcatgagaattgtacttcatacctcttatcacgactctaattcagtagtcatttggataatgattttgtttaatgtcagccactaaactgtaagtttcacaagagctgatgctacagggtgtgtggttttttcccttggtatccccagagcctcgcatggagaatgcacttgataaatatttgttgaatgaataaacagatgttatacaggtgttaatttttatttaatctgctgttgacgaagtggaagtttggaacttctaaatattgttggatcactgtaaatttcccaagccatttttatgtaacactatggcttaaaaactagcaagtctatgttaccagattttgtaaagttgtgaatttcagaagtaattcagatccttctgtgaaaaaattgtgaagcatttatactcttacatatctgaagaacttaaatttttatcatgaaaattttacttagtatcagtctctttaaataaattttcttaaattattccttgtacttcctggcactattatttagataacatttccagccctccatttttatagcaaagtttagaattttgataaaggtaaaaatagttgttcagactatgtagagaacagtagcctacagttaccaccttttaaagaaaactttaaaccaactgatgtggtaattttaacaggcgtatgcaaatacaaaccaactggcagtgccacctgggagcagtggaattttatagaagcctatacacgcaacttgcccctccaggcatttatttaaaagattttccctcctcacttcgtaacaggagcacttcctattcattctttttcctttaagccccaatttggtagcatttctgaacagtattttcagtatctgtgaaatcaaaactctgacttcttgactggagcagctttgaaatgtgaagaagttacagctgtgacagagtggaaccaaatgattgctttacaatttgtgttgttttgttgttctgagaaaaagaattggggattataacctggtgtttaattatttgttaatttttttttaacagccacgttcaagagcaataaactggcatttaaattaaaacagatcccaccctcatttatctgtatataaatctgactaatcttggtaggatgatctgatgtatcaaagggttataaatttggaaagaaatcagttggaaagtattttgtaagatagaaagaaaacaaacaagatgcatatcaatattaagaattaattgctttagccaaactaagtaccatagcaggattttgaagggagaacaaagaaaagagaataaaaatcatatcattttaatcactttttttccaaactggaaggctatattcagtatagaggcaaaattttttcagttgtaagagcacagctttattatatagactttttaattaaagatattttaaagaactgtaggtgaaacttg

SEQ ID NO: 110252 - DNA, 1340 bp, Homo sapiens
gtggatagtactgctcttttaatattctaccagcctcattttcctttatagtatcctcctttttcctactgctaaatgttcaaatgtctcagggctcagtctttgaactctctttttatactcacatttcaggtgatcgcatctagtcctatgcccttaaataccatcagtatttctctttattccagagttaatccctgtacattagacttttatatctaactttctactcagtatctccacttcggttaagcatctgaaaggtaacatattaaaaagagaatttctagttttattggtctcaatcttctttattcagtatgccattcactaagatgctgaagacaaaaacccttaaaattatcttttattccttttttctttgctccgtatccagtctgatgccaaatcctgttggctttttattcaagatatatttatgatttggccacttttcaacacttctgcaactactgattcaataatatgttgcctgaactacagcagtagacatctaacttctctcgttaatattttttgcttcctctaaggtagcaccccttcactccagacattactctgtcttcttacctgattctttattatacattttttactgtctttttacttgactgtcagctccatgtgggtgggatttttctgttatgtttattgttgtatcctcagtttctgtgacagtggctggcacactgtagataaccagaaaatatttgttgaatgagtgaagagacagggacatacgaacttgtgctaaggagggcccaagcaggtgtgtttgtctgtcttttcccttagactttctgtgaagcgcgcatcacactttatttagcattgtaatagttctctaactgatgattcttacttgccctctgagaagaaatacacacaaggaaatgaggtagggagagaagagaattcaatttcctcaaaactgggataactatataactcagaccaaactaggatactttaatgaaaagagggaatcattaataattaaagtgagacaacaggcataaatacagacttcccaagtaaatagaggcatatggggtcactctgttataaccatttattttctgactattcccaccaggcaacaggtctgaaattcacaccaagacatctccatcttggaccatcctagattgattgacctaaccgtgttatcggtacataccacattcattttgtctcatgtgtaatgataattgtgttttgataaaatattttttcttcatctccaaggaatggaattgttcatattcattagtgtagtgcttttgtactaaaaagtagactacgtatagggtaggtag

SEQ ID NO: 110253 - DNA, 3248 bp, Homo sapiens
taaaaatgtcttaatatagattttttatttaaagaatagccttgaaaccttggatgtgtagaaatgtatgttttctgtccatccgtgtaggtctttagcacaaaagggggaacaagaaatatttttccttatgctcttatgtaataccaaacaaaatagcctcagattcaattgaatgacttttctaaaaatataagcccattgatacataaaatatgaattaataatgctcatctcctttttagactgtgctaaatgctgtagagtatgatgtctgaccaaagaaaatgctgatttgtttagtttttgtatgttattagataaccttagggagactgttacagtaaagaaacagaagatactttgaaatattttcatttttcagtgttttgaaaatagattcaatttaatataattggctagtattatatatactgacatcttagctatattatggcttattcaagggatttaatgaatcgttttttgtaaatattatttatctagcttaatttgaaattaagtgaacttgtgcaattacacagtcatggaatattttttcacatagtcaaatcacaatttaaagagatgagcaaatactaaaagtctctcaaaattaaaaaaaatcacataacaccactttttgaggaaatgagctattgtctatgggaggaaaaataaagaaaaattaataattgtttgaaatacctattgtttgctacaagggtggtttgaggaaatattcatatttctaaatatttttaagcagtcagttcaactttagtaaaaataaaaggacgagaaatggtctaaaaacaagttgagaatgcatttgtcctctgacatcagtgatatttaaattaggaaaatacatacatacacattccttaggaccttttaaaataaattcccttaaagctgtcttttaaagaaaataatagaagcagctcaataaatataaactataactgtcaacagttctatatttctttatatgttttttataaatttctttactgtttttggttactagaattgtcttttaatggtgttgatttaaaataacatcagctttcttaagtaagaaattctacttacttttctcaaatatttgggagaaatggaattacctaggaagggggagtcattatgtaggcattgaggttaagttacaatcaaaacttattgaatgggcaacgattgatttaactcttaaattgaatactgccccaagaattttactaaccttattttgactgcaattacatatatcacgaaaggatgcaaagactaaaggttgacaatgttattcattgtagattaatactagatgatattttccattgtcaacaagacagatatctttagaactttttatatatatatatggtttatgtaaatgcacacccttctatatatgtatgcacagataacactagcattgatatatctgtcactcggtttattaaaagcaggcaaatgaaaagacaggaaaagtagttcatgtataaagtgttgaaaccacagagttacgttatagccgcttgggagtaggagcagaacgttgctgtgattgcgccagaagagagtcatgacccctgttcgcagtcagctctgcaaagccattttacatgacagcccccacccagtttggttcagagcattcctgtatgctagtatatgagttattaatagtttttatttctttcagacctctttcctgattctcatcttgtctttttcattacctttctattttatttctagaaataggagtattagggtagaggttttagcttctgtttttcttgcactggagtaccaacattttgtttttcattttatacatttttgtaactgatacattggatagtttatatatcttaatttttttataacttactggagttgatttgacaagttaaaatataatgggactgaaaaataacttgagatataattggatcttacttgatactagaatacttttttaaattgcacttactgactcatggctggcagctttcttttgcagcactaagggatttattgttagaaacaacgtagattgaaatttcatacttagagcatataatatatacctatgaatataataaggtcatagtgttttgtactgcgattggtaaataacagaggtctcttatttcactgatgtcaaaaatactctaagatttgacagaaagattaactttgaatctaattccatatgactaagccacatgatactttttgcagattggagagttgttataaatcaagttctattagtatgaaaactatctggtttagtatcccccccaaatacagtatgaaaagtatctgatttaatatccccccaaatatacacaatacataaaaagaacctgtacttattttacagattcatttaaattgcttgtctgctggaggtattcatgttcataactaagattatgtgccattttctactatgatactggaactcaggaggaagtcattaatgttttttgaatgataaggaaactgagtggttataaacttttgcaagacacctagcttctcagttagggtttggcatgtagttggtgttaataaatgcttatagaattaattaatttttattccattcacctcaaatgttatctcctggccttccaaaatatgacacctaatctaatacctcttcagtacctgtattgattggatcttctctcttccctcacaagtgtctttggtttttcacagcagcccatctccttttccactgccttttcttcccctccattcttcatactatcctccagtcacactgccccgattcccctgatttcctcacccctttcagtccccactcagtagtgataaccaaatagcttacacactgtctctcagttttatcatttcattgtatctcattttacattgtgggttttttgagaggttgttttattttttaatgttaaataaaaatgagtttcttatgaattacattggtgaaactttttcagtttgaggcttcatagtgtttttgtccttaatttcaaacgattagtatagaaaaagttctctatgcattgcgaagccctccttggttccgcaccctcagcgtccctcctattcttgtgttgagggtcactcaataatcggccccgtcctacttagcatacacagtcctgttccaatctgggaccagtttttatattcagcagggttttatagaactccagcacagtgctgctagactttac

SEQ ID NO: 110254 - DNA, 1013 bp, Homo sapiens
ggaagcattttaaacataaaaattcccaggttccccctgcccgtaaacattttgatggggagaggatacaccaatctgcatatataactagcgccccaggcaattctcaggcgaactattatgttaacctaaatattagatgttagaatatgttcctttagcaatcaggtgatagtatttggtgaaccagagtggtatttatgtagagttggataaaacacatttcactgattataaaacgaaaaatttaccagcgttaattctttctcatttttagaaatttatgaccttgtaatatgaatgtttataaaatactagagagatgatgctgataatttcttgaaagttcttttttatcataaaggttccagaagcaaaatacttgttttagtaattaatctaccttgagacccagttgttaatcattaaaaaccaatacattacataaaatgataaaggaaaatccatttgtaatgaagcgctatcgttagatagtcagagtttaatgtaggcagcacctttgaacaacttagagccagtgccagataatgtgtaagatctgcctggtgtagaaatttggatatgaatgacaaagattcttttagtgaaatcattttaacagtcagaactatttgcagagagaatcctcttatatgttttaattcagttcatatttataatttatataagcagtgaaggtgccattggattttactacagactgtggttgaaacttggtaatccagggtttttccacgcagtgcattaaatcaggcagccccacagggtcttggtagtccagtgtttatagcatccttctttacctgctaatcgacctcacttcctggatttcaatccatctagttatcagctaacaaaagaacagcttttggttcctgcagacgctggtgaaaaaataatcatgagaaagaaatccaccttatgtcgtcttttttgtctgcaaaaataaactcagccatcatacagctaacaggtacagagggaagatacga

SEQ ID NO: 110255 - DNA, 1030 bp, Homo sapiens
gaaacccctcttgtgatttaggtatagattttttgtgtgcatatactgactactggccaatggatgaggtgttcctagatttttgtaggtcatgtaacaggacattttcataaagaagtctttcccaaaacttgaagttgttttcttgatgtgaatggatttggataggaaatttgcatcaagaagtatttcttccctgtacattggggaaatatgggaggcagtgatctgtcaactttagattgtaccctaagttctttggctctgtagggtaaatagatgcacactaagagcctaccattgacccctaagttctctggctctgtaggataaatagatgctcactaagagcctactattgtatgtcttttggtactgtttacagtttgaggtaggagatttgcattcaacagttgtattcagtatcttcatccatactaattcagaataacagaacccatatcagttttctcctccccttgaagttttcatcagacatggatcaaggcacatattttagggccagaccaattaccgtagcatttatataaaccacactaatcaggtctttactaggtacctggtccataacaaaacttgaatttttttctgggaggtttcattttttccttcacaagaggattcttagttacctgtccgcccttagtattttcttacattctctactccgaattagataggatcactctggggccataaattgtcagctactgccggcacagtccttgggaagaagcaccaaactttctggtataatctctgtcacaaaatatcttgccctcaagagtcccacatggctctcacccttactgagcacatgttcacttctcagcagacgcatcatagagacagcattagcatgttttcttgcggagtcaagatttgcagtggacctcaacattgtagtttgacaaaaggctgcatccagttggtgctggtaagcacgtagacaaggaagattctgtcagtccacatccgaaaaaatatccatggctgaggttgggactta

SEQ ID NO: 110256 - DNA, 1007 bp, Homo sapiens
ttcttatataaaatattagatggaacaaagagcgggtgcatttttacctgatttctgcaatcaaaaacaacatatgctgaggcaggtagatcatgaggtcaggagatcgagaccgtcctggttaacacggtgaaaccccgtctctactaaaaagtacaaaaaaattagctgggtgcggtggcgggtgcctgtagtcccagctacttggggggctgaggcaggagaatggcgtgaacccaggaggcggagcttgcagtgagccaagatcgcgccactgcactccggcctgggccacagagcgagactccatctcaacaacagcaacaataaaaacaacatgtggtttaaagctatttgtaggaagagagccctctaacgtagtatttgggggaataattacttattttgaggtattgttttgaatcgaacttttttttctttttagtttttgtatgactgaaacttttcaattgctgatgtgaagaggtctcaaattgctagctgattaaattaggctgaaaggttgttaaagaatatattgcttttctggtcacccaagcatttttccctctttacattaagttctttgttttgtcagagaattcttattttcctactgagatttcagaaattttctgaaataggaaatggaaatgattgcacaagaaaaagtatgctgctgatagaaacagatttttaacaaatttaacattcgtattggttgttaaactatgagccagtaaaaaattcatatgcattgtttaaatagctaaggctacatttttttcccctaggtgttaagcctgttttttcatgtggtatgtacaacagagtgttttaggaaaaggattttaaattttttaaggaatatttttataaagctaatcactgtaaaaaatgttcctccttatatgtaggtaaattaaacatcttatgtatataagatgtttcaaaatactattattataaaaggttttaagaagtaacatggcattgctcatgactag

SEQ ID NO: 110257 - DNA, 1062 bp, Homo sapiens
ggtatagatatacatcaaaattggttcagtaatgtttttccagattttaagtgattttgatgtattagaaaatactgaactttttttactgtccaagtttaatttgtaattattctacttaactttgccagatgattgatttttgttgttgttgcttgaattgtttatagagaggaatcaaactacaaaatgtgataattgaggtactctttttaccattaaaactatattttaaatcagactacagtgtttagtggtgtagtaagaaagcatcacatatgacaagctctgggctcatctcttattgaaccgtgtaatgaatcccttgctgcaacatctttgcccctcccccaaagcagccagcatatatttgagcatagtggctctgctcgagttgtatcttattctcatggaggagatagcagagcttgtactgcagcaagtggagctctgtggtgaatccgatgctggattacattttaaggatattagcaaggccctgacaaagtggtgctaaatgagcactttcattctggtaatttgactataattttagtgaagcagttttattatgcaggaaaaagaaacagcattttaattccaatcatagtataccgacctgatctctgctgtgggggtggaaacaatgaagaatgcaacattttaatacaattttttttaaaaagaatgctttggatctagattaaatgttcaagacagtcagcaaacaacatgcacaaaggcatttttctggaatttcagtcttggatcgatttaaatgctcagggtctgaaaaaatgtctcctagcatcaaaaacttggattgcttttctccgatgttatgccactgtaaagtagcatgctccaacagcacaatatccttaatgtttggatgtaaggtgggtttgaataatacttccttaaaaagcttggttttaaaatccaatagtatttcagcaaagaaatgtaatttaggttagatggtttgattgactttaattcatgtaatagattcctgtcctttgtgtgtctgacatgagtaaagaattggtctgtgcacag

SEQ ID NO: 110258 - DNA, 1026 bp, Homo sapiens
tgaatgaatgaatgattttttgaggttaagacctcaaaaccacaggcaaccaaagctaaaaaagacaaatgagattacatcaagctaaaaagcttctgcacagcaaaaaaacacaatcaacaaagtgaagagaaaactcacagaatgggagaaaatatttccaaactacccgtctgacaagggattaataaccaggatatattaagagcttaaacaacttaatagcaaaaaaacaaataatcatattttaaaatgggcacatttaaaatgggcaaatgatctgaacagacatttctcaatagacctgtcgagtgtgggaaacaatgcccagtacatggtaagattcactaattgttagaagatctttttgataatttttatgaaacagtaaaatatgtaggttcctggctgtacagaacagtcttttctgaatcattctttctcttttccctcttttatagttcttgttccttgctttttatgactagtgtgctagttgtctctccttatgagaggtggtggatggtttaagtacaggtctatcatcgagacaagctggaggtaggaataaaaggaatatgaaagggaggagatttaaagatgcttctacccatttctttttctactttataaacctcttcttttactgcttttactttggattttaaaagcagtgtctcaaagagattatactgttttcatagcaatattattcacaatagctaaaatatggaaacaaagtatccattaacgaaataatggatacgaaaaatgtggtatagacatataatagaatattattcagctttaaaagggtaggaaattttgacatatactataacatggctgaaacttgaggacatgatgctgagtgaaccaagccagtcacaagaagacaaataccatctgactatacttttatgtggtacttacggtagttaaaatcagagaaacaaagtagaatgatggctgagggaatgaggagttattgtctgatgagggaatgaggagttatgtctgatgact

SEQ ID NO: 110259 - DNA, 2171 bp, Homo sapiens
caaggttgtgagatgtgatgactaaaccatcactgctactgaactgccaaatcttggtctccatttacagtagtattaatgccatttactaatttaaggctgtcataaatagctctgtattccttttctgattaatatgttttaaatccaagtgtaatgtttgttttgttttgccttttagtgaaaatgaaaatgtacttctcttcgagttaaaaaaaatactcttctggatttagatattttgtgggacaaaaagatgctagtgagcatttctagcatggcagcgtttctgattattgttcatacacttatatacatttttatgtactttaatcagcttggttacagtattttgtgcttttccacataatgtctaagagagatttatttttgtgtttgtaagttcttgtgttcttagctagctgctttgcaaacatgtccgttgaggtggagttaatattgttagaggccaggcagtgaagtgtcatttttgtcaggctcgtaatcactgtaggaaaattaactcagagcataaaaggcccaacaagagtgatttaggattattgttatatatggtatattttcttatgttagcaataaagcactctgcttaaaccgcagctgagggcatttcgtgttctttagcatggaggtttcccagctgtcaagtaacttctgagagtaactttagtaccagaatttcttgtaataggatcatgtctttctttaagttcaggtgtttcattaaggcaagctggagataggaataaaaggattatgaaagagaaggagcttgaaagatgcttttacccatacctgtttctgctttgtcagcctctttttgctgcctttattttagattttagagtgatgctttgccttgtcttctgaaacagttccctgaatctcctacttgccaaaagttcatgattcttttggtgattctttatatgggtaaagaaaatgtatgcccgtgtgtggggatgtttgtcattccagtgggtgcccagcaaatttgttttaacataactgatagaattttaggaattaagtcaccagagaactgttgaattgttttggtttatcagtttgggaattatgaatacaaaatttgactcctttgggtaaaacagctatcttttatttaaatattcatatttatattagggtactttcacttgtaggttgtattaaaattgtatgttagaagctttgaaaggggtattaaatatgttaaaagaaagtctcagtacaggtatttcagattttttagattttttttaaaagacttcaaattttttaagttaggttttaatagtgaatagaaatgctgccctctactgttggctgattgtttgactgccacgtaaaaatgttcagtaacctgtaatagaattttttagtgtagatcatattactgtgttgaagtataattatgttaaacgttttccttataatttagttaagttataatcaagtgtttcctaataatgctaactactattaaataagttcattaccattttggcttttagaaaaacttgagtcctggagaaagtttcgtttagtcttagctcctcattttatatggtgaggttttagtacttcctagattgatcccttatggttgtgtgactgaaagctcgtattgataacttataaccaaactataggtaaagatacatttttctaaactaattatttttagtttatgctatgtaaaatgtctgaacttctgaaacttatgttttacatgtaaaaaaatttggaatttaaatcactattaaatctttgcatgtttattaaaatgaggcactgctttaaaaagtagtactgttgagcaaatttaaacctctgattgatgtttttcaccgtgagtggagggattagaagagacggttttaaagattccttttagcttcgctgagtgcctactgtgtgtgaagtactgtagaaaataaacacggaaaacaaaggctattatagttcttcctttagatcaggagttggcagactatggccagtgggccaaattgggccacactcactcatttacttaccttgtatggctgctttagtgctacagtggcagaattgggtagttgcagcagtgagcatatggcctgcaaagctgaaaatacttactctctagacttttacagacaatgttt

SEQ ID NO: 110260 - DNA, 1426 bp, Homo sapiens
catatttttagtgattttttttttttttttttttttttttttttttttggtggttgtcatttgagtatccaaactgtagctaacgaggagaagcagatttaaatttatatcgggggaacctctttgtggagcatttcatcagatgacttcctgtcaacctcatatcttgaaaagagggattaatgaaacagcatctgaagaagcagtggactcttgtggaataaaccctgacatcttccacagtgttttgtgggataatttcaagttcttcagatacagattacataaagaagattgtagggcacgtgacagactctggtttcttgtattttagatagtagaaaaattgctacctctaagaatggatcctggagagatctagttacagttataacttcttcatttatggttttatctcacagctttatttatttttatttacatgttttgttcaactaggcaacttaaaatagttttgctttatgtataaaatattgtaatggtagagtaatggattgcctgtgcattgtaaccacaaaggtaagatataatatgcttttctgtatttcattgttagtgacagatgtgagagaccctttgttcagtgtcttttaaaaataaggtgtaaccattgttatagatttgaaaatagatgtgtgaatccatgtgatgcttagtttatatcctttagaaagggcggtattttgaaatgtgttttagatagccaaaagcgtgttgcacagatgttttttccctgagatttacaggaagcctttctcccagcagcaagggtctgtaaagtcctgattatatttaaatcttctcagtgtattctcagagctactcttctcccctttgtgtcccaacatgccatgctagttgaaagtataactcgttttgagagcattttctggactcttccatctattataattatagttaattttttgtttttttaggaagaggaaaatagtcaagtgctgattgtgttgcctttagaaagatgttgatgtggatttaaaatgattagacttgtacaagcactccttgaaagtacttgttttgaagtctgttttgctcattgtgttcaaagtgcagcatgcttcacttaatctctaagtttggcttcttttatttttgagcaccagtttgcagacattgtgtgatggtgttatagattcagcgtgcttacatttaaaattcatccattggtttttaaaatatggaataatttacctttttttatttctatgcacttacgatgtctcatagtgattgctagacaaacttgttgagattttaaaattacattcagtaataaaagagtaggtaaatttgtaaattctgaaagtagaggctattactctttctgtataatgaattatttttcataagaggaaaagcaggaaaattgatggaaattagt

SEQ ID NO: 110261 - DNA, 1562 bp, Homo sapiens
tttggattagggatacccaatctgtagtagtaattagggataaatggtcaagtgacgttgtagttcagaaagggccatatctcaaacaacttaaaccgtataaaactgatgtttgaggtcacagagattagatcattaaaaagtggttgtggttatgatgaccctagacatcggagatgaatgtgaggagtttaactaaaatttgttctttgaaatgtgactggaataatatattagacatactattttaatgtgttgttaagtaattatatgttaactgattaatttggatatttgactatttcatcttattcttacaggtttgtaattgagttggcaaacttctatttttactgggaaaatggaatgtctaattttcaggattgtttcaggctgttttcaattttgtaatcacctatagtttaaatattagaaaggccactcattaattcagcaaacattgtggtcaccctgctatcccccaagatgatggggataaagtggtaggtatttgagacatttcttttcttttttttctttttcttttgagatggagtcccactttgtcgcccagcctggagtgcagtggtgagatctcggctcactgcagtgtccacctcctgtgttcaagtgattctcccacctcagcctcccgagtagctgggattacaggcatgcgccaccacgcctggctaatttttgtatttgtagtagagatgggatttcaccatgttggccaggctggtctcgaactccggacctcaagtgattctcccaccttggcctcccaaagtgctgggattacaggtgtgagctaccatgcccagcctcatgagacattcttgagtcttgtcctgttggaccttagaatccaacggatttaaaaactgaaacataggcatggtataaattcaaggactcttaggagtcattgagtttttttattttacaaaagaggaagttgagaccctcctcccacccccccgaagaaaatgactgcttaagttacacaggctgaatgatatttctaacttgccgtagtgattttcagccttttctattatgaagtctgccaaacttagggatgcctgccctctctgggctagactactctagatgtgataaaaatttcacaagagaaacttcagaatactaagagagcaaccaggtaaagggttttacatacctccttatttttcttcgcaaaatgcaatgcctagtcagtacttagatatcacttccattgttttcagtattctgcttaaaaatgataaactttatttagggagttatgagccttgagccttatatgagctttactctttcatgttgggagcaaatgataattgcaggggtggggtggggaaaagggagtactcaacagagcatgtaatttccaggctatatcctgcatgggataagggatgtgttggcccatgatgacatttacatagctacatacatatgtatttaggtctgagaggagaaaaaccattttttccctctgctctcaacacagcacacttctgtgctgactagatgtgtgaggaggtttttggtga

SEQ ID NO: 110262 - DNA, 1053 bp, Homo sapiens
gggtttcgttgagtttcccccttctgctacagccaggaaactttttctgggcatttacaggactcacctcattagtttctcttctcacagggtccagtgtctgaaagtcagtctttttttttattccattatggttggcagcaattgcttgtttatggaaagccattggtattctaaaatactgttaattatcttatgtgcctattaggtgaagtgttgccatcccaaaaggcttatatttcaagtccttctaaagtagctcatattacagggtgatttctaaattacttttaacagcaaatgaccatctgaagagaacacataggcttgaaatgtaccttactcagtgccagttgggtacttacagatacttacagaagatgcagttagtgtagaatttaacacaaattgaataatcattccctgagtacagccttaaaacctgtaagtattagatctatgcaagcttttttgaaggattattaggtatattaaaaaataatatagtaaggggttagttacatcatgaaggttataaatacacgcctacagtacaggggaaagtggcttcctcttctgtgaatgagcactacaagttgagtgttccttatccaaaatacttgggaccagaagcgttttggattttggatttatttggattttgatatttgcattatacttgttggttgaatatccctgatctgaaaattcaaaatctggaacgtggctaggcacagtggctcacccttgtaatcccagcactttgggaggccgaggcaggtggatcgcctgaggtcaggagtttgagaccagcctggccaacatgtcaaaaccccgtctctactaaagatacaaaaattagctgggcgtggtggcaggcatctgtaatcccagctactcgggaggctgaggcaggagaatcatcgcttgaacctgggaggcaaaggttgcagtaagttgagattgtgccattggactccagcctgggtaacaagagtgaaactccatctcaaaaaacaaaagataacaaaatctgaaatgctccaacgagta

SEQ ID NO: 110263 - DNA, 1027 bp, Homo sapiens
tttttaataaggaaggcttttctaaccatgaccaaaaaacaccacaaaaattaaaaggttaaaaatgctgctgactttatagaatttctttgtggactttgacttcaaattttgattgtagaacttctgaatcttgaaagatataatacaaagataaattatatattaggatgaaaatttgtcacatatatgaaaaaggattaattttaatttccagtcctttcaacttaagaaacttcttatagaaactaagaaaaaggcccgtgttcaataggaaactgacttaacagtgtgagtattgtagtttgaagaagaagaaataaatgtgggccaataagcctatgaagaaatgctcagccacacttaaaaatgcaaattacattgacagcaaggatatttttaacaaatttgattgtcagagattaaataaataggaggaaacagaagctcctgtacagttagtaagggagaatacagtagtgcaactaatttgaaagacaactttatattcgtatcgtttgatccagcatatgctccagattcaccacagattattgaaggtatttgtacagggatgctcactgcagccttaattagtagaaaccaacaagggatataaaagattatcggtaagagatcggataaacacattatggtagagccatttaatgcaagataaagtagcaggcaaaatatattctgtgtatccattatgtgttattaaatgagtgaaagcaggttacatgtcaggaggcatagtatgactgtgtgtgaaaagaaaaccatgaggttaggcatgtctggaagaatatacacatagtctgctttcaatagtactcttttaaaattgataaataattatacatatttatatggtgcttgtggtattttgatacatgcataccatgtttaatgatcaaatcagggtaattgggatatccatcatctcaagcatttatcatttctttgtgttgagaatattccagattttctcttctagctattttgaaatatacaataaattgtt

SEQ ID NO: 110264 - DNA, 1042 bp, Homo sapiens
ttttttttttttttttttttgggacagagtcttgctctcccaccgaggctagagtgcaatggtacgatctcgtctcactgcaacctccacctcccaggttcaggtgattcttccacctcagcctcccgagtagctgggattacagcacccaccatcatacacggctaatttttgtatttttgtagagatggggtttcaccatgttggccaggctggtctcaaactcttgacctcaggtgatccacctgccttggcctcccaaagtgctgggattacaggcttcagccaccatgcccgaccccaaaaccatttctttaaacagttttttgaagactgggtctcactatgttgcctaggctagtctcagactcctggtggtggtctccagcagtcctcccacctcagcctccagagtagctgggattacaggtgtaaggtaccacacccggctctctctcttaattttaaaaaataacacatcatttttataagaacaactctattctaaaataagagtgagttagttttagagattataagaaaggatatagacttaaaaaaaagcaagagtaaagagtaggaggaattgcctgatttaatgggatatttcagtagaaaagggttgatttataaggaaggatagatgactcttaaaaagatgaggccaggcctggtggttcacacctgtaatcctagcacttttggaggcccaggcaggtgaatcacctgaggtcaggagttcaagaccagcctgagcaacatggcaaaaccccgcctctactaaaaatacaaaaattagccaggtgtggtggtgcgtgcctgtggttccagctgcttgggaggcagagacgtgagaatcgcatgaacctaggaagcggaggttgccaaagaacccaggaaggcaagatcgtaccactgcactccagcctgggtgacagggtgagactccctctggaaaaaaaggcaagatgaaagagtaggaggaatttcctgatttaatgggacatttcagtagaaaaggatgcaccctactcctaacatc

SEQ ID NO: 110265 - DNA, 1044 bp, Homo sapiens
tatgtattaggaaaaaattagattttggttgactcacaactgaaaacattaattttgttgaaacctactcggtcaatcttatcacagtctattcctcattttccattcataatctgcaagtgctttccctgttttggcctaaactgggtttccacaagtccgattcctgaacgcagatctaaacaagaccacacaaagctctaacatgtacactaagaaacctccaaaaatcaaacttgaagaaaagcagttaggtccaacagaagaggccagaatcattcttatctattaaaaaaaaaaaaaaaaaaactggaaatctccaagatcacacatttcagaagccttcaaatatataattttcttttacataaaaatttttcattacctttgttattttcttgctagaattcaaagtttgcaaacaatgggagtaaagggaaagtgcagaatcccagaaatactctcaaagggggtgaggaatgggagaaagggaactttcaaataggcaaagaaacattctagcttttggtgacaacttacataatcttaaacagagaaacccacaagccaagaaacatttctcaaactaaagaaataaggcaatactaacttagggtcaggggagaaaatctaaatacaggcccaagagtatgtaataatttaacataataccggtgacatttctaatctatgagaagataataattttatttgatggggaaaagagaatgaaaagataagccacagacagggagaaaatactggcaaaacacatacccaataaaggactaatattcaagtggacaaaaaattctttaagactcaacaataagaagacaatccaataaaaaaataggcaaaagatacagacagacacttcaccaaagacagagatggcaagtgagcatatatcaaatatcaccagggaatttcaaattaaaacaagatactactacacacctattaaaatggctaaaatccaaagcaccaacactaccaaatgctggtgaggacacagggcaacacattgctgacaggaatgca

SEQ ID NO: 110266 - DNA, 1065 bp, Homo sapiens
attttttgagggcccaccataatgttttccatagtgattgcagcattttacagtctcaccagcagcacacaggatttccagtttctccacatccttgccgatacttaatttttttcctttctttttttgataatagccatcctaataagtgtgagtatatgactcctcttcaagtgtatgtaaaacataataaccaacatttattgagcactttctatgtgctaatacaaatatatcatttagtcattgtaatcctgtgaggtgtacattcacctgtatgaggtgtttgtactgttttatagactggaaaactgaagcactgagaaatgaccaatcttgcccttggaccctcagatgctaaattgcggagccagaaattgaactcaactaatctgaatccatagatacttctcaccgtcaaccattgggatattctttatcgttgtttttcagaactgagtattttaatctgataaagaatactaaatgacaagcatgcttaagacagatagcaatctttagggttagtaatctttaaatgattgtcactttgaaggaaaatatttataatggtgcattatgtttatgatgatggaaatcacacattttgaaaacagtgtttagtaatcagggtttgagatcttccagctatagtggtaaaatgtcaaaatttcttaaatttcttttgcattatattagtcccactgatgttacattttagtctcttgctaactgtgtgtgtgtgtgtgtgtgtgtgtgtgtgtgtgtgtgtgtaactttgtaggctagatttgagtaaggaaaacaggatatggatcacatcgttggctgaaacttcctgaaatggagaattttagtaacttctcacttgatggttttgattcaattagattgagttctttgctcatagtttgcttactactgctctgaagcagtgttttgattatgttgaatctggctgaattctctttagaaccttggaatcagagttgtaaaggcatctaaatatttcttctaagccatttcctctctgcagggtcatatttttcctcagtgcagaatcca

SEQ ID NO: 110267 - DNA, 2671 bp, Homo sapiens
tccttaataaccctgaattggtgttttagtatttcactctatcattcttactaagcactattctgtaagcaactgtgggatactaagaatttgtattttgaaatgttaaaaatttggattatgatgacaaattgtagataatctgcttttgcattatcaggtaatctgaaactgttgctaatactttgatcttttactttggcaaactaccagtacacatttattccaaactgctcactctcctccgttttctaatgtgatatatgtttaaatttttcttgtatttctttaatttttttttttattttttggtcattctaaggaatatgtgtacatgaacatagtgacatcaattgacctgaaggatttgcggaactatttagatgtcatgcagaattatttgcactagtatgtgatactttttttgtaaatagagagttttaatcaggctctgctttttcttctcagatacccagagagcattgcaccttttggaggaatatcgttcaaaactaagccaaactgaagacagacagctcagaagttccatagaacgggttattaacatatttcagagcaacctctttcaggctttaataggtgggaattaaaacttcgtaactattatgccagctaggctttatgctcctctcaattcatttattttaaacttaagaaaatgatgtacttaattctctgaggcattcggtaacttgaacatcttcagtgagttgtgtgtttttcataggccagtgtcctttcttaaaataactagtaaccaaaaaactttcaggattatttcagtggcttttgagaacattgtttcacatcttaatagcattaactattaaaagatgttgcacagatgtttaaggacctaaaaggtatgactgagttactgtgagcttgtttctgtatttgactggcatgtctctgaagtcattgaaagcgtgtgaagggttctgctgtgttgaagaacattcattcccttaatgtagatttctgtttgagcttggcattcatggagtcagaattttagacctggaaaataatcttagagatgatcttgtctagtaaccgtattttacaggcaagaaaatggaaagttttattcttaattgtaacttaatttgaagtggtgcattgtttgaaagaactggaaaaataagagtcctgagttcttttgccactaattgaatgatatatcccaagtcatttaatcttttctatgccaccatattagctgtagaatgtagctgttgaaatgacagaatgggtttaaagccttttttaagtagataaatcatttttaaaagcatcatctcatattttgtgtataatctcctatgtataaaacaaggtgacttgtctggctcttttgtccaggtacctcaaaaagtttgcaaaccaccgaactagaaagtttgtctcttccaattctaagaatgaagttttttttttttgttttagttatcaactatataacattttaacataagaagacatatacttaattatattacatttatttcttcagtaacttccagtcagatatggccttacatctatctgttgatagaataattgttggtgtgatttgaagactactttcaagtcagtgtgtcctgtcaggtacattattgataaatggatgctctctacggttttagaatgaaagatttttgtaaagaccacttgatgcacctgaacaattttgaaaaatgtaacattttaatagacttttaaaaacataaggatacatagcacagtgtaatgaactgccttttaactgttacccagctccagaaattcacattttgccatttttgtttacattgatggacattttttacacatttgaatttctgaggtttaaggtccgaatggatgatcaaattggattcctctggaaaaacagcaaaaagcattttttagttatttgttttctaaatcaacattgagcctagtaatttggtgcagttactgttgcaaaaaaagtatgttttttcgcaacagtatagagatatatatatacatatatgtatagataggcagatagatagactgcagacttttctttgtgtgatggctgtaacttaagaaaattaaatcgttagtgaaataacagaatctacatttatatttctgtctagattggggatgggtttgctgtgttcagagacatttttgacctattctgccttgcctgttttgaatgtgtctattcttacgtacaattgaactttgatagagttagctttcttctctttttttttttttttttttttgaggcagagtctcactctgtcacccaggctggagtgcagtggcgagatctccgctcactgcaagctccgcctgccaggttcacgccattctcctgcctcagcctcctgagtagctgggaccaaaggtgcccaccaccacgtccggctaattttttattttttgtattgtatttttagtaaagacggggtttcactgtgtaagccaggatggtctcgatctcctgacctcgtgatccacccacctcggcctcccaaaatgttgggattacaggcgtgagccaccgcgtctggcctagagttagcttcctaattactaagtttatatttgtgaatcttctaatttcattggttgtgaatttactttgacatttaaatttacttat

SEQ ID NO: 110268 - DNA, 1046 bp, Homo sapiens
agcctgggatatccactcaggctgggaacaggtggtctaatgtgctgagagcattacagagcagattcaagatccttttgaattgagtggatctcagagtatcagggctgggatgctggccttctacagataagaaaactggagctcagcatctgtggctggcaggacccaggggtggggaatggccccacagggagcggagcccgggagagtcaatggtgaggcccccagggtacaggcaggatcgacctaacaggccaccctagcaaggcattcatgcaatggggtggcaggtttctggaaaagacctgggaagctgagggccagagagcagaggggacccactcaatctcgtccagtgtcagggacagagacagatcagaggcaggatctggtctcttcacaggagggaatggctggactggaagagagaggaggagagggaacctatgtaaatccctgaggcaatggagcctacccaaagcatgctgggagtagggacagagggtattggggagctattaagggagccgagcccgtctggatcattctgcgttgtcctagaccccgctccactttctaccagctctgggaattcacctgctctctgctctttgcacagtccccactttggaaatggggaggggctccgagttgggtatgaccctcttctaaacaaccttcagcttcagggccctgtcagtgatgtggccttctgcaacatccagtcactcactgggtatccctgtgtcctcaattagtgccggacccaagctgggtccctgccgcagcagtctcatgatcttgttggggaagtagggggacatttgaggcacccagcacaaggcactctaaggcaggcatggctcctggtataaccagtgggttgttagaagaagcagagaagagcctcatgggcacgttggcttttggaggagatgaggctggaactggagtttgagcattacgtgctgggatgggagtttcgagtaaagtcactgcagtaagaatacacacgttttctcgcaagggtagagggaaggaaa

SEQ ID NO: 110269 - DNA, 1029 bp, Homo sapiens
ctattgactgagaaggctcctgggtggctcagaagtggttccagccaagcctctagagacatgccagacttctgcccgctgtgtcatagggcagtaacggcttagcaggtacctctgtctccctctgtaggccgcgtcgtcaatatcagcagcatgctgggccgcatggccaacccggcccgctccccgtactgcatcaccaagttcggggtagaggctttctcggactgcctgcgctatgagatgtaccccctgggcgtgaaggtcagcgtggtggagcccggcaacttcatcgctgccaccagcctttacagccctgagagcattcaggccatcgccaagaagatgtgggaggagctgcctgaggtcgtgcgcaaggactacggcaagaagtactttgatgaaaagatcgccaagatggagacctactgcagcagtggctccacagacacgtcccctgtcatcgatgctgtcacacacgccctgaccgccaccaccccctacacccgctaccaccccatggactactactggtggctgcgaatgcagatcatgacccacttgcctggagccatctccgacatgatctacatccgctgaagagtctcgctgtggcctctgtcagggatccctggtggaaggggaggggagggaggaacccatatagtcaactcttgattatccacgtgtggattatccaccatgccaggaagacccataactggttttaacactaactagagggaatgacttctttgcatagtgagtgacttgggccttcacaaacagggtgtggagtggcaggcagaggcctctaaatctcagggcaaacatggtgaatctatctctccggagataatttcatacagagattttaagaaaacatctttatattaaaaacagatctcatttgatccttaagccagtctcatgaatgaaaaggacaggtttttttcttttgtaaatgaagcatttgcagcttaaagaggatgcatgaaataacccttttatcgcttataaatagtgcca

SEQ ID NO: 110270 - DNA, 1119 bp, Homo sapiens
acatacagcaggaagtgactgatggggtcggcctgagggggggatggagaccatagagcaggaaatgactgatgcgggggtcggcctgagggggggatggagaccatagagcaggaaatgactgatgcgggggtcggcctgaggggggatggagaccatagagcaggaagtgactgatgggtctgcctgaggggtggggtgaagacggaggtggaggagtgagtgagacaaacagacccaggaggcttctccagcagcccaggagacaggcagcgaggacccaagggaatgctagtggaaacaggaaggaagaactgacccagcagaggaaaccagcaacagcctggggcgtggggactttgtcctcagagagatctgggtccaaatcccaccctccctgcctgttagctgggtgacattgaccaaggtgcttaacctctctgagcttcagttgcctcaaccggatatgagacaatttaggatctattttccagggtggttgtgaggatcagggaagttaatgaatgtaaagggcttgattaggggtctgccagctgtcatgttgatcttgagctgtaatattagcagtactgggtgactcagtaggtgggggaggggtggaggagctggaggagtcacagacaaaagtaaaatcattaacaaagaggaggagcaggcttgggcagcttggaaacttgacgtgttggttgtggttagggtgagtcagggacccgtgggacattcaggtggaagcgagacaggagatgggatgaggagagagagccgtgactcccaaggagaactgaggggccactggtgcggaggcgatcttggggatgttacaggaaagttgctgtcacccaaccagcgggcatgcctccgtgagtttattcagaacattggctgaggattccagatggcaactaggtccaccactctcaacactcattaaagctgtaatccaggggctgtgcactttcacaggtcatgtttcattaaacttttttggatagtagcgtcaaatgtcattgttttatttttaggtagagaaagggctgtatgcattttaagtcatgggatattgtccgttatgaatcaaacacaaaacggctgcaaaat

SEQ ID NO: 110271 - DNA, 1261 bp, Homo sapiens
accttcagaattacaaacttttgtctttgttttccctcaagaatgtgatttaacttgttggaaatcttgaggagaagaatctccaaatcaaagcctgtcttcccatgagctttcttagatgtgaagatgactgggctggaccctcacttcacatctcctgctgcaggcctgatgtctgccatactccaagccactggcctttgagcatgtaaaactttcccgccccattcttgaatccatatggattccagtggaatcctgccttggaaaaagggagcccgcgaaaatgtgtgcggaaggatctgaggaaatatgggtcacgcacagcttcttggacaagccatccgtccttcacaactggggtttcctcttgggagttccatccccacttctgctgggtaaaatttaggacactttttttctctctctgtattctcattgctctatctggactctcctctgcacctgtctgtctaccggcaggaggccccaggaatatcaccattatagttgaagatcccattgcaggtttgggaatcggtcctccacctcctctttgttctgttttgtgaccacctttcttagttcagaacctccttcagtctggtgtcaaatcaagtctggctagcctggtcttgttgtgatgcttggaactgtctataaaatgataccagtatttcatatgatgtgttttctatacacaattccaaatgcctcgttcagtctctcaacagcttctgggaggcagagtcaagacttatcaattcagttttgcccaaaggtgaaactgaggcctgctatttgtctgaggcatcatgatgaatcagtagcagacttttttttctttttttaaattttttttactttttttttttttttttttttgtagagacagggtttcaccgcattgcccaggttggtcttgaactcctggcttcaagtgatcctcctgtcttggcctcccgagtgctgggattacaggcgtgatccaccacacctggcccagaatttttcttataactgaatacttcctatggattactttattttccttgaattaacaccagaatgtattttatcccctttctgtggtcttagatatacttgcatgtttggtttttttgttttttgtttttttgttttttttccctctcctgcagttccgtttcctttttctttcacctgttttcatttccctataaatccctgcaccccattccagctattgcataggattcttctagttatttcagtctgtttc

SEQ ID NO: 110272 - DNA, 1115 bp, Homo sapiens
tgcactagccagggattcccctttgaccccaaatgaaatgagctccagtactctgaccagccccatagaggcatcctgggtcagcagccagaatgattccccaggtgatgccagtgaggggcctgagtacctggccattggcaacttggacccccgaggccggactgccagctgtcagagtcacagcagcaatgccgagagcagcagttccaatttgttctcctccagcagctcccagaagccagattctgctgcctcttccttaggggaccaggaaggaggtggggagagccagctgtccagtgtcctccgcaggtccagcttctcagaggggcagacactcactgtcaccagtggggcaaagaaaagccacattcgctcccattcggataccagcattgcctccaggggagctccaggtaatgaggaacaccggctgctagttagcaagatgaccctgaattgagagtaagagagggcttgttatggggacttttcaggtggcagaaagagatgttctgtttctggtgatacaacatcttattttgtaatgaaagaagtttataacgaaatactgagactcaaaatctctaagtctatttatgtttgtttctttatacattgctaatattaaatgttttcctggattctttactagtttggtaacatcagaggatagcgtgactcatagtgcgagttttcaaagtatctcttggattggggaaagtattattgagctttaaaaataatcccattaagttctgtcatttcctgtgacgtcttagaagtttgcccagggtgtaataataccaatgtgagagaggcagagagatactggggtttctaattaaaacgaaggctatagtgagtgcagggtgatgcgatccagcaactgagtcggtggggctgacggccgcatcactgattcagggtgagaggccgtcagataaggaggccctggcagctgggacctccctcaccaaacaccagctgatagcaggggcagcctactcgtggggaaggtggggctccttgcttttgccatctccctgccatcatccttcccggcttgtggtatccggcaggctttggttgggttttgtttgtagtaggat

SEQ ID NO: 110273 - DNA, 1089 bp, Homo sapiens
tgttggccaggctggtctcgatctcctgacctcaagtgatttgcccgccttggcctcccaaagtgctgggattacaggtgtgaggcactgtgcccggcctgattcgtttaattttgattgttggttactatccatttaatactttgtatgtgccaggcacggtgctatgtatgataaatgtatcatgtcattgactcttcataaccctgtgaagtgggcattgatctcattttataaaggaggctgctgaggcacagagtagatacgtggtccaaagtttggatcaaatagctgataagtgtcagggcctggatttgaaccctagtctgtctgacttctgattccacatacatcagcactttgttgtgctgcctctgtaataaagtactcctggtttaacacctggaaggattccagtgcagatgctgtggtttcacagttgtaaattacatactgtagtagaaggtagccttgctgtatctacaggctctggctaaagtccaggcctactgcaaaggtagcttctatggcatttctgcagtactgcgttgcccccactctgaggccctttgtccttaactctgacacattttttggttttgttttgctttttagtttgccagaaagcacgagagcccgctcctggtgacaaagagccagagcctgacagccctgcccagttccacatacacccctccaaacagctatgctcagcattcctactttgggtccttctctagcctccaccaatccgtgcccaacaatggctcaggtatggggacaggaaaaagtggtcattacatttatccccagccctggaaagtaagaagactttgtggttgctcataggcttggaaaattgagacttgggttggtagtttttcttaataagggacatctttacaagttatatagtgactagcttgaaataattcagtagaatcatgaagtaacagaagagagagatgtttgtagattcccctgggtttctaatccacattgccaagaaggcatttcaatactagctaacaccgaatgattgccaatcatgtactaggctctgttgtgttcagtttgtatgtgttatcc

SEQ ID NO: 110274 - DNA, 1001 bp, Homo sapiens
ttgctgtttgttttttgtctttaaattagtattgttcacaactttaattctctcagagttgagttttgtgcccaagtaaaaattaagaggggagagaatgttaggatgtggggcaggaggctcctcggcttagactttctttgatatgatcaggatcaagtacagcaaaggtaactaacgattggtgtaactgatgcccttgcaggagggagcactggcagttgctgggtaatttgaagacgacggtggagggtttggtatcaaccaacagccccaacgtctggtctaagtatggtggcttggagcggctttgcagggacatgcagagcatcctctatcacgggcttatccgtgaccaggtatgcagaactcctttttttgccagattggctgactcgcttgttgaaaagaaacagtcgcattggcagggaggagatgaaggccactggtctgtggactcctgagagcagctgtgacttaattcatttttttaatatacagaacgtttcacatcgtgtctgatggaccatagatgttaatggaatgaataaatcactgggtaggacagcaaatcagcaacaaaagattaggtcaacttaaaactttcctattgttgctgtaacaagtaactacaaactaaatggcttaaaacaacacagatttatcatcttacagttcttgagatcgaagtccaaaatgagtttcacggggctgaaaccaaggtgtctgcagggccacacaccctctggacgctccacagagaatctacttccttgccttttccagcttctctaggtttcctgcattctttggctcttggccacttcctccatcttgagagccaacagcatagcaccttcaaatctctctctgcccccccctttttttttttgagacggagtctcgctctgtcacccaggctggagtgcggtggtgcgatcttggctcactgcaagctccgcctcccgggttcacagcattctcctggctcagcctcccga

SEQ ID NO: 110275 - DNA, 1041 bp, Homo sapiens
aagggaagatttatgagatgttcctgggtgaagacttgctatttttaagggtgactctacttttatgtgcaaagtggcctgttgaacaaaacctggactgacaggactttggggctcctgcctgagatctgagaatgatttgtgctaagtgaaactgaacatcttacttcccttttccatgtttcagtttctgctttgcctatttgactatttattcttcctgcagatgtctgtgacgtgcttcgtgtgaaaggtcccatgtaaattctaaacacgttttaggattgttttgatttccctctaccacttcatgtgagggaggctgggttagttatttttttaatgtatgtaacaaatgctatttaccacatgccaggaattgttttaaggtattaagatatgaatactgcgttaacttctttaatccctataactattgtatgtggtcggtactactgttattgctgtgtcacagatgagaaagctgagaaatggacagggtaagtaacttgccaaggttgtacagcgaatccctggcagaactggattcaaacccaggcagttcggcaccagagtctgcgcttttttttttttttctttttttagacagggtctcactatgttgcctaggctggtctcaaactcctgggctcaagatattctccagcctcggcctctcaaaagtgctgaggttacaggcatgagcgaccatgccggcccaagagactgcacttttttttttttttttttgagatagagtcttgctctgtcgccaaggctggagtgcagtggcaccgtcttgcttcactacaacctctgcctcccaggttcaaacaattctcctgcctcagcctcccaagtagctgggattacaggtgcccgccaccacgcccagctaattttttgtatttttagtagagacggggtttcgccatgttggccaggctggtctcaaactcctgacctcagaggatctaccagcctccgcctcccaaagtgctgggattacaagcgtgaaccaccgtgcccggcccgagtctg

SEQ ID NO: 110276 - DNA, 1048 bp, Homo sapiens
gagtgaggaaggaagagaaagctggaggaggagatgttatttttcaaacctttctctttatttttggtcttcagtttattttacgtcttcagtttggcctatgtgtggtttttctttgtactaatcctataaattgtaaagttatgttttcaccaaatataggaaatagcactaaaaatgtgattattaatgtcttcagaagatatatgggatattagaggattgaatatttggaagataaagtggtttgaaattaacacgtggttatgtgctatgcttcggagggaggtatttgttaatcaaatctcagtagcttcatgttaataagcaaataattcagagttgtttgtttcttgcacctcatgtttgcagcctatgaatttaactatttttgcttatttttcctcaagatgtttgaaagtagttaaatggcttagcatggcctatgtgtttttgttgcagaaataacattccagctaattttaccaggagtggaaataaattaaatcatcagaaagatactcgtcaggcaacttttcttttcagaagaggcctgaaggtatttaaaaactttggcagtgtttttgtttgtttgtttgttttttcccaaagaggatcctgagcagccacctttagtaagcctcagtcataggcagcattgggttcaggatgtgaggcacgtggtagtagattagttcttcctgttgtatgttttttatttcccatcttttcttaccctcaatagcaatgtcttataagaatttaactcgttatttgggaataaacctgtatttgccactcgttctcatgtaggaattccaacagggaactgttgccagaatagcgtgggcccctctgctgcactcacgcacacaccccactgggttaggaagttctagaatagcacgggcccctccgctgcactcacgcacacgccccactgggttaggaagttctagaatagcgcgggcccctccgcagcactcacgcacacgccccactgggttaggaatttctagaatagcgcgggcccctccgctgcactcac

SEQ ID NO: 110277 - DNA, 1193 bp, Homo sapiens
aaaaaattttgaccaaatttgttttgcttatttttattttgttgctattattgttttccagaaatggtatagtttgtagatgctgttgttaataaaaaaaaaaacagattttcatttgaatttgatttgaatttctgtgttgaactcaccgtaattcaagaaaatttgctataaaatatttacaggtctgaagagttcttacttttatcagtgacatcatgagttggtggcagtgtttacagagcctgaaaataattcagataggggctttgggtgtatgacttctaggcattatagcatatgtgtgttttatatagtatataatgtaggctttatatgaggtcatacatgtaaatatttaggaaattttagctgtcattacttgtaattaatcataagatcacattattgttccaaagcaaatatggccttcagtaaagttgttaattgttgctttgttgttgtttttgtttttttcttttctctagacagggatgacgttgaatgagcggtttgggatcctgaaggaacaaagagccactctcacatacaacaaagggggaagccgctttgtcaccgtgggataggtcccatgtcaaaggaacttttgagtgatgactctgagaagttgaattgcttgaagagttcatcacggaaattcaagaaactttacttcaaaatattcacaaggctaaataactcttatttttatttttgaaggtttttttttttaaaaaaaaaaacgtataaaataatgccctgaaagaataatagggattatacctgtctgttcttaaagatttcatggttggctcagacagaacaatcatctgtttgacttctttggttcctcatgcagcagaaggaagacagaaagatagaaattgattatttttatgatagcagtattcaggatctcatcacctttgcccgtgttttagactttgtcatggtaaatcctggtcttcataaacatgagtaggtcccttggttgctgtcacttgccctttaatagtgttgatgtagtcagtgccgttgccttttcttcattagagacacagaacaatgtattagaatttccagctgtgggtttgaagacttagggggacatccagaacgtgcttcctctttcagacggtgtaaagtcccctggaattacacagctttagtgctgagcttttaacaggaaatgt

SEQ ID NO: 110278 - DNA, 1107 bp, Homo sapiens
gtaaattacagtataatgccaaatgcagcaaaatcttccagctgtacgttacaagtttggtcattttgaagcttgacattttagtttgccattatgttaaaaacatctaaataggtgttagtttctcaggagtagattgttagtgttgacttttcctgtaaagcagacatcgttcttggcctgccctgcattgtatactagatttcattgttgtctctcatgcttcttgagttgcttcatggtttatgctcgccatggaaagctatcagtaacagtttcatgcttataccaaagaattaaatctgatctttaatatctgatattttcctggtactcgtactgataagggattattggaagtcagtcacagaatttggaaataaattctagtctctccttagctatttgatgcttttcatataggccaagaactcattgcaaaacatttttgcaaggatgaatgcctgtatttggtctaggaacagtacattttagtctgatttagaattactggtagcttattttaaagcaaggaaaagcagctgagctcaagtttgctgtctttagaatggtttgtgaaaatatggtataaaggtgttttcattttcctgttcttacctattattgtatagagctattcatgccattttttgggaaaactttaaaaattgccccaaatactgacattgagtgcattaaataacaaattatctttgatacattaaacttttattcttcatgcatctgtaatttaattttaagtataatgttttgcctttggtacaactaaattaaaactcttggtggtcacatattgtatataaacaaaacaatatgctttgttgaaggaaaattttctttattggaatgtggttgtaatccttgttcagttcttaagtttcggttttttttaaaaacaggatgcaacttaaacttttctttgcatcaaggtatatgcaaaacattggtgccgtgcatcaccaaatgaaagtttgtatttaacgaggaggtgctttacactgtactttttggtgttttttggaaaagttacatttagatctattctgaagctgttcatttttaacaaataaaatgttacaggtttca

SEQ ID NO: 110279 - DNA, 1106 bp, Homo sapiens
gtacataatctattttggtttctactgctttccactcatttttattattttttaaaattatttttcatttttagagatgggatgtcattctctcctaggctagagtgcagtggcacaatcatagcttgctgcagcctcaactcctggcatcaagcaaacctacctcaccatcccaagtagctgggactacagtcaggcaccaccacacctagctaattattttaaaaaattttagagaccagagggtgggaggtggggtgccctcactatgttgctcaggctggtctcgaactcctggcctcaagcaatcctcccaccttaccctcccaagtagctgggattacaggcacaagcaagggttgactaattttttaactcctaaaaatatactcagtcctatgatagcatagagtttaatatattaaggaccttaaaatcttgttgaatattcaagcatcaatctataagcttggtcagttcagggctagcatagtatgttgctattacaatgggatgtattcatacatatagataggaatgaggcctattacagagaacttgacagaatttagtgtagatgtggaaggtaataagcaatcagatgacaatggtgcatttgaaaaggtacatctggcaactaattctacagcattgtagcattagtgtggagtatatgaatagataatcagtcattgtagttgaaatctccctaaaaagtaaaaaaactgcccttaaatagcttaatatctttcgaagaataacagttttaggaagcccaggataacaaaaagctatatatgcattggataaatgttatttgctggggatgacaaatacgtcacctgccattgtgacccacgctcataacatgtatgagctcataacatatgtatggttatgtatcatggaacttgttgctgaagtaactagaatgtattgagagtttatagaacagctctctgggcagctgttactaatcaactttggcactgggattaaacatttttataccttctagcatttagcaattcatgccaattgaggtgtcattgaagagttggggcttgaatgagaggatctctccatccttatttttcttttgctct

SEQ ID NO: 110280 - DNA, 1003 bp, Homo sapiens
cgtctctgcccgtcggagacccggcgccgggagccgccccggccgggggaggcggatgcgggggagttacagcagctcgtcccgtaggcgccgggtccggacccgggtaacggggagaagccgacggcgccagccctccgggcctgcgccagacccagagcctggggagaggcggcgggcggcggcatctctcggggaagggggccggagtgattgatggatgattttttaggctttctgaggaaaatcagtttctgccacggcggaggtagacccttgccccgccccggtttctgcaggccctttcggatttggggtgccgaatggacctgctaagacgggaacgttagcgcgagctcttcacagatcagagtagcaggggtgtctggacgagctgcattgtcaggaagggtcggtctcagccctggagttttttcgaaagaagtgttggggagcgtgtgtttaaagtggacccgaaagaagtgttggggtgtgtgtgtgtttaaagtgaacccgagagaagtgttggggtgtgtgtgtgtttaaagtgaaccccaaagaagtgctggggtgtgtgtgaagtgaacccgaacgctggaacgtctttcttcgcctccatctagttgacttacaaaataaatacgcttgtaaaaataactagagcccactttccgactcccattagtttcctcttccactcctcatgtcctccaaaaaaaagttgaagcaaactacttagaaaagatagtctaacatatttgtacttgctattcctttttaaagcattacttcgtgttatgtatgttttcgaacacaggaaagagaataagaaagtaggtattatttggctttcttagttgtggcgaacagtgtctggtgcccgagttgttcatcatcatgtttgcagtgccgtcatcactgctcactgcagcctcgacctcccgggctcaggtgatcctcccacctcagcctcctgagtagctgggactacaggcagccgcca

SEQ ID NO: 110281 - DNA, 1010 bp, Homo sapiens
gcttggctaacatggtgaaacccggtctcaactaaaaatacaaaaattagccaggtgtaatggcgggtgcctgtaatcccaactacttgagagggtgaggcacgagactcgcttgaacccaggaggcggaggttgcagtgagctgagattgtgccactgcactccagcctgggtgacagagtaagtgctgtcttaaaaaaaaaagaaaaaaaaatattaatcttttggaaaaggggaatatttatttgggaatgggtgacttgatccagtggacaaggaaagtcttagaagacatcacagaagacttcttgaagcagaaaggatataacttggatttgggcaagcagaaacaagaaggaaagctattttaggcagtggtggacagcacgcaaaaaatgttaagagtataagggacatcagttaattttgccagtccattattcagtcccttctggtaatagtactccaattttcctagggaaccacccctctcagttatatgaaccccaccctggcatagggtatgccagtgactcaggcctagctaatggtcagtcagtatatagtccattgctctggccatagtgattgttcagaggtgggcccattttgcaatcagcacacatgagtaactgaattttttgttgaactattgagaaagaggcatgctttgagccctggggttgctgagacaataggatgttagcctggaagttaccaataagtgggaagcagagccaaaagatggaagttctgatggcagtgtttgtacctttgggtcagccgccatgcctaaagtcagtgctatctctgtactttcaaattatgtgagctaataaattcttctttctgcttaaggtgagtaaaaaagttgttgttttttttttttttttttttttttgagatggagtctcgctctgtcacccaggctggagtgcagtggcatgatctcggctcactgcaacttctttctcctgggttcaagtgattttcctgcctcagcctcctga

SEQ ID NO: 110282 - DNA, 1025 bp, Homo sapiens
tttaaactttggtctgtgggacgcaccatgaacagtatcattgtgatatgttacatagctatcaaataatattttaaattattacttttatataattctttagggactttttgaaaattactttttagtttatttcatactgattgtgtatttcagaaattttcatagtttgcatttaccatttctttatatgttaaagaatattattcctataatattctttacagttttacattgctcagtgttgaaaatctcttatacagattatttgtcatcatccctggccattttcgcattcatagtagtgtctgttctcacagaaaatgatggtactgtacatgtgggttttgcataatgggctgattgggtaaggatgatgtcactgcgtgggaccgcctggaggagttattagaagaacacaagacttttgactgctagcatttcttaataaatgccatactgttgaaaacattaatttgtgtttggactggaatgaaccttggttttcctggcttagttactgagatttaaagaaataagtcctaatgtcataattacatagccaaatagaatgaaatatgaagcatttttctccctggcagagagaaatggggttaagaaggaaagaagttactaactgccagtctctgttacacagttgtgagactaatttttgagatttgaagttcaggaatactttgaaattttgtttctgtaatttgtgtattattcattttattgctgagacataagatatggttattagaaaagtccataattttagagatttttaaggtacatgtcactaagaagaggcagattacatttcttttctactttgagtactacatgtttgattttttaaattgttgtggtaaaatatgccattttatccatttttaagcatctgttcagtggtattaagtaccttcatactgttgtgcagctatcaccaactaaatccacttccagaacttttttcattatcccagactgcaacactgtatgcgttaaacactaactcc

SEQ ID NO: 110283 - DNA, 1043 bp, Homo sapiens
ctatgttaaaatcacatttaactagaagctttgtaaaaattctctagttgtaaaacatcattaattgttcatttccattttaccttcttgcagagctggcggagttgcctttgatacggttagacttctcatgcaataaaattaccacaatccctgtttgttatcggaacctcaggcacctacagacgatcaccctagataacaatccactacaatcacctcctgcacaggtaaaccatagtggaagcatcaggtaaaccatggtggaagcatcaggtaaaccacggtggaagcatctggtgaaccatagtggaagcatcaggtaaatcatagtggaagcatcaggtaaaccacagtggaagcatcaggtaaaccatagtggaagcatcaggtaaaccatagtggaagcatcaggtagaccatggtggaagcatcaggtaaaccatggtggaagcatcagataaatcatggtggaagcatcaggtaaaccatagtggaagcatcaggtaaaccataatggaagcatcaggtaaaccatagtggaagcatcaggtaaaccatagtggaagcatcaggtaaaccatagtggaagcatcaggtaaaccatagtggaagcatcaggtaaatcatagtggaagcatcaggcaaatcatagtggaagcatcaggtaaaccatagtggaagcatcgcatggactttttttggacaaaggatgaaatttaaaatttcatgtacatttatcattcggttagaaaataatttcttttaaaatggattcacatacatatgtatttttgagaagccttgaattaatggattagaagataatgtttccagaagtatttttcctttctctaaattggtatttctttttaaattgaagaattcttccctaaatttttttctaataaaattttagttaatttcttaattttttcttgtaaaattttagttaatttctttatttttttctagtaaaatttgagtgtagacaccataaatgctagagacaggccaggtgtggtggctcatgcctgtaattc

SEQ ID NO: 110284 - DNA, 1050 bp, Homo sapiens
tcttactatgttgcccagcctggtctcaaactcctgagctcaagcattcctcccacctcagcctcctgagtatggagcagtcttaagtagcaagaattaaattcttaggcctttaaacaagcaggatagatgtttcagtcaaagtgaagtaatgtttatggactttactcaaaagagaacctctcaggccttctcttgaacctctcaaattttgcttaaaagcacagtcctagtaaactcgcctcattggacgaacaagaattgcagaggtgtgattgttttgaagctggataataatgagtacatgaggtctcatgctattctgtttgctttgtttctatttggaatttttcatattaaaaaattaaagcccatttagttctaatagttaagtgactgccacatttcttgttttttagaaaattgatctgtttaatttcaaattttaattgttaaaataacaaactttgcagtaacagagtctcttttcggcagccatgaagaactgtactcaagtcgcccttatggagcccttgattcaggcttcaatagtgtggacagtggtgataagagatggtcagggaatgaagtaagtgttttttatgttccgtgtgttataacacctgattaagagaaaacagaatgatgaaaatgaaaagcgtcttaactggattcagtttctcactacataaaatacagaaaagtcaaggtggaggcaagattcccaccctctccagcagaattggcattctgcgtccttaccggctttctgtcacgtggatttccgcctgtttcctcattgcctcatggaaatagtttcatatcatagaaaggcaaacaggagctgagccagttgaaactgaagcctacaatctgaggtggggggtaatctcgagcagaggtgctagatggtgagaaaacaagtaggactttcggctgatgggtagagacaaggaccttagtaaagagtattcatgtgctcaagaggaataacttcctggctaattctgtcgtttttctcgtttttaaattattgatattatgttttct

SEQ ID NO: 110285 - DNA, 1855 bp, Homo sapiens
agattcttgctgtggtcattatttgatctcttttaggaatttagtccttttttttttttttttcagtgtttaccttttcttcacctggaattgtcagatgctcttcaaagtcatctgaatcacagttttccttattctgacattaaaaaatttgtagttcattagcaagcagcactctctctacttgcttatacttccgaagcagactcttgattttcgcattcaattctgtattgcttgaattggtttgaatttaatgtttaatgtttaatttcatatttaaattttgagggccagttataatggaaaataactttgattttccagaaacctattgcttatccgaggagagctttcatttctcagtgacgatttcaattaaatggtttgctgtccttttccttaccatcttagattctttactcctgtcgttaccatttcatttacatttcagtagttgtcttttaagtgtttctctcatatgaggtatctttctccatcagtttatttaagacttaaaataatgttgagatctgtgccggtatgatagccactagccacatgtgataattattgagtatttgaaatgtgtttttttaggctgggcgtggtggctcacgcctgtaatcccaacactttgggaggttgaggcgggtggatcacttgaggtcaagagtttgagaccagcctggccaacatggtgaaaccccatctctactaaaaaccgaaaaaaaaaaaaaaaaaaaaaaaaaagcagggcatagtggcatatgcctgtaatcccagctactcgggaggctgaggcaggagaatcacttgaactcgggaggtggaggttgcagtgagccaagatcacgccactgcactccagcctgggtgacagaatgagactgtatctcgaaaaaaaatcagaaatgtggtttttccaaattgatatgtattgtaagtataaaatacacatcagattttgaagacttcctttgaaaaaaagcgtgtaaaatagtaatattttgcattgattatatgttgaagtgatatttagacatattagacaatgtaaaatattaaagttaatgctgcctcttttactttaaaaaatatggctactagaaaatttcaaacgacatatgtggttcaccttcatggcttgtgttatttttctctttggccacactggtctagattggatgaagaagtaaagttactttcttcagaaatcgtcttaatataaaccattaatttagtcagaaaagttttagcacatttaaaaaatgcatttatgtacctggtttctaatgtggatgtaaacttagaaccttttcatcttttttagctattaataaaactctaataactcaaaattcaattttatattaattgtagtcacagaattatttgtcaataattgagtcagaagactaaattgagaaataggcttccccaagttcactgttccagcaactgcgatttttaggcagcctgtagaacgtcatgaagtaacaggttgtggtttaatgcatctctggaaaaactatcttagtaggaagtttttttttctagtgtgccattttaagtagttgtttcattacttttaaacttaaaaataatgggggattcccaaacttagcagatgaacaagatgtggctaaaaataatttatatacgtctcctcaccctaaagcattttgagaagaagaaactcctcaaatgaatcccttcccatccataaactattataaaatatctacattgctgacctctagcagatagttttccaaataggacaatctttgttctgatcttttttgtttctgcttaattgacaacaattacaggaagggagatagtagtcaga

SEQ ID NO: 110286 - DNA, 1084 bp, Homo sapiens
ttgtttttgagacggagtcttgctatgtcacccaagctggagtgcagtggtacggtcttggctcaccgtaacttctgtctcccgggttcaagcaattctcttgtctcagcctcccgagtagctgggactacaggcgtgtgccactaagcccagctaatttttgtatttttagtagagacgggatttcagcatattggtcaggcttgccttgaactcctgacttcaggtgatccactcaccacctccacctcccaaagtgctgggattacaggcgtgagccaccaaccttggacataaaatgggtaaaaaaaaaaaaaaaaaaaaagacttaagtaatttaaagtttttatcatccctcccactttcaaaatagaaaatcatggggaaaaggaaataagtaaatgtcttttattggctatctaatttgaatgtttttttctggtgtgtgtgtgtgtgtgggtgtgtgtgtggtgtatacagtggaacatgatctggatcagattgactacatagacagctgcaccgcagaggaagaggaggccgaggtgagacagcccaagggaccagacccagacagccttagttcacagtttatggcgtatattgaacagcggcgaatctctcatgaggtagtacacagattgaagcctaaatatgttgctatcccttcataaaaataattcataatagtataaagttttgttatatcagtgatttgttgactgaagcctaattgttttcattatgttcacttctgatttcagtcctgagtttttcagatttattcagaaaactcagacagcagcctcaagtaggctttaggtttatttttcaaacaagaagaaagatttcagaattttgcaggaggaataaaagaagtctaggtactgttaaggccttggaagaaagtacaaagaaaaatacagtgatgcttttcattgttgtttttattgcttttttattgttactaactgataaatcatagtttggtcagtagttaattaacagttaaaccaaaaagttgacttttgtggcaacatgcagacttaaccatagaatttttataatatgctgaattatattg

SEQ ID NO: 110287 - DNA, 1032 bp, Homo sapiens
aaagatgagttacagagacttgagcaatgaaatctgtttcaggaaaaggataaatagtaaactataagaattaacactgatagcagtgagaaggaagtactactttttttttgtttttttaagcattaaaaagggctttgtatttttcttaaaaataaaaaaaccagaatctttatttctgtgttaaaattgcttcatcgattgaaaataagagcaggtgtgctttataagtacagttacgaggttctgtagttgataaaaatgactgtatgtaaaaggatctcagtttacatgtatcgtgttttaatcatggtggtaacgaagataatagttatttgtgttataaagaaatgatgctgtttgcaaggtgatctcaattaactgtattgttggtattggctgacatagacagttgataccacatgaaacgtgagttggaggcatcagattttcctctggtttcacttaatgacttggacttaggtttacaaaatgcagctactccttcaatgctaactaggcagtttgctactgattaatagaaagctacatttacaataaaaatttcatttgttttttatgtatctgtttgtctttttatcaaagagtttttttctttcttttttcttttttgggtcagggttccagctgagccatcttccctcctgtcactatcagcaagtcacaatcaggtaatgtttagtagttgtgtttatttttgctttttaaactaagatgattttttttcttttataatacttaaattgccattaattgccaggtatatttaagcattactagctgtctcaatcgattaatataacatatgtacgtgatacttgctaacagtgtttttagacactagatagaaaatctttaccttcatgatggctttatagtattagtttggtgcaccaacctaatacatataagaaccgtgcaaagacgggaaaagattagccaataaacacatttcaagcaatgctaggtgacttcaaagcaaaagttgcatgggtcaacagtagttcccta

SEQ ID NO: 110288 - DNA, 1109 bp, Homo sapiens
ttactggctcactaaatgaccataggttctttatgttattgttacatctctctccagctttctgttccctccttgctttgtaaggttttaggcaataagatcgtatttgaagttgtttaaactctgggagaagatcagtactcagaaccaacttactgactattataatgcatgaattccagatgattgtgaatgtggtcctctatgtcaacgtcttcaaaagtatgtcttaatatgtctcttcccttgtgtgtgtattcgtgaaatacgtcacacgtgtgcgtagtttgtttctgacatggcttcatttttctccatctctccagtgccccttcccatccagaaggtctcagcacactgatgatagtgccttgtgcatggtaagagttttgcacaaaacggagtttcgcatttctgtgtttagagattgtactttttattcagaaactatctaaataccataaaacatgatgaacatcattactaaatgctttatgaagaactaaaccattttcccacatgaccatttgtgattgacccagtgtttcaaagttctgcagctcatatctttgtcagtgccaccgaaaggaaaacatttgccttgagaaccatattggctttgtgtgtgctgggaatggaggcataacataatattcatgttttaaatgtgtctaattccaggagcacttactttattaatcattaatttggctcatgggtcacctatatgttaaggtgactcatgacactgattgcacagctgtatatttggcatccaattttatgatgtattttcagctactgaaaatccttcactttggttttaaatacttacagctcaagattattccttcatgttcactttttaaacccaaggaaacattaactgctgatcgtgttgaacactggcttacttttattgcctgtttcatcagctcaaaatgagtataagatggaaggtttatttaacatcttattagccttgcgaaagaattctaaccatttctagaatttctttccccatcatgttttatgtgattgttttcatagtagtacgttcagaggtctagtgcctacagtgctagtaactgctgccagggtgcatcctg

SEQ ID NO: 110289 - DNA, 1011 bp, Homo sapiens
ttgcaggcgtgagcttccgcgcccggctgtaatttttaacagattagtgctgggatggcaggcgtgagcttccgcgcccggctgtaatttttaacagattaaatgagtgcccattgtgtgccatgttttgtgatgaatgtaaacattttgctattaaggaaattcttttcagctatttacttagaaaatgagatagatggcttattctataaagctcaattcctagctctactcatttaaattttttccttttttctacttcctgttataaagaaatattgtcagtaataatttatatgtgtgtgcacacatatataaatatcacacttacacatatatagtgagtgattgcctctttattttatgttggaattgaaggagaatctaggtttttttttttaatcagaaagttgtaaatgaatttttgttgtactttgtaccactatgccctggctgccgtccatatatattagatctccttaagttaaacttaggatagagggataaaatggatattgtggtacttatttcctttttatcttgatttttaattagatttcattataactcccttatgtcctatatgtcagtctttcttcaattaatctattacatgttttttgttctttcagcatattgagtaccggttgaaagtgtctctaccttgtgatctcggagcagctctaactgacggtgttgttctttgccatttggccaatcatgtgcgacctcgatctgtcccaagcattcatgttccctcaccagctgtagtaagttgataatcctaaaaagccttggctattcatcagacatttgttaagcacagtggacagacatttcttaagcattgtgctagatattaaggatacagatataaagagtccagtctctaccttcctggtctcacttctactcgagaagaaatagacatgtatacagctacttacagcagtgcgataaatgtaagaaaggcatgtacagtgtgtgttatagggatataaaaaggggcca

SEQ ID NO: 110290 - DNA, 1004 bp, Homo sapiens
gctgggcatttagctgatgcctctgatcccagcactttgggaggctgaggcaggcagattgcttgaactcaggaattcaagaccagcctgggcaacgtggcgaaccctgtctctacaaaaattgcccaggtgtgatggcatgcaactatagtcccagctacttgggaggctgaggtgggaggatcacctgagcctgggaggtcaatgatacagcgagccaggcttgcgccactgcactccagcctgggtggcagtgagaccctgtcccagaaacaaaacttctctagtaacacattttcttttcctcatttcagcctaaattaacaatggcgaaatgcaggcgaaatgtggaaaatttcctagaagcttgcagaaaaattggtgtacctcaggtaataaatttatcattttttatgttgcctaaatagacttggttgtcctaaaattttagaaatgtaaatctctaaaatcttacaggactagctctgagctaagtcgatcataattaacatgactttgtgttacaagagtcagtgtacttttgaacagttttccttgattatttccaaggaccacacaaagaaattataaatatatagattgaaataagtataagtaatttgaaataattattctattttcctaaactttcccacttgctatttgacaactaaatatatccttcaaaaactaagtatatctcagattgagaatgctgcagttggcttcagtgttctaacacttgctttgatactttttaaaatgttttagacttccagaaatgttgaaaaaatagcctagagttccttttgtatacttcagtcaatttcttctaatgttaactaacgtctaatacaaacataggacagtaattcaaactaagtaacatgagaacaatacgattaactgaattacaggctttatttggatttcatcagtttttccatgaagctctggttctttggagtctggcatgcaacaggccatttctaagctgttgtcct

SEQ ID NO: 110291 - DNA, 1656 bp, Homo sapiens
tctttacccagttcaccgcacctctttctaactagccaggagttgactaggccacagcatcacatgttacaaagtgaaagagagagcgcccagctccacagatcatctgtgtcagccagcaggattcccaggattgtttttctcttatgaaagtagatcatcattctattatttattttttacttttttcttttgctgttttttttttaactgaattatacaagaatggaaatttacataaagtggtagttagcaaacacctttttgattcctatggacaaattgaaagcaaaattttcgtttttatattatgttgttttataaagggtcatcttttagaacagacctttttaaatattttgagagcactgaatatggtttctgaagaaataacatacattcttttaaacaagtttattctaatagtgcacattagcctccagttcttcccttctgcttcctaaagaggttcttgctacacaaacatccagtgtctgctctagttccctgccacagtgtctttaaacaaagagagtatggcatgggttggtgcagagaatgggaaatgcaaaatagacaggagagtgctgaaaatggccccactcaagcaagtcatgttgacttaccagatgtcaaaacctgttgaaaggtctaagcctgtccgcggggctttcggaagcatcctctgagggtctctgagatttaaagtccgtaccttggaattatttcaggatgttcccaccatcagccaacaaagtacaaaacagtgtgccttaaaatacacatttaagttggtatttgcatgcagtggttgaccatgtttgttatgggccagcctgcccctgttcctaccagagctgtgctgttggaaggcaagtacgaagaaaaaaaaaatacagttttaaaagactgggtctttttccagagtggttaggctgaggttttgatgcatcctccctccttctccgtcaccagaaagaggaaatggacgttcccataggctgccccttccttctccccttccacctcccacccacgtccccaccacaaccactgccagttttacacggcttcctagcaagctgctacttctgctgaaaaattagtcatctgtctagaacaaagtgaaagaaaatgaataaacgcacaaactcgtaggttcaaactagccttctgaggtccctctgccagaggaagagaagaaacttctacctcctcgtcttcctttttctcctggtctccaggtcattctggcctttacttaaacatccccactttgctctgtgtgacttgaacattgggaatgtaataatgaccacttttgaaaatgtaaaacagaaaacaatattacaaatatttttgtcagattctatacccaggtaagatagataaagacaaataatttcccttctctgtgtaacttttaaagtgttgtacaagttaaagtatgagtgaaatactgaagaacaaggcagttattaaaaacctctgatgacattgggcatgtgggtatttgctttatttttatgcttctattcaatatgctacattcaaaaaaactgtaatgggtgattaaaaacttgtatctgagtccagtatcttttgtcccagagtcgttatgttatgtgttaaaggatgtctgtctccctgttgtca

SEQ ID NO: 110292 - DNA, 1482 bp, Homo sapiens
tgctttctgacctactttttttttttttttaaatagaggagaatgagtcaggaaagaggttgcttcacacacacctcactacattcaggcctcacacgaccctaaaccaacatccacttctgtgtattgtattttttttttttttttgagacggagtctcgctctgtcacccaggctggagtgcggtggcgcgatctcggctcactgcaagctccgcctcccgggttcccgccattctcctgcctcagcctcccgagtagctgggactacaggcgcccgccaccacgcccggctaattttttgtatttttagtaaagacggggtttcaccgtgttagccgggatggtctcgatctcctgacctcgtgatccacccgcctcggcctcccaaagtgctgggattacaggtgtgagccaccgcgcccggcctgtgtattgtattcttaatgttcagaccagtcaccaacaaacgaattttattctgctatttagtagtaagatcaggctcagcatggagaagattctttgtagtttgggttttcagcgttttatttttgttcctcaatgtaaaaatgttacaggatgtgtatatgtgaatatgactgagatgatcatatgaattctatactcaaatctgcatttctgatccactgactttgtttttctgttttcctttcctgcttacactttggacaggacaatctttgttccccttccgacatccttcagctaaacctcagcgttaaaagaactgttgaaacgctcctttctcttggggcacactcagaagaatccagttttgtctgtctctctctgcagcttctgggttttgtggcattttactgtactgtgatgttaactctctgtgtgctttattactggctcttccccgctcgctgaaagattgcactccggtgactttctgcctcattcctgtgcttggtaaaggaggtttgtttctcatccagaattatttacataagtgctttttctccctgctggccctcaaagagctaacccataaaggaggtaaatcctttctttatatttgcagatgagcaccccctcacattagtaaacatttacgattgctaacaaagagtaaaagaccagcattttttctcctggtcatccgtccattctcctggcctgtggccttgtttctcttaccataaatgctgaagcatttttactaatacaattctgaacttgtacttcgaatatgacatgtagagctttatttccaagtcacacaatacaactcccatctggccatttttccgtgcctcagcacaagtgttgaattgtggagtgactgaacctttgcagcagctgctcacgaggagaaccgtcgtgccttttctggttttggccgcacccggttacttagatttctgctttgaactgtgtcctgagatcctgaatccccgctttgtcggtaggcacaggtccatataagcatttgcggtctggacgtttcaaa

SEQ ID NO: 110293 - DNA, 1367 bp, Homo sapiens
aaagtaagcacaagtaccaataactgcctcaaaaatacttgttatatattttattgtaactggttttataaaatttcctagtaatatcgtctcaatgaaaagcaaaacaaaaaacaaaaaacaaaaaaacccaactagttgttttaacaaacatatataatctttttttagtggcaccagaattctatattctgttctttgtaagagcaatctcttttctttttggaatatttaatcttaacagaaagctagtgataaatgctgttcttaagatttgcctttttctctcacaagaaagggttaacctaacaaattaacgatgcacacattaaggaagcgtttaacttcctcaagcaaacagtgtcaacacttctcacatgttggtaatcaacatgttcctgcctaagcttacatagtagttccctggaataattcaggctgttaaataccaggatattaaatcctttacattttcaaatactgcttttaattctgtaattcagatttttaattcagacaggcccttccatgaattattcaaattagggggaagtttctcaagagctcaggatacactgagtttcttgccctatctggtctggaaaccctggttttcacagtcaggattataatgcagatagcgtagaactcatgcaggctgagttatgttttcaaactatctttcattcttgtggtagggaacttaccctcaagtgtagtatcttttactcttgagccatctggtagcgtggaattgtttttctatttttcacctgcctattttatagacctgtattgaccttttattcatcagggataaaggatgttgctttcaccctgcggtattgttttccctctgttgtatgtatagatatatgctacttgtcaattttccaattttgaaaatgatctgtatgtacttttagttgtattaataaagtgacagtgagtgtcagacaccatctctctaactcatatttacactgaggtcagtttcccaggtactaattttcatatctaagttgatgattgtgaaggggagaagtgcttattttttcctttcagttctatgatattcatccgattttcttttttgtttgttttcatgttacgttgtccctttcaggagcaattatgtttgcctctccacattttagaagagaaaggtttgagccaggttgcagtgacggtccaggctctcctggaacttgccccacccaagcaacagcagcaccagttatctgctgtttgaggatccccaggacggtgggcactggcctggccaaaacaaggaacaggacaccgtgattgctgctgccagctgtctgcttaaacaaagctcttgtgtgttctcagaagggaccgtt

SEQ ID NO: 110294 - DNA, 1230 bp, Homo sapiens
ctagcagagcccttcccatcactgacagtgtctggggctgagagccccccctagcagagcccttcccatcactgacagtgttgggggctgagagccccccagcagagcccttcccatcactgacagtgtctggggctgagagccccccagcagagcccttcccatcactgacagtgtctggggctgagagccccccctagcagagcccttcccatcactgacagtgtcgggttgagagccacccccagcagagcccttgccacgtacagagattttctgtcagcagtttcccagtatttcagactcataatctgtgtttagcactccagtgttctcttgtaatagccaggtctggaaacgacccatggaaagaggggcctttgtattctgctagaacacagagcatagtagtagatcacttttctgaagagctttttaaaatacagctaatcaaggagtttgcgatttctcttactttctacagctcagcagtgactaatgatgtgtgactatgcgaatgagtttgatgaattcgtaaaaactaagcgcttaaatggttatagaaatgaaaacatggatatttagaagcctttctatatacacagtgcagttgagatggtttacagcaaatttcgttttatttctgaaaatgttgtaaacatgtaattagtgaaagattttgtaaaacattgtcctgtatttttgtctgtaaatatattgcataagttctaagtataaatatgtcagtatcatgtatgttattttaaattgcctgtacgccactttacacattgacattcaaataaaagccaacacttcagtggcgtgtaataaaagctgattggagcgtgttcatacctgaggtgtggttcccttggcaaaggtgaatcaaggaaagagcatctcatttccagagggaatgtcagtggaaatgggggcttcgggacaaacttttgagatcaaattcattttttaaggaagtacagatatcaagactgagctttatttggagttagatagaaggcttaattcatgaaatgtatgtgacacattaggacaactttgctcttggaaacctttagcatcccaaggcattgttttgactcatcaaggcaagcatgatctggtgggtgcattttttttctaggagaagagggagagtgacagctttcctatttgccaggcacaagttagatattttcacacacctgatttcttttcatcttaaca

SEQ ID NO: 110295 - DNA, 1053 bp, Homo sapiens
ataagaggagaggcaagaagaagtgaccaagttctcttttgtgttttctgctggtattctggaggtgggaaggacttggagagagttaagaaacacctggtacctcaaagatgactcatctacaggttgtttcctattgagactttcccagggaagcctgatttcactttgcctgttaatttcactctgcctgttaggtgggttttcaaaccctgatttaggattacaccattgacttagggcttcctcataccttgctgggaagaagtttctagtagtcctgtgaagattcattcttcttgctctttctcagcagaacaaaggagttcactggcttagctacagtgacgcattgaaacttgagtaattcctgtaatgtcagattttgattttacccaatttgtctgtagtgaaaaaactcttatgagcaaaagtattcagtaggaattacaatatgatgttattagctgtccagcataatatatacacagcaaagttttaataaatgttggttcctgcctgccttttagatttatcgtcactttggtgtttttattcaggtgaaaatggcatggaatacatatccagttgtaagctgcttcagcaacttttctaggaaacagggatacaaattataaatacaagctagaaataggatgttaggatatacaactttacaaactataaagatggggacacaggttctctggaaggctagtttggagatatttttgacaagtgaaacactagagccaccaatccccactttatggagtgttaagatgaaaagaaatcaggtgtgtgaaaatatctaacttgtgcctggcaaataggaaagctgtcactctccctcttctcctagaaaaaaaatgcacccaccagatcatgcttgccttgatgagtcaaaacaatgccttgggatgctaaaggtttccaagagcaaagttgtcctaatgtgtcacatacatttcatgaattaagccttctatctaactccaaataaagctcagtcttgatatctgtacttccttaaaaaatgaatttgatctcaaa

SEQ ID NO: 110296 - DNA, 1052 bp, Homo sapiens
ttcattatggaataaatgcagaacttcctaaatttctttcaaaagtcagctactgctgggcatggtggctaacgcctataatcccagcactttgggaggccgaggcgagcagatcagtagagatcaggagtttgagaccagcctgggtaacatggcaaaaccctatctctactaaaaatacaaaaattagccatgcatggtggcacgtggctgtaattccagctattcaggaggctgaggcacaagaatcacttgaacccagaaggcggaggttgcagtgagccaacactgcgccactgcactccagcctgggtgacagacagagtgagactctgtctcaaaacaaacaaacaaacaaaaaagacagctgactacttgtgtatgtacattctcccaaagtttaaaaaacaatccatattattttgagatcattgatcacacattaattcatatttcattttttataaaagatagaatttaaatttgaattattaaaactgaaaaagttttgggaacaattataaagttaatatgtgaatatttaccatctaggaatctattacatttttttctttggtttatctttagattgagcatgttttattttgaaattttatattaaaagtgcagggctggctgggctacagcttagccaagagagtactataataaatgatgaatgtctatctttgcagataagagagtatgaacaggtcatcattgaagatcgtatagaaaaggagaggagcaagaagaaggtaaaacaggatctcttggaattaaagagcgttataaaggtaaagaaccataatcagtatctcgccacagctggcttaacactgaggaacacaaaagcatttccaattcattatcaaacacatctcagtatatcaaggaactgcagatctgagaagaagcatggacttttgttattattagaatttgccaacagtccatggtgcagggagacagttaacatagaaaaggacgtgcccccagctcttcatctggggaaaaagaggtggttagcagcggaagcaaaacctaggcca

SEQ ID NO: 110297 - DNA, 1051 bp, Homo sapiens
cccacagtttctgtgggtcccaaggttaggagcaggttagctggatggtgctggcttgaggtctctcctgaacttgaagttggccaggggtggcaatgatctgaacacttgatgggggctgcagtatccacttccaaggtggttcattgacagagctggcaagttggtgcaggctgccggcaagaggccttagttccttaccttcatggatgtgtccacagtgctgctgaagtgtcctcataccaaggcagctgtcttccctcacagtgagagatttgagagagtgaggcagaagctgcaatgtcttttatcacctagccttgcaagtcacactccgtcatccccaccgtaaccttctggttacataggctagtcctgctcggtgtggtgtagactacacagaggcgttaacactagaaagtgagaatcatttgggccaccttggaggctggataccacattctgtttttcactcatcatgagacacttttggttagcatccaaagatactcctagggaaaaaaaagttaattttggctcaaattcaaattgatcagaatagccaaattgcatgaactacatacctttattaaacagtaggccaggcgcggtggctcacgcctgtaatcccagcactttgggaggctgagttgggcagatcacctgaggtcaggagttcaaggccagtctgaccaacatggagaaacccaatctctactaaaaacacaaactggccgggcgcggtggctcacacctgtaatcccagcactttgggaggccgaggtgggcggatcacgaggtcaggagatcgagaccatcctggctaacacggtgaaaccacgtctctactaaaaatacaaaaaattagccaggtgtgttggtggacgcctgtagtcccagctacttgggaggctgaggcaggagaatggtgtgaacccaggaggcagagcttgcagtgagccaagatcgcgctactgcactccagcctgggcaacatagtgagactctgtctcaaaaaaaataaaataaaataaaataaaataaaaacaca

SEQ ID NO: 110298 - DNA, 1083 bp, Homo sapiens
gcctttccacctacggcgtccggggacgcaggaagtaaactaagttgtttctatggcaacgcacagctttggcggatttagctggctaccattttgccttcccttgttcccaagtagtacattttgcagcctaccaagatgaaaggacttaggaaaataattgtaagagtgctattgaatgtggcttatttcagtgcgaagccgatttccgaggattgtttttctggcgtttggagaagatgcctaaattgagggcggagtcgaaagatgtttaatcccacaaggccacgcggcggggcctcgtccttctcttaccgccatcttggctcctgtggaggtgagtgaagggtctgctgctgaaatttgggggcaaataaccggagtaggtttgttcctgtgccttggcgagtcgccggtgcgtatcggagtctctgccagccattgatttctacgggtttcaagaagagggagaacaggatggaggagatgttgggctgatggtgtttggtcccctgacacccggagaacggctgcccgggttatcccagttaaattcctgggcctgaacggagtgaaacgatgtttttgttcgtgtgcagttgtccatgaggcagtgcttccttcatccgtttcctcccagtccataccttccttggcttgtctgaccagtctctttcctcagcttttctcccccagccattgcataaaagtcttacgtgtgtgtttctctttaaggcttcatttcttttcctgagtgttgcctactgataacggcatgcattttctcaggcttttctgagagtcatttttgtgactcctgtcccttagttttgtcttcattctgaagtttgcttagataccagctgttctctgaggtttgaatgtcttgccggaccctgcgtttcatatggatgttctggcattgttgtccccgaactcctacatgaaactcccatccaaaaggaatttgctttaggggcttaaacgagaggggacgaggtgggaaacttgtgtggcttggttttaaactaatctttttgtttgttttaaggcctgctgggaacgggacttctaaaaggaact

SEQ ID NO: 110299 - DNA, 1026 bp, Homo sapiens
attagtagagacagggtattgccatgttggccaggctggtcccaaactcctgaccttaggtgatccgcccacctcggcctcccaaagtgctgagattacaggcttgagccaccgcgcctggcctcattatcctattgaaataataaacaaaagatttagctgaagtacttggtattgtttttttgtttttgtgacaagagtctctgttgcccaggttggagggcagtagcgcgatcttggctcgctgcagcctctgcctcctggctcaagcgattctcctgcctcagcctcctgagtagctgggcttacaggggtgtgccaccacgcccggctaatttttgtatttttactagagaatgggtttccccatgttggccaggctggattggtattgctgtggcttctattttgcgtcattaaggaacttaatggggagttttagaaggacgttacttctgagggtggtgttggatttaggtaccttttgcacttgtaagcaataaaggaggtaattccttatattgtgatccttttaaggtttctaattttttttctcggctccttttgccagaatttaaggatttttagaacacttgtgcttaatgcattttgttaatgccttaaaattatgggttttttttttttttttttttttttttggagacggagtctcactgtcacctaggctggagtgcagtagcacaatatcggctcaccgcaacctccgcctcccgggttcaagggattctcctgccttagcctcctgagtagctgggattacaggcggccgccaccatgcctgtctaatttttgtatatttagtagagatggggtttcaccattttggccaggctggtcttaaactcctgaacttgtgatccacccacctcagcctcccaaagtgctgggattacaggcaggagccacggtgccccgccccttgttttttcttttctttcttttctttttttctttcttttttgagacagagttttgctcttgttatccaggctaaagtgcaatggc

SEQ ID NO: 110300 - DNA, 1085 bp, Homo sapiens
gaggctgcagtgagctatgattgggccactgtactgcagcctgggtgacaagacaaccccgtggtctttaaaggaaatatatataaagtcatatcctttgtacattgctcgaaccacagtagtttctctcattcagtaaaagcccgtcattaagagctccataattctctttatctcagctgggattaaccccttggtgtcttcagtctttcttccggccaggacacacactccttggccccagtgcctgcgctagtcatcccgtgatcacttcatggcatttcccctccctttccagtctttgttccatggtcacctcagtgagaccttccttggctatttaaaatggcaggtaattcctcctttctgtacacacaaatatcctcacacttgtccttttttgctattttttcaatattgcctctgttatcatctgacctatgtattttccttaaacttacttggttatcatgtgaaagatttttgttttatagctgctgtattttacagaagggcctggcatacaatagttactcgataagtatctgttgaatgaatggtgttctaggcatttaaagtttctcaggtgatgaagtgggtaaccagggttgagagccactcgtgtagaggtcaccttgaatttgtatccaactatatcagcttgtattcctcttctttccctttttaaaatcagcaacacagtcactcctggcggcaaaccaaacaaaaccagagtcatctggggaaaagtaactcgggcccatggaaacagtggcatggttcgtgccaaattccgaagcaatcttcctgctaaggccattggacacagaatccgagtggtgagtatggtttttagcaaaatggacgtctgatgaatcagactaggttcaaggtgttgtgctttgacttctgaggacttctgtggttgtgaaattgacaccagtaaattatgctgcaaaatttgtgtattgcagaacactggagagatagtaattgaaagaattaggtgtttggttgtttgttttttgttttttttttggggggagacagggtctcactttgtcacccaggctggggtgcagtgg

SEQ ID NO: 110301 - DNA, 1046 bp, Homo sapiens
caggcgtaggagatagtgactgggagaaggtgtcctggatgagaaagcgaaattggggcagagcctgactcttacaggcctgggacccgctctcagctccctacaccctgcaagttggctgttaggcgctcagaacagtatcacttctgtgcggagggttgtgcttagcagtagccctcgaggagtggttttcaaacttgagcgtgcatcacagtcacccgacgcacatggtacaacacggattgccgccctcagtcccccacttagtgactcagtaggtctgggatgagtccccagagttgacagtttacgttcccagctggttggtgagatatgcttgtccggggaccactttaggaaccgctgacctgaagtttcgggaagacattgaacggagagccagatagaggcgttggtgggacgttgggggctcactggagacaaaattcaggtttcttttcacgttatgtcgtcactttgtttgctttacccggttcctctgctctggaagtgcctgcccgcctcccatcccatttttctctctgcttaaattctttgtctcatttcaaattccctaacctcaaggcagcctgctgaaaccaccacagcgcaatattcttttcattaaaaagtacatcgtgtctgtactccctcctggcatttaaccaagtactgctatgggataatggcttattttttaggcgtatcttgcctttgcagttagattataaggttccgtgggataaggtttgtgtttcatactttgattccttcacagtatttaggtcagaggtgggtccacgataatccatattctttgagaaagggagagtacctggggcagggctgcatgctgatacacctacacatgttcaattcagcccagaaatctaaagacactcatttttatggtaatttcccaaaatgttacatgcatactcttcataaccaagtgagccaaaatattaacttcggagtttatagcttttttgcagcttttatcatgctgcattttcgctgaattctttaaaaaaaatttcccacaa

SEQ ID NO: 110302 - DNA, 1040 bp, Homo sapiens
catttacattctaaatttttgtattcttaccttttactcttaaacttggcagatgtaactggattcctgcagtcatttttccccatcattcatctattcaataaatgtcctggccaggcgcagtggctcacgcctgtaatcgcagcactttgggaggccaaggcaggtgaattgcttgagctcagaagtttgaggccagctgagcaacatggtgaaaccctgtctgtatcaaaaatccaaaaaattagccaggtgtgatggtgcacacctgtggtcccagctatggaggaggacgaagccagaggattgcttgagcagcccaggaggcggagtttgcagtgagtcgagatcatgcccctgcactccagcctgggcaacacagtgagaccccatgtcacataaaaataataaataaataaatatcctaacaacttataaccactcagcagttccatattaaagcaaaagaaatgcacagatctgtcagttatggatttgccagagatgtactatcacatgttattgttttagagctggagctggcaaacgttttttgttaacggggaaaattataaatatctggggctttgtgggtcataaggtctctagctttctgattcagctcagccgttaccgtctgaaagcagttacagacagtatgtacgtgaatgaatgtgccaggatttggcctgagggttgcagtttgctgaattctgttttattattattattattattatttttagagacaaggtctcactctgtcacccaagttggagtgcagtggcaccatcatagctcactgtaacctgtaactcctgggctcaagtgattctcctgcctcagactccccagagccaggactacaggcatgcacctccacacctgactaatttttaaaaatttttgtagagatgaggcttgctatgttacccagactggcctcaaactcctggcctcaagcggtccttcctccttggcctcccaaagtgttgaaattataggcttgagccaccacatccagccctgaaccccatttt

SEQ ID NO: 110303 - DNA, 1052 bp, Homo sapiens
tacttcctcagagtttcattttctttctttgcagaatgtctcttgggtgcttctgctttgcattaattaatttcagtgcctttctacaagaaaaaaattgggatttgctggtgtaaaaagaaaatctttaggatgtttcatcattgcataaaccatctcttttcttgagctaatttgtgtccttcactctaggatagtagtaattctagaaattcagtgatgtaaaatattgttttccacatctaaaatctaatttgcaccacttatttttgattcagtagtactgggtagtggaacttagaacccacagatttaaaatatttcagtattctaaagattctgtcaggaaacaatttttggattaattttctggagtcttccataatttctttattctacttagcatagtaatagattggtcattggagtatccccagcaatagtcatgttaatttttttttaataaaacaggttttgtgatctctaacccagacctggtcacctgtctggagcaaataaaagagccctgcaatttgaagatacatgagacagcagccaaacccccaggtaggtgagactgaatgaaggagaggacacaggctaggaggccagaggtcaggaaggaagccaggccttcaaatgtagtctgggaaactgcgccaataaaaataatttccgaaaaggctgcattttttctcttattcacaaatagggtcatcttctgtcccatgctcttaaatcttctaagaatttcctttttttcttcagtgatctccaagtttacaaggagagccaatgtccactttatcgcttataatgggctgcataatctgactgctgttccattgcttttagagacataggagtatttgtattattgaggacctctatgttaaagtattttttcaaatattattttcgcatcatgcctaaaatacgtaaggtgagtagtggacataatgggatttggtttagaaatcttaggaacaccgaggacagatgttgcatcttttctgcttagtgatttttttttttaattatactttaagttt

SEQ ID NO: 110304 - DNA, 1031 bp, Homo sapiens
tcacagttttgtggctgaagcaaagccacctacagttactatgcctcgaatcaaggtaagtttgccttaatgttttatgaatcatggtttggctgttttgaagatttagagggggtctctgtagtctttcgcttggagttgcaattttaagaaagtggaaattttgtgctgtcagttggctggggcaatagaatgttgaaggagcctcacacgggatggaactgagacccatcatttgtgccccatgtcaagtagccaaagctcatgcttcatggcaaatataaaagatttagagcaagatcatccaggctaacctaccccaagatatgccattcttggtgacctgctttcttctttaatcgtcactgggtcatttacaatcttagaaggagcctttagagttaatctagttcagtctctagactttatagataggaaagcaaactcagataagttaaatgtgacttctccaaaattatccaccagtatacataatgatcaaatcagtatgttccggcctcaacaattaccactgtttccaccatatccttcaggtgtccagcctactgacagcagctttgaagtacatagtgcatttcccaagaaccgtgggtaaagaaaaaagtaagcctttattgattggctcaaaacttttgagcaacgactatgtggtgatacttcaatgggtatgcaattggggaaaaaatagtatctctgccttcatgtagcttttagtctttagatatacagccactcaacaaaggagcatatgaaaacatgcagttgtaaagtgtggttaatgcatgatgagaaagaacaggatgtgatgattagtgggtgagaaagcctggctgaggaaattgcatttaaactgagactggaaggatgaataaaggtggggacagaaaggagcagaggggttgaagtgtgtgagtgtatcgcatgtgagcgtggcataaagtctctgacggagccttagctgtgttgttgatcatgtgaaacattatttggtgagaaggagctacttattg

SEQ ID NO: 110305 - DNA, 1029 bp, Homo sapiens
agtgcccttttcatgctccggttttggattcagtggcctaattcttgcattttctgactgcaggcattgatgacggggagccttcctggctttgtcgacgtcatcaggaacctcaattctcctgcactgctggaagacagtgtgataagacaagcaaaagcagctggaaaaagaatagtcttttatggagatgaaacctgggttaaattattcccaaagcattttgtggaatatgatggaacaacctcatttttcgtgtcagattacacagaggtcagtttttaaaataagaaaatatatcatactagaatatcatactagatagagcctggcatcccattacttagtgagagatgataccattttatatttggttttattaatttatagggagtactatggacaggtgtaaaaattattcactcacataatcagttaacaacccagaaatacaaacctgaagcaggtgtgagcagagttttatggaacccaaagcttagaacagctgagtgccattgaggggcagagaggatcaggaagggtgacacagccaagggactgtctgagccgagatatgatgggtgagtggggactccccaggtgggcagaacaggctggtagcttctgcacatggcagagctgtaggactccacagcctgttggttctgctgcaagcggagcctcatcgtgccctgagggcaggtggccgactgggtggggcctggtcctgagggggttttcctggagcttttccaacaaaaattagacctgcatgttagaaagcagacctggggctgaggtaggagcacaccagcacacctgcctggcctggggtttagccagcttcacctcctagatggctgggccttatggagcatctgtagtcctatcctgttccaaagtggggcgcttttcaacagttacttttcagtaatgactgagttttcctgactatatatggcatcactgagaaacacttctcttcataggagatttttttagtgggagggagatgagctagctgagggg

SEQ ID NO: 110306 - DNA, 1093 bp, Homo sapiens
ttacctcatgacaacttgggatctatttaacttgcccatttgctcaccttcagttatgcccattaagcccagcagtgatcccacagaaaaatatttttgtcagaagaacccttgctcatttaaattatctgtagaatatattcgatccatagcccagaaacataaaaacaatattagcaaaagtttaatccaatgctaatgttcatttatttattatagacgtggggtcttgctatgttgcccaggtgggtcctgaactcttggcctcaagcagtcttcccgcttcagcctcctcaagtgttgagatgaaaggcatgagctgctgtgtccagcctatttatttatttttaatgacatagattttgttgtgtttcaactcccccaaatcctgtaacctgaataaacccctagattttaagatgactgttgcgttttccccggggagtgaagatccagggaaattaggtgagttgtttatacgtgtgtttccccttcaaaggtggataataatgtcacgaggcatttggataaagtattaaaaagaggagattgggacatattaatcctccactacctggggctggaccacattggccacatttcagggcccaacagccccctgattgggcagaagctgagcgagatggacagcgtgctgatgaagatccacacctcactgcagtcgaaggtgaggctcgccgtcgctcactgtctgctgatgtggtttcacgtggatgttccctagaataaatgcaaccgcctgagttattcagggtgcctgtgtgaatgtccaccatcagtctgctagccaggggccgcatgccacacgggcagcactgtctcagtgtccactgcactgactccgtcttccagcagccctgcagaacagcagctctcactcctacccgtgtatgcattcattcaactaatacctcctgaagaccttttgtgccactctctctgttctgtatcactctctctgttctgtgccactctgttctgtgtcactttctgttctgtgtcactctctgttctgtgtcactctctcttctgtgtcactctctgttctgtgtcactctctctgctctgtgcc

SEQ ID NO: 110307 - DNA, 1340 bp, Homo sapiens
agcttgctggaaaatcagaccgtccttgtaatttataacgagcccccgtaaggggccaggagctcctgttgattggcgggagggctcagtcaggaggaccattttattttctttgtgtcaaagcaactgtgtttctgattttaattgtgttgtggtggtgaacacaggagtgggatgagcagaggccgttctggagggcagcttgtaacatgtgggtgaccctctatttaaatttaaatagctgtttccatttatctcaagaatataagcagaggcaggagcctgggatgggacagaggcatgtccactgaagtgtccttcacaaagtgtccttgcaaaaaggaacaaccagggtaattatccagcagcaatacagtgatcctcccagtgaggtcggtgctctgacagtgaccgtcccagtgaggtcggtgctctgatagtgaccctctcagtgaggtcggtgctctgcagaggggtcttctggctgttaggcagcctattttcacagaacagagaagcatgttgtggaacaggtatgaccccagcttactaattgtgtacctgttttttttttcatacttatatgaaagactacatacttaaaatactggtgattatatttaggacctgaaatcataagattgtggtcttgctttttacttatttttgtatcttagcgatgtctagagttaataagtgttgcttttctaatcacagcaagtcaaggtgactgctgagggctgtggccagcctgaggggtggccgtggggctccgggggcacccctggaagtacttcctggctgagtggggagtaaggggtgggagttagggtgacctgaggcctggctgaggcagtgagagtgtagcaggccgtcatacggggccggggcctggggcagagaggatgctgacgtgcaggtaccagcggtgttctgtggagatgtctcaaaggctgttgactttggaatctgagacttagggctcatccaaatggatgttacatttgcgggtgtgtgtttaaggtgcagcgtatgaataaattcatttcctcacagatctatacactgaatttcagcatcactcatctcaagaccttggccctcttccctttcctggcctgcttcctgcagcatgtaatttgctagtgtccagaactagccagtgtgccttttctttccacacgcactgcctggttcaccttcttcctgtaaagtgcctccgtcctttgtccccatctgtcccgatcgtaaataggtcctggctacagaggcatcctggctctagatcattgtaacagctgccgctctcctgtcagtcccccgggccctgccatccactg

SEQ ID NO: 110308 - DNA, 1044 bp, Homo sapiens
agttagctttagaaagaggctggattcagtcaactagctagcagaatacaactgttcaaactcaacatttgtccgaccaaatgaaaccatttccccccacactgacttgtgcgtagacatcctctaattccaatttgatgaatattctccaataacatagcaattaatttaataaaggaactcaccaattttaaattgcaataaatttaccaaacattttcactatttatggagagctttacagtaagaaagtatcaacaaaagcaggcacatccgtgtacaaagtgttgctgttgggtgttctcacttcttctttctgaattaccagctgctctgcgtctctgtctgctcttcctccgtgggaagtcgccgtcctggggcgctcgctctgtccccctcgcctcggaccaccaggcagagcagccccagggtttggacttgccaagaaaagtgcagtcgggctagccaagcccaaacatttattgtaaacttgaaaatggaatccagatatgaacgacacaaataagaagagaaacctcccagatacagaaatggtcacatcaggggccccctcctgtggtcacggagcccgcagagggggccaggccggaggctgcaaagccacgtggaagaggcggcgcccctgaggcctggccctggaccccgccccgctgcccgtcctcccttgccgcgggggtcctgagcggggcggggtgggtggaacgcaagcgcggtccgcgggatgggggtccggcccgcgggatcagcaggcccgatgggtctcccagggccgcggcgtctcgcagggcggccggcagcagtaggggtaggaggcgttgaggtcggggtccgagggcgcgtaccccggcagctccaccgacgggtgccccccgcagcgcacctccgcgcccgcctcgtccagcgcgtggaggacgcctacgttgatgtaggagaccgcgtggtgcgccgcgaagcccgcgcagtccccgggggcggccaggtccgactcctccggggacaggatggaggcctcgctcggccgct

SEQ ID NO: 110309 - DNA, 1078 bp, Homo sapiens
gcctcaagtgcttctcgttgggctcggagctgcgcggggagccgttccgcctgggggccgccgccggcgccttctactccgggctgctgctggccgccggcctctcactgctcggcgccgccctgctctgctgcggaccccgggacgcgcccctcgcggggtcggaaccgggcccgggtttgggggtccccgcggcgccggcaggcgctcccgaggccacgccgggcgagtcgggggccgcggccggggccccggggccggtgagcagccagaacctgcttctgctcggcgtcctggtcttcatgctcggggtcctcagcgcattcgcgggcgccgtgatcgacggcgacaccgtgtccctggtggagcgcaagtactcgcactactgcctgcccccgcgggcgccaggttcgagccccggctcggccccgggctcaacccccggctcggccccgggctcggcccccggctcggcgccgggctcggcccccggcgccccgcgcgctcgcagcaccctggacagcgccacgtccgccaagtgccgccagctgaaggactaccagcgcggcctggtgctctccaccgtcttcaactcgcttgagtgcctgctgggcctgctcagcctcctgctcgtcaagaactacaagtcgtcgcaggcccggcgcggtcggcgcggcaggcggaggggaggccgggccctggcgcggccccgcggcggctccgggctccgcgcgcagccgcccgcctctcgggcgcgccggggccggcggggccggcgggggcggcggctgcagcagcggccgagcgaggcctccatcctgtccccggaggagtcggacctggccgcccccggggactgcgcgggcttcgcggcgcaccacgcggtctcctacatcaacgtaggcgtcctccacgcgctggacgaggcgggcgcggaggtgcgctgcggggggcacccgtcggtggagctgccggggtacgcgccctcggaccccgacctcaacgcctcctacccctactgctgccggccgccctgcgagacgccgcggccctgggagacccatcgggcctgctgatc

SEQ ID NO: 110310 - DNA, 1912 bp, Homo sapiens
ggtgggcgcggtccgcggggctggacccgcccgagccgccctgacctcaggcctccgacgctccgcgcaagaagacagagtgcgccccggcccgcagtctggggtgtggacacacggccaggacgcggacggcggggcctcggcagcagcgcggggaaacagcggacccccagccctgcggggaaaggaaaccccccgcccactcggcgcagatcccgcctcacgcagcaactgcgcaggcgcagccgatgatcctccgcgcactccccagcctttgtgcgcgtgcgcctcacgtgacgtcaccgccgcgcgggggcgcgcagtcacccttcggtcgccagggggcgcggccccccgctctctcgccgctgacggcgcatgcgtgcgcccagctccgcctttgcctccaaggctttgctggcttgtgcggcatcctgctccgtctgcaggttgtgcttccggtgcggaggtcagggacaagatggtgccaccggtgcaggtctctccgctcatcaaggtgatccaggctttgcagccgccgcccagtgctctgggcccccccgtgtcccgccccgcagctccgaccccgcgggctgcgacccccggcccccgcccccatgatcctcgccccgtgaccctcgcccggcgaccggacccccacccctcctgcgacctctgcccagcgaccccgccccccctcctcccgcgacccccgtcccgcgagccccgtttcgcgccgcctctgaccaacctctttcgcagctcggccgctactccgccctgttcctcggtgtggcctacggagccacgcgctacagtgagtgaccgcgggcggggccggggcggggtctgctcggctttcctgtggagctcctgtgctatttggagaactccagctctggaagggggcttgggacgcatgcgaggctgcaggaccgtgtcctccaccgagcgtgaccccgatagtggaatcagctcacccaaagctcaggcttctgaggcccgggcgggggactcgaaaacggctgcttcttggtgaaaacgggtgctaaatggctgttcgagtgctgaggtcttgatgggaggcagtccctgttcgcagaggacgagtgagccagtgcgtgagcgggtgggcagcaggggccctgtagcctctgggttggactcgtcagggtgaaggtcaggcgttgactcgcattaacataaagagcgggaacagcaggtgcgtctggtttacagcgtcgctgaagataccttgacctgtggactcagttccttttgtacagcatttccagtgaattttattctcctgcattccgccaaacagattacctaaaacctcgggcagaagaggagaggaggatagcagcagaagagaagaagaagcaggatgaactgaaacggattgccagagaattggcagaaggtacgagtgacactggctcttatagattgtccctcccaggtttgtgcagggataaggaaaatggaggaggacatttaagcagagctaagtagatgcggattgtttaaaaatggggaagctggccaggcgtggtggctcatgcctgtatcccagcactttgggaggccaaggcgggcagatcacctgaggttaggagttcaagaccagcctgaccaacatggtgcaaccctgtctctacaaaaattagccgggcatggcccggtgcggtggctcatgcctgtaatcctagcactttgggaggctgagacaggcagattgcctgagctctggagttcgagaccagcctgggcaagatggtgaaaccccatttctactaaaatacaaaaaatcagccgggcatggtggcaggcacctgtaatcccagctactcagaaagctgaggcatgagaattgcttgaacccgggaggcggaggttgcagtgagct

SEQ ID NO: 110311 - DNA, 1052 bp, Homo sapiens
cccggccagtgtgtgatgtttctatgcctgcctgtgtgtattgagtgtgtgtggtgtgtgcggtgcgtgtctctgttcctgtgcccatgtgtattgtgtgatgtgtgcatatgtgtctgtgtgtctgtgcacatgtgtggtgtgtacctgtgtgtgctcgtgcatgtgtatcaggtgcgggtggtgtgtttgtgcttgggggtatgtactgagcgtgagtctgtatgcacgtgtgcctctgcacccacctgtgtctgtgtgttgagccctatcatgggctgtgcagctggcagtgagatgtaagtctggagcctgggggtgctgggctaacatcagccaggagggtgtcactggtgagggatgcgttgacagccaggggtccccatgagcccctggagcaggcccctcccagcctgggcctcgcaaagggcagctgcagaccagaggttgggaggcagccggtggtggggcaggaggagctgggaggtggcgcctgggacaggcagggctgcggcgtgtgtgggtgccagtctgcgtggtctccttgtgcacacacacccctccccagctcggtgtctataccatccctgctggcgtcgtctgcctgctgtccaccatctgcctgtgggagagtgtgccccccaccccgccctctgccggggctgccagctccacctcagagaagttcctggatgggctcaagctggtcagtgccgtgggatccccggggtagggtggatttgggggtgggggcaagaggctgaggaggcgatgggtttgggaagggcccccgggctccggggctgagacgctctttcccagcagctcatgtggaacaaggcctatgtcatcctggctgtgtgcttggggggaatgatcgggatctctgccagcttctcagccctcctggagcagatcctctgtgcaagcggccactccagtgtgagcctggccccacccctggggaccctgcctctgtcatccgccccatatggccatggagtcaccgccgcctccagggtgcccagtgtccgaccctggcgggggccaca

SEQ ID NO: 110312 - DNA, 1066 bp, Homo sapiens
caagagtgaatgatgtatgaacaaatgaatgaaaggcaagagtgagtgatgcatgaacaaatgaatgaaaggcagggccgctcttcagagacatcccctcggattaggcgtgcgggcttgcctggaagttgggcagtacaatgaggtgtaaccctaaaactctgagctatctagactcccaagagagacactgaattggatggttcgggatttcatctttgccacagcttcacttcttggttacttaggagaaaaccgtgttaggttttcagcttaacatttcagggtactcagtgtcagccacgtcgtgtccctgcgtggtcagcctggacctagaagctcttactcgcccagtgtaaccgccagggacctttttactcaacacttccttctgatttgctcttttgacatatcctttactgttttttaaacttcatttgctttgtgaaattgtggaagaggcttgtgaagctgagtgttcaggtttgtttggctctgtactgtctggttcccaggcttttagaggtgtgttttagaggtgtttttaggccgtgctgagtggttgtattatttatatattgctgtgtggcagattaccccagaacccctgccttaaaccaacagtccgatgataacttactgtttctgtgggttgggagaccaggtgggctctggctcagggacctcccatctggggttgtgtctcctctgaaggctggactggggagggtccgcagccaggctgtgtcacgtgactgtgggctggagacctcagttcctttctctatagggcagctccgagggagcccatgcctagccagagagggacaggaaggacgtcccagtgtttgtggagtgacattctaccacttttgccaagagtcattcggcccctacacacttgaggggaggggactccaaaacggtgagcatacgatgggcaggtggggtcactggaacacttaaagcctgcccagcacagcggtgctgtgagcctggcacctctcagggcactggagagacatcccgtaagtaaatcagcgattgcgtgtggagtgacgtgtta

SEQ ID NO: 110313 - DNA, 1031 bp, Homo sapiens
ccctcattttcttcctgccagtgattttgctccagaaattatcaaccgacttctgttaagttttcctaaaccattttaaatatatgggggaaatgtttttaccagttacagtagaccttgcgcttgcagttatttgtgacttcataaaaatgccgtaggagacgtgagaccttgaccacactggacatttgaccggtgtgaggacttagctccagggtccaggcactactgtgagccagagcctctgctcctagcccacaccctccactgcacagggagccggaccccatgcctccttccggttctgggctggagctagggccgggaagggggcctgttctggactctggagacctcagccgcccctcccaccatgccgcactctctagactacagcggctctgtggcaaaatcgaggagctgcagggtgcggcaggggccctttgccgtgggctagaattctttacttgggtttttttatttggattataaagtgagtcttgttttggtgtatgctgttactctttattaaatggcaggatttattttgtttgcagccttatttttggttaatggttagaattgaagttgaaaatgtaatttttcttttttttttcttttttttttttttgagacggagtctcgctctgtcgcccaggccggactgcggactgcagtggcgcaatctcggctcactgcaagctccgcttcccgggttcacgccattctcctgcctcagcctcccgagtagctgggactacaggcgcccgccaccgcgcccggctaattttttgtatttttagtagagacggggtttcaccttgttagccaggatggtctcgatctcctgacctcatgatccacccgcctcggcctcccaaagtgctgggattacaggcgtgagccaccgcacccggccgaaaatgtaatttttctacagaattaggcaggcgtgtgtaatttttcaacaaaaattagccaggcatggtggtgggcacctgtaatcccagctacttgggaggctgaggcag

SEQ ID NO: 110314 - DNA, 1047 bp, Homo sapiens
ccgatgccttgggcctgggctcagagacgcccgacaggcaccgagaccagcccgtgtctcccgggtagagcctgttcttcacggtccctgtgaagaacttttggttattttaagcaaggaacagagcagtgtaaccgagccaggcttggcaccgcgggtggggtgggggtcgtccgcctccggcccacgggtaaccctgttgtgctttttctccgcaggcgtcacaatgtagcagggaccccaggcgtcgtgctcaggtaagtgcgcgtaggccgactgccctcttctttccgcacctgtgaactgccggactccgccgggaccacgctttgtgcatgtggtcggcgttccttgcagtgcctctgaaacgcaggctctgaggacaggctggagccatgcgtgggtccttagcttttctcccggtcagtacttctgattgaccccattccgccctttgctcggtagggcttggttgcaagttccagtaggaatggcggagttgtggcagtcacacatccatgacgcgaagtgaactaacaggtgccgtttctgtgctagaaaatggaaaaagagccagggccggaaggagggtgcagaagcgagtccgcgtgcggagccaggaggcagcgtcgcgtgggagtgctggcctgaagcctccatgccccggcagagggacggacacgcggacgtctagcggaggtgaggcccacgccccccgaccccgggggtcctgctgactccttgccctgccctgttgctggttgtggcgagggccggcgatcattaggagccagctggtcaggacacgatgcagtgttcacggttcactgccgagttttcctggcccctcctgtgagagtccaaggtccagccagctgtgggggtcccaggcctcgatggcagtgcggggtgcagagggctggtctccttccgtcactggttcacttgggttcccggcgtgtcgctgaggagcagtgctgcttgggggccgagcctggggcctcagcccagtgagttgtgaggcggtcggctagcatcctgcaggga

SEQ ID NO: 110315 - DNA, 1124 bp, Homo sapiens
ccgcagagggtccaggtgcccagagcctgcccatcctcatcccacccggcagctctgccttcgcgggctcctcctgctccttccgctttcacagaagacagacagctcggggatcctgcctctctgcagctttatggaccctcctcagtcctcactgcaggaggagaggagggggtgttgggcacagagagaagccagtgcgggggagccgggggcttttgaaaaggtgggcttgtcccagtgcacgcagacactggattgctgaccgtgccctgcacatgggagcctgggaccccgtgagcccaagaggctcctgccacccaggcctcagggcctgcactgtcctccctgggggcggctgtcagagctcagccaaggatgaaaggcatggaagagtttcaggtgttaattaatcgcgttttctcttgtagaagccaaagatgttgaccaggaagatcaagctgtgggacatcaacgcccacatcacctgccgcctgtgcagcgggtacctcatcgacgccaccacggtgaccgagtgtctgcacacctgtacgtgccctgcccgcgccacccagggagggcgcgcccttcccagctctgtgctcttcagaaccttggcttttgtgttaccacacgcttttagctcaagcccgacaaaagcaggaaccaggaccaggggcagagacgatcttgaagataagtcagaaaagtcatttcacgctaaaggtcctgtgggtggtgtcagagcagatgaggcctcgcttaggagagcgaaacacaggagagaccccacattcctcccacggagcagcaaggccagtagccgctgtgacagtgctcactgctggcagtttccaaatctccagaggagttccttagatccttcaaaggggaaccttccagtgtgttcttcacacctgatgtgcgtcctcacacctgatgagtctgtgctttggtgttagaggactcacacctggggctggacctgagtgtttttctaagtgtggctaccgctgacgggcaggtgccatccatcaggctgaggctcggctcttatgctaacctgaggccccatggctggcggccctgctggtgtggacgaccgctgtgtgcgtctcttgatg

SEQ ID NO: 110316 - DNA, 1605 bp, Homo sapiens
cccctctgaagcaggaaaccaatggtggaactctcccacctcagctggtgttgctgcctggggagagggggaggagccaaggctggcctggggctgggccagagggtttgagggagaagggggcaggggagtggcagccagggccacatcaggtacaggtggccaccacggtgtgcacagtggtcactgggtcacctggggccaggggagagggcacatgtcttcctagcccgtcttcccccagcaacttctgggggacccttctgttgctcagaacagaagggtctctgtgcagccctgcatgtggactgtgcctcacgggacgtgattcctcagcacccttcccgatgaagtaggtccttctcgcctccacccctgctaagcaggcactgtgcgttcttgtgtcttccagaaggcgccgctcctgctgcactacagacccaagatggacttgctgtgaatggtgccacacagcgcccacagactgggccctcgcacccttgggtgctcccggccgccgcgcttaagaacattgcctctgggtgtcatgtggaccagacttctgaatagagaatatttataacttttgtatgagagagaattcacactcaacaagacactaccagcaccacgtttacagaggatgaaaacacttcacagtctcccagagccgatcgtcctctcccccgccccaccccgtgcttcagccttgcagggagagtgatgctccaggcaacacggttctgagtcaccttctgacacgagctccctctgcttgctttccaggtcttgaaaatctgaattcacttcagtttagtttatgaattttaggtttcatgataagcctcaagtgtagttggacttttattgaatccttcctaagttattgaaaaaatgtcttttcatggtgaatgacaatatttatgttgcctttagcttcttgaagatttagaagttatataaaaaattaatttaaaagcaaaccaaaagaggtttccattaacattatgatttaaccattgtatttaatttcccaccttatgaaacacaacagcagctccctgactggttcgcctttcattgtgtgaggtcggcacttggactcactcagaactgtcgctcacctgtggctgacacacccagccctggaaacggggccccagacgccacgtcgggatttctgacatgctcagcaggtagaccagaggccgtgtgaccagctcagtgctggtttacggaacaactcttacttttaaaaattacttgttcccccaaattgttgagtgccgccgtttggtttcctatgttttctttccctgttttgattttgctgaagggagaggtggtggtggttaggatcagagctctcctggcatccgtggggaggatttgctggtggtggcttcgggctcatgcccagacacactcactgccccgtctgtccaaggcctccccttcccctttgctggtgggaggagctcgtgtgctccttggccgcttactggaagggcgtttttcagagctgcagggacagggtgagcagctgaagggctaggagggaagccggcccccgctctgcagaagctgcatttcagctgaatctgt

SEQ ID NO: 110317 - DNA, 1099 bp, Homo sapiens
ttttctagagtcactgtataagggtctatgagtagctgtgtatgaataaatattacctgtctacctcaaaatacacatactgctgaagcattctgtacaaccgtgtgttatcacagtgcagttttaagtgtaacgttagaacttaggcattttcctgtgtggcggaataagaaaggattaaacagttacaagcctccaaattcaaataaaattaaatcacagttcagatgaaactgaatatcattgtaataatctcataatatatatttgtaactttgtagctatctttgaaatcacttgactttgcaatggtgctaagctgatagatttaaatacacagacgggcgagtggcgcccgtgtcgatgtcttcagccagtggtgaccctgcttttgtaaccgcgttaacctgacaaaacctcagcagcagaagtccctatttttctaggagttcatcgtgcagacagtcttcactacaggactcggccctggggcctctgcctctcgtctgaccttgcagccttagtcgttggaggctggagcgcaatggccctgccgtctgtggagcctctgggcggccttctttcctttctgtcaacctctcatttcacagaaaaaggctgaatttcattttttccagcatgaaagccaggatcggttagtggttggattctattggttttttttttttaaacagatggagttactgtgaagaagttttcacaactatttatgctggtaaaacaaatgctgttaaatcaccttatgcgtcgttttcaacagcagtggggctaattacccggaatacggtctcaccgatgcagttttcatggacatagaaaattcaaatagaatatataatattgaatttaagatttggggggttaaaaaagaaaacttaactttataaaattatttattctattttaagccttctatcatattttcccatccaattgtttggtttcagtggtccagctttatttacaggcatataaaatgaaattgtgagatgttttgcaagcttctttttactttgagtagcttttaatttgtatgtttttatgtggatgaagagcattttttatgcttttgtgcaat

SEQ ID NO: 110318 - DNA, 1297 bp, Homo sapiens
gtggaacacacactgtctgcagagctccgggaggcacagtgcacgatgtgccagggcctgggtgcccgtcccctcgagtgcacagtgcgaggtgcgccagggcctgggtgcccgtcccctcgagtgcacagtgcgaggtgcgccagggcctgggtgcccttctccccgtgtgcacagtgcgaggtgcgccagggcctgggtgcccgtcccctcaagtgcgcttcaggacgtctttgcccaggggcaactgccatctccggtttgtctcctggttggatgatcactgtgaaggtgtctcgccagtttgatttctttcttatgaatgaggttgactcttagtttgagtggttttggttacgtgtatttcttttgagaatcatttcatgttctttgcttattttttggcctcaggaattcatctttttcctcaaatagatccacgagggctctttatacatgaagagcctggttttaatgactgcatggcactctatcaagtagctctaccacggttttttttttttttgagacagagtgtcattctgtcactggggctgagtgcagtggcatcattttggctcactgcagccgtcaacccctgggctggagcgatcctcccaccgcagcccccctgggtagctggggccgtcaacccctgggctggagcgatcctcccaccgcagcccccctgggtagctgggaccacatgcatgaaccaccgtgcctggatgatttttttattttttgtagagacagggtatttctatgttgcccagcctgtattttatgattttatacttaggatattctcaaatttatgctattataaagagtatcctgaagagcattcacattttagatagattccagaaagtggtactgcagaatcataatcataatgatatgagcatggtttggttctgggtgtgagctgtgaagctgttttccctgaggagcagcatggggcatggaggcagcgtccgccacacacacctctgtcctggctggtctcgtgcacgcaagccatgcaggtgccagctctcaggcaggagtgaggctgtcatgtcgtaaggaggcgccatcggaggtcccaggaggatgtgtttcgcttcagatggtgcttgttctaatgccctgtgccccttctccaggccccctcttctctcctggaggtcagccggccccttgtggctctcaggccagctggaccaagtctcagaacccggacccatttgctgaccttggcgacctcagctccggcctccaaggtaacgtggagggcactttgggggtgtgg

SEQ ID NO: 110319 - DNA, 1475 bp, Homo sapiens
ggagggccccctgccgctggtacgtgtttctgttctgaaggcgagtggcttcacagtagatgagtgatgaggctgagtcattctcactgcatgggcgtgtttcgaaggtgcttgcaggaagggaacgtgcccttcccccacctcccccaggagcagcctcggggtcatgtcagggttctgtgctgcccacctgagctcacgggccgggagctactggcttctccatctcagcagtgttgctgtgtccctgggaaagtcatcctgaggcgtggggcacggggagcccctgggctgactgcctcagtgcccctgcgagggcagccgtggggtctgggctgcccagctggagtggcctcttgggcaggcctgactccagagctgggctcctttgtcttcaggcagccgggctgagtcctccccatgcccgcctgtccccacagctgacccctttggcccgcttctgccgtcttcaggcaacaactcccagccctgctccaatcctgatctcttcggcgaatttctcaattcggactctgtgaccgtcccaccatccttcccgtctgcccacagtgctccgcccccatcctgcagcgccgacttcctgcacctgggtaagtgcctctcgcctggcagccagctctccatggccgcctccctcaggaccgcagcctctggtgggaaacagagctgtgggtctcaggcagtggtggggctggactgtgtggcctccgggtgcgctccttgcggcccaagcatcctgcaggacgtcccagaggtcaggacagactgctccctgctctgtctccccaaaccatccccaaacctggaacaggttgtggggccctgcagtgcctcagtcgtctgtgactggcaacaggtgtttctccaggcctcctcaggcccaggccttgcagctgttagcagagaaggccacctgcacccagagcttgtgtagggaccagaggtcagagggaggcagctgggggacccagggtccgggaagctgacctggtctgggtgtagcaggggccgtggggcaccgtatccatggggaggaggtcaggcgccggggcacagcatggcttgtttagacagacgccggtggggccaggccctgggagagggctgcgcgcccctccagtgtggtcctaggggaaggagcctgggttctctctcctgaggaggcagcagcgtggtccacggcgtactctggggtgatgatggtgaccattgcaggatggcttgtgggcgggtgtgtggagtgcagccttgcagcgttggggcgggtgccgccagaggtgtgctgcgtggccagagccagggcagacaggacctgctgggccctctgtctgccgaaggcagctcagccaggtggagccacctcgggctctggtgggttttaggagaggcgggaacgcaggctgtggggatggcggcagaaagtggggtcctgacaaacccttttggatgggaat

SEQ ID NO: 110320 - DNA, 1049 bp, Homo sapiens
acaggcatggggagcctgctgcccgctggagagcccaggcttatcagtgcagtttatgacagtgggatcagagatgatcataggaaatgtgtgaaatagcctggaattccttagagagctgtggggctgggaaatggtcagtgtcaggtcacacctgcctccccgtgcggccaacaccccaaggcgggccctgctgacccctgcccctgctccccacccacatggccgacaccccaaggtgggccctgctgacccctgccctgctccccacccgcacggccgacaccccaaggcaggccctgctgacctctgccctgctccccacagctcagcctgggctgcctccccagccccacagtgaacacagctttgtttcccccggaatcatgttcccaattccctggcagccggattctagaggtcttggttttatgggcatctgttgacagttgtggatttttgtcagggcggacgtcgtcatttttatggaaaacacatttagtatcccagagtgcgtgctctgagctgccgggtggctgcagtctgtgtgtgctgggtagtgagggccagcgcctgccttggaaccctggggtcccacctcagagctgcctgcctgggtgccggagtctccagctgtgggatgttgtcccgtctgctctgagcacgtggcctcccctggagttgcaggaaacatggcggccccgcccggtgcccctctgccttgaacacagtcgcgggcatccccactgtgacgtccgaggagcgagtgaaatgatgctcttctggggccgtgaccgggggtgctggtgccctgtgggttcctgggacagctgctgggtcagctcacagggctccagcttccgcaggcgggggtggccggctgccctggttgttctcgccccgctgcctgcagctgccacctgtttccatgcacgtttctttagtgaatgtccaaggacttacagactacttgggtggccttcctaagtggtgtctacttgtaaccgcaggtatgacctggacgcgtgtgacattcaagaaaaataccc

SEQ ID NO: 110321 - DNA, 1037 bp, Homo sapiens
gctgagggctttggccagggtggggctgtgatgggggcggccggaggtctcctgaggggctgcagagcgtgggacaggagggggcgaggtggggtctctgttgctctgaggatgccgcttgccgggaactctggaggccccagctcctcactgcttcccaccagccagagggtgctcgaggccgaggcattccttccagacacgacacttgtcagtatgcaaagggacccaaagcccaggaacagctgactgagctctgtctgcaaggccagtggcagccctggtgctcaggtctcgcgcaggtggacgcctgttcatgacaccagctggcggaggcccccgcactgcaggcaggctgtccctcctagctgaccaaggctggggcggggctcctctgccgtccgtgccaccgtgccctgtccccacaggtctccgagtgtggctgggcagcacggcgggccccacacctgcacaccctgtacaacatctgcaggaacatgcacgcctggctgcggcaggaccacaagaacgtctgcgtcgtgcactgcatggtgagctcgagggccgtgggctggcgccgtcttctgtcaaagttcattatttcatgcatagttcaacaggatctgagcgccagtcatgagctggggcctgttcttcaccctgggacacggaagaaagtccctgtgcttggtgtctttgggtctggaggggacagatgacagatggccccgcccttccctccccatgtggcccttcctggccttgacctgcatgcccgtgtggaggccactccgctgtgtggggagcccacctcccctcctgctcggtggccacctaagagtcacttccagtttcccgatctgcagctcgaggcttagtggtgcttgagcctcccagggtgtggcagctgccactgtgggtgatggagttgaggtttccatgaggggtcttttgcggggtacggggcaccagcagagcctgttggagtggccctagccctgttcttcgttagggaaccttcagtctctgttgggctc

SEQ ID NO: 110322 - DNA, 1004 bp, Homo sapiens
gattccgtggacccagtgttgggggcagttggtctgtagagagttggctgtggccacagcaggggcttctaggcactcagggcagggggccctctctgcctccagcggcgtctgctggagtcgcactgctacaaccaccaggcctgggcagcgcgtggagcctggcatgacccgtgaccatcgtccaagccacccttgctctccagccctccccttccaccggtgttgccatccctctcccagcccactcctgggccgtgcctccctggagagcgcaggggaaggggcagtcagacagcggatgtctctcctgtctcacccatgcctccaccagctgcaggctgtcatttccatccgtttctgatgtaggggtcagctccacagcacgcacacagccgggaagctgcccacacgcctgtgcacacacacgttcctcctgggatgcggcctctacagtgagagccccacggcttctccaggcctcgggctctggcttaagccctgtgacctaactgcggagtgtttcttgtcataaccaagttctcttctttttaattccagttatgcaaagggtgacctggacatatcttacatcacatccagaattgcaggtatgcgtgccacatgaggctgtgggacgcgccccggcccttccctgtgtgcccagtgagtccctgttgtgtgtcagggcacaggtgcctctgctccagccttctctgtggccacagactcacaggggtgacctggggccccttggcaggcaggcggcctgtgctcagcacctccaggcgcagcagtggacagggtcagcgccagcctggcctcccatggctccctgaggtcatgccaggaacaacacaaggccgtgtccgtggaaaaccagggcctctgtgcaccaggcatcccagtcactcatcccgacacctggagacagggcaggtgtcagaaagctgtctcaggaagtcccagccaccggctgatgggcgtgtggctgggtccatgct

SEQ ID NO: 110323 - DNA, 1051 bp, Homo sapiens
ttaacaccacttgtgccaccaaagccgcctgtgaagacctcactcgcaggacccaccaggccaggggccaccactctgccttcacgtccagggtcatggtggcctgaagctgtggccgtgaggccggactatccccacagacagagtcccagccccagctgtgctgaggcggccacatagcccttccgcacccagattgaccatttcctgggtctctggaaaggctgaggacagggtagacctgccagtgctgaggcctggcttcccgctgggtacgtgtgggtcaggggcctggccataccacccactccctgctcctgctgcctgggcccagccagcaacctgcacctggggaggtgggaccgagcgcctggggaggtgggaccgagcgcctggggcctgggcccagccagcaacccgcacctggggaggtgggaccgagcacctggggcctgctgagactgtgtctccctgcaggcctggcgctggcggagtacgaccagccgtatggcggcttcctggacattctgcggggtgggacagagcggctcttcaccaacctcaaggacacctcctccaaggtcatccagtccgtcgctaagtgagtgtgaggctccagagccctggacctgccgcacgctcgttccaggctgcagccccggcccttgcttcctggctgcggtggaacagctggtcatcaggccccacaggggcccctgaggcagtgggacagcatcacccgcttctcccagggagtcggaatgagcccagcatcccacagagccaggcagatccctttcctttcatcgcctggggggcaaggccctgctgaggagatgcctgggccctcccctcccttgctgcaatgtcgcccctcactctggggcgttcctggcttgttcccgggactctgtaaattgggtgaaacctcggtggtggcgcctcactgagccagtccttgagttaaagccctagttactcagacttagaccaggtgagtcccagcctgtggtgggagaaagtctccctctgggtgggctgtccaagggcg

SEQ ID NO: 110324 - DNA, 1040 bp, Homo sapiens
cggcccgggtgtcacccctgttgttcccgcaggccccggtgtcacccctgcatttcccatgttcccgatatcacccctgtgttccctgcagtccccagtgtcacccctgcgctccccacggctccgatgtcacccctgcattccccgtgggcctgggcatcacccctgctctccccgcaggcccaggcgtcacccctgcgctccccgtgggcctaggcatcacccctgctctccccgcaggccctgggctgcatcttgtacctgctgtgcttccggcagcacccttttgaggatggagcgaaacttcgaatagtcaatgggaagtactcgatccccccgcacgacacgcagtacacggtcttccacagcctcatccgtaagtcccggtggaatgcgtgcgtggggcaggaccctggagcacagaccccgcgtggctctggagaccccgctccccttggggcactgctcacctggccccactcccgcccgtcaccatagttttgacaacatccctggggggggggtttccagagagctcccctgccgcccaccccgctggtgaatttgcggtgctctgagtggtgatttttgatcattttgttcggtttttgttcttccctttgccgctcccttcttgcttctgacgtcactgatgtgtgtagagggagtggcctctggtggtctgtgacctctgccagtgcagggggtgctgacccgcctggggaaccgtggggccgagcgcgctgtgcttctgctgcaggcgccatgctgcaggtgaacccggaggagcggctgtccatcgccgaggtggtgcaccagctgcaggagatcgcggccgcccgcaacgtgaaccccaagtctcccatcacagaggtgagggaggcacacgtgagccccaaatcccccgcagtggtgaaggaggcacacatgagccccagatcccccgcagaggggagggaggcacatgtgagccccagatcccctgcagaagggagggaggcacacgtgaaccctaagtctcctatcacagaggggaggga

SEQ ID NO: 110325 - DNA, 1068 bp, Homo sapiens
cccagcctctgcctctcgcaagtgcctccgtgtgtttgtgaggctctccattgttaaccttgaaccagtcgggtgagcttgggtggacggcttcctcctcccagataccctcacgtaccctggggttctgggtgtcacagaagctgctctgggtgcggccactctggagcggggcccttgtgccaggtgagacacccttctcctcagcaagcggacttggtgcgcagcaggccaatacgtcggtgccgacatgccatgaagcacgggaggccgtaggagattgagggaggtgaatgactcagtcctcatcgtaaggagcgcgctgaggccgaagatgagcagcggagctggtgcatggggccgactggcctgaggtcatcccggggcatagtgtgcgggacaggctgcccctcagtctgctgtgcatttggaaagctgcacggaagtggtgcaacataaaaaatactgtttgtgggatgcaacttttcctttgaaatgtttgtattttttcagatcacgaggaatacaacaccaatgtatagaacaccagaaatcatagacttgtattccaacttcccgatcggcgagaagcaggatatctgggtgaggtctggcgcctctcagtggcagtgcctggctccgtgcgccctacttaacctgaggcggcgtgggccgggcacctgccactcggaactggcctgcctcctccaccccctcttcccctcccgtccccttttctttttcctttccttaagaatcactgtggctgccactgtttttttgggtttttttggagacagggtcttcctctgtcacccaggctggagtgcagtggtgtgacctcggctcaggctcaccgcagcctcccgcccctgggctcaagggatcctcccacctcagcctcccgagtagctgggaccacaggtgctcaccaccatgcccggctattattttgtatttttggtagaaggggtggtctcaccatgtcgcccaggccggtctcgaactcctgagctcaagcggtccacctgcctcagcctcccaaagtgctgcgattacaggcttgag

SEQ ID NO: 110326 - DNA, 1022 bp, Homo sapiens
agaccagaaagcctcataactctatacagcctgagagaaattccatgatggccactggtgtttgtgcccctgagaagatcctcgcgatttggtgaggctgtgctgtgtggtccgtgctgggcccttcccgtccctgtctctcccatccctgacacgccgctcccggcccctcccgtgcgtccatgcagtccgtgctgggctgtctcccccatccctgacacgtcgcacccggcccttcccgtgcgcataccggggcctcgtcaaggctcctgtgtgtgttcggttgaggtgtctgtcagtcaatctcttgttgttcatggcactgttttctctggatgtccctggactctgacacccgctcctgcgctgcgcttctagggcctcctccagagctgggaggtgctgaaaccagtgggattaagatttgtcgggagcacgcatcacgccgtggggcctcccgctcgtggtgttacttgtcagttttcattataaaagaatacatgctgattgacaaaatacaaataacacagagttaggccaggcacggtggctcacgcctgtaatcctagcactttgggaggccgaggcgggtgcatcgcttgaggtgaggagttcgagactagcctggccaacatggctaaaccccgtctcttttgtattgtaaaaatacaaaaattagccaggcatggtagtgggggcctgtaatcccagctactcgggaggctgaggcaggagagttgcttgaacctgggaggtggaggttgcagtgagccgagactcttgtctcaaaaaaaaccaacaacaacccagagttttatgagtgcttataaaaatgggattttactttatataattttcctttttaaaaaaattgaccgtatcaggcgtattttttttggagacagggtcttgctttgttgcccaagctggagtgcagtgattcatagctcactgtagcttcaaactcctgggctcaagcagtcctcccgccttagcctctggagtagctgggacttcaggtg

SEQ ID NO: 110327 - DNA, 2075 bp, Homo sapiens
ggccaagaggctgctccgtgacgttgtctttcatgtgttaaaatcggctttttgcttttaccaaacctagttgtaggcgacttctaggaagaagcagttttttctgttttttttttactgccagggtaatagtagaagattcagaagtgttgggaatgaagttgttcctacccaagaggtctccctgcccagtggatgggctggttaccacagggggcccttgcccggcccggccccctcagctcctccggagacctggctgagagccgtgcagatggcctggctcccacaggccccgatgtggcttctcagccgcccctctcgtcccttctcaggctgtcccagcatgactgggcggggcatctcccggcgctgacagaggatctgggggctgcactccctgtccactgccacatgtccctcctgagcctggagtcttcggccctggctgccctcagactctgcctctctttcctctcctagctctgttcactcggagagcccgccggctgcctgagtgtgggttcgggtggacacagccacgccgcagcctccctgcgcacagccccctgagggccctgcctcctcctgccacgcgcgggatggactttggtgtcgctgtggtcaggtgtgtgtggccggtgtgcctgcctttgtccccgccctctcctgcagctcctcctgcctctgtctgcctttctctcggtcgtccactgctctctccctcatcttccgctctgacgtctaaaattgtaagggttcgattcaagtattctgacttcagtgtgttaatattgtctacatttattttgaagtgcacagaactgtggacatggttatgtacgttctcctttaacaagacaactgcagaaaaagctttccggccacccgaacattgtccagttttgttctgcagcgtctataggaaaagaggagtcagacacggggcaggctgagttcctcttgctcacagagctctgtaaaggtaacgtcctgtgaaggccggcttggtgccatctaacccagcagaggccggcttgatgcctcctaacccagctgcatggctgtgaaacatgcccggcatcttctctcaagctgtgttggtcttagcgggaagcgcgggcagctctctgacagtagttctgtgagaggcccacgctgacgcccagtgagcttcccactgtcccggtgggccacctgcatcgtctcctcgtggagctgcgggcagccagagagccgggctcccatcctgcctgtctccagtggcagcacggggtagagcgtggtggccttccgtgagtggtgtttagcaggggtggaggagcgtctgtccttctcagggctctggggtccctgtggggtggagcgtggtggccttccatgagcggtgttgagcagggtggaggagtgctgctgtccgtccttgtcaggggctctggggtcctggcaaggagaagagaggccgcagaggtggacaactccaggtccctctgtgggtgcccagcctcatcagggttgagcccaggaagatggcacaacgactccatggtccgtttgtcaggacaggaagagaggccggtgggttggggtggtgctttcggagagttctaggggcagagtggtctgtgtgagtgactgcgggggatgtcgtgttggtgtcaccggagcccacgctgactggccggagacctggcctgaccctgctgagcctcaggctgtgtctgcaaaggggaaacaagacctgtgcctcagagggcggctccacccccagccctgcctcgtgccgatgccctccagaactcctgtgccaggtgacgaggggaagtcgagcactcggggaggcctcagagctgtggcctggccggtgagggggtggtgacactagtgacccctgcgtctgtcccccaggcagggagagaggggagaggagaggccgggagcagcaggggagactgaggcagggagtcccacagaaggaagcctgtggggagggcacctgtagccgcgtgagatctgtcgtccacaagccagcccctgctcagcagccaggaggagctgttcccgcaggccggcta

SEQ ID NO: 110328 - DNA, 1036 bp, Homo sapiens
acagatgccgtctatcaggctggggaggtttctttctgtcctcgtttgctgagagttttaaatttcatgatgtagtttttccactgcagaaacctaaaagaaaactaagcaaattagaccccaaaacaatagaattaaattgattttcaaatgttaaaccaactctgctcctgatgtcttggtgggcttggtttgctgttttatgaagaattcttgggtccacattcgtgagtgatgttggtgtgtattctcttttatgtcttttcctcttttgggcgtcggggaaggaggtcccctctcttgttctgggtattggtgatctgtcctctctctctggatcagtctgtctagaatttatcagtctcgttggtctttggagaactgcttgtggttttgtttttccttctattgacctctgttcttaggttattcctgtctgtctctggagtagaggaagtgaaaggcagtggtgtatgcactggggccgcgcacgctggggctgagtgcggggggccatgtacgctggggctgagtgcacggggccgtgtatgctggggctgtgtgtgtggggccgtgtatactggggctgtgtgtgtggggccgtgcacgctggggctgagtgcggggggccgtgtacgctggggctgtgtgtgtggggccgtgcacgctgggactgtgtgtgttggccgtgtgcgctggggctgtgtgtgttgggggccgtgtgcgctggggctgtgtgtgttgggggccgtgtacgctggacctgtgtgtgtgtggggccgtgtacgctggggctgtgtgtgttgggggccgtatatgctggggctgtgtgtgtgtggggccgtgcacgctggggctgtgtgtgtgtgtggggccgtgcatgctggagctatctgtgttgggggccgtgtacgttggggctgtgtgtgtatggggccgtgcacactggggctgtgtgtgttgggggccgtgtatgctggggctgtgtgtggggccttgcacgctggggctgagtgcggggggccgtgtatgctgg

SEQ ID NO: 110329 - DNA, 1043 bp, Homo sapiens
ctgggatcagctggacatttctaaaccttgtaatcactttggaaaccagagtcagactacttatcttacgaatatttctggagcacctttatttattggcattgaagtagatgctatagtaacaccatcttaacccaaatatctatctccatatctcatctgaactctcagatgtttgttcttagatactgctacatgtataaacatgtatatatccaaaactgaagttatagtcttaatccctataactgatttcctaaatttcatagcaaagagtattgcaagagattaagaggatcattttgtaatgaagaaggggtgaattcatcgaaaagacttgataatcctaaacatttatgcacctaataacaaagctctaaaatacacaaagcataaactaatagctgcaaggagagagaaaaatcacaattgtagttggagaatattctttctcaataaacgataggatagatacccagaaaatcactgaggatataggcgacttgaacatgactgtcagccaacttgacctaatgaatgtttatggaacactccccacaataacagcagaatacacaatttttcaagtgcattaaaacattaagcctgatcatattctgttctattaaacaagtatgttatctgaccagaatgatattgaatattaaagtagaaatcagtaacagattggaaaatcctttcaatatttggaaactgaataactcacttttgttttttgtatattttttcaactcacttttaaataactcatgggtcaaagaagaaatcaaaaaggaaattagaaagtattttgaacagaatgaaaatgaaaatgcagcatttaaaactggtgggatgcagctaaaacagtattaaatgttaagtctcaaatcagtgacctcagcaatcaccttatgaaactagaaaagttggctgggcacggtagctcactttggcaggctgaggtgggcagatcacttgaggtcggaagtttaagaccaccctggccaacatggtgaaaccccatctctactaaaaataca

SEQ ID NO: 110330 - DNA, 1166 bp, Homo sapiens
ccgcagggtgctgtgttcctcttccacgtttaggtcggccttggggtctgtgatctctgtgcctttccttgtctctcccgtttcctgaggagaaactgaggcccagtccacccagatcagtgttcaccagtaacagggccgggagtggcatctgttgttggcctctcagcctggaggccagaaatttgaggggcacctgggagaggacagagcagcgtggacccttcccctgctcagtggcggccaagcccccccccataccagtccctgtccctgcaccagggctgaggctgcatggccgacctccaggagcgccccacaggcacactcagacctgcctttcctcccaggctcctgtaaccgccaggcagcggccccgccatgtcccagccccggaccccagagcaggcactggatacaccgggggactgccccccaggcaggagagacgaggacgctggggaggggatccagtgctcccaacgcatgctcagcttcagtgacgccctgctgtccatcatcgccaccgtcatggtctgtacggggcccctgcttaggcctgccccaccccgagcctctcgaggcactgcccagcccacctcagacctgtctaggtcttgccagcatccttgggtcccccagctcctcaggcagcttaggggggcccagcactgccctcgagtccccagtactgccacacccaatccaacaagcgtctcttgctctcctgcttccttctgtctctttgccccctcagatcctgcctgtgacccacacggagatctccccagaacaggtaacggggcaggctgtgctctgcgtggtgtggccctgcgaagatatagggtccccgaggctcgacctggcacagggtgctgaccctgcacgcctcgaagcttctgaggcttaggaggcagaggcgggaggcgggggcctccttggaaagggagggagccaacaagtcctgctcagcctgtgctcaccccggcggaggtcctggcctcctgggagggtgggagactgggctcctagggctctgtttccgagttcagtggacaaaggcagcaccctggaagtgagccagaggacaggttggaagaggaaggttccgggcctgccccaaggacagaagtttcctctgcgggagggcagctgccccagcaggc

SEQ ID NO: 110331 - DNA, 1014 bp, Homo sapiens
tggcagagcctcatgaatgacattcgtgacctggtgcttttgccctcctgtcccctcccacatgcggatacacagagggtaccatccctgaggcggagtccacagcagacaccgagcccattaagagctgaccccccagcaggaacacagcccatagaacactctggagtacacctgtgggtgtgggcatggatcagcgccctggagaaggggtgggggctggaggggtgggggctgcaggtgccaggggagacagaccagctggagacggaggctggacccagaccagggcactcagggtctgctggggaggccaggaccctcccaggtgcctcacaggacccacccgagggtttcgccctgccctgggccgaggccagccccccctcacggtgctgtctcgactgccattcagggacactcatgtcacctgggctctgacagcagtgctcttgtattccagcagttcgacagaagtgtacagaggcttctggcaacacggattgccgtctacctgatgacctttctcatcgtgacagtggcctgggcagcacacacaaggtgggggcccgggcgcttccagcggtccatagctgctctcaaggttcccgtaccccgcaccacatcacgcacgggtccatggggtcggggaggacagcaggctactcctcccaccctcatccgcgtggggatggcaggacttaccccaaacccagggcctgggacagtgtggatggtgcagtaggcggaggtgtggacggtgcagtaggtggaggtgtggatggtgcaataggtggaggtgtggacggtgtggatggtgcagtaggcggaggtgtggatggtgtggatggtgcaataggtggaggtgtggatggtgtggatggtgcagtaggcggaggtgtggacggtgcagtaggtggaggtgtggatggtgcaataggtggaggtgtggatggtgtggatggtgtggatggtgcaataggtggaggtgtggatggtgtggatggtgcagta

SEQ ID NO: 110332 - DNA, 1061 bp, Homo sapiens
aacattacgatggccgggcacggtggcttacacctgtaatcccagcactttgggaggccgaggtgggcagatcacctgaggtcaggagttcaagaccagcctggccaacttggtgaaacctcatctctattaaaaatgcaaaaagttagctgggcatggtggtgggtgcttgtaatcccaactacttgggaggctgaggcaggagaattgcttgaacctgggaggcggaggttgcagtgagctgagcttgagccactatactccagcctgggcgacacagcaggactgtctcaaaaaaaaaaaaaaaaaaaccccacaaaaaccaaaaacgtgacgactgagacgagacgcgcgctctaacagacgaagaggcagatgaggccgcggaggagcagacgctggaaggaagcaacagccagccaaagggagcaggaggggctgcgaagcgatggggggcactgggagggagccggagggaatgggagggactagggactaggaggggctggtgttggggcaggggtgaggcctggggcagggggatacccatggctgctgagcccctctgagaggagtgaggagagcagttggctgctggtgctgacctcaccctggcaccccatcctcggctgtgcttggggtgggagccgctgggaagggaggggccgctgggaagggaggggccgccgggaaggttgtcctccctgaagtgggggctgccctgacctcacacaaaactctaggcatccagaggagggtggagccaagacccctgtgcctttctggggtttccaggatgagacgccagggactcaagacacattggccacctgatagctggggcaggtgacgcggggtcctcaccagatgtccaggatgagaagcgtggccacgatggcgtagactccgtcgctgaaggcttccacgcgctccttgctgagtggctcgtggaggtcaaacgagaagacttccactgggtgagccgagggctccctgtggcctggggacacgccaggagggtggagctggccaaaccccccatgtggaggtagagcccgcgt

SEQ ID NO: 110333 - DNA, 1065 bp, Homo sapiens
gggctcccattagcacagagcagaagggtgccagtttctatggaatttcagatgaacagcacgtaacagtcagtgtgccaaatacacataaatacggcgttctgaaatttagcacactgggaagtccacatggttcatctgaaaacgtgccagatccaggcagccctgacaggcgctcagccaccctgctggggcctgtgtggccacggcaaggccggcacaaatgcatctattcactgttctcagcgaagacaacgtcccggaccccaaggatgtgaaggagaggttcagcggcagcctcgtggccgccctgagtgcgaccgggccgcgcttcctggcgtacttcggctccttcgccacagtgggactgctgtggttcgcccaccactcactcttcctgcatgtgcgcaaggccacgcgggccatggggctgctgaacacgctctcgctggccttcgtgggtggcctcccactagcctaccagcagacctcggccttcgcccggcagccccgcgatgagctggagcgcgtgcgtgtcagctgcaccatcatcttcctggccagcatcttccagctggccatgtggaccacggcgctgctgcaccaggcggagacgctgcagccctcggtgtggtttggcggccgggagcatgtgctcatgttcgccaagctggcgctgtacccctgtgccagcctgctggccttcgcctccacctgcctgctgagcaggttcagtgtgggcatcttccacctcatgcagatcgccgtgccctgcgccttcctgttgctgcgcctgctcgtgggcctggccctggccaccctgcgggtcctgcggggcctcgcccggcccgaacaccccccgccagcccccacgggccaggacgacccacagtcccagctcctccctgccccctgctagcagccacagagcccactcccagccgtcctcaccagagatggaccagggaggacaggatgctgggcaggggaagccaagtcacgggcaggccgcagtggttcttgcgtggcctggttttattttcattgtgaaatatcatgctctta

SEQ ID NO: 110334 - DNA, 1882 bp, Homo sapiens
ggtgagtccagcaggacccctggtccagggcagcagcaggggcgggaagggccccaggaggctgccacagctgtctcggccggcaggagctccacggggatcccgtgctgggaccttgaagtcctccacacggccaggacgggcacttggaagaggcagcctgggtgggggatgggctgcgcccgcagctggtagaggacacttcctgtctcccgctaggctccacctgttctcccaggtgccctgcttccgggtgctggtgtgtggtggcgatggcactgtgggctgggtgcttggcgccctggaggagacacggtaccgactggcctgcccggagccttctgtggccatcctgcccctgggcacaggtgggctcagccgtgcagccgaggagggggcctcagggtctaccccttcctgtgcagcttttgccgaggcctgggctggctgtcctcgtggtggggtctgcacccagctgatgggcgggtgggtgtggacagatgctctgtgtctgcttgtgtcccagggaatgaccttggtcgagtcctccgctggggggcgggctacagcggcgaggacccgttctccgtactgctgtctgtggacgaggccgacgccgtgctcatggaccgctggaccatcctgctggatgcccacgaggctggcagtgcagagaacgacacggcagacgcagagccccccaaggtacagggcagcccggcgtggggtgccttccaggctcctgcatatgaccccgctacacgcgtcacaacgggcgtcctcttcccagccacactcgggtgtacgcgcccgcatcatcccctctgcaaagcgggcagttgagggagacacagaaagtagccactgctggggattgtgctgagccagctggcgacagagcctggccaggacctgcccatgctgccctctcctgggtgctcggcttggtgccagggtggtccttgctcttgtctctgcctgccggcagagctgttggggagctcagggggcctggtgagggcggccgggtcctgggagatgaacgccctgtccccagatcgtgcagatgagtaactactgtggcattggcatcgacgcggagctgagcctggacttccaccaggcacgggaagaggagcctggcaagttcacaagcaggtaccggagccgcaggggctaccacctgtcaacggcatacctccctcaggtcccccagcaggaacaggcagaggggccggaacccggaggctgcctaaggcggggtagggcttcccctggtgatgggtgacctgccccgtcctgcaggctgcacaacaagggtgtgtacgtgcgggtggggctgcagaagatcagtcactctcggagcctgcacaagcagatccggctgcaggtggagcggcaggaggtggagctgcccagtattgaaggcctcatcttcatcaacatccccaggtgctcgcgggcggggctccccagaggctctgcccggcggggccatgggcaggctcagccctcgtcctgcctgcacctacacctctgtgcccgctctcttatgcggcagctggggctcgggggccgacctgtggggctccgacagcgacaccaggtttgagaagccacgcatggacgacgggctgctggaggttgtgggcgtgacgggcgtcgtgcacatggtgagccgccggccgagtgggcgggcgagcccagggtgggcgtccccggtccccgctgagcccagctggcctctcccgccccagggccaggtccagggtgggcgtccccggtccccgctgagcccggctggcctctcccgccccagggccaggtccagggtgggcgtccctggtccctgctcggctggcctctcccgccccagggccag

SEQ ID NO: 110335 - DNA, 1024 bp, Homo sapiens
aagagcgaggaggggtggcgggcagcctgttgcccttaccaagggtgctgaggtgaggctgccccaccaggttcctgtagcccactgcttcggcccccgggggctccacaagcgcaagttctgtgctgtctgccgcaaggtcctggaggcaccggcgctccactgcgaaggtacctggagcctgcctggctccccacccagtgtcctggtctctgctgcccagggtggcccagcccacccctgctgtgcagcttgtcaggggtgatgggggaggccaagggctggccgcctggcaggccacaggacacttaaaggatgcagggtgctaggtggtggggatggggcagacccaagcaccggcagaggcaggggtcctccgggggcggcagacacctctaaccctgcctgccccccagtgtgtgagctgcacctccacccagactgtgtgcccttcgcctgcagtgactgccgccagtgccaccaggatgggcaccaggatcacgtgagtgtaccggccccagggagccctggggggtggggcgggcccagctgctgactgcccccgctctgcaggacacccatcaccaccactggcgggaggggaacctgccctcgggagcgcgctgcgaggtctgcaggaagacgtgcggctcctctgacgtgctggccggcgtgcgctgcgagtggtgcggggtccaggtgggcgctgggaagtcgagggggtgggggtggggcaggagaggtgcggggttgggtgggtgctgggaggtggaggagttggcggggcggggcaggagaggcgcgggttccaggtgggtgctcgggggcgggcggcaggaaggacacggggtccaggtgggtctgcgtcgtgtggggtctttccctggacctggcgcacctggtgcccccgcaccctggctccaaccccccagctcaggcccttctccccccaggcgcactccctctgctccgcggcgctggctcccgagtgtggcttcgggcgtctgcgctccctggtcctgcc

SEQ ID NO: 110336 - DNA, 2360 bp, Homo sapiens
agggcctcctttcccagttggggttccccggtttccccagggcagctgtggcacaagagtgcagctcttgggtggctcctccctgggaagggtctcagcagtggcttgcagacgtctgctgtgggtccccaggagggagcagaggctgctgggcaggcctggccctgctacagatgggcatcggtggcctccagctccctgtggcgggctcgtgctgtctgcacggcatcgtgcacactgaggaacagctgctcctcctcagccgtgtccccggggccctccccgaggaagcctcctctgctcagaatgtctctcacaggcgggctgcagcaggctagcagcaggctgatgcccagggccccgtagtctcggcgcaggtcctgcagcgtgctcacaccggctgcgtctaggaacagcagcggggcgcagtcgatgaccactgtgtggaagccggccgctgcgggcaccagcgcagccctggtgctaaccgggcccaggtcctcgccctgggcagggcctccctcaccgacccccgtctctgagcccccctccttcctcctggcagccatgcaccctgcgtccagccccgtgaggctgtagagtgactgcaggaagaagtccttgttggcatagtacagcggccccccaaagcggaacacccgcacgccgggctcagggacgaggccctcgaactctgtggcatcctcgtagaaggccgtgtccccgatgcgggccagcagggcggtgcgtgggcgttgggtgcggccggccaggctgagcagcgagaggatgacgccagccagcagcccggcctctgtgctgaccagcatacaggtggccgcggtgcctgcccagaccagcgcgtcagccgggctcatccgccacagccgcgggaggtcccacaccttgcgcagggccccccgcaggctgaccacgatgacgcaggccagcacgcttcgctgtaggtcgtggaacagcggtgccagcgccagcagcaccagcagcaccacggtggcgctgaccacgctggacagctgtgtccggcagccagtggctgtcttcaccaggctcttggccagggcggcgctggtggcgaagcagtggaggaaggcgggtagcacgttgcagcagcccacagccagcagctcctggttggcacgcacagagtagccgtgactgcgggcgaacatctccgccagcgagatggagaaggcggcagccacgagggccagggccacggcatccaaagccacacgctgcatcagcctgggctctgggacctgagggggcatgaaacccgtggggatgtcgccagccacgctcgagccaaagcgcttgtggagctgcccgaagtgcgacacgagtgtggccaccacgatgaccagcagctccgtgggcagcggcaccctcaggcggtgtcggtagcggtctgagagctccttcgcggctagcagcaccgccaggcacaccgtgctggtgaccacgtcgcacacgttggcctgcccggcgccgcgcagcaggctcagccatgtgaggaccaccatgccgggcccctggtgccgcgggatccgcacgcccagcaggtgtttgagctgcgaggtcaggatggtcacggaggcccccatggcaaagccatcgagcagtggctgtgagaggtaggcggacacgaagcccagccggaggacgcccatgaggacctgtggacggagtgcggtcaggccagcaggcgcctggcgggagccacctgcccctcaccagcacctggcatggcccgaggggtggtggtcacggcacaggacctgacaattctgtgttgcggccccgtgtgttccaaaccagactcctcacacgggcctgagttctggttccacgcgtgctcatgcccgcagacaactgtgacatccacgtgagcatcacacgtgcacacagctggccatagacacgtctaacccttgtcacgtgcagcagcccgttttatttcagaattaagacctctggtatcagaaggcaaccccttcctgctgcttcctacacatggtgcccactgccccccatgcagatgtggagccaacgggggccaaggtggacaggccaaggcaggagaccttcgggggtggggaggccatcccccactccacctaggacagaaggcctgggaggccacatggcctcagtccagcaccactgagccacagccacacctggcctgctggtccccaccaaggccatggcccaccggactggctccccgtgcccctcccctcctgcatccacagcctctccgcgtcggtgcctcgccctgggatgccccggcacgccccagctctgcccaagccttgctgtcttgggccagcacctcc

SEQ ID NO: 110337 - DNA, 1126 bp, Homo sapiens
catggggtgtgctgaggccagcagtgctgaggggcggcgtggcggcaccctgtccaggctcagctccggcctattggctctgcggttcctggctgaaaaccaccctgtagcctcctgaagctcacctccccaacggggcaggaacaggctgggctgccaccacgcacatgtgcctaccgtcagaatgtcacagtcactggacacaggtgcaggcaagcctgagtccagctgctccgtgtccacctccctggctccccaggttggcaaacggtcctgctgtccaccccatgcccacaccagagccctccctcccccatccaaaccatcgcctgctctcctggagacacctccacccacccctctgtcacctgccctgtgggtcctggggctggcggaagtctcaggaagaggcctcctatgtccctgccaagctttgtgggtactgggaccccaagtctgctgggggagcagcactcagacactagcctagcccatccgcctggacttgggacagaattctgagaatatgcctggacgggggccccatcagggccagctgggaggggaggagggtgactggcgtctgtctcccctgcccagacagttctgggacgtgaggcgccctttttcccaggctgcaccagctcactgtggaacggccatgacacactgtcccgaggcagcaccgagagggcccagcccgctgcacacagtcaccctgggccggcagagccggaagggcacctgacctttcccttgatctcggaaaacaccgtggcgttagggaggcggtgcttagaggcctgactggtcccacgtgaggcctcgggtctgtcctgtttgcagactccaatgtactttcactttaaacattcttctcagcgacgttaggcaaagactttgctcccaggacaccaggtgcccaggacaccctggagcctgggctgagcctgctgtttgcacgctggcccagggtgtgcgagctccagtctcctggcgggtgtgttggggcagtgagcccagcctggtaggttgacacatgcaggctgggcacagcacccctggggcacagagcgggggtcctggccctcaggcaacattgcaagagttgtgtccccttccctgg

SEQ ID NO: 110338 - DNA, 1141 bp, Homo sapiens
gggtgggcgaaggccctgggcccctggggtggggggtactcctgggcaggctgcacccctatcacccaggccgcacccctatcacccaggccgccgcccaggtcttggacccccttgagccagcgcttcctgatgtggggcgggaggctggcctgcatggagatggggttcatcttgagtcagacgcccttcatcaccttgcaccctccctccgtgggagtcactgaggcgagattcacctgtgctggggggacagcaaggctcctctgcaggtaggtacggactggcgcatgtttccaagtggaacttcgagacgtggaatgagccagaccaccacgactttgacaacgtctccatgaccatgcaaggtgtgcaccgcttcctggggtcctgcccggctgaaagggggcagaggaaggcaggagcagaggctaagccgctcatccccagggcaggtgtagacgcagtgctcccccggcccaggcttcctgaactactacgatgcctgctcggagggtctgcgcgccgccagccccgccctgcggctgggaggccccggcgactccttccacaccccaccgcgatccccgctgagctggggcctcctgcgccactgccacgacggtaccaacttcttcactggggaggcgggcgtgcggctggactacatctccctccacaggaaggtgcgccctgcccctccgtccgccccggtgttctgcgccctcagccgctgtgccccgggccgcgctgaccctggtggtgctgaggcggccccgcccgcagggtgcgcgcagctccatctccatcctggagcaggagaaggtcgtcgcgcagcagatccggcagctcttccccaagttcgcggacacccccatttacaacgacgaggcggacccgctggtgggctggtccctgccacagccgtggagggcggacgtgacctacgcggccatggtggtgaaggtgggccggcccaacgccctgcgcgccccccggccaccttcctcccgagacgggacaggcgagcggtggccgcgccacccggtcccagctgccctggacacccgcaggtcatcgcgcagcatcagaacctgctactggccaacaccacctccgccttcccctacgcgctcctgag

SEQ ID NO: 110339 - DNA, 1083 bp, Homo sapiens
ttgaccccagccttgttcttggcctgacctccccaggtgcctgtggacatacgagatccagttctctcaggacggtaaggcgtacaccccggtcagcaggaagccatcgaccttcaacctctttgtgttcagcccaggtgcgcccaccacccgctgccctggactcggccaccccattcttgggcctcagggcagtactgggtgggggcctcgagaagcctggggtcagggggctttcgggtgggggcaggttccggttggcacacatgtccccttgtctccagacacaggtgctgtctctggctcctaccgagttcgagccctggactactgggcccgaccaggccccttctcggaccctgtgccgtacctggaggtccctgtgccaagagggcccccatccccgggcaatccatgagcctgtgctgagccccagtgggttgcacctccaccggcagtcagcgagctggggctgcactgtgcccatgctgccctcccatcaccccctttgcaatatatttttatattttattattttcttttatatcttggtaccaacgccccctttaaagcggctttgcacaggtcagtctcgggttgaggctctgtggcttggccctgggcacattccagggcagcctccaagggtaaaccccggtggctgatgaggacccagctggagcgaggcctctttccccctcgctcccactcagaccacccccaagcctggactggaagtgtgttgagcccctgggtcaggctggcgagccagctcggccctgcccacccaggggtttccgagatcacccctggtgaggcggcgtgccagtcccttgctttcttacttgttctgcagagcggggagctgaggctgcatgagggaagactcccgtaccccagcacggtggagggtgggatggggtcacgcctgtgcgacccaggaggtggccagcagaaggaaacagtagtgtccaccatggtctgcgtctccccaccacggattgtcttggctccggatttgagacatggcagggccagatgaggacaacttgatgacagtttacagagatggaggcagggtgc

SEQ ID NO: 110340 - DNA, 1036 bp, Homo sapiens
agaccgggcccgggggcgcggggcggcgggatgcggcgcccggggcggcgatgaccgcggagcgcacgccgcgggcccggccctgaccccgccgcccgcccgctgagccccccgccgaggtgagccccccgcgcgcgcggccgcgaccccaggtgggcacacgggggagggcgggggtccggggcgggggcggggaggggcgggttcggggccccagctgggcacgggtcatgcgcgccgccgccgctcctgcgggcccccggcctgccccgcccccgcccccgcgccccacgtgggccccccccagcgcaaatttgtccgctaatggcgcaggcgattatctgcggggcgctgagtgttgtgtgtcctgcgggcagggccggagttacaagcgccaggaatccagacggtgtttggagagggggggcggcgggggagcccggtaattagtgtaaaccctttgtctgcctttgatacccacagcttctccccgctgcggcttcctccgcctggagcgcgggcggggagggcctgtggggagggcggccagacccctgatccccgcggcccgggaccggggagggcggtatctcccagttccacgtgttagtgacggcgcccccaatgtccccaggtccggacaggccgagatgacgccgagccccctgttgctgctcctgctgccgccgctgctgctgggggccttcccgccggccgccgccgcccgaggtgagttctggcgcccagcccggccagcctggcctccgccagcgccgcccccttcccgcccggccctgaaccctgccacagtgcccgcctggcacgcgccatgccccgcccctgccgccccgctcgccaggcccccttccttccagggccccctcacccatgggctgtccacagcacccaccggggctcccctagctggctggaggggttcccctcatgcgtgcttgctggccaggtgggctttagtcctggctccccaggacatgctcctggtcttgcaaacactttcatactcgtacctgcagtc

SEQ ID NO: 110341 - DNA, 1079 bp, Homo sapiens
gtctttcacaaataactctgaaggaagtcgtttcagggctttctgagaagtgccacctttgaacttttgcaagcatggccttgggggccagctctgagtggcctgcctaggaggccactcccctgtcctctgcacccggccagctgcggtgggcaagctgagccctgacccaggtgggcagggtgcctgtccaggggtgccccatgcctggggggtagcggggtcagtgtcggctccctgtgggggcaagagtctgaagggttgtgattcggggaagcaatagccgtgggtgtacggtgctgacctcggcccccagccaggcctcagggccttcctccctcgccccaggcccttccgggcagtggctggcccgtgtgcagcgggctgaggtggacgtgtgggagctgggcccagcccctgcaaggtggggaatcgggccagccgccccgtttccatctcggggccccactcctggaagggaaaataaatcactgtccccttggggggagggagggagccgtgaacaaagtcgcctttggctgggcctggaaacgccgaccgcagactcctttatccattgtgcgggaatcaatgggcctccgggctccctttcagccgcaggccccgcgctgcggccctgtcaggggaaatgttggtttttccccagtcgtggcctccagcccctggcttgcccagccctggcttgcccagccctggctcaggaactgcggccgtgctgggagaggcgggctgtgcccgcagactggaccccggctgctgcatgctggccctctgtgcggcccgggcttgctgctcggcccagggtggactcctttgccccatcagggcctccgccagtgactccaggcctggtgtgtccaggtgacagcctcagcgggtcagcacaggagggagagggatacccacacccctctccccagaggccccctccagggctgcactccctgcctgcctgccactctccctggcggccatccctggagctgctggtcaagccccagggtgcctggctgccctctgcaggcggctccaaggtgggccgcagccccagagccatg

SEQ ID NO: 110342 - DNA, 1079 bp, Homo sapiens
ggggggcggcgggaggatttggaggcatccgccttcttggcgcactgcctccgagtctagtcctccatacctgacagcagtgaggccctgtctcagactcagtttactctcatgtctcgctcccatgtggcccttggtgtcctgcctgtgctgggggcctctcggctgtggctaagtgtgtgtgcagggcaggggctgtgctggaggaggaggctggggggtgtcttggcagggtgcacggccccggaggtggcacagtgctgctgtcatgccccggcgggggttccctgtgtttcttcctggctgcagtgcgaggcagccggtcttcccaccaggtgcctgtgccctcaggtcctgactcagtttccccataggctgcgtgggttggacgcccgtccaggtggcgtggtgccctggccgctgtcctggtgtgatcattccccaggaatctggggggatgggcttcctcctgggcaggccctcctgcggggggtcttgggccggcaacagcagggggtccggggagcccaggtgggggtgggataggcctggcgagggggagggaggctgtttgctttaggataagcctggctcctctggcccagctgcctctgcccgtgcctacagcgcttgcaggccggccctgggggccacgcttccggccatccagcggtcatttgtctctgccccctttctcagtggtgaccacaggcgggggtcccgcctccctgtctgtgcctgtcatcctgcacctcccgcatgcctttggggacccttacctcaccaagccttgcttgtatctgcctggggcagggtgggggctgggaaaccttcccgaagtgtagctggggctttcagcctctgaggtgggctccctccccagatgtggggggctgggtcagtgtgctcccacccaggacagggccaggcactcgctctcttgcttcttctggacagttgtgtgggtgaacacttgtgtgcacccatgaacatgcacgtgtgaggcctgtgcccaggtagccagccaggaggcccaggcacccctgcaggctgtgggccacaggggctgggctggccag

SEQ ID NO: 110343 - DNA, 1049 bp, Homo sapiens
ctaaggtgcctggcagggtacggcccttgggggtgggcagacagacctgggcatctgtggtccctgaactcaggtctgatattgacacagacgtgggtgctgcacagactctcatccacacattgcacaggctcaggcagcccgccgtgctcggttgcttgtggatagctgtggggtcgctggcccatgcccaggcccggctgggccctgggctgatggttgggtgggaattaggtgaggggcctggggcctctttgggacccaccaggccccccatccccctactgcccttgtccttggggggccactgtcccctctgacctcgggtgtacggctgcttcctgtatgaccagaaggagactctgcccttttggttggtggttttcgagagttaccaagcgcagctgttttgcatcctctggggaccctgctcccttctcgtgtctcaaagagccagcctctggggccacggggctgccccggccatgagaggctgctgacgtggtgtttgctgggccagtgctcagggctttggtgcatgtgggcagctgaggcctgggtcaggggcactgcacctcggcccctctgctcatcttgggcaggtgacccaggtggagctcaggcccgaggtctgtgctgggccgtgggtccccttttgaccgcccccccggctccggaccccaagcccctcctcgctgactgttcctcggtcccacccgcaggccccccaaagatggcggacaaggtggtcccacggcaggtggcccggctgggccgcactgtgcggctgcagtgcccagtggagggggacccgccgccgctgaccatgtggaccaaggatggccgcaccatccacagcggctggagccgcttccgcgtgctgccgcaggggctgaaggtgaagcaggtggagcgggaggatgccggcgtgtacgtgtgcaaggccaccaacggcttcggcagcctgagcgtcaactacaccctcgtcgtgctgggttagtcgctgctgcggtcagaggtcatgggctgggttggagccaggcaggggt

SEQ ID NO: 110344 - DNA, 1069 bp, Homo sapiens
atcagggtcacctgcgcccagtgtgggccagcggcccttgcccagctgtccctgggattctgggctgtgggtgtgtggcgcagccccctgcctgggtgtccagggctgtcccggctggggctgggggagctagaggccacgggggagttgggggagctcctcagggcccccctcacctgccctccctgtgcacctccgtctctctgcagatgacattagcccagggaaggagagcctggggcccgacagctcctctgggggtcaagaggaccccgccagccagcagtggggtgagcagggggtgacgggggtggggggcgtccgtctgtcccggccccttggctgcatccccgtcctctgacctccacgccaccccaccccgcagcacgaccgcgcttcacacagccctccaagatgaggcgccgggtgatcgcacggcccgtgggtagctccgtgcggctcaagtgcgtggccagcgggcaccctcggcccgacatcacgtggatgaaggacgaccaggccttgacgcgcccagaggccgctgagcccaggaagaagaagtggacactgagcctgaagaacctgcggccggaggacagcggcaaatacacctgccgcgtgtcgaaccgcgcgggcgccatcaacgccacctacaaggtggatgtgatccgtgagtgtggccccgggcgctggcgggcggggggtgctggtgggcgggggcgctggcgggcgggggtgctggtgggcgggggcgctggtgggcgggggcactggcagggcttgggggtggtgggctgggggtgctggtgggcccagggtgctggcggggtagagtccggcgcggcccaggagccatgcccgcgtgccacgttcccacagagcggacccgttccaagcccgtgctcacaggcacgcaccccgtgaacacgacggtggacttcggggggaccacgtccttccagtgcaaggtgcgcagcgacgtgaagccggtgatccagtggctgaagcgcgtggagtacggcgccgagggccgccacaactccaccatcgatgtgggcggccagaagtt

SEQ ID NO: 110345 - DNA, 1060 bp, Homo sapiens
tctattaacaggaattgagttggtgtgaccagtatgagcattggcagatgctctttgtggagtgactgcgacccctagacccacgggcctaacgactggcactcacagtgcagtagccgtggtggcatctctacacaccccatcttcctcttcaagttatatccttctggtcttttgtccctttcactgattttccataattgtattgttttattattggtagacaatactgagcagaatttttctcagggaaaccacctagctttgttgaacttttcttctctttctaaacttttcaagtggtcaaactctggctcatcgttctgaaaggtcctgtaaacatggtattcccttctgcttaagatgggattttgttcatctgctcctgttgaaggattatgactctgccacctgtatctccagttcctactaattctccagaatgaataagttctactggggaagaaaaaagctaatgaaatagttatggtcaatagttatagaaaaattaaaattccacaccactcgtgacatcatctgctacatcgtcatctattgctcctttcacctgagaaacctctactgagtgtcatccctcctccagctcctgccatagggaaacaaaaatacacatatggccccattatgtttcaccttgtgaagggctcttccttctcagcgcaaaaatatctgtacatacacctaagaaagcttgcagcagggggtaaactactttccttgacctaaatgttggttacacattatgattctgaaaaattgactgaggtatacactcataatgtgtgtacttggccatgtgttagctcacagaaactgtaactaaaaacttgcaaatacttaaaaatgaatatacttctaggtaacacatgggtcacaggagaaactgagtaaaaatatcaaaattcaaagataaaaatatagtatcatcaaatacatatactgcaggcaaaaatgaacacagaagggaagttatgaccctatagtgtaatattacagaggaaaggttgaaaattaatcctaagcacccatcttaaagaac

SEQ ID NO: 110346 - DNA, 1017 bp, Homo sapiens
gtgcttaggattaattttcaacctttcctctgtaatattacactatagggtcataacttcccttctgtgttcatttttgcctgcagtatatgtatttgatgatactatatttttatctttgaattttgatatttttactcagtttctcctgtgacccatgtgttacctagaagtatattcatttttaagtatttgcaagtttttagttacagtttctgtgagctaacacatggccaagtacacacattatgagtgtatacctcagtcaatttttcagaatcataatgtgtaaccaacatttaggtcaaggaaagtagtttaccccctgctgcaagctttcttaggtgtatgtacagatatttttgcgctgagaaggaagagcccttcacaaggtgaaacataatggggccatatgtgtatttttgtttccctatggcaggagctggaggagggatgacactcagtagaggtttctcaggtgaaaggagcaatagatgacgatgtagcagatgatgtcacgagtggtgtggaattttaatttttctataactattgaccataactatttcattagcttttttcttccccagtagaacttattcattctggagaattagtaggaactggagatacaggtggcagagtcataatccttcaacaggagcagatgaacaaaatcccatcttaagcagaagggaataccatgtttacaggacctttcagaacgatgagccagagtttgaccacttgaaaagtttagaaagagaagaaaagttcaacaaagctaggtggtttccctgagaaaaattctgctcagtattgtctaccaataataaaacaatacaattatggaaaatcagtgaaagggacaaaagaccagaaggatataacttgaagaggaagatggggtgtgtagagatgccaccacggctactgcactgtgagtgccagtcgttaggcccgtgggtctaggggtcgcagtcactccacaaagagcatctgccaatgctcatactg

SEQ ID NO: 110347 - DNA, 1018 bp, Homo sapiens
tggagctggggagggtcgggcagccccagcacctcaggctactgcgccttggtggggaactctcctgcggctgctgatgaacacccgggctctggtctcctgtagacttccgccccgggcacgggagcaaggggaggctgcaggcagctccgggggccttggcaggaagttgggagggtcgggacagtccctctggggtggcccaagcagggcacagggcagggagccaggctcttcggggccccaccccaggctggccctgcaccccatcctgccttctctccccactgtgggcccagaacttgccccgtgggggccgggaagcacccaccatccccacccctagctgctctcagccagagcccagctggacttgcaggattgattttccagcaaaaaacaacagcagagaaacccaagagcagctgcatgagccctcccaggcctacccccgcagccggcactccctgcagcaaagaaaaccatctggccactgggccctgagcccggcgcccggaggaggacctctgccccgctgagcagctctgctccccaggctggccctgggcctctcgcggcctgacccgctccccttggcatcaagcaccaggagggacggggtggcccggccagggcgtgggtgttccccggcccctctgagcaccagcacctggtgagtctacctccgcttccccaagcccttgaccactgccctggacagcctcagccgccccctgacccgaccttcaaacgggccaagggcttcccatgtagggtccgaaaacatccctgataggcaggacatgagacttgaacaatataaggttaggtgcatctgtaagcgcggcgcatggttaggcagccggaccctctggagcatgtgtaagcgcggcgcatggttaggcagccggaccctctggagcatgtgtaagcgcggcgcatggttaggcagccggaccctctggagcatgtgtaagcgcggcgcatggttaggcagccggaccctctggagcatgtg

SEQ ID NO: 110348 - DNA, 1018 bp, Homo sapiens; identical to SEQ ID NO: 110347

SEQ ID NO: 110349 - DNA, 1024 bp, Homo sapiens
catgtccctgtcccacggcctgccccctgtggcccacccgccccacgccccttctcctggccaaaccgtcaagcccgaggcggatagagaccacgccagtgaccagttgtagcccgggaggagctctccagcctcggcgcctgggcagagggcccggaaaccctcggaccagagtgtgtggaggaggcatctgtgtggtggccctggcactgcagagactggtccgggctgtcaggaggcgggagggggcagcgctgggcctcgtgtcgcttgtcgtcgtccgtcctgtgggcgctctgccctgtgtccttcgcgttcctcgttaagcagaagaagtcagtagttattctcccatgaacgttcttgtctgtgtacagtttttagaacattacaaaggatctgtttgcttagctgtcaacaaaaagaaaacctgaaggagcatttggaagtcaatttgaggtttttttttttgttttttttttttttgtatgttggaacgtgccccagaatgaggcagttggcaaacttctcaggacaatgaatccttcccgtttttctttttatgccacacagtgcattgttttttctacctgcttgtcttatttttagaataatttagaaaaacaaaacaaaggctgtttttcctaattttggcatgaacccccccttgttccaaatgaagacggcatcacgaagcagctccaaaaggaaaagcttgggcggtgcccagcgtgcccgctgcccatcgacgtctgtcctggggacgtggagggtggcagcgtccccgcctgcaccagtgccgtcctgctgatgtggtaggctagcaatattttggttaaaatcatgtttgtgactgtaaccatttgtatgaattattttaaagaaataaaaatcctggaaagagccagcgtgcccagcatctattctggtgactttctctcatgaggacacgggtgagcctcagtcctggctctggtgacctccacggctcagctcagcctctctgaagtgggcggcctaagag

SEQ ID NO: 110350 - DNA, 1044 bp, Homo sapiens
aggtgggcgtgggggccgctcggtcaggcctgggggtcccttcctgccagccccagatgctcatgggctcgcatccgcctggcagccaggcccatgttctgccagctcagggcccgtggtgctctcactgcacccccagcagggacctctaaggccaaagtcaagttgagccctggcgtcgtgtcttacacacaggacctgctgggaagttgctgggctgagcagacaggtccctcagcaagctgggcacgtgctctgggctgggggtccccacgctgcaagggtgccagtgcccagagagacaggaccctgccgtgccttgggagccccggggctgagagggaggagcacactgccaagaatcctgctgcccgtgtcttcaacccagtgggccacgctcctggggccccctcagagccacagctgttccttcctcctgcatctcccaggccggatcccagacagcctgaagaactgtgtcaacaaggaccatctgacagccgccacccactgggccagcatggaccccgccgtcgtgcaccctgagctcaatggggctgcctataggtgagcaggcccgctggcccagaacagcctccaggagggccccaggcttcccctggatcccagcacagcccctggtgggaggggcggcgtctccactgactgacctggaggatctgggtagaattggtaaggccaacctcacctgaaaggcccatgagaaccagggcctcttggaaggagcctgggctggggtggccttcagggctcagtggacacaggagtgccatgggcacggggcctgtgggaggagggggctttgggtgaggcgaagacctcatgttcaagtcacctggagacaccagggctcccctccccagccctgagaagtagctgccataggcaggaacatccgtgtaaaggccgggatccttaccctgactgctggtcctcctggagaggccccctcggtgctgccgatgctaggagggcaggtggggcctggccaggccgcctacaggtgggcctcacggatggacc

SEQ ID NO: 110351 - DNA, 1089 bp, Homo sapiens
ttggtcttctcagggaggcctgccctggctgccgcctttgaaactgcgcccacttcccacccgccccggcgctcaacctgcttccttcctgtgtagcggttccctctgaggcaatgcaggagacaccacgttcgcgggcttggggtcctgtgtcctttgcagccatgctgttggctcacagtgggcacgagcactctgcagacccttccccgaggaggagccggccccagccagacacggtggctcaagctccacggctcctgtgctgggacccgtgccagccttggactgctggggtgggggcaggcacgtctgcctgggatggctttctctgccgctccactcgaaggggtcaggacctgagcccagcggggcctccctggtctggaagtttccctcctgccccctttgccgtctccacgtagtggtggctggaattgagatgccggaaacattgatgggtggatcgaaaggccagcggaggggcctgggcacggaggacatgtgttgggtgggtggagacccactgaccagtccgtttgacactgagtggttcatgtcacgtcctgtggacaggctgcaggggagtggtgtggctggcagctggtgtgggccgaggggctagtgtaccctttccacccctgtgcatctcctccgccttggcagtgggcgcgttggagcggacgtggagcgctcgtgtggagcgtgcgtgggcaccttggcttgaccacagctggtgtcatccttggcagatggtcaaactgaggcacagaggccactccgaccctggctttcggggccggcctcccggccacgggtgagcaagggtctcacactgtgtcttgacgccaccaggtcgcgtggggcaggcagtggcgctgcgggccaaggccttcggcttcaacgtgctcttctacgacccttacttgtcggatggcgtggagcgggcgctggggctgcagcgtgtcagcaccctgcaggacctgctcttccacagcgactgcgtgaccctgcactgcggcctcaacgagcacaaccaccacctcatcaacgacttcaccgtcaagcaggtgcgtggagccggggaca

SEQ ID NO: 110352 - DNA, 1038 bp, Homo sapiens
gaggcctgaggacatgtgcggatgtccacgtaggggtgtgcaggcggggccggcacccagattctgacctggccacagcctcccagcagggtacccccgagaggaatcggggtggcgaggtgacgcggggagacacgtgcttgtctcttcctgggctgccagcgctgagtcgggaggggtcagggcagcgtctcacaccccagccctaccacacaccgagcagttgccgtgtgtgtgctgccacgtgaacctaaagtggaggtggggctcctggagttgctctgttgcgcccgacctgtgagcaacgtgttcatctcgtggcctcccggggtggccttggggacacggcctttggcttcttccttgggaagcttcaaacccgctccagtcacggcggccccggtgtcctcccggaggctgggcccggcccgggggtgaccgccgtgtccttgtccccacaggcattgccgtctgcaacgtgcccgcggcgtctgtggaggagacggccgactcgacgctgtgccacatcctgaacctgtaccggcgggccacctggctgcaccaggcgctgcgggagggcacacgagtccagagcgtcgagcagatccgcgaggtggcgtccggcgctgccaggatccgcggggagaccttgggcatcatcggacttggtgcgtcggccgcagctccacgcctgtgtccctccctgtgtctggcgctgccgctcttcagctgtgcccaggaggagaggcccggggcggggtggggctgctgcaggtgtcggtcccaacccaggacaggactgagtgcgcacaggcaccagggcccgggagtcccaggcgtgtgccctacgtgcacggacgtcacagcacacgtgggtctcacacaggcacacacagataacgtacacggatgccacagcacacacagcctcacacagacatcacagcacgtgggtctcatgggcacatgcagataacacacacggacgtcacagcactcacatgggcttcatgggcacatagataacacacggatgtc

SEQ ID NO: 110353 - DNA, 1063 bp, Homo sapiens
ggcccgggaatcagtgacatgagatagaagcttccagaacaggaggcagagcctttccgcagtttccctgcccacagcacacaccctgtgccctccgtcccctggttcttggacactggggacatctggatgcggctagagcctgtgggggtggccgcagccctgggggactgttcccaggagtaggcctcggggccacaggggcgcggcctcgggcctggcactgcaacctcagggtgagcgcccttcgtgtgtgcggcaggagccggggcccctggctgtcagcaggcccccgagtccaggtaggtcccagacagcagtcccgggtgtggcagatgcagtgaggtccacttctgaggcgttccctggagtctgtgagttctggtcggaccttcgatggcattttaatgtgtctcttgtgtttgatttttagtaagactttgaccccgacgcaggcttcagtgattgccgcggatcagaagcctgagcactttggctcgagacaattaaggacgtgggatgaggctccgagacaggacgcggttctgcctggggatcctgaagataaaaagctttgaaaagtcgaattcatggtcgtggaagctgagcccatattaagagatgtcaggttggtaggggttcctggcgtcggcggcagagtgaagccggccggtctctttgcgaccgtgtggaggaggcactgcctcggatcaagtcgagggacctgggctgcatgggcgtcgggccggactgctgccacctgacccccggtgtgctctgggcgaggtcaggtgcccctcgagggagggcttcctgcacacctggtggcagagcacagctgtggtcaggcctgtccgtggcatctgctgtctgtttctgtcggaaagtgtctgagaggcacggagggcctccatgtggaggccgccagcacgagggtggagccccacacggaaccctggaaatctcaggtgtccacccggctggcccaggagcagggccgtggcccctgtggagctgttccttgtggttggtctgcgctctctggcccggaagtgcgtgcagt

SEQ ID NO: 110354 - DNA, 3085 bp, Homo sapiens
gctgcgtgagccgagccagcgacgactctggcagcgctaagggtggcgaatttggggctggggtggaagccggagtttgcggggcgtggggtctctggcgcccaggcagacggagtgcgcggcgtgcccagccagtgcccggccgccctcccgggagcccagggctgggaggtgccggctgcgccggtcgctagttaggaactgtagggagaaacctcacggcctgatggcacccagcgacctttttgatgggcgtcaccaaacctgaaatacagctcttgccgtccggctgccggttgcgtgaccttgggtggtcacctagccacgtcgcacttcttagaatgaaatttgtgctcctagtagaaggagccgatacttgttctttacctagttagtagaggatttgatatgaagcacctgggaaggaattccttaaaagatcaaggtcatagctttcctagagctgcggctgagcttcgtggttctgtgttgccttcctggagagctgcgtagtttctctctcctcccagagcgccctggtgttcacgtccgtctgaggacggacggtgtggcgacaggtgtggaggatgcagtatggccaggttgctgtgcgttcccccagccccagggcagttcagcgaagggctgaagagcacaggctgtgagccatcctgctggggtgtgaatcaggcttctctgtattcgtccttactgggagacatcagggcccggttggtgactgtttattcttgtcaggtttaagcagtggtagcgcctgtgtcacctcagggtgaaatgagtgaccacgtattgtttcaaacagtgcctagcattcattaaaaggtccctgctacagttagcgctgctgaagtcaggctgtaccctgctgtagctggtcttcataggaaagcagaagcaagcttctcctcctctttattaactagcggtttatttcatatttttaaaaagaaacggggtttcactgttgcctagggtggttttggattccaggacttaagcgatcctcctgccttttgacctcccaaagcgctgggctgacaggtgtgagccacgcgcccgccacactaatggtttcgcagtggggtttcatggtgcttgtgtgtccagcacttcttttgatcaaggaagggagggcaatgttgctgacgttaccaaaggtctagcctcttgctagatccctccaagatgtaggtggttggtttttaatactcagtgacattggtggatctctgttggtttagagatggagaccctgcagctgagagaagtctatacaaggacattgtggtgatattagtagggagtcctaaccactgaccactttgtctcacgcagtgcacctccaggcctgtcatttcagctaacacacaagaaggtttgaagatcagaaccgtggtggtttgtcacttctggtactggctggtgaatgtgggaaacactagataggaaaagtttccagaaatcctttcattgtgtattgaaggaactaggaagggagatggaaggtctccggaaaggattcttcttcaggtcttctgctgttttgtaatcgtgaatgtaatttgtattccagagtgattgcatagcttctgattaaaatagtcatgcagatagtcatacaggtaaagaaatattatagtgtcataatttctctgttgacacttgtgtcactactgagttaaaactttttttcatagaagttttcaggagtgattcctagtggataatggaggtgttttgctgggaaactagggatccttgatttagaagcatttattggtatagaactaaacagaacatgctgagctcacagctcaagagctgcactcttcagtttccaggaggggccagtgcagatgtcagagaagggaccgagggctgcaggaccggggttgtggaaggtggggggtggatgttctgcttctctagtctgagagcaagtcctcctgcagggtggtagcagctggcatgctctggactggatcttcacctggtaatagttaaactgctttcctgccatgtgagtcctccacagactcacaggggattcctttctcttcagagggcttggtagccctaggtgggtttcagcagtaacacttgggatgtctgcttcctcacagcgtcagggcggctggtggggctcctgggtgcctggcaggtacttatttttctattttcctggtgaagtgggaagagaatggaacagacgtgaattgctgcagccaacacgcactgaccttgggcacctctgtcgtcatgagcttctatttccaccaaaggggtggaccggcctgcgaacgtttgggctggaggagcctttgtcggtggtgggggctgtgcagtctaggatgtctagcagcatccctggtgtctgcctgccagatgccaagagcatgcccccaaaatgtcttcagacattgctagatgtgccctgggggcatgcacacacccctgagaattgctgggctggatcctgctttaagggacttgtttcttcctcttaccaaacggaggtgtggctcatgaggactcagccttgcgtcctggctgtggctgtgtctttttgctgtcaaatgctgtgaacgccgtccggtgtagggtggtgggtaatgccttgtgggggaggggaaagatgaataactcaccatcttttttttttttttttttcttttttgagacggagtctcactctgttgcccaggctggagcgcggtggcacaatctcagctcactgcaacctctgcctcccagattcaagcaattctcctacctcagcctcccgagtagctgagattacaggcacccgccaccatgcccagctaattttttgtattttttagtagagacgtggtttctccatgttgtccagctggtcttgaactcctgacctcaggaattcaccatctttcaattcaacatgcatagttcaccatcttgaattggaagcccttgctttcattattttgtaaaaggtttttttttttctgattataaaagtaatttgatgagttgggtgcggtggtgtgcgcctgtagtcccagctaattgggaggctgaggcg

SEQ ID NO: 110355 - DNA, 1092 bp, Homo sapiens
cgttcctcacccgtgcctgtgcccccctcacccgtgcctgtgcctccctcacttgcgctgtgcccccctcacctgtgctgtgccctttgccttgtggctgctcctgcacttggttctctctctgttggtcggttttcccattggctgtgcagctccctggtgtgcacgtggctctgagtcttcctctcgtgaaaaccccttccttgcccccgtcctcctccagctactactccctgtctctgccccttcatgtctctcttcctgttttacctaaatcagatttttgccccccaacactccacccagatgttcctcttgaggacaggatgatgctcctgaaagcggtcagtccacagcggaccccactgcctcgagacgctcccatcactcggctcccgtgacaccatcctctgggctctccccacccctcgctgcatgtcctcacttgcctatgctgtcttctctagtcttggaggccttttgttttatgtcaccagccagccctccagaggttgtgtggcttcacagacggtctccaagctcctgtccccacactgctgccctccccaggcctctctccctgaggccatcccgtgtagtcacctcccggagctctcttcgcatgtctggaaggcagttcaaagatacgataccaggcgcaaaaccaaatgccgcatctcggccttggggccccagacgagccccagacctgccttactaagccacccttcccaagtcagttgacagcgatgtcccccggcacttgttcagtgacagccgagaactcggaggttttctcgatttctgtttctcacgtttatccttgagtccacgatggctgctggggctgcggccttcgcggccaggaggagggtaagggggaatcagtgccgccctgcgtggccagctccctgcgtgggggccttagtggacatcctcccaagcgtttacacttcagctcattccccagagcacggggctggccatttctagctttggaggagcctgaaaaagtacgtgcgtatgtgtgtgtgtatacatacatatagagagagagcacgcgcttgagtgtgggctcattgctgccctaaa

SEQ ID NO: 110356 - DNA, 1057 bp, Homo sapiens
gaaaaccgtaatgatatcatattgttctttttgtgtttgataaatatttcttatttataatgaaagggacaccaagaagggctgggccttgccagacaccacagccaggtatgtaactgccaaagttgtgaccttgtggcagaacagctggctccctttgaaatactttatggaaaggtgagagaggaagctctgctgatgttgtgattatgaactgacactcctgcccgcttgcagtctctgttgtttggtcagggagtgacctggggatgagggcactggaccgcgtggggcacggccccggctcttccgtgctgccggcttccgaggctggggctgcgtggcgtgcgtgtgtgccgctgccgcaggtcgcataccctttccaagacggaccagtggctttaaaaggttcctgcaaggaagtggctggctaaggctgggcctaactgggcgtgcacacaacagggagcgcagagctcagggccgacagcactcttgccactgcgagctttgtagggcgcaacatcaatctggttacatcccctcagaagttgactggaagtgtcattttttcaagaagcctcttaggggattcgaagcgtttttccttggtgagcctccctcagggtatgtgctgtgcttggggagattagctcaggatggcaggaagccaccgtgattacatgccccgcaccagaacatgagactggcccctccaggacggagagggatgtaaactgccacccagggcttaatccagcacttctggccctgtgatgagcttcgtgatcaatatttagaaacctcttctggttaattgcaaaagacaaagagcctcatgcattggggaaattcttccttcccgtgctggtgaaaacatgatgatgacacactgaaatgcgttgcgttttgtcagcaaattctgtcagaagcacggcaaacgctggagaaggtttgaggaagcgcatcctgaagctgatggcaccgtgtgggggcagcgggcgggcaggtgcagacgtttcacgcatgtctccactcacactgcttgccacattct

SEQ ID NO: 110357 - DNA, 1050 bp, Homo sapiens
cagcctgagcagcagagtgacgccctatatgaatgaatgaataagtaagtgaataagtaaaaataaataagcactggacaagggacacagacaaaatgtgtagaaggaaaaaagtgttaggttgaatcatatacagttgttatttttgtaagttaaaagtgatgaccgaatagacctataacaggtgaagttactacaaaaaacctcacaaagaaaagcctgagaccagatggtttcactgatgaattctgttaaacatttaaagaaggatttataccaactcttctaaaaacagttaaggagggattacatcccacctccttctatgaggccagtataactttgatataaccttgaaccagacaaagacatcacaagaaaaccatagaccattgttccagatgagagaaaatagatgccaaaatattcaacaaaatcttagaaaactaagaaaatctaagaaaacaaaatatagaaaggattatgtgtcaggactaagtaggatttcccccagaaatgcaaagttggttcaacgtgtgaaaatcaatgtcgtgtatcatattaatagaatgaaggacaacaaccacataatcatctcaatagatgcaacaaaagtactttacactgtgagaaatcagtgtttgctgtttaagttgcccagtctgtgatatttttgttacagcagcctgagctgactaagacagctgctcagaacagggagaaaatgtttgccagtcatatatctgttaagggtttagtattcagaataggttaggaactcttctagttcattaatacaaaggcaaaagaaaacttgtttttttgagttggattctcactctgtcaccaggctggagtgcagtacagtggcgccatctcggctcactgcaagctccgcttcccgggttcacgccattcttttgcttcagcctcccaagtagctgggactacaggcacctgccaccatgcccggctaatttttttgtatttttagtagagacggggtttcactgtgttagccaggttggtctcgatctcctgacctcgtga

SEQ ID NO: 110358 - DNA, 1090 bp, Homo sapiens
ccagcccgtgtggagcccacgccccatgcacccttgtccctgcccggcctggcctcgtgtggtggcgcctgcagccgcagcagcctggctgatcaccggccaggcctgtgttttaccgtctgatagcctcacaccccggtcactcctctcctgtttggaaatttctttaactgttcgttattctggatgaactttgggattattttgtcaacatacacgtacaatgtttttggcaaaaattggggttgcttctcatccagggatgtggagtggctctccgttcagcagggcttttgtgggtcttggttgaggtttagagtagatacttttgagaccatgaaccttctgagacttctgcctctacaagtgccatgaggagacctggtgtgtcctgggtgtggggctggtggggctcacaccaggggagcagatccctcaccatcctccttcctctccaggtgccctacgagacgctgaacaaacgctttcgcgccgctcagaagaacattgaccgggagaccagccacgtcaccatggtggtggccgagctggagaagacgttgagcggctgccccgccgtggactccgtggtcagcctgctggacggcgtggtggagaagctcagcgtcctcaagaggaaggttggtcccgcctggcggtccctcttcagtctggggcatggacaccccttttgtctcgaaaatgagtcctaagacaggcaagctgcaatgatgggaacgcgggaggtgcggttgggggcccccttccctgctgtctgccttctggggccactgtcggctgagcaggccagcttcctgttcctgtagggaccgtgttgtcttgctccaggagtgtccagagtccaggccacagggagaccaggatgtatagcaggttgattgattttttttttttttttttttttttgagacagagtcccactgtgtcattcaggctggagttcagtggtgcgatctcagctcactgcagcctccacctccggggttcaggcgattctcctgcctcagcctcacgagtagctgggactacaggcgcccaccaccacgcccgtctaatttttgtattgtta

SEQ ID NO: 110359 - DNA, 2038 bp, Homo sapiens
aaaagtgattgggcaggcacagtggctcacgcctgcaatcccagcactttgggaggccaaggcaggcggatcacctgaggtcaggaattcaagaccagcctggccaacatggcgaaaccccgtctctattaaaaatacaaaaaaattagccgggcatggtgtacgcctgtggtcccagctactcgggaggctgaggcaggagaatcacttgaacccaggagctggaggttgcagtgagctgagatcgcaccactgcacttcagcctgcacagagactctgtctccaaaaaaaaaaaaaaattcagaatttaaaagggactaaaatttcaagaaatgggaaatataataaccaaaaatgaaaaactcaacatttgcctataacagtttaacagttaacagacaaagctaaagacagaattagtgaactggagggtgatcgagaatggagcacagagactgaaaaatcaaagtggctgcgagagtaaagcatggaatagagcagaaacctgtggcatgtttcaccagagcccaccagtgggtggggacagagatggtgcggggagagtgaccaaggtttcagaactgatgagtaccaccaggtcagaatccgacacagagtaagtgaaaataaaccgacatgggattttcccgtggtggaactgaagaaaacagagacaaagaaatatttgaaaagctcctgagggcaaaagatgacttccaaaggggcaacagacagccggacagctgatttctgcacagcagttggaagccaaaattggtagaatgtgctgaaagaagccagcccggatcctggatctgtccagtagtcagtcgccgtgtgtgctgtcaaatttttagcgaagaattcagttcctcagttgcaccactgcccttaagtgtgtggcagccacgtgggctggtggcagctgtgttgggcagcacaggcctggaacgtttctatctagcccgattcatttttaacaaaattgactttaagaaaaaaagtattgcaaaagatttttttaaagtcaccttataatgataaacagtttaaccagaaaggcatagcaaatttgaaattgtatgcatctggcaacatggcttcagggtatattaatataaagccagaaatagcagagagaagctgcagatccagggtggtggattttcactgcctccgtctgcagctcttgggccaggcacacctgcctagcggactcggtagagcacggttttttttctgtcccgtaatccctgcttttctccttgtgagtgttgtggattggggcagcctggcctcccttggtgcagggctgcggggcatccctgtcctgaacgtgcctctgttgtgtgtggctcaggcggtggaatccatccaggccgaggacgagagcgccaagctgtgcaagcgccggatcgagcacctcaaagagcatagcagcgaccagcccgcggcggccagcgtgtggaagaggaagcgcatggatcgcatgatggtggagcacctgctgcgttgcggctactacaacacggctgtcaagctggcgcgccagagcggcatcgaggtgggtgcccgccagacgcaggcacagcgccccagctggccccaggcctatggccagccgccctgtggcatgtcccccggcatgcctgtgtccctacatgcttgtgttcccctccccccacccccgtatgcttgtgttcccctccccccacccccgtgtgcgtgtgtcccccctccagtgtgtgtgtgtgtccccctccccgtgtgcgtgtccccctccccccatgtgcatgtccccacccctgtgtgcgtgtgtccccttcccgtgtgtgtgcccccccccccccaatgtgcgtgtttctcccccaccccgtgtgtgtgtctgcgctgtggtgagggcctcctccccagctgagaggccctgaccctttgtggaaacgcacctgggacttagccttctgaaggcaggaagtcagtgtctaagcggctctccaggttcttctcatttccctgtggtgtctgcacacatcctgc

SEQ ID NO: 110360 - DNA, 1082 bp, Homo sapiens
tcccttgcccggctatggctgctgtctacgtgagcgtccgaccttttggtccttgggggctgttctgttcctaggatctcagagcggccctgagtagtccacgagtgcagacccacagtgtggactggagatgcatctcgagtggtggccggtgctgggcctgcctcatggaggctggggtgtgggagggtggcatgggggccttgagccagcacattctgatcaggtgctgcttccttcctctaaggacctagtgaatattgagatgttcctgacggccaaagaggtggaggagtccctggagaggcgtgagacggccacctgcctggcctggtgccatgacaacaagtcccggctccggaagatgaaggtgcacggactcccaggttggggtgggagtgggtcggggccgaggctgcgccacctgccctggagccagcacccccttgcctggtggttcacagtagtttggttttggtttgtaaggtgggggttgggtttgggagtttttttggtggctgtgttacacttttaggctaaaatctggaaaagtgcacctcatttggcattacagtttgtgtacagctggcatgaggctcagaaggagtgggttacaggaggctgaccatgtgcacacagagtgttggggctgctgggcttagagcctggagacaggtcagtcctgctccatgggggtactccatgggctccctgtgctcagtcatagacacagaaaagctggttgggaagtcattctccatctgcgaggctgcagagctctgggctgtgatattgttaatgaatacccacttttttttttttttttttttttttttttttgagacggagtctcgctttgtcgccagggtggagtgcagtggcacgatcttggctcacttgcctccggtgttcaagcgattctcttgccttggcctcctgagtagctgggattataggcatgcgccaccatgcccggctaatttttgtatttttagtagacatgggatttcaccacgttggccaggatggtcttgatctcctgaccttgtgatccacctgcctcaacctcccaaagtgctggg

SEQ ID NO: 110361 - DNA, 1049 bp, Homo sapiens
tggaactctgggcgagagggctggcgtgcttgcccactgcctgttcctaggtgccagcagaacgtccctgctgggtggctcttgtcctgcctggagaggttgcgtggccggggagagggcggcgggcgacggagccactctgtgcctgtggtcctggtgctggaggccggggtgagaaggcgcaggcttcttgtctccaccgaggcctcagtggggctgtttagctgtcgagtgcagcacttcctgtgcctcgaaagacagccccgtgtagtcagcatggcgcccacatagccagaagggcacgcagcccagggcagagtggccacagggggctgggctcaccccggctgccctgagtggcccccaacccttccttgacccgatgctcagacagtgctacaaggaggacggcagctccaagagccctgactgccctgtgtgcagccgctccctgaacaagctggcgcagcccctgcccatggcccactgtgccaactcccgcctggtctgcaagatttctggcgacgtgatgaacgagaacaatccgcccatgatgctgcccaacggctacgtctacggctacaatgtgaggggggcagggcaggggggccaggctggcacgcatcgccatcgggacagggctgtgtgggacgggcagggcaggggggccaggctggcacgcatcgccatcgggacagggctgtgtgggacgggcagggcggggggccaggctggcacgcgtcgccatcgggacagggctgtgtggggcgggcagggcagcggggccaggctggcacacgtcgccattgggacagggctgtcctctcgccccaccctgccttagcttcgttcgaaatggatgaaggggtgggaaggacaggcgaggtggccccgggatttctttggcaggtgtgccttcgggaaggaactttgcctgagaggatgagtcattccctggtggttcattgtggggattttccatggaaatccgtgtgtacgttgtagtcgcttgccttaatgcattcccggttttatttttcagtctctgc

SEQ ID NO: 110362 - DNA, 1081 bp, Homo sapiens
cgatgagacttggagaacgggctggtccttcaccacttcctgttggccctggcctggccggggaaggtggcagcggcaccggactgacctgcagtgacccgcgatgccgcgccacgagggacacttatggcttcattcgagagctgctgccaaaacgcctggcgccgccaccgtcgggggctggcttcgaggacgcccgcctgcctcgcgggtcgtgtccgcgggactgtgttcgtacgtgcatagtttcgatatcacatcgcggggctgtgttcgtagctgcgtcgtttcgatatcacaccctctgtgtgccgccttacttcctgcttcgagaatgtataacgtggaaatccacgggaccaaatttctgcagaggccttgccggatggttccataactgtagagtctaattgctatccattacagaaattaatcgttcagttgaaagaagtactgatgacttttcaaaacaaatgaaccaccgtagctgacagagaaccgtatcgtagaggtttgtagttagtgcttatttttgcatgttgatgttgactagctaataaactgtaaatgtaaaccatgcgaataaaatggttttctatttctcatttccgtgtgagccgaggctgccgtgcgtttctaacaccgaggttgtgttctgctcctccccggggcccgggcagcatggcgggcatatgcgtagcttctggcaccacggccaccgggagttgagaagccggctggaggccactcctgcccggaccgcagtcctcctctcgggcgctgccctgaggcgtgatggccccagcgtcttgaggccccggcttgcagctgggtgaatcagacactggttcctgggacccacgggccattgtctgttgggggtgggggctcaggctgcagccaccagcaagcctgggcctgcggcttgggctgagtctagggttgggctaaggaggcctgcgggctgtggccactggcccttccccccaccgcccacccctgttctctccagtgccccgtcgcagctcctgtggccagcctggtgccccttagcccatctcttaccccatggtggctgccc

SEQ ID NO: 110363 - DNA, 1030 bp, Homo sapiens
gtcccagctaatcaggaggctgaggcggctgcactacctgagcctggaaggtcgaggctggggtgagctgtgattgcaccactgcattccacctggtgctgaaaagtgacaccctgcggggagtgggcctctgagtgtggttttgagtgggctggtgcttttgctccacatagcgcagcaaacaggtgtcttgatcttccggcagaaatgtctggagaaattgaatcctgcttgacggaggtagagagctgctttaggctgctggtgccttttgactttgacccgaacccggagacggaatcccttggcatggcttctggcatgtccgatgcccttcgctcctcctgcgcgggccaggtgggcccctgccggtctggcacccctgacccccgggacggggagcagccctgctgcagtagagacctgcctgcctctgcaggccaccccagagcgggcggcggggcacagccatcccagacagccacaggtgacccctcagatgaggacgaggacagcgacctcgaggagtttgtgcggagccacgggctgggctcgcacaagtacacgctggatgtggagctctgctcaggtaactgccttcgcggggtctctgtggcgccaccctgccccggctcccgggtaggctcctccctcactggcacccggcccaggagcctggggatgcaggggcctcccctggggagctaggtcaggggtcaccaccaggtttttcctttctgtgtggcctctgcactgggctccccccacccatgccaggcctctgtggccacagggacacttctaagagctcatggcagcccccacctcagtgaggctgtgggcagagtaaggacccacaggattggggtgaggtggggtcgtgaggctgttgcggtcctcaaaggatgagggagcacaggcctgacctccaagtgactggatccctgggcaggctgtgtgggcatcccgtcagctcacaggcctgtcagggtcccgtgtcgccatgaggggtcaggtagcaccggccctt

SEQ ID NO: 110364 - DNA, 1027 bp, Homo sapiens
ctggcagagcgtggcctgagctgctgctccgggcctcaccctcgcccgtgaggagcagatagcaggcacccacctcgggactgttggaagatggaacacgctaacgcataggcgcgtcctaactgcccggtcttgcctgatgtgcctggcgggttgtgggagtggtggcagggagtggacacgtgtctgtttcagggctggaggcagcaccagagaaagacacagttgtgcggtgcttgcggacgaggacgaggatggacgaggaggtgtcggaccccacctctgcggctgctcagctgcggcagctccgggaccacttgcctccaccctcatctgccaggtgactcccagtgtcctgtgtgctgagccccctgcccggcgctgccacagcctctgcccagagcactggccggcctcgagaggctgcttagtgccttttctggatatcttggtggaagccttgggtgtgtacccccggccgggtgagcagtgttggtgccatgtttgggcttgtcagtgccagcatcagctggagcccgggtgggactgggccaacaaatacccttccagacactgcccgtgcctctgagaggagcccccagggctggggtttgagaggcagatgtcaggtcacctctgggccagggtgaaggactgcagaccagaggccagctgttggcgagggcccagagcttctcacaggacctcagcggtggccctgaggcccaggcgtcgtgtggcagaagccattgctcacctgatccgacccgaggccccagccttgctgtgggggtggggagggagaggagggtggctgtgggtggcaccagcagcaccgtcaggctgtcccactctgctcctgtagcccctccagagcgttgccagagccacaggaggcccagaagctggcagcagagcgggcccgggcgcctgtggtgccctacggcgtggacctgcactactggggccaggagctccccacagccgggaagattgtcaagtgagtccccatgtgtctgaagtcggc

SEQ ID NO: 110365 - DNA, 1488 bp, Homo sapiens
cttcatctctgtggcccaaattccccaactggaaaatgggtacaatcaaatctgccctgtcagaggcaccgtgggagcctgccctcccaccctcaggcgtcaggtgctgatgtagcccacctccaacctcggtggcccactgagctccaggatgggtgcctgactgagctgagaccaccacgttcctgctcctggggtgcagccgcacacagctgagaggcaggcagggtgggagccaggaaggccagtttgggagctggtatgcctcaggaggagggtgtgccaccagctcacaaagggagagcatgtggctccagagggagacagaggcactgccaggcccctgtgctgctggtaacaggagcccgcactcacaaagcatcacgggcaactgcctgctcacacagccaagtgggctgtgacctgcctgcttcaggcatggttggatccagcatctcaaagcagagaccaggctgcttctgcctgtcggggtggctcagaggcctttctggggggcagaggcagtgagacccagtcccagcttgcaccccaggctgctggatactcaggtgggccctggaggggagcaggggagcgggaggagagggctccatctaggttgtgctggaccctgggaacagatggcagctgagatgggcactgtcccccaggaggacagccggtcaagggggtgcagaggcccgagggagacaccgttgtgccccaggaggacggcggtcagggggacgcagaggcccgagggagacaccctgatggtggcacagctgagtctcccatgctcagcatgtatgccgtgaagccccactccttccccaggtggaagaggaggggctgccccagctgtgaccacagcttgcaggaggcctcaggtgagggggtgaggatggcccctctctgcaggcaggggtcagtgtgggggtggacacccctgagtcggcttgacactggtgccctggggctgcttagcctctgtgagcctcagtttttccatctgtgtgggaatgcgcccgtccagtgtgataaggcgtcacatgtgagctcccggggggctattcgggctctgaaggagcatcggaggtgaggaggtgaggtccagcactgcagctgcactcgggggtcctcggctgggcacgcactggccctgggggggaagattctgccagggccctcagcacgccgggaagggcccagtctgtcacccaggcttgtccttggctctcaccacacagcctggggcggggcctccctgcagccacacggccacccgggcctcgggccgccaggcactgccctgtcctgtaatgggaggggccctcagctccctggtggtccgtttgtaggggagccccctgcccactcctctacgccagccatcggccctctgagggggtgccgcactgccagaccctggctcaggagcccgcgagctgggaggaagcaagtttattaccttccacaacgtgataa

SEQ ID NO: 110366 - DNA, 1051 bp, Homo sapiens
cctgcagcacctccccaagcaagggcacactcatgtcaggggctggagagggacagggctgggtctgggcctactggggcaccacgaaggtcactgacacctggccctctgggcctcgagtccaaagcccgtgtgtgatcaggagactggcctggaggcccagctcggccccagagctctccctggcctgggaaggggtgtgtgctgggggccctggaaggctacagggaagccaccatttcaatcccgaccactcacgacccttgtgggactccaggtgtggatgcccacctggaacagccacactgagtcagtgggggaccacagtcccaggccccaagggtccccatcctgccacattcttagaggggagccactcttgagggacccccagggtctcccaggccagaaccttgaggctgcacgaggacccttcagcccactcaggcccggaccactccaaggctggccaaggaacaggggaatagggtgctgcccgaggccaactgagggacttccaggggccctccaggagaagctggctggtgggctacgtgcccagcctctggagggcgaggggatggagagctcgtggcctccgaccccctgtcctcaccccaggaccaggccacaggatgcagtgagtcagaggatcccggaggcagtgcctggctccccacctccctggccgacccccaccctgttcccccacctgctgccccagcccaataagaagttggccacaggcacccccagcccagtgcctgtgaacagctccatggcagacatggtggctccagaggtgtccctgctccctgggagccagctgcaggagctgggggcacggcaggcgcgccggggggctctgtggcacgcagcgaaggctatttaaatgctccgttggagagggattaaagtttacgcaaggtcactgaggatgtgataattataatcacaggtttttggctccacaatgacagccatttgttatttccgctcgggcggctcccgcggcccagagctggtgacaagcgtggactgatttagtggc

SEQ ID NO: 110367 - DNA, 1849 bp, Homo sapiens
ttcactgcatgggagaagggcgcggaccctcccgtggtccagctccaggggcaggatcgtcgctgttacccaaggccagcggtggcctcagacacagctaggtgcagagatgctatactatactccccgctgcctccctcccctgaggaggggtggcagagggcccaggaagatgcctggggctgagagggagaaggccagcgggacaccaggagcaggggacctgaaccccacatgctgaacccctcaagcctcaggtgagtcctggcccagccagcctggcttacagatacaccccgagggcaccccttccctcactgttgacccactccaggagaggacgcatcagataaccccgtaaatcacacgtcaaaacactttttaaaggaaaccgctgaagagacagcgtttcctcagcctggtgaagacgcatatagcaaaatctatgtaagaaagccggctacttaatcacggagacgaagagcctctgcgagagattgttctgcttaaaaaatgtggtggcgacttgcaaatatgtttttagaagcaattttattacaaactgtcccatcggatagcgcctggaaagttatggggagctgtgttcattcttcagacgctgggacagcagcgggaggttgttacaggaggatttattccagcagagctggggaggggcccaggccaggtgtcgaggggacaggctccatctgggtctgtgtccttcccaaggggccaggtagagggtccctgccagcccctcccctactcagtgcctggcccctctgcctccctccttgctggtgccccagtagaggggccctgggagtgaggagctgccgtctggagggaatgcacagatcgcaaaaggccggagggaggcccaggctcagggacacggcacccacagtctggctgacggagagacgtgaacacagccacaactcacagaacacttcagagggactcaggccccagcaggaagaagcaaatcacaagaagcccctggtgtggcccaagaatttctcttttttctaagtcaggtgtgagacctggagtccacagggactgtgtggggtctctgacctcttcctcctggctggagggggctgaagccagaagacactctctgctccttctgcattctcctcatcacagtgtctgcctggcagctctgagatggccccagggatgcacacccctacggagtcccctcccctggagcggggctgcgcctagcaatgcttctgggtgatgtggcaggtggggaggcagctcctctgagaggaggctgtagaaaagagcatgcctctgtcttgggtgctggctggatttctccctcgccttcctcccctccctgaccctatctctctctcatcacttccccttgggggaagccagtggctggagtgagtccactcagacagcctatggagaagcccatagaggcaggaaaccgacatccctggggtataggcagtgaacgtcggtggcttgccaacagcctcgggatgttcttgggaatgaatctaccaccagtcaggctttgagatgcctacaaccatggctgacaacttgactgcagtttcaccagagaccttgagccagaactacacagttaggctgctctcaagtttccgagggtccctcagtaaccgcgcaggataataaatatttgtgatttttagttactatgttttcaggcaatttgttatacagcaatagataagtaatacaactaaccaccataatcatcatgaccatcatcaccatcaccatcatcaccaccatcacaaccatcaccatcacaatcatcaccatcactatcacagtcatcaccatcatcacc

SEQ ID NO: 110368 - DNA, 1113 bp, Homo sapiens
aggctttggacgctggttcgatccccgcccctggaaaccatccccgtggcttgtgggtgccggggccgtggcgcagccccacgctgactgcagaggagcccttgagccctcgccgagcccacgcactcctaccctgtgctggcaacctggccacctgtcccctggtccacccgcgccatcagggcgggcccggcggcggggcctccagcgacaggatccagtagcggagaggaaggaggctgagggaccccactccgcgcccgcccctcgcccccccctccgctaggcagaagcccccgccgccagaccccaaggaagcgtctaaaattaattcttgttcccgcagcagcgggtgaccccgatgtgtcggcctccacggctctagccggcagccggctctgcgtcttatctccagagcagcctcatttgttaacttctcgctgaatacaccctctcccattatttctgtaattcttggcaataacagcccttcccctaatgaaacctgcattattggaaggttgcagtcctgacccggtgaagattagctgtgtcctctgttattgctacatatgtaattgtataattgattttaaaatttacttttgtgtccccacatcataaagtaagcagcccattaaggggcagaaatataattaatatatctgtaaccacttcaacctcgggaaaacaagggctggggggctctgccggcctgtgggcaggggcgccgcagggtccacccctaggcctcctacagtcatgggcctcgggaggggctgtccaagggggtccgaagtggggtggggtggtgcctcctccagcgggaaggctgcctgcctgtggccatgccccctccagccgcccccaggcccagtggccctgcccttgctggagtgtggttgtggtgaggctggactgatcccacgggggccctctgaggctgaagcccctgcccagctgcctgcatcgtgggcacccagggagcagaggggagtgaggggcccgtaggaggctgcagggagctgggcccaggccagcccctgtagcagggtacattccaccgtggttctctttgcctttgccaccccttcccaggcacaaagacaccct

SEQ ID NO: 110369 - DNA, 1028 bp, Homo sapiens
tgccgtgtatcgggacaggacagacagcttcctcctcacctcagggacaaaggggactgtctgtgcctcgtctgtgaagccaaggtgtccgcccaaagcgctgtggggctgaggtgcttccttcttcctgtgtccgtctgctgcccctgggggtcttggggacagctgggggaggcgttgctgtaggcgctgggtccaacctctttccaggtggggacccgagtggcagctgtgagcccaggagggcgctcttcctcgcgggccaggggggctgcagaagaccaccaggggggcttctgagttgctggtgggcactcacctgggggccggtcctgggggccaacaggcgcccagcaggggcttggcgtggcctccgcccttggagggatgagctggggctgttgcttgacccgcgttaacttttaatttaaagtctctcaccaaaacacaatggacttttgacatacaaatattaaaaattaaatttcccgagttcattatctgataattagaactaaataacatcttaactgagaggccagccccacgcagatcaagtcagttccatttaagattccattagaccagtgtcggagcgataagtaatggaccataaaatttaatttggaaatgatctcgcgccgagatggagcgacagcgcttcacaaagagcggccgggccacggggccccggcgggggcgggattcaaaggcaccgcggcggccgccgggaacatgtgttcgcgctttcttccctttctcggccctgcggtatttaaaagtcagaattgaccagtgtagctccgtgtaattacaaagatccccttatcagagtctatttgccggcgcgaggaaagagaggccggagccgtcggctcatttgcatgcggggccccggcggccgcaggaatcaccaggatcagcgcgggcctcgctgcaccgggaggggccgggcatgggcgaggctggagggagaggcgtccccggggcggcctcggaggggctggaggggggagaggcgtccccgg

SEQ ID NO: 110370 - DNA, 2176 bp, Homo sapiens
acacacatgcacacagtcacacgcatgacccacttgcatgttcacatggtgtgtgcgcacacacgcacacacacacgcacacacacacgccggcacatgcacgcacacacacgcacacacacacgtgcacgcacacacactgcctgagctccacctgtccagtactgtggggatgggcccaagggggagcttcccttccccgtctggtgtggcagacggctgtgtcccttgtctccagctcacgcctcttgtgtcacactggttgagtgtgtctcttgcatttccagaaaaggtgagtgtgttccggcctgggaaggtgggtgaaacccgggtctcctcctttcagtccagcgaggcaggtgctggtgctccctggaggaggttctaggggccctcccagtaccctggggttctcgactcagtggtgtcatgggtgctgaacagtgcaaggagaatagtctgtctttggctgtggttccgaggacccccaaccaggggaaacagtgtggctgtcctgggccttttctcaattgttggggggtgaggggagtggctttgcagagctatgtgctgggactggggacctggatgatgtgagaggctctcccagcttccagaagctcttggtatgggcggggggagggcgtaggcccagcagccacaggcagcggtgacacccaggaagggctggggaaaggcaggtcaggggaggcttcttggaggagagagcccagagctggctctaggacgagctccagtggctttggctcctgtttgcccttgttgtgcaccagccacccacagcctcccctcctgcagaagcacagacacactccgcagacacactcccacccaggactgccatggccacaggggtgcactctggtcggtgtgggctgaggggtgcgtcctggtgggtctcagccgcacactgctcggcttgctgtcttgggctatgtcctcgtggggcatgaagctggacagaggacttttcctgggtccccaacgtcccggggcaacagggtggaaggagctggtggggccctccagtgcctctgtggcaaggagtgccccaacccaggagctgcctgggcccagccaggagcacggcccaagcctggcctgtgcctcaccggacgtagagatgtatcgaattcagcttagcaacccaggcatgaatgcccggcctttaaagagaaacttatctgtaattaaaatcatgcacaagttttagaaagagtgtttacaactgggaagaaagctgattgtgaaaaagaataggcttccgttggggctgggagtgtttaattcagaaataaatccccccacgggaggtgcttctccggggctcttttccctggtgcttttgggggctggcggctggcgtggcgccgtgtggatgctgttgacggtgaccttatcgagctcccatcgcagacgcgagggccgggctgcgggctcccgggtggctggagaaatttgctgcgaactcaggtcctccgcttgtgagcaataaattagtccagttaaaatcagcaggacctgcttattcaaagtttatgtttccctgtaagcagatggtggcctcagcacgtgtggagcaggtggcatcaatcatggctttgggatttaggagacagtaacactgctctcagcgggagagcctctgccctgacgcgcggcagtcagaacgtgatttacgctggtccgggctggctgcggccgccggtgtaatttaggaggtgagggtggcgattcggcgttaattgtgggaaggctgatggatctctgtccccacagccccctgccggccccttcaccgcatcggcgtgaccctctgcagtccttcttgccatcagagatgaccagcgtggccagtcgggggctaattgcttttctgagcattgattgcaattaagagcacacatttgagtgggaagatgaggggcttcgggctggaacgcggcctgaggcgtgggcagctgactggcctctgagtacccagagcccccgggcagagcagctgtcccgaggcctctgagccaccagcccctgtgatgtgagatgcgcccgagaccctccctgcctgccccacccaggcccagaaaacccccaggatgaggaggccgcgcactgtgttcgcgtccaggtggatttagcttgccacgctcagccg

SEQ ID NO: 110371 - DNA, 1003 bp, Homo sapiens
cgccatgggcctgtgtgtgtgtatgtgcggcgtgtgcgtgagcgtgggtgcgaggcatcgctgtgagcctgtgtgtgtccgcgcatgtgccttgtgcctttcgttgccgccctcccaagcaagatgtaacaggaaggctgcagggatgggtctggggtcctgggctgtttggggagtgtgaggatccctgccggtcttgatgtggcctctttctgctttcggccgcattggacattagcaccctgctgggcaaaaaatggtttcatgctcctggaaattggcggggccaacatgctgattgattttccaggcaggcccctgggtccccgcggttcctctggctgggtggggtgggctgcccggctgtggcagccacctgtgggatgtaggggtcgggaggcaccggggtgtctgccccagaggccttgactgcaggtatctctgcccactgatgaggtccagcttcagaaacgggagaaaatgccattgtcatcctgtttcagcgaaagctaatctgtgtctttgcttctccatttggctctgctgtgcgcccctagggggttctgggacacgaccccatggaaagggccttagtgagagcgagggatgccgtcaccaccgccccccccgcccgctgccaccccatagcacctgcctgtgtgctggccgcgtctcccatctgcaaaggcaagacctgggtccctgcagcccagcacccatgtggggctgcctcaccccgggagtgtgcaggaggctgggggtcctgtcaagtaagaggacggagtgccggggccaccctggagccgaggtctgcgctggtccccattcgagcaacttggagctgcaccgggctctcgggcgcctgcttgctgtaacactctgggggagccatgggggcgcggggtggaggctgccgggctctcctgcccctcactacctccctcatggcttcccctcttttgcccctttcccggattctgctgcgccctggggagcccccgct

SEQ ID NO: 110372 - DNA, 1143 bp, Homo sapiens
gccgggacccccggcccacccgagcctaagcctgagccaaggacgtgtcctggcagggagagggagtccctggggtcttgtgggacgtgtccacagggcacgccggggcctggcttccccaggcctgtggacacggaaggcaggaacaggaaggggctgcagccgggccaccacggggggcaaatgcttgtccatcgcagatgggcgtctgaggctctcgggctgcctctgccatgccccgggccccacctggctctctggggggcggcctgttaggataatggcctggcactgaagccttcctgggcactgttgcggccggtccctccccagttctccgccggccgcgtgatggagctctgacggggacagactcccggccggagctaatcgaagctgaaaaggtggaatcagcgtgtgtcgtatccttttgccaccttcatcaatccagctaactgggtttgagctgcgctcggcaaatgttctgcagcgggaaattaatatgtaagacatctgaggcctgacggcggccgcagggccaagcgggtgctcgggcagggtggcctcctagggccaccacggctgccgcccgctgaggacctgcagtctggggagggtccccaccctggcccccaccctctgcatcatcaattcagttacctccggggttgatacatattcaggcccgaggacgccagggtggaaggagacaaaggaatctgtatttacccaataataagttccatttggaggaggtttgaaaacaattccccgtcacatttgtccctgtcagatcacattattcacaaatgaagttcacaaagtatcaattcaatttcaatgaggcgctggctggcggggctggggctgaatttagctgggtgctgggggggcgtggacagcgtggccgtcagaggtaatcaaaggcaggcgcagcgggcaggctttccatttcacccactctgtgcacatctgttcctggataatcccattttctacacttccaaatcactgaagacggcagctgggggggctccaggcccctgggagccaaggtggggcctggggctgtgctcccacccagtgccggggcctcctgggactggcacctctccaggtcaggctgcagctgtcctggtcccc

SEQ ID NO: 110373 - DNA, 2882 bp, Homo sapiens
tcactcttctccccgacagtttgtgctgtcccagaagagcacagctgctgaaatgtgctccccatctcccctgacaagctccaccatcttgccccatcctcccctgccagcccctcgggggcgtgtgggacaggacacccaagtcccgctccttcttgccctcagcatcccctctcagcttgtgcacactagaggctggatctggaggatggggcagagaggcctccgggtcctgttgtggggacggctggcaccggccttcggccttcagtgggtggtcccactgaagcacggccttctctggccccatgcctgactgtgaatgggtgaggctctgaggaccacagagacctgtccctcaggccctgcccatccctcctgcctggggctctggggctgggtcagtgagagcagatcaggcagtatctggggagtcccagctctgccctcaacttgccctgaggtgacaaagcctcgactgaaggcgagtgggacccactgggtctgcagtagggaaggtccaggcccgaccacacctgggggctgtcccggctctggccttggcccaggccccccccaccaccccgaccaagctggccttcctgcctgcacccatctgggtcttctgtgcccctgagctggggcagtgcccccgccagcatcccaagaacaggaacgggccgcagaggaccagatgtgactgcacaggggcctggacgccagcttcttccctcccgcctgctttctcacctggaaccgtggccatctcagaggaaacccgcctgtctcgggattttctcacccgcagagcggggagggccctctgggctgcctgcagtgcaccgtgtgtccagcagggggcaagcgcccggccccggagccgcagcagggtccgcttggggccgcacagggtcctcgcccgacctgtgtctgaacacgcaggagcggccgggccaggcagtcccagcgcattttaatagtggaatgtaattcctgggcggcagaaaaatgaaagtgagaagtctatgaattattgcaaatgctctcgatctgctgggccgtgcagcggggccctgggctgcaaagcctttttttctcatgtttaagttggcgtggaagatgaaatagtcacagagacgcagtggcccctcaaagctgttattgccagctgtgtgtctcctgtaaacacttttctgatttataacctcactctgctttataaatggaaaaaccagaaacgccttcaggagcagcctttcaccgcccaagaggcctctgcgtccacacgtggccgcgggggcagggtgccgaggcttctggtcagccttccttcccagggccaaggcctccacctaggcctggcgcgaatgtgggtcccggaagggtgacccacggtgcctgtttgcctgggacggacggggtttccggaactcggggaattcgatgcaaacctggcaggttcccggcaagctgcttccctggactctggcggttcttcttttggtcgacagatgctgtggacgggttttctgtttgttttggaaggagagggggtactcagacatccggcgattgtctttgctggcctgtgtccgagaggggaagctgatgcctgtggctggaggacctcgtgtcgtacctagagtcccctcaggacggccgactgccagccatgggccacccgggagctcaccccacagccccacctcggtgcccacacctgggccaggtggccatggggtccccaagcctcgtgcagatgagggaagggactcgctgcagcctccatgctggcgtctggcctcagaaagagggctcaggaaacgttggccactgactcctgatatcacagtaacccagggcggctgggatgctgtcctgctcaatggggaactgagtcacttgtcccaagtcctgcagtgacccagaaccgtgcaggtccaacccggagcagcagagcccttggagcaggcggtgtggatggcagccccatcacagccaggatgcggggtcagctggggtgtgggttgtcagtctcctggagttgtctggggtgtgggttgtcagcatactggggttgcctagggttatttggggagtgggttgtcagtgtcccggggttgtctgggattgtctggggtgtgggttgtcagtgtcccagggttatttcgggtgtgggtgtgggttttcagtgcctcggggttgtctagggtgtggactgtcgatgtcccggggtcgtctggggtgtgggatgtgggttgtggcctggggttacctggggcgatgcctcccctctccggggcaggtcttcgtaacatcaggaatttgcaggcacatgtgtctgggtgttgggaagcaaacagtctgtgctggatttgctgtgtggattcttgaattatctggagaatacaagcttcttgatgaaaagtgtgattttgtgttatgaaccggagagtcatgggctatcaggccgggggctgggtaatgtcctgaatggcaggcgctgtcgtttccaggaaagacgatggtgtgaacgtgccattcaccctttagagcccgaggctcagggcccacactgaggccctgcactgcttctaagtctgcccaggatcaagagcccttgggcagggggtgtgggtccctggagacaagtttatcagtaaagcaggagaccttgaccgccagctgagagcctggggcgggtctggctgtccagctgagagcctggggcaggggtccggctgtcctgctgagagcctggggcagggggtccggctgtcctgctgagagcctggggcaaggggtccggctgtcctgctgagtacctggggcaggggtccggctgtcctgctgagagcctggggcaaggggtccggctgtcc

SEQ ID NO: 110374 - DNA, 1033 bp, Homo sapiens
ggaccctctgtctgggggtgtcttaggtgagtctgggaccctctgtctgggggttcttaggtgagtctgggaccttctgtctgggggtatctgttgggttggctgggcctcctctgtcctcaggaggcaaccttgtcttgctcgctgagcctggctgcctcttgagtcctggaacccgcttggctgctccaggcacgtgctggcctcatgggcaccaacccacatgcagggacacaggctcctgtgtgctctgctcagatgcagctccacctcctgccaggtgccacatgtgccccccatggagtcatgccctgctgcccaggccccacctgaccacatccagcctccgtcaaggcctggtccccatccctggaaaggccagacactgggccgtgacacccccttcccacctcccacctgcccaccggactctttactgagtctgccctggcctggggcctgagcacctgtgggctgggcatggccaggtggagtggaccctggggaccctaagaagctcctcccagccttgagcgtccaccccagccatgcccctggggctcctaaatccccatggcccttagacacactgagggggaatggtgggtccaaggacagctccttccccctggagacggggtggggtctaggcctgcttcacctctggtcccctaccccagcctcagtttccctctagcgccaggggctggggctacacctcactcctgtggccgctggattggtggtctgaatgccaagctggggcagacgggagcttggcctgactccaggccctgcactggccatggcgccgtgagtgggtggccccctcaactgttgggggggtggccctgcctctggggacaccagccccctctccccagcctgtactatcatctgttcttcacggttcctctgtcttcccaccacctttggccgggttcggagccctcctggtgtgctgggccccggggctgtcctgcccaggcagtgagtgtcatttaggggggcaggctggggtgggcagtggtgc

SEQ ID NO: 110375 - DNA, 1518 bp, Homo sapiens
gcgctggtgacgggggcctcgaggctcagtaccgcctggcagccctggagcctcggaccgggtgccccgtattctcctcggctagattaggccccagtgccatcctccaagcaccgagggcttcccgggccccttcccagaccccgccccccaacctgcttccttttgctaaaaagctagatttttctactatttgtgctgcttttaatccataggaagtcaattttccactcatatattagtttattttatattttcaaattgattcgactatgcattgatttcctgttgtgggcattgtgtcctgagccgggattacgcgtttcggagaagtggatactcgtggcacataaaggtgcttctacgccacagagctcttatcttgaagagggagagtccaattttattgaaacagctaaaatcccacttaattgaatttttttgctctaagatgtacaagcttagagacgtttgctttccaattcaactcaggctccgtggtgtttaaatttccaaacccataaagacctttatgaaaaagaccctacaaatattgtatttctgagcgggcgcgtcggtgagcacccgggtgggagtggggaggcatccgtgcccttggacagcctttgatcctgcggaggggccccgggcgctggctcctggacggtgcctcccctggaccgctcgctcccttccttcgggccaggcagtttcctctccccgctgtgctcggtggcctgggctctgcggcttccttagtggcctttctgggcgtcgcgagggtgctgaccccacccttgcccccacccttgtagtggccgggccaggtggccctcattcgtcagggactggccctggctgcccggtggctgagctgggctttgaccctggccactggctcccaggccctctcccctcacctcccactgactctcagggaggagagaggagagggggtgagcaggccgcactcagcgcccagctctctggagctgctagacgaagcctcctggacagcagcctctgccaccgctcggcccaggccatgcccagggcaggggtgtggccagtgtgtgtggggacctgggtctgggcggggtcttcactgcacctgccctgggcctgggctccaggcccaccagtcacagctgggtgaatgaaggggtgcctgagagttggggaccctctgtcttggggtgtcttaggtgagtctgggaccctctgtctgggggtatttctcaggtgagtctgggaccctctgtctgggggtgtcttaggtgagtttgggaccctctgtctgggggtatttcttaggtgagtctgggaccctctgtctgggggtatttctcaggtgaggctgggaccctctgtctgggggtatttctcaggtgagtctgggaccctctgtctgggggtgtcttagctgagtctgggaccctctgtctgggggtgtctctgaggtgagcttgggaccctctgtctgggggtgtcttaggtgagtctgggaccctctgtctg

SEQ ID NO: 110376 - DNA, 1037 bp, Homo sapiens
aaagaatgctagaggggcagccccgccagctggtgcaagcatggcgtgcaacgtccacgaagctgagcaggatggcctggacgacgcacccaccacggggctcctggagagaatgggcagccgcccgacgaggcctgccggggtctcagccctgcacctccgcagctgtgggacgccatgcctcctctgagatctccggtctgtgccgcctccacccttttgttcagacatagctatcgctctcccctgagcccccatgacccacagccccctggcctgcaggcactcctcctccagggagcccactcagttgcccccctcagagccagctcccaccccctccccggctgccaggccactccctccccggctgccaggtctctccctggcccagaccccacaggcccctgacatcccatgcgcaattgggactcaatgcctatgaggctgcctcgccccgaccccagcaaccacccctcaccctctgtctgacctgtctgacggggacccctcctcaccagccccccggtctgtctccccatcacctcggtatgtggtttccaggtgccctcagggggcagccggcgtctctcttttggtttgtttatttccaagcaacagacaaaagcgccactcccgggtcccgcggctctgaggcttccaccaacaggggaggccaggagaagcccagtgggcaagcccctcgggccgtacccaggcccccgccaggcaccagcccacctaccactgcccagaaacccacctgctcatgcacccacccacccatgggctcccaaacacaccccctcactactgtctccacccgcccaattcctcccccacccacctatgcacccacctgcccactaaatcccaaacccagccacccgtgcgtccatctattcaaccagagcatgtctgtccacccccagaccgccttctgcctgtgcagccacggcccccaccagcctcgacctgcccgtcccgtcatccatttatttatgccccgcttgccgatgcctgcggctgaataacaa

SEQ ID NO: 110377 - DNA, 1442 bp, Homo sapiens
tccgagggttgacgcagcccctggacctggaggaggcaggagggagctccaagccttcagagggagccatggggcaagtaccaggtaccccctggtgatgctggttggtgccgggtaaattccaggtggcttctgggctccagaccgtgaaagcatgctgctgttttaagctccacccctgcccgtggtattcattccacagccccagagcaagttcccctgggggccgtcctgtgactcccccggccacaccgcacctcacccggagtccccagcccgccccacccagcctcaggtcacgccttcctctgagcagcctccctacactgcaccagctcccgggccccctcctcattccctcctcggccccaccccctgcctctctcctggcctcaccttgccccctcctcttctccggggcgggcggcacccaggccagacacctcctgccagcccatgctgacgccggggctgtgctcagtacgggctcaggatgggctcaggacaggcgaaggcggccgagactcccgggccggcaggccggtgccgcgtcagcagcgggctcattagcggagttaactgtcaggcataaggagggggaaaaagctcaatttgtaaacacttggtcaatatgaggtaaagccaacaggatggatttgggaccacattggacaacgccatcggctgcaccggacgcccagcaacagtaggtaaattaggtcatcattaaattatcatgaggaaaaacgcataatcggcaccagcgctggtagaaagattacggttatttacaaaaaccatgctgtttgcaaatttgtgcaaaattatttgttcctagcagagttttatagagctatctgcacatgatctccgcccgagattcccagccctgcatattaactaatgtctgtggtttaattggaaatagaacaggccacattgtaaatcgcttttctgccatctgtctctgtctccacacggggcctgggagtggaggacacagtgaacagatggatgacagggaccctgcgctgcccggccccaccccactccccgccagagcctcaacttacccctgcaccgcccggccccacccactcccctccagagcctcaacttacccctgcactgcccggccccacctcatccctctccagagcctcaacttacccctgcactgcccggccccacccactcccctccagagcctcaacttacccctgcaccgcccggacccacccactcccctccagagcctcaacttaccctggtcacggctcgaccctgacgctggccacagccacggacactgcaaagaaccagcccctgcacagccacacacagggttgggggcggccctcagtgggcttgaagcggcaacgggcagtagtgtcttcagacctgaaaattaaagaaggtgacggaggccatgtctcagcaat

SEQ ID NO: 110378 - DNA, 2631 bp, Homo sapiens
acaagctctgtgcctcagtttcccaagagtaccccaggtaagaggcccatttcctcctctccttcagtccaggaggtgtctggcttaggagacacacagtcctgggtctgcagctctggtgccccttgtccctctccaggtccttgtccctgtatccaggacctcaggtgcggggtctgctttttctgggaagcacccctagctggggcagaggcagctgtctgagcttccctttgcccatccgtccgcctgtttcgagcctcattgcgcaccagactgtcccaagagctgggcgcagcgggcagagcagatcctgctttcaacatcctggcctcggccctgcccacccacacgggccaccctccttctgctcggccctccccccagcagccccttccagaccactgcctgttagacctgcggacccacactgccgtgtccagcagcagccctggatgccctgacacctcccttcccaaagcccatccccagtcagcttctggaaccttctctccaggttcccttcctgaccactggggtcctgccagctctgcctgcccatgggtgctctcgcccggcccacgccagccctgggctggacagcaggcgggagccgcaggatttgaggcaccacagtccccaggcagctggcctcctaccatgctggggtgttatttagagggtttggggcgagacgagaacagcctaatggggctgaccatgtggaaggacgtcttatctgggcccgcgccggccatccattaccactaatgacaccggcctcgcgcctcggccgctctcggccaggtgggccactctgtcctcattgtcctcttccagggatggccccgagacctgcgggaagggcctggggtctccctatcgtcccagagcagcagccccacgtcgcgggcgccccgtgatagatgaagcatggaaattagttccagagtttaactgataaccgcagagcccacgacactcggttatggcagctctaattgatgagctcattaagtccattattagagaaattgatttcaaataggcacttggagtgcgcggggaggcaggtggagagggagcgcggaaggcaggggaagtctcgaaatacataatgaggcacgtaatgttataggtttgtttaatgaaaagcctcaactgcacgctcgtggccgtgtgtgttttaaacacccattttatgtactaataaagctcccggcgctggggtccctccttggccccagcccactgtgctccatggctgcccctaattaattaattaacccgggcaaggcgatcaatgagttagtggcgcagaatcgacactcccaggccgtgggttgttgggaggggtgagggaggccggtggggccggcggcggaagtgggtacctgggcttcccatcctctgccctctcggcctcaccctgcctggctcggccacccgaggctgaggcagaccctgtcctggatggtggggacctgggttgccatggagctgctccacccggccagggagaggtggcccagaccctgaggcccagggtcccagaaccagggcgggagacagtcacggtgaccctgacctgtctgcttcagctccaggggtccctcccagccatgctccacaggctaccgacgccctcctctcggggctacagggctcagtctgggatggttgtcagcatccccacccagcctctgtgcagccccagaccacatgcacctagacagacacacgtagacacacacaggtactcggcatcccacatgcagacacatgtggacacacgtggacacacagagatactgacacagaaatacacagaatcccttacagagacacatggtcacagagacacacgcagacactcacagacacgctacacacacatgaccagcccttcctttctgcaacgtgctccggtgtgtgtccagggctctgtgctccccggctcccaggcctgtggctgtgcctgccctctgggtcctctgctccgaggcttgacacctgctctgtccggccctggcctctcgagccgcctgtgctgatgaccactggccaccctcctgccgccgactcccaggccgtgagtccggaggccccaacatctccacccggctgtcccagaggcttctcacactcaacatggctgaatcctaacgatccccgatcacttgctgcccagaagtccccgtacctagtgaggggtgcccagccttccaggccccgccatgggccccgcagcttctcccggccccttcatcccatagaggttcccatggctgcaccatggaaatgcacagaacccaatccctcctcatgctgcctctcggctgcccgggtcccctcggcgtccaccccatcgctgcagctcagcagccattgcgcagaacagacccctctggcctccagcccgtggccacgatgaccctggctgtgcctcccacaccaggtgctgtggcgagggcctcctgctgtcccctgtctggagccgctccccaggtgaccgtgctcccttcgcccagcccttcccgccttgtcccaccttcctccacggtggtcaccttcacctggggtcccgcgtgcatcccgtggaccgactgccacatccgcactaggacgcag

SEQ ID NO: 110379 - DNA, 1335 bp, Homo sapiens
gacagggcttggccccacagctggggaggatgatgctggctcaactcccagagggacgccagctgagggaggttgttgagctgggctgcggaggggtctgcgtcggcaagcaggcctggcatgctggggagctgaggggcaaggggagcgcctttgagggcccccagcccagccagctgcatctgcagcctcccccatcctgcccctcactctggcctcttagaccaccgaccccacaaggccccctcctcagccatcagcaaagacaggctggctggtcctgctccttctttaagcaccttcccctgacctgcaccccctgccctcctccctggcaccccagcccacccccttcccttggaggggcagcctccacggccctcccggacccacaccgagggggcttctgtctggtcaccatggggaccttattaaacctcgggggcaagtctcaggccccaaattacgcccccacccgcaacgttatctggcctagctgacgtctccttcctcctgcagacaccgcacagctcccatagctctgcctctccatcagccgtcttctcacagcctcttcctggtcccctccctgctcctcttgtgtcattcccacacacacctgtcccgccgcccgctccgccttctcagggttgctgcctgaggccacatagcctctggggtcctgcccctcccctgctcagatccccactggcaaccctgtgctccagaagcctgctgaccctcaggtgtgcgcctgttccccctcaaccattctgctttgtgtccctgggtcccacaggcaaccagttagccttccagccctcactccagtgccaacggtggtgcagggcacagggtgggtgcccttaagcctagtgcagtgaccaggggcaccccagggctggggccgccgggaccatcctccctggggctaagtcaccccaagttctgggcctggatgtgctaggtgctggggagagtgggggcagagggtgccacacaggtcactcctgcctccaccgtaggggctgggggtgcagccctgagggtggccgggaggcggagatggggaagggccaggcctccagctgctgataaagcttcattaatggcctctcgctaatgagaaagccgagctgattatgacaaatcgaagggggcaggggctaagtggagacaccagagacaccctggggcaggggtgggggtggaagggtgggcagggtggaagggagaggtggttcccaggctccttgctcctccagtgcccccaccctggcccttcacctgcccaaatcaccacccacctccccacgccagctctccaaagtgcat

SEQ ID NO: 110380 - DNA, 1023 bp, Homo sapiens
gtgcagtcgtggggagtgggccctccggacactcgctgtggggacatccctggctggcttggaccctgccccattctccagctgagacccagcccgcccatcacctcgccgggcctcggcttcctcatctgtaaaatgggcctgtgcttgccctgcaccgtggcggcgtgagctccaggaggtgctgctgggccggagcctggtgcacagaagggagctcccgcgggtggtgtgctggtcgctgggaggcctcagggtgtgcgggcccggcctgccccggctgggagacttccaccttaaggtgtgaggagccctccgtggccgagttctcctccgcccccgccgccctggtgacaaatactaatgtctaaatcagcagccgcaggccgccgcctgccgtgttctttgctgaaatgtcacctgttcctatctaacgatttgcataatgcaaaccttctcactcgtaaaatacagattaagaggggaagccggagtcattctggaaccagggagccatttcaaagggaacgaggagggaggcctgggaggcgccgtgctcttaaccccgtccctgccggccctgcctgcacctccacagccggtctggcctaacacactggggccgagctggggtcaaggttgatcccatgatgctgggcgggtccaagctgtggaagggcggggcgtgctgcccagcccttcccctggtcgcacgtgtggacggctgtgtcccccatccccttgcaccttccacccatgtgtggaggggaggctggaggggccgggggccctgggctggggctgctcctggtaggtccttgggggcctttcgggctgtcctggccccaggtgttttaacgatgtggcctcaggccgaggagggaccccgagcccaagtcatgattaggggtttctccagccccccaaatctggctgggtgtgtggtctcagcaaagggggagcaggtgctgaggagagaggagatcccaggactctgctgggcacagggggcgtggccagggc

SEQ ID NO: 110381 - DNA, 1024 bp, Homo sapiens
ggactccaatgaaaggagattggaaaactaccctcaattgaaattacatttgtaaatgaggcagagttttctgttcagagtgtgaacgttacggtaaatctgctccagaaagtcgaagaggcggcagcggtgggcaggccggggacgccgcaggggcgactgggactgtgccccggctggggccagggtccacattctggagaggtgcccggcaccatgctggcccctggggacagccccaggagaggagaggggctgtggcggaagcccggagagttgggcctagtttgtcagacatcagacttcacttcccactctgtaaaatggggcgcagggcggcctccttgagggagggggtaagacagaacgaggggtgagtcagagcttagttggtctcctctctgccttccaagggtgcccccgcccctccctcccacactgcacactgttcccggcccctccctccctccagccctctgtgcatctggtagtgttccgggtcctctctgaggcaactgagcgggtacggtggggacaggggcacttcccgcaccagggtgttgggtctgaggctgtcctcgtggtaggggagggctggacccagatcacctgcctgaccacgtgcccaggacattggccaggcacactcactgggacactgcaggaggggagcacacagggagagcagaggggaccatgtgccagacgaatggacctgccccctccaggacagtggcgaacccaggggaaggtggccttgggccctggaggtcctctcccagacagaggcagggcctgtgctcagggctcagggatggccatgcggaccccgccagcagacggagcctggacgccagcagctcccgtggccacagggtgcggggtggtaggggggctactgcctgctggtctcacctcgtggactgctggccagagtggccccagcagcagcggtgaggtacccagcacctcctcaaaggcctttatgtaaatcaagtcctaattaggccatccggcgtttgtg

SEQ ID NO: 110382 - DNA, 1068 bp, Homo sapiens
cagggccgagtggggctgtggctagggtggggcgggatcagtgtcagcctgtctcctcaatgacctgtggccttggcagccccctgaactctcatccccagccccatcctccgggccacaggcttgcccatgccctgcctctgggggctgtagatgtgggtggagctgtccatagtgtggctgcactgtcttgctcgggtgggctgggcctgggcatcctgtggggacagtgactggagaaggggcacagatggcccaggtcctcctcgacctggccacagcccagagctggagagcagtgtggccggcgtgccaggtgggatcccccagggtcctccaggacgctagtcctaggccacgctgagggcaccgtgagctttgcctcttctgatcagtgggctctccagttgattcttccggggggcttgaggtgagttgaaaacccagacttccctgctatgaaacttttctgcagagagcagggtttagagaaggctctgatcttttgctatgagatgggctgacctggggaagccagtaaatgctggaaagctggtggcaagctttggacatagcacaagcaggctgtccctgcttgccagggcttggggtgtgcatggcgtgggtgtcaggccccacggggaccaggagggatgggagcagaggagggagctgccggctcagcacgttgtggggcggggaatgatggtgccagcgacgtattgatgaccagacaacagtcctaatgtagagcggccctgggtttctcagatgccttgggagacagaccaggtggttgggtgagttggtgatcgaggctgcatggggctcagtgtggacatggggtacccccggtagagtgtgaggtgtgggtagaggcaaggactcgccagacccaggaccagggctcatggacacccgggtgtgtggtgtgttggggagatgggtgggagaagggcagggctgccgtcaaatgctgtgtggtgtgtgtgtggcacacgtgctatgtgctgtgtggtgtgtgtagtgtgtgctctgtgtggtgtatgtggtgtgtgatgtgtatgt

SEQ ID NO: 110383 - DNA, 1108 bp, Homo sapiens
gtgctgcagtgatgaaaatgggggatattattgccgaattctcacgtgtcagtcacagtattgaaacttctctttcctgtcagttgcagtattctgcggaaaccctgaacaagagcggtcgtctgttccctttggagctcaacggtgagcactttaggagctgtggccggaggcctgagcagggctgggactgggctcctgggctgggagggtcctggacgcagaacatgagccggatctgcagaagcccaggaaggtgttcgtgtgccctgcactggggcgtggggtggtccctgctgccgtcctccaacggctgggcccgtggtcaagagtggtctgtgagcaggacggctcgtgtagggtgcgggcccagccaggtctctccctcctcagctggtggggcccaggggtctgctgcgccctttctggaaggtgcaaggcccaccctgtggccacgaaaagaagaggacggcgtggctggcagggcttgtagcgtcagctggagcgtgccatggcatactgggcggcccacccactgtccgtgcagtggagggtgtggctgtgcctggttcacccgcaggtgggcccttcattgatggagagcaggtgccccgagtatggaggctggctggtgttcacgggccaggtaaccctggggtcccaggtcctcccccagcgaaggtcccaggggcatctccctctgttggccctgcttacctgactgtgacacgcccagcgccctgtgtcacgcagagtgggcccgttaggaggctcaccttgctgagcgccagatgaccaaagtgaaggtgttttaccagattctttcatgagtagatggaagtagcatgtgtgaggccccagctggccagagccccaccccctgccgggcctgtggtgcgatgtcctcacctcagcctcctggggttcatcctgcacacggggtcagaccagccacctccatcctggctcagagccccgcagcgcttcctacactcctcacccagccggccgctctccctgcctacacctccacgtctcctccccacagcccccatctctctcccagtcaccccaaggtcatcccagggcctttccccagaggcaggtc

SEQ ID NO: 110384 - DNA, 1051 bp, Homo sapiens
gatggatgagtttggcttcaagaatgtgctcgtggctggtgccaagggagtgagttttctctgttgcttgttcagtccattacagatcgaactccttgttccactctttcccctttctcactactgcacttgactagtcttaaaacgaaacagaaaaggaaaagaatgtgcttccgtttcacaatatttaagaaatttaacctgaacatattgatgctgctttaaacaccctcctgtcgcctgaccttctccctcatcagagtgggtgctagaagggaagtgcacccttgcaccctgaaggtaggctgggaaacggttttgatttatttgaagctcttcaatattaccccaaaatggaaactgacattgtttagaaacagtgacttttctttaaattgggttagttagcgcaggaaaactaggtggtagttctttcagacaattgtagttttccctcgtccggcgccattgtcccgcctccttgagtcctccttgtgcgctgggtactggcagtcctgatccccttctgtggcttgatagttgattccccgtgctgtcccgtgaacttagagcttttgattctgcagctttgtccctctgttgtgttctgtgttgcgactttgagggtcacactcactgaggccttggtaattgtcccgcccctttggatgcgtccttatgtttcttagattgcacgtggggaccacagaacgtttttgttaccacttgaagtatataagagaaaatgccaaagtaattttttctttttttttttagtgcatgcatttctagttatagaggtagttgctctatagtgaggcctttctagttatagaggtagttgctcacatgcaatgatgtgcacaggaaacagaaataggaagaggctctaatccgagagagtacacatttttagctggtagataaaagaactaagaaaacaggtatttttcaccggtgcattgggaacagggaaaatgtttttctaaaaaaggaaattaaggctaggcgcggtggctcacacctgtaatcccagcactttgagaggccg

SEQ ID NO: 110385 - DNA, 1050 bp, Homo sapiens
ccactgccctccaccctgtgtgacagagtgagactctgtctcaagagaaaagaaaaccgtttttaaatgtatcagtttaaatactgtctcctgtcctgagacagccactatttgtggttttgtctaggcttttacaattctttctgtgcttataaactatgtacatggccaggcacagtgactagtgactccttcctgtaatcccagcacaatgggatgtgtgcacatctaaacgtcagtgtcttgtaaatggtacatgtggtttctctttgcagtgttattattaaaatctgtctcagttgcacgtgaagtgtacaccttgctgtgcattacatcacatgatttaccacataaggagtggggtgtaggaaggggcccctgttttcagggtgagatgaatgtcaaccgagccatgcttctgttttccaggatgtgtactctggcacacccaccaaggtgagacacatggacagtcaagtggaggatgagtttgatttggaagcttgtttaactgaacccttgagagacttctcagccatgagctaactgccccctggcggccaggaagagaaacagctcctccccgactaggtggaaggctggccaggcaccaagcatgtgtgtgcacttgtacctggtggtttctctgttagcagtccattagctcatgctgaattatttttgccttactttcttaagaaacattaattttatgtatagtgagtatattttgcatgttttaaattgtaaatggagctaagtccaagaaagtacttgaagctctcttccagcgagcttaattgcgtaatccctgttgtcctccagggtaagctgacacgtctacataactggttttccacaggcatcttcagttattgcttgtcaggtggactgttttggatttaaccatgtaatccatgggaccaattgagagtcagctacttttataggcatcaaagtattctcagacacctttaatatctttatggaaacttaatttttggccttttatcaatatgtcataacagcattctgaagtcagacattgtt

SEQ ID NO: 110386 - DNA, 1024 bp, Homo sapiens
aggaatcataatttagtttgaagtctaaaatctagttggttttattagacccccaaacacagtgggcacactgccaaggagctccatgacttctgctctagtaagacagccctggatagacagatgcagctgataggttatgttctacatctagtttgcttttgtcctgctaaactccagtttagtatggtttgatacacatagttcactgatataatgcttttatttttttgggtgggggacagagatgaggtctcactatcttgcccatgctggtcttgaactcctgggttcaagtgatcctcctacctcagtttccaaagtgctggtattacaggcacaagccactgtgtcccaccagcctttgaatatttcttgacatacagtttgaaagaaaacaaagtatgtgtcatggttcagtagcattttccttttattgcagctttaccactcctgaaggccctaaaccccgttccagatgctctgactgggcaagtgcagttgaagaagatgaaatgaggaccagagttaacaaagaaatggcaaggtacacattttggaccaccttgaagtgttaatctgtggcgttttcagtaacacattaaatttgatatttgtcttagaacagtggttttcaaaggtctgggctccagaccaaaggcatcaacatttcctgggaacttgttagaaatacagattctcagacccttccctgggcctgcgaatggggtggggcctggccatcctgtgaaaagccctccaggcgggtccactctttcaagcttgaagaccactgtcctcttggtggtaatccttccaagagtggaagtaggtgcacaatggtgttactgctggattgcaggctggaggactatcagaactaactttctttttttttttttttttttgagacagtctcgctctgttgcccgggctggagtacagtgacaagatctcggctcactgcaacctctgcctcccgggttcaagcgattctcttgcctcagcctcctgagtagctgag

SEQ ID NO: 110387 - DNA, 1050 bp, Homo sapiens
gccctagccccagtcggctcgcgaggcgcgcacagctgagtggacccctgcggcgtggcccgatggtctcgcccgacccggcgcgcgcgggaggccgaggggcggggcccggcgcccacataaaggcggttgggggcggggcgcgcagagctcgtgagcgccggcgcggggacgcgggtttctgcctcaggccctgccctgctctactctgcgctctctgcccgcgccgccgccgcctcagcctcggccctgcgctgcgcgcccggcccgtgctgccatggcctgccgcccgcgaagcccgccgaggcatcagagccgctgcgacggtgacgccaggtgaggccgggctgcgcggcgggcgagggagcgcgtgccccgtggggcgggggttgtgcggggccggggtgtgggagggcggaggttgtaaggcggtcccgaacctcccgtgcccagccgaccgcgtccctccccgcagcccgccgtcccccgcgcgatggagcctgggacggaagcgcagagccgacggcaggcgctggaggcccgaagacgccgaggaggcagagcaccgcggcgccgagcgcagacccgagaggtgggcgcgggacccgggggtcggggcgcggtggggcccttgacgaggccgcgggctccagggacctcgtcgcgctctcgcggtgccgggatcggtcaggtcggcaccctgcgtccttttatcttggtctccgcgcggcccgtggactggggcggccgcagcaggcctgggaggcgctggaacactccggaagcctcttgccaggatgggagtcagctgaaccggcgtcagcccgagttagccagttcgagtctgtgttgtgctcccgggagaggtcagggtctctgacgagcttctcgtgaacacgtggaagtcagggacacccgagtcccgaggagaagtgagttgacagggcttacctgcttggccattttctgggttaggcagtgtgcagggagggtggagatgcgagcgaaaggagggcttgatggggtgggacggccgaggagggtctggag

SEQ ID NO: 110388 - DNA, 1035 bp, Homo sapiens
aggctggagagtgagtctctgaagcaagatggggactcagtctgaggctttctctgccaagagacacgtgtgggaggtgtgagttccagagcaatgagcacacctgtgtgggaagtggtcgtgccccttgcagcagctgtcacgtctgtgtctggacaatgtggtagtgttgccctcacactgacacaaacatgttctgcttttccagaatgagtctgcaggtcttaaacgacaaaaatgtcagcaatgaaaaaaatacagaaaattgcgacttcctgttttcgccaccagaagttaccggaagatcgtctgttcttcgtgtgtcacagaaagaaaatgtgccacccaagaacctggccaaagctatgaaggtaagtgtgacctgtacagtgtgtggctggccaggttgccctagggcctgctttcttggtgacctctgagctgcaggacactgctggtgtggctgtaacagcttgaactaatgaataggtgctctcctcctcactccgcaacaggtgacttttcagacacctctgcgggatccacagacgcacaggattctaagtcctagcatggccagcaaacttgaggctcctttcactcaggatgacacccttggactggaaaactcacacccggtctggacacagaaagagaagtaagtgttggtgctgctggacatgctggagcttcaccctctctgtccgatggttcttgcaggaaagtgctgtcttgttctatcaggccttggctggattttttgtttgtttgtttgagatggagtctcgctctgttgcccacgctggagtgcagtggcgcgatgtccgctcactgcaagctccgccccccaggttcatgccattctcctgcctcagccttccaagtagctgggactacaggcgcctgccaccacgcccggctaatttttttgtatttttagtaaagaaggggtttcaccgtgttagccaggatggtcttgatctcctcctgacctcatgatgcgcccgccttggcctcacaaagtgctgggattac

SEQ ID NO: 110389 - DNA, 1048 bp, Homo sapiens
cgaagcaagacaatggcttgaacccgggaggcggagcttgcagcaagcagagatcacgtgactgcactccagcctgggcgacagagtgagactcttgtctcaaaaaaaaaaaaagagatctgaacatactgacttactgattctttgaagacaaacttggagttcactatatttaacacttaggacccctagtatctgccactgggctgcgggggcagctgcagggacacacacctgttgggtgcctgctggttccacccaggagcacagccagcagcctcatgcctcctgccccctggcagtcgggtgcacgtggagcaggtggccttggcctcgacagggttcccagggtcccactggaagccccacatggaactgtgcctctgggacattgctccagggacctcgggtgcgggctggccccatcctgtggggaggtcctgggagggtcagtctggcccgcctgcctgctgacttgggtgtggcctgagcaggtaaaggcgacacaggaggagaaccgggagctgaggagcaggtgtgaggagctccacgggaagaacctggaactggggtaaggaggccccgtctcctgtcctccccgtccccatccccctcgccatccttgtccccatccccctcgccatccttgtccccatccccctcgccatccctgtccccgtccccatccccacctggcctgggaccgctgggcacccgaggcaatggctgtgtgtctgttctcctcccacaggaagatcatggacaggttcgaagaggttgtgtaccaggccatgggtgagtgcccgggccaccgaggccacgtgcctccacgaggggctgcctatgccccaccctggccctgccctgcaccctgcctaggaccccaccctcctgaggccccttttcctaacacacgagtcccttcaacatgggcccggccgtggaagcactgaggcgagttgcggggaagctggtggtagtgaggctggtggctcccacggagccagggcttggcaggccccacagttgtgcagatgctgagctagca

SEQ ID NO: 110390 - DNA, 1034 bp, Homo sapiens
ctcagctccagagggagacgggctgggctgtcagtggtcccaggtgcatcccactttccagcagcacttggtgccagcagaggctgcaggtgtggcaggagggggcccagccgtgagggcaccaggttcaggcccggcatctcagggtggagagccagggctgtcctgaacctccagagggggtgagctgggaacttgtgtgaaggggctttttccaaaaggaaaacgggagctactggctcacggctgatgccccagacagcctcgaggatctgcaggtccccagacaccaagcctgggtgctctccagcagacggcgtggtacccacagctaatgcctgccccttcctagaacgaagagtcactgaagaagtgcgtggaggattacctggcaaggatcacccaggagggccagaggtaccaagccctgaaggcccacgcggaggagaagctgcagctgtgagtgctgggcgaggccccaccctggagggagaatctgagcacctgggccccagctcagcctctgccccgcccctacccctccagggcaaacgaggagatcgcccaggtccggagcaaggcccaggcggaagcgttggccctccaggccagcctgaggaaggagcagatgcgcatccagtcgctggagaagacagtggagcagaaggtgggtgcgggaagcccagctcaaggggccgtctggcagcaccttctagaaggcccttgggcctgctgctccctccaagcagggagaagccccgcaactcatcttcctcctccagactaaagagaacgaggagctgaccaggatctgcgacgacctcatctccaagatggagaagatctgacctccacggagccgctgtccccgcccccctgctcccgtctgtctgtcctgtctgattctcttaggtgtcatgttcttttttctgtcttgtcttcaacttttttaaaaactagattgctttgaaaacatgactcaataaaagtttcctttcaatttaaacactgaagccgctctggtcttgatgaag

SEQ ID NO: 110391 - DNA, 1031 bp, Homo sapiens
catgccctctctgtcccgggcccagcaaccctggggctcttctgggccagggaggtggcctctttacccccagggttcacccacaacccccaccccagatggacaggggccgcctggtgggtggtcctgcaccaggccaggcagcccgggacactgagtgggcccagggtgggggtaccttgcacacacaccgcgctggggaggcctcgaggaatcagaaacacacggccgagcagcccagtgccacgccaccagtccacaggcgctcacccgcagccaccaccagagcagacccagacagcagggacctgccgggcgctcctccctccacccgcaccatccctgctggggacgtccatctgtgtccccaccaccctgccaggctcactggctatccaggcccggaggctcctgcctgtgcacccagctctccaggttaaggtgcgcctgccaagcagggagctgctcccaggagagtgtcccctccccagcccgaacctgtggcctggaggagcttggcctccctgaggtccacacccgcagagctcaggggcctttgtcacccccaatgctggtgatgaggtgcaggccccgggacaaggccatgctgctcactcgcctctgtgtggtcagcactctggacaacccagcatgggtggggatggaggcgggccctcagcattgagggacttcctggaggtgggggctcctgagctgggccccagcgtgggagggagcatggccaggctgggccctctcctagaggaggctgggaatcctggtcagtgcccgacctgccccacctctcagctgtcgagagggtccacagtgttcccctgggaggccacacctggccggagggcagcccaagctgggcggattcaggctggatctcccccgccccaacgtgcccacggcacagctcatttccctctgcgccaggtgctggctcctctgccaggaacatgagctcatttcaccctctcaggcagggtagggcaaggcagaccccaacccacaggcgacgggcc

SEQ ID NO: 110392 - DNA, 1064 bp, Homo sapiens
ggaggggacacacggcccagctctgagaaagccccggggaggggacaagatgtggaggctcctgggaacctcatcccgccctcttcctacacaggacgggaaactgaggctggggatgggcaggggcagctctgggaagggggttgttcagaggggcctctgctcccactcgggtcatggccttcacacgcacctcggcccgcaggggccccttactggacacggcccgagcggatggacaagaagctgctggccgtgccggccgccaacaccgtccgcttccgctgcccagccgctggcaaccccactccctccatctcctggctgaagaacggcagggagttccgcggcgagcaccgcattggaggcatcaaggtgggcgcggcggggtggctctgggcctggcaggcgcggtggttgctgcctccgctcactcacccgcccgcgtcccggtgcagctgcggcatcagcagtggagcctggtcatggaaagcgtggtgccctcggaccgcggcaactacacctgcgtcgtggagaacaagtttggcagcatccggcagacgtacacgctggacgtgctgggtgagggccctggggcggcgcgggggtgggggcggcagtggcggtggtggtgagggagggggtggcccctgagcgtcatctgcccccacagagcgctccccgcaccggcccatcctgcaggcggggctgccggccaaccagacggcggtgctgggcagcgacgtggagttccactgcaaggtgtacagtgacgcacagccccacatccagtggctcaagcacgtggaggtgaatggcagcaaggtgggcccggacggcacaccctacgttaccgtgctcaaggtgggccaccgtgtgcacgtgggtgccgccgctggggctcctgggctggccccaagggtgccccttggctgcgggttgcgtgaggatttgggtctaggggttggagcttcgggggcagaagctgtgggggtgcttgtggggccaagtctcagccaccccacacctcagggccataggcagctgcgttgggacccgtttcc

SEQ ID NO: 110393 - DNA, 1050 bp, Homo sapiens
gatggagatgatgaagatgatcgggaaacacaaaaacatcatcaacctgctgggcgcctgcacgcagggcggtaggtgcggtagcggcggtggtgccggctgggcggccctcctgggcctggcagcccgtctgaggagcccgtgtccccagggcccctgtacgtgctggtggagtacgcggccaagggtaacctgcgggagtttctgcgggcgcggcggcccccgggcctggactactccttcgacacctgcaagccgcccgaggagcagctcaccttcaaggacctggtgtcctgtgcctaccaggtggcccggggcatggagtacttggcctcccagaaggtgggcagggcggcaggtgtgggtggagtaggctgggccctgccctgagatgctgggagcagcggggagaggtggagaggcttcagccctgcctcccaccccttccccagtgcatccacagggacctggctgcccgcaatgtgctggtgaccgaggacaacgtgatgaagatcgcagacttcgggctggcccgggacgtgcacaacctcgactactacaagaagacgaccaacgtgagcccggccctggggtgcgggggtgggggtcatgccagtaggacgcctggcgccaacaccgccttcccacaccctcccagggccggctgcccgtgaagtggatggcgcctgaggccttgtttgaccgagtctacactcaccagagtgacgtgtacgtgtcctgcagagctcaggcttcaggggtggaggcgggaactgggcagagccaggaccccagctgcagtccccaggcctgtgccctggagctcctgggtgtggtttctacccctccctgggggcagcagcgcagccctggcctattcccctggtgcccgcccaggtgtctgtcctgggagtctcaggacagcctgacctcaccttcccctgcagctggtcctttggggtcctgctctgggagatcttcacgctggggggctccccgtaccccggcatccctgtggaggagctcttcaagctgctgaaggagggccac

SEQ ID NO: 110394 - DNA, 1110 bp, Homo sapiens
atatcttcactggaatcacctccaactattaacaaccttttaggcttggaggggatcctccagctccggggcaggctggacgtacattcttggccgtccctctatcggcgggataaaccttctcggttgtcaataagttaaaaattaaaactctccgccatgtggccagctaaatgctggaagtgttggggtgtgggaacaagagtgccaggggcccataaatagctttacaaatatacaggtccagttttaaaacaaaactgcggtgccagaaaaggccctggtcctctgcttgcatgggtgagaccccctggggcctccctccacgcccccccacgccccgcccagggccatgcctgcctcctgtgcccccagggtcgcaggcctccgttgtaccagccttttcctcttccatatatgttatatatatatatgtatatataccatatacacagcatctatttatagaaatgtacactagtttccggaataaaccttttgcataaaaggtaaaggctcccatcttcaggtacccgtaatttcagtctctgaggggcagggtgggaagtgggaaagcctggaggtggggaggcggtgccactaacaccccaggcacaaggtgctggacatgtggggcttccctgcaggctcagctttgggtgtgggaggggccgaggcccaccctgtgatgtcccgtggtgcaaaggcagaggccggagccatgtcgggcccagctccctgccccacgggggtcccaccgggtgggcccacttacattctgcactgggtccccccagaacaaaggcccctcggtgctgcagcaccagtcaggagaccgttgcacagcagcggggacacccagggtacctctgcacctggaggcaagatgcgcacgcacacaggcacacgcggatgtgcacacacacacacacacacgcacacacacacacacagaccaaagctctgtgtagctgtctctccatctgcactgagtctcatgccggggagtggctgtgcaccagcagcagggtgggctgctagggacccctcacattgttggggaccagtggcccttcacgtccgcgagcccccactgctgggtggggccgg

SEQ ID NO: 110395 - DNA, 1006 bp, Homo sapiens
tcttggaggccctcatctgcccagggcaccacagcccccatgatcgtgaacgtattgccaagtggccacaggcctgaggacaacagcccagcagccatggccccagaggggcagccactgaggggcagacatgcccgtggaaaccctggacctggtggtgtttctgtgtttgtgtccacgctggccctgggagctcttggcattgtatgcaggatgggatcataccttgggggtccgtgctggaggttgcctggctcacgcggagccgcctgtgtcagtgctgaccacttgcagccacaggtgtgggcagtgaggccctgtgtggcaggacgcctgcccgtggccacatgcaggctgtgcttccacagggagaacgtcatcagtgtcgctgagctcatcaacgccatgaagcaagtcaagcacattcccgaaagcaagctcaccagcctggccgcagcactggatgaaaacaaggatggcaaggtcaacatcgacgacctcgtcaaggtgggcctcgctggggaccacgcaggccatccgccacctgctctggagtggggtggggcagggggactgttcattgcatgtccggcaccctcctgggcagctaccccctcctgtcaggggtttgggtctgtcactgcgactgctcctttaagccgctgctctcatttgaaacatcagaagtgagaaattattgaagttacaactcaagtgttgagagagaaaacgcacctagtggctacgcatgtccctggaccccgcccccagctggtggcactggggagccgggggggtgcagcaaacacctctcaggggcccccgacgctgaggggcgactgcacagggagcctgggggcacttcacacctgccgggggcccccaaagctgagaggcaactacacaggggagccgcggggcagcttgggcaccgccccaaggctgagaggtgactgctgggctgagctcccaagtgcagccactcaggttccagggtagccccgga

SEQ ID NO: 110396 - DNA, 1047 bp, Homo sapiens
gactacaggtgcacaccactatacctggctaatttttgtatttttagtagagatgggatcgccatgttggccaggctggtctcgaacttctgacctcaggtgatccgcccacctcggcctcccaaagtgctgggattacaggcgtgagccaccgcgcccggcccctggggtgtttttaagtgaagagttggtgccctgttctgaggcccttggggtcctcgctgtgggggttgctgacccccaagcctctctggtgttttgtttactaacgccgtcatcgggtcacgcagcacagcaacaaacagaccttgtagaacttgagacactgtcttctctgagagctattctggtgatgagatgggcggacctgctgtggggccagcagggttggggggctgcccatctgctgaacctggccttggttgcagtggctggacctgcacctgcatcaggagatccccacatcgctgctcatcctgtcccgggccatgtacctcccggacaccctctctccagccgaccagctcaagtccacactgcagaccctcccagagattgtggtacgtgctgtcggagaccccttttacctcatctcttcataggtggctccgctcttctggggtggggggaggtgtgcaagcgcactcattcctcaaccatgggcgaggagcctgcctcccaccccctcgcgagtgcccccacccagccacctgtccccttccttccatccctcctcaccagccccttgcctgccatcccccgtgtggcacagttgccagtggtcccgacctggccacgtgttggctgctgtggatctgggccgcggcccttggagctgtgtcagcagcgcctatgctccttcccacatgtcaggagtcatcgggcgagcgcagagggcggcccaggggcctcccagcaattgcgggcagcacctcggcagtgccttctgtcctgtgtgtgtgaagcccaggtggtgacggggcaggggacacaggacacaggacagaggtgaggggcagcaggggcctctggtggcttctgggctca

SEQ ID NO: 110397 - DNA, 1012 bp, Homo sapiens
ctacctctgggactcctgtttgcttttccagttggtgtcacagtgaccttgggctgagcagaagagaggggccctttgggtatgaggtcaagatgtgtcttcagagtgtctggttccctcgccttccatccctccttcttttccatcctgggcacactttggcagatgggggactgggggatcaggagaaacagcaggtggcaggagtggccagggtggggctggttctgccatcaggacagagggttggaggtggacttctttgtctcggggttgaccgtggccgttctgcacttcccaagatcctgaccctccgtcacaggcttccagtcacttctaacctagaactgggctttggtggccgtggtttgattcttgcttggcaaaatctgttagccacttattctggagggtgttcacacagacactgtcacccaccagcaactgtcccagatgataattcactgctttgttttctagctgattgctgaggaaggggtggacagcctgaatgtcaaggagctgcaggcagcgtgtcgggcacgaggcatgcgggccctgggcgtcacggaagaccgcctgaggggtcagctgaagcaggtgcgtgaatattggcctggtgccaggccggcacgggctcaagggaaacatcagcctcgaaaggccactcggaggctcttcccaaactctgggccggcctggcgaggcgacactgtgacctctctggggacggccaggatgtttgggctgtttctcgcccttctgctcctaccgcactcacacccctgcattcgcacctttcattgccttttgaatattgctttgatttttcttgtttgcttttagttgattttaaagaccttaataacttactattttggttatctgtagtcagatgaggactggagttcacctctgagatgtcggacgtgttcacattttgactctttctgaactggggccatggaaggtttgggtggcatggcacggtctgactttggagccgcccctt

SEQ ID NO: 110398 - DNA, 1027 bp, Homo sapiens
gtttgtttgtttgtttttgttttgtttttgttttttttttgagacggagtttcgctctgtcacccaggctggagagtgcagtggtgcaatctcagctcactgtagcctccacctcctgggttcaagcgattcttgtgcctcagcctcccaagtagctgggattacaggtgtgcatgcctggctaatttttgtgtttttagtagagacggggtttcaccgtgttggccaggctggtctcaaactcctgacctcaggtgatccacccaccttggcctcccaaagtgctgggattacaggcatgagccactgtgcccggcccacacgggtactttttaaaaccatgaaataaaagagtttgagaatgtattgcacttagatgagagtcagtgtgttgtgaaatgtttctgggagtgggggtcgggcacaggcgtgagatgttttccttgcccgaaccacagtctgagcagttggaatgcagtgccctctctgcccttgcaggaggagaggctgaagaaggagcttcgggtcaagctggagctggccaagttcctccaggacaccatcgaggagatggccttgaagaacaaggcagccaagggcagcgccaccaaagacttctctgtgtttttccagaaggtgctgtgatacgtctgagtccctgtgacctcaccagggagccttccctgattttctgtttccctttcgctgtgctcagcagagtggagctcccccaggtgctggctggcgcttgaaagtttacccaggaggctcagtcgggggccagtggagtgtcaggagtctgcccccacgagctcccagtgagttaagctgtggtggctgcgcctcgtcagccttcagaattatgggcgtctgtgtctcatcaccctgcagctgtccaggagcagtagaatctgacccatgaggagcctgagaccctgatggtgtgaggtgtgggtggcttggccgggctcctctgctgggcattgccctctggctggagtcagtcaagaagatcccaggtcccagg

SEQ ID NO: 110399 - DNA, 1050 bp, Homo sapiens
ttttcctaatgattgctttgtagtatagtcttaggaaacacaagagaagccctccttatagagcaccctccaagagaaggtgtggctcagcctatcctggtgactctccaccacgctagtaatgcccagtcctcagcctgcagccctcacttgctggcccccgagcccagagtgctggccggtgtcctcggaggactcgatcgctgggagcacccagtggcccttggtgtcagcaccataccctgcttttctggaggctgctggtacctgctttggaccctgagaaagaagtgggttttgggaatggtctgctaagtggttctggaacttagagtcctcagtgggtcctgtgagtcgctgcctgaggttgtgcctataaaccattataggagaaatgctcacaccccttgcccttgttcccacatgtgctctgctcccctctgatggattccgccccttccagtttctccggatctgcgctgacctcttccgcctggtgccgttccttgtgttcgtggtggtgccgttcatggagtttctgctgcctgttgctgtgaagctcttccccaacatgttgccatccacatttgagactcagtcactcaaggtaagggcagcatcccaactgcttgttttagaatgagtctgaaattcattgtgatggcttccttgtttgtgacttttcaggtgctagatatttttgagactttatgtatcttcatattgtccttgtgctgtgcaataattatttagtggatgctgggttttggatttgtttctctttatttcgttatttatttatttatttatttatttttgaaacagggtctcgctctgtcacccaggctggagtgcagcagtgcgatcttgtctcactgcatacaacctctgcctcccgggttcaagcgaatctcctgcctcagcctcccaagtagctgggattataggcatgtgtgccaccatacacaggtctcgccctgtcacccaggctggagtgcagtggtgcgatcacggctcactgcagcctcaagttcctggacttaagtgatc

SEQ ID NO: 110400 - DNA, 1025 bp, Homo sapiens
ttttgctgctatattatggaggctaatgatcagaaagcatttttccgactccggttttactgtcttcaggtagttctctacacactgccttgtctttctaaaatacagatgtcctatgtgtccccagtcttcagggggtgactctcactgcccattggggttcaagacgagtctctcactggctttctgactctcactgcactacttgttttgccctcatctcagttactcagctcatctctttctgccatgtttttcctctgggcctttgtgtggtcaatttttgttcctttcttctgcccatgtgcccccttaccccatgtgtttgggggataggcatgctttccctcttccttccttctgccaggtctcagcttgggccccacactgaatgctgtgcctgactcctgcctgttttgggaggctcttgtcttttccatcgtcacccactcccattctcattctgttccagccacacgggcctcttgcctgctctgaagccctgcagctctgctgcctccgactagtgcccttgttccttctttgacctggaatgctgtccccaggtatctgtgtggcttacccctcaccctccttcaggtctttgtgcttctccctctcgggcaccttctctgaccactgatttaaagtactctgttgtgaccaggtactattacagtttatctgtgatcctggtgctttatgaagccaagacgagaggatcactccagcccaggagtttgaggttgcagggaaccacgattatgccactgcattccagactgggtggcagtaagactctgtcccaaaagaaaaataaaatttaaaaaaagtattatatatatacacacacacttctgagacggagtctaactctgtcacccaggctggagtgcagtggcacaatctaggctcaccacaacctctgcttcctgggttcaagcggttctcctgcctcagcctcccaagtagctgggattacgggtgtgtgccaccatgcccggctgatatatatatatatatat

SEQ ID NO: 110401 - DNA, 1048 bp, Homo sapiens
tttttttttttttttttttttttgtatttttagtagagactaggccatgttggccaggctggtctcgaactcctgacctcaagtgatctgcctgtcttggcctcccaaagtgttcggattacaggcgtaagccaccatgcctggccaaaaaaactttttttaattattctgttgctatctggcactccacatctgccttagattttctccatagcacatacctccaacattccatgtgaattcctggctgcattgggtcatctgtgaaggcagggacttttttccttttgcttggcttgctgtcatgtcctcagcacctggaatggtacctgagtgactgtcaggcattcagtgactatttgaatacatacacagccctcagtacttcgtatgccttagggggcataatatgtcccagaaatggtgtgaatgaaggggagtggtgtgagcattttgccttgatgtggagttggaaaggtggagggccatgggctggtggcagaggtcacagaagagccttatgcaccattagcagggctggagaactgtgacttaaccaatgcacaggaggcaaggctgggaaggtgtggacaggtgggagagaatgagcagaggcagcattgcccggactgggccatagcgtgagagtggtgcaggagagggtccttggtccaatccttacagatggaaagattgggtagttgctggtactgttacctctctgtgaaccaggggaagggaaagtgggcctcgcttctgacctaccttatttccttccagaaggaagctctgatctcacctacctgcctaaaaatgtgtctctggagcttcactgtttgcttagaagagaaagccctagatcttgagcatggcatgtggttcctgcctgtctttcctttatgtatctatgtgtatatatgtaaatatatacaacactttttaaaattattttattttattttattttatttttttgagacggagtctcgctctgtcacccaggctggagtgcagtggagtgatctcagctcgctgcaagctccgcctc

SEQ ID NO: 110402 - DNA, 1038 bp, Homo sapiens
gctgccacgcccggttgatttttttgtatttttagtagagacggggtttcaccgtgttagccaggatggtctcgatctcctgacctcatgatccacccgcctcggcctcccaaagtgctgggattacaggcgtgagccaccgtgcctggcttgtttttgtttttaaatagagacagggttttgccatgttgcccaggctggtcttgaattcctcgactcaagcagtccttctgcctgcacctcccaaagttctgggaatacaagtatgagccacccctctgagccctggttctaattattctctccacatttatatgtgtttagaattcctcatcacacaaagcaagtcatgaaggaaagatctaggtgcatataatagggaggttatacctgacaaggctttgggaaagacttcctgatgggatagacactagagcagggagcagagagcagaacggggattgggtgttggctccatgagggtgggggtgagtatcagatggagggaagagcctgtgcagagcttctgtgatagagcaggaagaagctggtgtggctggagcagagggtgtcaggcaagttcttttaggtcctgttaagagcaatgtgaggttttaagggtgatggtgtgacatgaatctatttgctttggaaagaagattcctcagattgctctgtagattgagttggtgctggggaaggttccggaagagtgtgtacagaagcccaatctgtggtcactctgttcaggtgaaaacctttcctttgtccctgctttgggtccctgattggattggacagccctgtctccttgaaatgtggtgtggcctgtgatttgctctggccattggaaagtgacacgtaacttctgagtggaagcgctgagacacgtgctttatcgtgttccctttctcttgtttctgactgtggaaacaaacggatatgtactatgggcaagaaagaaaactttgggctgggcttagtggctcatgcctgtaatcccagcactttgggaggccgaggcgggtggacacgagg

SEQ ID NO: 110403 - DNA, 1253 bp, Homo sapiens
taattgctttttctttcttttttcttttttttaataccatagtgttctaagaacggaagcatctgggctggatggaatttagcatcaagcagagtcccctttctgttcagagtgttgtaaagtgcataaagatgaagcaggcaccagaaatcctcggcagtgccaacgggaagactccgagctgcgaggtgaaccgcgagtgttctgtgttcctcagcaaagcccagctctccagtagcctgcaggagggggtcatgcagaagtttaacggccacgacgccctgccctttattccagccgacaagctgaaagatcttacttcccgggtgtttaatggagaacccggcgcacacgatgccaaactgcgttttgagtcccaggaaatgaaagggattgggacaccccctaacactacccctatcaaaaatggctctccagaaattaagctgaaaatcaccaaaacatacatgaatgggaagcctctctttgaatcttccatttgtggtgacagtgctgctgatgtgtctcagtcagaagaaaatggacaaaaaccagaaaacaaggcgagaaggaacaggaagaggagcataaaatatgactccttgctggagcagggccttgtcgaagcagctcttgtgtctaagatctcaagtccttcagataaaaaggtatttaggagacgttgtgtaaggggtcatgtgaccttgagcagtgagcatggccaccctatgagggcacctgcacgagtactggggcgggcggagaaggtgaggacaggcctggtacttccagccacttgcctgagccctggctttgggttggagggtgggctccaggatgccctggcactgcctcctcagttctcagctggctgctgagccagttgagaggtctagagaggtgagctaagtgttcaagattcaaatggctaaaaagaggcaaagcttgtttcttaacgtggttctgccagtttcagagcccttgcttgacaacgtcaggctacactcttttcatggatctcatctccaaggtgttctttagcctgatgtggtcagtggagacaggctgggctctagagtgtgacttcttaagtctgcaccatctgatgagtgggaagcagagctgtgcagaggtgctcccgctgtccttaccctgtggtccagtgtccacttactgtctcctcagccaggtggtccagcagatggcctgcctccctgaggcctagggatgtgtcttttgcctcctgttcttgg

SEQ ID NO: 110404 - DNA, 1017 bp, Homo sapiens
actggaagagacaaagaccacctgttgaaatacaacgttggtgatttggtgtggtccaaagtgtcgggttacccttggtggccttgcatggtttctgcagatccactccttcacagctataccaaacttaaaggtattgtgttctttgggttgtttttccaactttctcttctgcacttaatctttctcatctccaggcttctttcttactctttctaaatagccctgctatggttcatttttgcagctttacctaaagttagtgattgattcaagtgtgatgtgttgccatttctttttatattcaactcaaatatgtacttcatctgattgaattagtgttaagggacacatgacctttgccttgtataacttctgtttttatgatagtttattatttagttacgatgattgcttgtttcaggatgatttgcagcaagagtgttttatgctaagtttaagttgtaaaaatgtccaagtgaattttattaggcctatgggaagaatggaaaacactggaagtgatcatctttgtcttatgaagcttgggtagataaattgatttttacatggagcggctgatgtaacatattaagaatgtacggccgggcacggtggctcacgcctgtaatcccaacactttgggaggccgaggtgggtggatcacttgaggtcaggagttcgagactagcctgaccaacatggtcaaaccgcgtctctactaaaaatacaaaattagccggacgtggtggtgcacgcctgtaatcccagctactcaggaggctgaggcaggagaatcgctagaacccgggaggtggaggttgcagtgagccgagatcgcgccattgcactctagtctgggcaacaacagcgaaactctgtctcacaaaaaaaaaaagaatgttatatgtccctgatacagagcaaataatggttggtcaacccataaatgtgtttttagaggaatagtaaaagataatgtggtttgaggtttttctgaaagttcttctagagtga

SEQ ID NO: 110405 - DNA, 1081 bp, Homo sapiens
ctcctgggttcacaccattctcctgcctcagcctcctgtgtagctgaggctacaggcgcccaccaccatgcctggctaatttttgtatatttagtagaaatgggatttcaccgtgttagccaggatggtctcgatttcctgacctcgtggtccgcctgcctcggcctcccaaagtgctgggattacaggcttgagccactgcacccggcctgaattttattttcatagttgtattttagaatttcaaatatctctttgtttttctgtgttctcttttcatagcacacagggtttctctgttgggtatcttctcttcccttgccttatgtctgtggccctgcagagggccattcatttctgtgtgttttggattcattcatactggatgcttccctgggtccaggggttccttggtgctgggctcgtgtttaagagcacgacacttagagctgcctgcaaccatgggtggggaggcttggttatccaccctcctttgcattagagggtctgattggccattgaccacttaattgggggaatctccagaagactcactggagaggtttttcctctggagcacttcaggtcttcaggaaatatcctttgattcatctgggccagtgttctgcatgaggggacagggagtggtaactgcccccaccctgtgccagggagatccccctccctcctctcacctggcacagagatctgaccttttaacctgcttacctgtattcaccttctcatttgacttcagtggaatctggtacctcctttcttttattttgggcccgtctctttctttcctcatccccctggctgcactgtgggacgtggcttcttcctctcagctaagagtaagactagtgggcatctgtggggttactctgtggtctgagctgctctctgaggccactgatgctcctgtcactctagcactgtgagataggggggtagctagctggtaggtagcagggctgggatttgaacccaggttgtgtgatgtccgtatactgcctccttcactgcctctctcactcctttcttgcacatgtcctcttgtcttatttggtatcttttt

SEQ ID NO: 110406 - DNA, 1039 bp, Homo sapiens
gtaacagtggttagatttgtgataaatatgtgcttggatgtaaattgtggaaaactgagatttgaatgtaaaaataactgacatattagggtatcaatttaaaattaaaaaaaaaagtactgtatatctgaagagtcatcattgaggagctttggagagtccaaacataaagtgtttcaagactcacctaaagggaagtcggggcccagaagcgaaagggtctggccacatgtgcctgctgtcacctttctctttctcagatgttttcatcttgatttaggtgtttctagatctcttcatcagctatctcattaatcttgaatttgttcaacttcctcagtgttcattgcaaatactataatttagaatagcaaggatatttaggacttgtatattttctttaaaagaaaatatacctcactctatcagtacactaaatttagagacgtgttccttttaaatgactggcttatttaaaaatgagccagctcttcctgaagccagattcagcttaccctcgaagtgtaagcataaatttgattgtgttatattttgctgagtgcttagtggatagaagtgacagttgagtttctgcccacagtgtgtgtcaggtgtatgcaggttcttgggtgtcctttaatcctgactttcaggtgaccctggtgctaacaactaggatggcgcaccacatcattgtcacgcgcccatgacctcagtgttagaaatctacacagatgtctgggcacggtggctcacacctgtaatcccagcactttgggaggccaaggtgggtggatcacttgaggccaggaattcaagaccagcctggccaacatggtgaaaccccatctctactaaaaatacaaaaaaattagccaggcctggtggtgcatgcctgtaatcccagctactcgggaggctgaggcacgagaatctcttgaacccgggaggcagaggttgcagtgaggcaagatcacgccactgcactccagccttggcgccagagcaagagtcaatctccaaaaaaaaaaaaaaaaaa

SEQ ID NO: 110407 - DNA, 3004 bp, Homo sapiens
tgcagatgttttagggcctcttggctaactcagattcatgaaatggacaaacagtgcactatgttagtttatttgagcactttttatacacacgcacacagtgtctgtgtacatgtacagatatacttcagtcttgatgcagtttcatagttcttaaaatctgtctgaagaatgttgtgttctgtgtagccctcacactgtaagagttcacatggaagtaagtctgcgttggttctgaaagggcacagtgtcagttgagctgacatatactgggtggggtggaaggcgactcacacaccacacctgattcctgttgcttccagacctaggctcatggaggaagccaaagatttctttgttctcatgcatttcatggctttggtcctttaaattctggcacatttttagttacttgagtgttgaggtgagtcagaactaccattgtaatatgactcctgtgttctggacttgcagagtacatgatagcaaaataaagccatttggggctgctgcctgccatcattgtaacatgacacttagactttattatcaaacctaaattttttgccgttgccaaaaacaacaaatagccacagaacgtaggtgtgacacttttttgttcggaggtagttttggtttcctgatttttagggattaccttcatagagctttggagttttaatttcttgttatttggttctccgtgatgctgtttttctcattgtagacatgggtcctgtttttgtcatgtttatgaggagatgataactgggggcccttttggaacagggtagtgaggcaagggttggacaggccccttactcttgctgagtcagaaggcggcacttctggccaggtctctgccatggtccccaggaaggatggggtgtgcctcagttgtttccactcattagaggagtgtaggccttccagtgcaggaaggtcagggacctaggcaacctgggcggggctcatagagctctgcggcttgccactctgaatcctcagcgaccactcctccgagtgggattttctgcagggactcaaaccaactcagtggtggtcgagacctgttcacggatggtgggactggggctgctttacagtttgatacgtgtagataattaagcattttgtgatgtttggacacactggagaaaaggcagtaagaattatttactgaaacatctaggagcttactgaaatatgaaaaggcaaattttatacaaattatttttcctttttcctttctttcttgtccaagttcaggttaaaatcttagaaaattaaatgaaaggtcatttacagttccaaagaagaatattaaacatttttcacttaagttgagatttttgctttaaagagcttttaatgagtttttctgttatcataattttggtccggttattcacttgagttgttgcttatactgttgtcaggtacagtagagagaacatggagcctgctgagatcttctctgttattcctgatcctaagtcatgtatatcgaaggctttgatttagagtaatgcatgaggccagtgtagcggggtcgaggcctgcccatgagtcaggggagctcagtctccctggcctaggcagttgtcctgaccttgagaagacatagatgaagcattttatcatcattagacttaaattttaattcttcagaatgtcagaagttgataggttgttaaatacatttatataatacattaaatatgtgaaattaatacaccttcctacattttgaaggtgatgcatagatcccatagtgtgcatcatgttccttatatgaaaacgtttaaattactgggtcttttccattaaactacttttgtatggcttagataaatcttccattagtgttcatttttatagaattatgctgttaaaactactttaggtgaacaaataaacttgtctattatatattaacgcgactgaactacagtaaatgtttgtgatgtttccaatgctgaatgcctgttagcatatgaggcaaagtgtagtgttataaaaaacagcctgttgactgctgggcccgattctgatatgagttaggtgaccatgagaattgctgtttgaggtccacactgacacacacccattgggtcacaccccctttgcatgtttgtatttcctccctttcatcacatttgtttgaaataaggtacttttatagggttggtatttcagaacactttaggtcatgttgtagtttaaattcttcttgaaaaaggtatatgtgataaataaaaatttttattggaataattattacatggtactacatcaccctgaggaagagaataaattaaaattacacacttgcatgacaaaggcctgtgaaggaattaatgtgatttaagtgttttgtaacttcattttttattcctttagtagagcaaattcttatttttttcgccttcactggtaacagcttttgtgggagcccacaccagtcaagttggatttgaacccagctgctctgtactgcacttagaatgatgtaatattccaggatgctgctgcaggtggcgtatcatcgtacacactcagtgacatttctatcacaatcattttatggaagatgtgtgataatctgtttttactggtattaataaacacatacaatgaagaaaacagataacaaattttaagaccaaggtaagataactaatcaaggccatttaatccgtcacattcatctcataatagaaacacgttcatattccagtggtcaatgtagatttcaagttgaaaggcagtccctttagttgggggctgtccagagctgcagcagggctttgcacggaaggggtggccctgttagagttgcttctcctctagtttgtaacttactggacttttgtggaaaatatcagcgtcgctaccctcagaaacaaactaacagcacacgttaggaggagtcctcatcagctgttctcattgccagtgagatatattcagtattgtagatactacactaatttccaacata

SEQ ID NO: 110408 - DNA, 1034 bp, Homo sapiens
attataaattagcatctagttccaaaaccaaaaaaagtgcctgtggatgtatataaaattaagatgataagaaagtgctcctgagaaggctcttgccagaagcctgatgtgagtgtgtggcacctgtgatggcagggctgtgagctgggcttctgtcctcctctgtgtcccggcatggaagccagtataagcatttccaaatgagggaaaagtccttggctcgtttgatccagttgagttgaaagggttgccttggcagcagaggctcctctgatggctgacatcagtcactgcgtctgggcctgagacgtgcatggagggctgtaaagccacggattcccctcgctggagaggctcctgtctgatagcggtagatgaaaaataaggtcgttatgactttggcaacttgcttcatttctttttcatttgacttacaacacacttctctaacatctagcccttttaaatttttaattaatttcaaagcttcctctggccaggtagacttttgtatacagaccaggtgagagcccttttgccttagtgtgaaaatgtaacattttatgcttttaaaatcaatagattcatcaccttagttttttaaaaaaaatctataaatagggtaattgctgaggtgtgcggtttatctttgagatgataaagctaaattatagtcttttgccagagaaactgaggtaactgtcattagaaaaggtttcttaaaatactcacaaagctgttattggcttcttaacttctaaaatttggggggtcttgcatttatttattatttatttatttatttatttagagacagagtctcaccctgttggccaggctggagtgcagtaagtggcacaatctcggctcactgcaacctccgcctccttggttccagcaattcttctgcctcagcctcccgagtagctgggactacaagcggctgccaccacacctggctatttttttttgtatttttagtagagacagggtttcgccatattggccaggctggtcttgaactcctgacctcg

SEQ ID NO: 110409 - DNA, 1099 bp, Homo sapiens
ttattgttttatgtagaatgttagaaattaccactaatttacctggcagtgatgtcaaattgactgtaattagcaggtagaaaattatttgtattatattcatctgattcctatactggatgagcaaggagcatgcttcctttgggacattcttacagcagggtgtctctccaacagcccgacaggcctcatctttttggttggatacctttgaactccatggttacgtgttaggtccacatttgtgtttttttctagcctacctatagttgttggcctttttgcatataactctcgggtaatattttgaagcatgctgaccatccaggcatatagtattttcaagaaatgactgaggtaggggtgggggtcctggtccggctgatgggggtttgctcagcactgtgccagtggaagcaggtgtattgtgggcagttttgtcattgtcctcaagtccttcgcagacagtgcacagcctgctgtctgcagtcggccagaccaggctcctccccagcacactccctgtgggatggccgctgctcaggacacagtgggacaaagttgggttgataggatattttagattcattttacctttgacaagggcaggccttgaattgggagcagcagccacctggcctcactctggccacaggtgacacttggtccttgctgccacctgcttggggctatgtggctacggctacacaaaagcctgtgcaggttagaagacgactgtggtgtgcagtggtgctctgggagtggagacttcctctgttctcagagactcacccccagccctgaccctagaatttagggatagccaggaagtttctagtttgtgtaacctagaagggtcactttaataaaaattgttatgaactatagtattttagatgatgagtgacttattttaattccactttaacattttactgtgctgttaacttggaagacctgtttgaaattagtcttgatttcacactcatttaatctgctgagcacagggctgttgtcatttgtaaacgcaaacactgtggaggtacttctcgccatcagcttccttctttacaaaaccatcatttcaacatgaaaatta

SEQ ID NO: 110410 - DNA, 1020 bp, Homo sapiens
gtgaagcactgaatctgggctgagccatagcagacaggctaagcctggccgcctcgccctcctcttgcaggggggagccttctgtgctgtgagtcctgcccagcggccttccaccctgactgcctgaacatcgagatgcctgacggcagctggttctgcaatgactgcagggctgggaagaagctgcacttccaggatatcatttgggtgaaacttgggaactacaggtgtgagacatagaatcgtatgcttttatgtcttttctgttcacatgtgttcgctttacagtacttaaagtattgaaattattatcgctgtctctgaggagtctgtgaatcctgtttttaatatttataatagatggtggccggcagaagtttgccatcccaaaaatgttcccccaaatattcagaaaatgaagcacgagattggagaattccctgtgtttttctttgggtctaaagattattactggacgcatcaggcgcgagtgttcccgtacatggagggggaccggggcagccgctaccagggggtcagagggatcggaagagtcttcaaaaacggtacggagatattcagatagagagtgagacagcactctcgtgcattttcttacccctaatttctattttttaaaatttgatctttatagaaaatactggactaagcattcaatctgtttttttaaattaggaaaatgtttgcagtctggtttatttgttgagcatagaataagatacactgataacttttgtaacattggtttgtgattaatttcattaaaattctgtaaacctattattcagaaattatttttaatactaatttacagaaatgttccatggcttgcctttatgtaaaatgcagatctgaaggaagggtcctgttgtctcgaccttgtgcagcaggctcttgggggctcgctttacctttcagtgcatgaggaatcaggggtggtcaagcagacaaggtgcttggcctctgattccccagctggggtgggaggcaggagcaacg

SEQ ID NO: 110411 - DNA, 1037 bp, Homo sapiens
ggttcaagcaattctcctgcctcagtctcccaagtagctgggaccatacgcacctgccatcatgcctggctaatttttttttttttttttgtagagaatggggtttcagcatgttggccaggctggtcttgaactcctgacctcaggtgatccgcctgcctcggcctcccaaagtgcttcgattacaggcgtgagccactgcacccggcctcaggtgcatttttattttctgtctgagaacagcaagtcccaggctttgaccctggtgctttgtccttaggccatagtggaggacagggagctcccgacagaactctgccctgggcctgtcttgtagagaggtgatggctgttctctgagcactcctttgcctcacacacttggccgcatttaaaaatacctgcccactgacagttgttcatagactctagttttatgggaaccagaaactatacttaacattgaaagtttagagtgaactataaaaatatggagcttgaaaggtagttacctgtatttactaaaatctttactcctatttcattgactttttagcactgcaagaagctgaagctcgttttcgtgaaattaagcttcagagggaagcccgagaaacacaggagagcgagcgcaagcccccaccatacaagcacatcaaggtggcgtgtgggagctgcgtgcacgcgtgtggagggagtcttccccgagggccgtgagaggttcttaggcacacccaggctatggctggggagaggactgtcaccagccaggatctgtggtgcctggcatggatggccacacaagagaccatgagcaaatggcatggggggatctgcatgggggttcttggatccgccttggagtgtgaggcttggcttggtagcttagagaagggttggggtgacagtcctgaccgggctgcttggagcaggaggagctgagggatgagcctcccacctgcaccaggctgttgccaagtgctgggagtcagtcacatacggccagggctcagtgactgagccccaaacacgtagatc

SEQ ID NO: 110412 - DNA, 1018 bp, Homo sapiens
ataagcctggtgccagttccagcaacagcacaaaaggttgcttagaaacacctccccagcacccttgttcctcgcctgcctgactgctgattcacccagactcttgctttacatcctgtcagatactttgtagccattttctctgttgtggggatcaccgtgtaaagtgggttatgtagaagcttggttatcagacagcgctcctgagacaaggtcgtgtaggaagcaagggttggcatattgccacttcgtgaatacttaatacatttttcattggcaacctttacatacagatatgtctgagatcctttgaatttaatttatggagactttgtacacgccctccacggaggtatgctgatgtgtgtggtgcccgttctaagtgatcatgatggggagtcttgagccccgacactgaggattggtcagcacgctttttgtcatggccacatgcttgtgatttccagggagaatttgttaacgagtacgttggggagctgatcgacgaggaggagtgcatggcgagaatcaagcacgcacacgagaacgacatcacccacttctacatgctcactatagacaaggtaatgcggaactccactgtgagcttctgcagtgtgctggacctggagccctgatggtcacctgtagaactggactttgccctgtggcagcgccagcatttgtctccttagctgcttattttcaaacatctgcacattttcttctgaggtgcagcgtgtctttcagctgcgccggagggctagagctaaccacctctcagcacccaggcaccctgaggctctgcttgtccgggtgtgcatgcagagcgttcccagcagccttagtacagggcagggaagtagagaggacacagatgaggaagtctcagcatcttcttttgtttttaaaaagtgattgtattttattttttaattttcagtgctctttgggtaaggtctcagcatcttctctgttgtgtagcagaatcgtttttgcttggttgttgcttgtatgc

SEQ ID NO: 110413 - DNA, 1015 bp, Homo sapiens
tccctgtcctgtcctccccggcgctcactaaggctcggtcctctccacgtggtcctgacctgtcctctgtgagcaagagaaacaggactggtttgggggtgtcctgtctcagtggacacaggacaccacggttttcagtacaacaaggaacacaacttgttcaatgtgctttatgatggtgaaaattccctttaaaaataacatgcgattgctaacacttgaccgaatatatcacttgaccttacaggaccgtataatagacgctggccccaaaggaaactactctcgatttatgaatcacagctgccagcccaactgtgagaccctcaagtggacagtgaatggggacactcgtgtgggcctgtttgccgtctgtgacattcctgcaggtacaagctctggggaccctgcatggggctcctggctatgggggcagagtggccatcgctgagggctgcgtggggctggactggaaaggctctgggggaggtgggtgctgatgtggagtctcttttggtttgaatatctcttttaccaagcaaaattgaaaggccatgggtcaagccagtacagatacaaaaataataagagtatttttgttgacctaatacacgccccttagcttttgaagagaaaggcaggtgtttccaatttggtgtctgtctcctcttctcccagggacggagctgacttttaactacaacctcgattgtctgggcaatgaaaaaacggtctgccggtgtggagcctccaattgcagtggattcctcggggatagaccaaaggtaaggctgtggcgccctccttccccccaggctctgtgttggcattttgcactcctggagacctgtgtcccccgtgaacagcggcttcctccaggctggcttgttgccgggacaggtgggagcaagttccctgctgtgggctggggaggatggctctcaacaaaggccagtggttaagagttcctcactgaacgtgtttcctggggctgccagaacaatgcctcacagac

SEQ ID NO: 110414 - DNA, 1150 bp, Homo sapiens
cacgatagagaaaagtgttggccatgggtgcgagagggtggtccctaacgtgacagagcttttacagagtcatgccagaaagatgaatacccaagttgaaaatcagtcccttgggagagggcaggtcacatggaaatcagcacagcagcccctgcctgtccacgccgcgctgggggacactcctgcacccggcacagctcctctcagttgccgaaacataaagagacgctaacaggtggtccttaggggcctggcaggtactgtggagtcaacaggccctgccagggagcccgcccgggctgtggtagacagtttgtctgcccgtcctgttcgctggagccagcactattttgtgttcatttgacctgacagttgtaagtcatcttcaaccacgataatgttgaagtcgtgattccatcacttctgtgtgctcacatcttgtgttctgttgcagggaagtgggaatgtccttggcatcattgtgacgtgtgtggcaaaccttcgacttcattttgccacctctgccccaattcgttctgtaaggagcaccaggacgggacagccttcagctgcaccccggacgggcggtcctactgctgtgagcatgacttaggggcggcatcggtcagaagcaccaagactgagaagccccccccagagccagggaagccgaaggggaagaggcggcggcggaggggctggcggagagtcacagagggcaaatagcgccaggcggccgcttggccggatccaggggcggtgcagggcggccggccctgcctgcgggagagggcgagcatgaactggcccggaggacccagctcgagccgccaggacacagacgtacaggcctcctcgggagggagcgcctccccaccactgagccatcctcagcagcgtccgctgcgtctgcactgatgaccgtctgagcccagctcagcgttcctggacaaacagcctcactcctcagcgttaccgccacacttgaatttctccgaatgtcaaggttccctcccactctatttttttaggttaaagttaattggcatatggaatgttttaatctcctctgaaatgtgtagcgtaggcttttcccaagggtcgctagaaactcgtcttcgcgttgccccctttctggctctcagcgccg

SEQ ID NO: 110415 - DNA, 1049 bp, Homo sapiens
agtgagaacccagctgtccgtcctcaggccggcctttcttccggcgacacccgtccatggctggctgggtccccttcgcagtgtttgtctgtcttgacatctaaaccccggcgtgtgcagtgcccatcttccaggactaccttattttccagaattaaacctgttttataattcaagttaatgcaaatgactgtcagttgccaaatatcttgatcctatgagtgtagttgatgactgtttgttagtcagtagagtaaaatgctgtgtccacggggtgtcacagcctcaccataccctgttgaggtgtgaaatgccccgtcagaaattaaatacaaacttaaatgtgcctattggtgtctaaacttcatacaatgtaaggtcagattccttttaggaatactgggtgctgtcaccaggtttgatagttagacttaaaaacttgaaattcactttttggggggagggatatactgaaatagagagttgagacttgccagttgggggaaaatagcatttaaaatggaaagctgtgtttggaaaattgtgtatgagtatttttgtattaaaaacattttaaaggcttttttcttaacttattttatatgggattgtttgattttttttccagttactttgaattgcaaagcatcgggtgtggcactgatgcctccgatgggtggggctccctgtcctgactgtgtcattttgcctttgacctgacccgctggggagaggcagtgccaccttgggaagtataacaacaaatactggaaatagcaggcataactgactgactttggaaaaatgctttcttcttctttcagaaataatttgcttcccaaattcccattaagggtgaaatggtctagagagaaggaagcactgctgtcccccagccctgcagtcggctgagccgggtggtccccaggcccacagccaagtaagtcaagggagtaccccgagggctgatcctacctgttccccaccctgtgggccagggtgtcctaggaagcccccagccctggcccaccccgtcctgatggccgcct

SEQ ID NO: 110416 - DNA, 1048 bp, Homo sapiens
cacccacgcctgcggcgcccacctcgcctctgacacccaccacacctccggctgtcgcccctaccactcagacacccccggttgccatggtggccccgcagacccaggcccctgctcagcagcagcctaagaagaacctgtccctcacggtaggtgtacactggtagggcccacaggccaccaggtaggtggtacggccctggccacctcccctagcgtgggggtgccacggtgcctgcagggggatgcaggaggtggtcctggcggggccctggcacccacacccctctccccgctgtagagagagcagatgttcgctgcccaggagatgttcaagacggccaacaaagtcacgcggcccgagaaggccctcatcctgggcttcatggccggctcccgaggtatgttcataaggcagggcctgggggtgcaccgggccgggttgggggcgggtgcccccagacacccacccagcagctcctgctctctgcagagaacccgtgccaggagcagggggacgtgatccagatcaagctgagcgagcacacggaggacctgcccaaggcggacggccagggtagcacaaccatgctggtggacacagtgtttgagatgaactatgccacgggccagtggacgcgcttcaagaagtacaagcccatgaccaatgtgtcctagaaccacctgcctcacagctggccgtcacttgtgggggtccacgggacgatggctttgccagcttaaagtaaccggatggcggacacctggcccccgaggtcccccggccgccgccctgctgctgacccagcctgttttaagttctggatgcatttctctggggtatttggggcttatttttaaaattttaatatgggttcttttttgtgtgatttaagacactttttggactcaacgttacatttttgaatgtagtaagtaaattaaccaaaaaagttacaacttcctaattttagtgacagctctgcctgttagactcttactttttaaaatcttttctattttccctcgctggggcagtgccctccta

SEQ ID NO: 110417 - DNA, 1036 bp, Homo sapiens
agactccacctggtgagatcctgtggctgggctggggtgccgctgtctttgtttggtgtcttggcaaagtgtgaggtcgtggctccaggcgttcccctgctccttgaggtccgggatcctgggggtcctgcccgctgcccgccaggggtttggcccttcccctctgcggcgctagcctagaagagggtgggacgttctgagctcggggtgggggacgtttgccggtcactgctgctggcgccctgactgttgccgtcctccagccccactcaaaggcatcccgaagcaggcgcccttcagaagccccacggcgcccagcgtcttcagccccacagggaaccggacccccatcccgccttccaggacgctgctgcggaaggaacgaggtgtgaaggtaggcccgtcccccagctcctgtggcaccccggggcccgttgcgccctggtgccgtcactaaggcagggctgtgcttgtcttggcagctgctggacatctctgagctggatatggttggcgctggccgagaggcgaagcggagaaggaagactctcggtgggggttggggcctgcgtgtcggcggcaatgggggtccctgcgggccctgcccagttggggtgggttgtgcccacgctcggcgggcagggctgtgccccgtgaggctgctctccgtgggtgggtgcctgcttttctcctcgctccttggtggcctcccctgggaagctgtttgattccctgccgctgccctgagctgacactgcagacgcgcccgggcactggcgaggactcctgttttgtccacagatgcggaggtggtggagaagccggccaaggaggaaacggtggtggagaacgccaccccggactacgcagccggcctggtgtccacgcaggtagggctcggggctgcaccccatgtctggcaccactgcgggtgccccttttgttccgattgtggccactagtgtgctctgtcggagaatatatatatgtatgtacatatgtgtgcagtctgtatttatgtatatatacgtatatg

SEQ ID NO: 110418 - DNA, 1050 bp, Homo sapiens
ggacgggaagagagaagccacagatcgggggtccttcttacgtgggggtgggatctgttaacatttcatgttctacaagtgtctggagccctccaggaatcactgtatctatgtccgcctgtggttcttggtgtccgcggtgccagaggtttccagtttacagccctctcaaggcatgcccgcctctcaggcattcctgttctgcaaatgctcctgggtgttctgctggagccgtggggagtcagtctcgaggacctcaggggacagccgaagctcccatgacctaaccctaactgaggagggtgtggggctgggcagccgccagctcctctcagccgggaggtctgcggcctgggcgcccctaacttcatgtggttcttaccggcagtgggtgagtgtgaagcgtctgccatgctgccactggagtgccagtacttgaacaaaaacgccctgacgaccctcgcgggacccctcactcccccggtgaagcattttcagttaaagcggaaacccaagagcgccacgctgcgggcggagctgctgcagaagtgtgagtggccgcggccgccatcgggcattgtctttgtagtttccagtcataggtttcttaggttctaaggtaccaagactgccccttcaaggtggcgttctgggccaggcatggtggctcacacctgttgggaggctggggcaggtgggtcgtttgagcccaggagtttgagaccagccaagaaaccccatctctaccaaaagtaccaaaacattagccgggcatggtggtgcgtgcctgtgctcccagctactcggaaggctgaggtaggaggatcacctgagcccacgaggttgaggctgcagtgagctgtgatcacaccactacactccagcctgggagagagtgagaccctgtctcaagaaaaagaagataaagttctgcataaagttttttgttagaagtttatcactatattaaactttatgttctgaaaacatgctttaaaaacttcagaatttaggctgggcatggtggctcacacctgtaaacccagcact

SEQ ID NO: 110419 - DNA, 1030 bp, Homo sapiens
ggcacctgcctgctctacgcccctcatccccaggatttcccacccgcaggctttctgcgggagcagtggtggccccggcttctcacccttcaggttttcttgcatctgcgcaccggtggaagagtaggcccagtggactgggtgctgctgggaggtgggaggctgctgggagggcaccggatgccggggccttgcaacctggcagaggctgtgctgctcagggaagcaaggtggccctggggtgaggcggggggctcagaggaaggggagccctcaggaggaagtgttgggggcaactgccagagagcccggccactgcccagtgcccatccggaagctcagcagggagtgggcttggaagtgggcaggggcatggtggcgccggcagcatcctattttgcagatgaagggcgccctaatggagatcatccagctcgccagcctcgactcggacccctgggtgctcatggtcgccgacatcttgaagtcctttccggacacaggctcgcttaacctggagctggaggagcagaatcccaacgttcaggatattttgggagaacttagagaaaagggtatgttgtgctgctttaattcatgttgggtggagggaaatggatctttcttgaaaaatttttttctgaaatgaatttgatttttagacctttacgtttttccgtgtgtcctggtccctagaatattaactgtatatgcaccatcctcccccgtaagctgctgcctggcttttgccatctttgaaaacaaactccaaacagcccacaggccccatcctcactgctgcggtgtcagtgggaggctgtgtcacgccactcgccgtctctctctggtcggctccgtgagggtaggggctctgcccattcaggtggtatctgtagatcctaggttctagggcccagagcattccctggcccagagtacatgctcagaaatgcatgttgaaaatatcaacgatttagttgtttaaatgtgaactgaaagtcacttagaaaatattcacaaggctgggctc

SEQ ID NO: 110420 - DNA, 1050 bp, Homo sapiens
ccgggctcccaagacgcgaatacgcgcgcctgctcgtgacgtcattttttgcggtcttcccgagagccagcagagggcgccgccatgatgttttacggaagccgatagtccttgctcagcggcaccccgtccttccggctctcggctttgccacaaagcttcccgaagacgcggccgctacccggagacgcggtcgccacccagaagcgctctcccgggaagccccgctcgtgggaccgcgccacctgcgccgcctctgcggcccgcagcccgacgggcgccgccatgttggggtcctagcgagggacgcgtaggtgtcttcataagatgccggggcagcggcgcgcgctttcccccaagatggcgtccatgcgggagagcgacacgggcctgtggctgcacaacaagctgggggccacggacgagctgtgggcgccgcccagcatcgcgtccctgctcacggccgcggtcatcgacaacatccgtctctgcttccatggcctctcgtcggcagtgaagctcaagttgctactcgggacgctgcacctcccgcgccgcacggtggacgaggtaaggcaggcgtggcgccccgcggcccccagattcccaaccttcccacctccgacccgcacacccaactccggaccctcctcgctccctcccccaaccttcccatcccccttcagactgttaacccccccggcccgccctcacgccccctcctcgctcctccgaatacctccctccagtcctcacctccccctgggtcctcatcccccgcctcgatcctcatctcccacctcggttctcatccccaccgtgggtcttcaggaccccccgcccctcctcgccccctgggaatcccccactagggtcctcacctccctacttttcgtcctcacccctacccaagttttcacctcccctgggatcctcaatctcctccccgccgggccccgggttctcgctacgacccccaggtcctcactcccctccctgggcccccgggtactcatccccacccgcccccgcctcccccgccttcggtcc

SEQ ID NO: 110421 - DNA, 1024 bp, Homo sapiens
tcccccgcgcggggcctggtctgcggggcagctccctgccaggatctgcccaccttggcttcagtaggccagcgtgggcagagtccttcccggcccggccatcccgagggtgtcctgccgtgtttggaagctcagagacccgccgaggctcattccaggcggtgggggtgggtggggtggctgtcttcaccgcaggaagcttggaaatagggagaagtagaaagcacccgagatgaccccggctcctccaccaggagcgcggccgggcgcggcgtccctagcgggcttcgccggggtggcgtctctggggcctggggacccccgccgcgccgctgacccgcgccctctgcccccagcgctgtgcttcgccgtgagccgctcgctgctgctgacgtgcctggtgccggccgcgctgctgggcctgcgctactactacagccgcaaggtgatccgcgcctacctggagtgcgcgctgcacacggacatggcggacatcgagcagtactacatgaagccgcccggtgagtcccgctcccgccgctccccgacctccgccccagacagccctcgggggcacgcactccagcgacctcagggcaggcctgggcgagggccggcgtgggtgggcctgagccggggcccctgtgacctgagccttctgggtgaccgaggcctccggtgtcagcggggctgggggaggcacggccggttcctcccgctgagtgacctgagctggccctgcgacgcagtggctccaccgttccctgctgtggatgcgtctccctggcgcctgctgcggtggggcaagggccgctgggctctgtgggtcccatctggtgtgccttgcggggatggggttgcctgcagtgccagggtcctggggggagagggcttgtgtggcaggggccggggaccctattggggcacagaggatggggtgggggcaggggacctgaccttgagccttggccttcacttctggcctgatcgctgggccgcttagctgaagggttttgtcccagcc

SEQ ID NO: 110422 - DNA, 1061 bp, Homo sapiens
aaccaggatggctattcacgtgaaaattccccatttaacacttttcagattggatctgtgaatgatgtttctttctccacagctgcaggacagagagaacatcttcatttctttcttagattcatttttttttcattatgaagacttgcattttaaagacagactctggaatttcattagctagcattataaatgtagtaggcccatagagatcatttttgctagaaaaaaaaagagtaccggagtaaactcttcctgagtttgctcaataagagtgaagtgagcagcacagaacaggttttcttcttccagggcatcttaagaaggccacagactagggagtgactgtcaagttcagcaatatggagggtgttggagagcttgccaagaccatcagtttctgtagagagaatcccatggtccattttatcatcaccatcatcatcatcatcatcatcatcatcatcatcatcatcatcactatttgtctgggagagtgggctcctggacagacttgtgtggaatgtttggggtagggagtcatgggtggtgagtcagagaggatgcttgaccattctgtgtacatgtgttggattcatgtcccctccctactttcagctccccctctctgccttgtgttataccagttattccctatttctgagctcacattcttgggtcttctgcgtcatagctcctctcaccaccagctcttcctgaactttcataaatatatggagctctcttgcctgatgataatccctctcctgatctcttttttcttatagatttattcctcttaattcctttgctttattttagtgggttcttggtagggagcagagagaaacagatgtgccacctttaactggatgcctgttggatggttttcagcaaggaagttttcaaattgcatggtgctgagcagagaatgggttgtaggggaaaaaaaggcagaggagactattgctgccatccagatgatggccagggaaaaatcggtagagatgataaaaaggtccagactccagcgatattaggaggtggaagtgatgaggttt

SEQ ID NO: 110423 - DNA, 1123 bp, Homo sapiens
cacaaataataataatattattattataattataattattattattattatttggagacggagtctcactctgtcgcccaggctggagtgcagtggcgcaatctgggttcactgcaacctctgcctcccgagttcaagcaatcctcctgcctcagcctccggagtatctgggactataggtgcatgccgccatgcccggctaactttttttttgtattttagtggagatggggtttcaccatgttgcccaggctggtctcgaactcctgagctcaggcaatctgcccgccttggcctcccaaagtgctaggattacaggcgtgagctactgtacccggccaatatttttataagttgttacttagctatccccacaaatgccccaatacagtggattgtaattttgaaaatgatactgacttgataatttttccctataattttaatttttacatttcaggctttaccaagttttggagggagagaataagaaaaaagaattgtttctaactcatggaaaccttgaggaagtggctgagaaattgaaacagaatatttctttagtacaagatcagttggcagtatctgctcaagaacattctttctttctgtccaaacggaataaggatgtggacatgctttgtgatactttgtatcaaggaggaaatcagcttttgcttagtgatcaggtgggtatttgccatagtagttaaaaatgctttttaaaaaaatgcttgttgtaaaagatattaaagaaaatgttaacatgaggaaaatattaccccaatttcattgccttaatataaagtatatttctatatctcctaatttttgttcacatataaatatgtttttcagatagttttgatgagtgtgcacagaaatttaaaaatgtatataatttttcagacacaaaagaatatgtaatgtttatactagtgttaaaaaataaataaaaccgcctctgtatttttttttcactcatcttagcaaacacaggattgcctttatagctttaaaatcctctgtgtacacttaatggtacatgctcctcctaatataattcctctctcatcctcaaagagtgactaccatgcttaatttgttcattattttcttgctt

SEQ ID NO: 110424 - DNA, 1036 bp, Homo sapiens
ctagaaactaattgctttattatgggtattctgcctcgtttgctccaaccagagcatagtgctaatgaagtcagaggtccaggttcagtagactgaaactgatttctttttgagaatatatggatagatgtattgcagatgtctgtctgcactcttggagagcttgttttcttggtaatataactgctagatacttgagtaaaaatgtaacttttctgaatcagaatatcagcaccaagttagtttctatagctgacaaaacatttgaatgatataggaaatccaataattacgtagaagtgctaaaatcaactggccaactaggacctattgaagtaattttaacttaagaaaaactagtaacatatacttggattcagtgaatagtgtcctattaataatgattctgattaaaagaagtataataagatctctattttggtagccgttactatatatatggtagtaatagcagtaaaatttagtaattcatacccttgacttagtccacatttttcccttttaaactgtaatttttgtttatatgaatattaaattagttttcattcattgagcttattatctggtcacctaaagtggaaagtgaaaataatcttaagatgatttcaaatttaggcatacagtttgaaatgtaattgcttttctttgtataggctgtggacaaagaaaatttggatgctaaaatttctagcttgaccagtgagattatgaaacttgaaaaagaggtcactcaaataaaagacagaagtttacctgctgtggtaagagagaatgcccagttattgaatatgccagtggtaaagggagattttgatctgcagattgctaaacaagattattatacagcaagacaagagttagttttaaatcaattaataaaacaaaaggcatcatttgaacttctacagttatcatatgaaattgaattaagaaagcatcgggacatatatcgtcaacttgaaaatttggttcaagaacttagtcaaagtaacatgatgctctacaagcaattaga

SEQ ID NO: 110425 - DNA, 2034 bp, Homo sapiens
gtccagcctcgccgactccgcctcttttgacactacgcctgcgcaaacagtcatcccccacgaccacgccgtcgccttgtgcgcttgcgcgcgtccaggcgctcccgtgaggcagtgcgaggcgcgcggggcacggagggcggtggcggcgggctcctgcgagaagcaagcggaacttcctgaggtgactgacgcgggcctcggttctgggcgcaggggtgtggggctggaggagtggccgcgatccccgtctgcacccaggtgcctcttttttttcctgcgctcctgggggctccttccaggtgctccagcagctgcccggggatcagggcccggtccgctgggcgaggagctggggcgggggctgtgcggggcctgtcacccccgtcttctgcagctcggtgtcgacggcgattcggtgggcttgtgcgtttgttttgtcagcgtgcttaggtgtcacagctgggtgaccctccgaaggaaggttttgccgctggcgcgtctggtgtatcgcggccttggggccgcggatccctggggcttgccgctgcctctggggttcgcgcggccctggcgtcggggctgcctcagcgctggctgaaggccggcccgaagcacccttaattgtggccgcgcgcttccctgctgctcctgctgttctccgcgtcgcggtggtggactctggaggtggagccttgcccggcgagacgttgaggtaaatatttagttgatcttcagaagatgtgccatgcttatttgcgtcttcttacgtacggagggcagggaagagaggctgcctagcctcctggtggcttgggtttgtttggatccatttattttgaattaaaaacaaatgctgctctataaagtgtaatgcattttaaaccattttatctttggaaaaaaagataaaatggatccaaatagatccactttcttgttaattacttttcgttactgttgcggttttctgagaactagcctaattgtttctgtttctctttatcatcatcaaacattgcagctacgactacctgtcatttatcccgctctcggatatcatgtgatatttgtctgtgtcttctttttaaaaacactgtcgtcatatttgtggtctaatacttgttttcttcccccctaggaggaatcattatagattctaaaaatatattttcccttctctgtggacttggtataaaacgtagctttttttctgcttggatttattttctaaaaatcaacaccgtaaacccatatcagatacaacaaaattggggtagttaaaaccatgagttgtggaaatgagtttgtggaaacattaaaaaaaattggttatcccaaagctgataatcttaatggagaagactttgactggttgtttgagggcgttgaagatgaatcgtttctgaagtggttttgtgggaatgtgaatgaacagaacgtgttgtctgaaagagaattggaagcttttagcattcttcagaaatcaggcaagcctattctagaaggggcggcattggatgaagctcttaaaacgtgtaaaacttctgatttgaagacacctagactggatgataaagagctggagaaattagaggatgaggttcaaactctactgaaattaaagaacctaaaaattcagcgacgtaataaatgtcaattgatggcttcagtaactagccacaaatctctgaggttaaatgctaaagaagaagaagccactaaaaagctgaagcagagtcaaggaattctaaatgcaatgatcactaagatcagtaatgaacttcaggctcttactgatgaagttacacaattgatgatgttcttcagacattctaatttaggtcaagggacaaatccactggtatttttatcgcaattttccttggaaaaatacctaagtcaggaagagcaaagcacagcagcattaactttgtataccaaaaaacagttctttcagggtatacatgaagtagttgaaagttcaaatgaagacaattttcaacttttagatatacagacaccatctatttg

SEQ ID NO: 110426 - DNA, 1061 bp, Homo sapiens
gacacagaggaggggtgtgtgggcagccagggtgtctctgtggactcccccaccccagtgcagggggtctctgtctctggctggccaagaggcggatgtggacagccccaagcacctacaggcctggagcttggggccctggatcacagcctacctgatgccagctgctcttggctgcaggaagggctgcgtgctgtcttgagaaaggaaggaagcccctggctgggccacccagccatccccgggaggcaggccctggacatcgctttgcccggagttgtccccttactggggactgggcagggcctgtgggacttcccctgtgggtgctctgagccaagcctgcccagccctgctcctcatccctttgtagagaggcagctccagcaggtctgaggccgttgccaaccccagggtcctggggaccgtggaggcctcgccttcttggctgctgacctcactggccccactccaggctctgatcttagtgtgttttgggggaaggtcccagccttctttcctggcccttgacagccgctgaatggcaggacccatcccaaaggccagtccagagtcttcagctgagtctctgccccacattcccccaggcacgtccaggaggtccccaggagccccctgcagcccagcctcatgtgctggtgcagcctcacacggctttcacatacctcgggaagttctgttggcaacatctagaaaacgcaggcagagggagtgggaggcacgcttgctcctgggccacccccagctccccggcagcggcagccaggctctctggttggctgggatgctggcgtggagccatgccctctcggtgccctgggtccccctctgggcatgggggtttttgggggagctgggaagtgctgcgtcagaggtggggctgctgtcgataccagcccagcgtgctagtcctgcaggcgggttctgcctcctgaatccacacagggttccttcaggaagtggaggttttaaaagccctttggatgcccagggacagccgtggggtgctggcagggggcccagggcactgcagcggcttc

SEQ ID NO: 110427 - DNA, 1051 bp, Homo sapiens
catgttatctgggagggagaaggcagggactggttaggcacagggagtctggccctcggtccctgtaggatccagggtgggaaaggggactaagcccctactcgccacccctggtgctctggtgctgagctgaggcacttgttccagcagagccatccctcaccacagaggcttctgttcatggggcgtccgggcacatggggcagcccgcctggtcctggagccctggcccagcagggcatacccttgccagcagggaggagcccatgtgccgacccagctctgccctgccgaatccacaccgccaggctgcattctaccagggaggttggcaggactgccttctggaaatcatgattcagagacggcaggtgacatggccctgttctgcacacggaggttgtgagctgcagtcctggccacacacgtgccatgcaggggctccagggctggatgcccctgtcagggggagcagccacaggcttctgggcccccatgttgtgcaaaggagaggcccctgctcaggaagacccccagccaggatcggcgcccaacctgctgtggtgccacctgccatgagactgccagtgggcttggggagctgaccgactgctggaagcccccagctgtgcccagcaagtgcaggtgaccctgcatcaattgcccgcctccctcaccataccccgacggccccccttctccactagtcacccagactctgcggagtgcggccttggaggactgtgcactgtgccaggagaccctgtcatcctctgaactggcagccaagacccgcgatggggactttgaaggtgtgtgggaggctctgggtcaggacactgcactagacaccagtgggggctgtgggagccacaggagccttcctcctgggggaggggctgcaggccaccctgtccgggcatgtgggagctgggagaccgcccccccggaggctggctggaggccaggcggcttggcagtctggaaaggagggcccagggtaggttgagggtcccggcccagcccacctgctcctgccgtcgctgatgtg

SEQ ID NO: 110428 - DNA, 1061 bp, Homo sapiens
aggcccgggactggctcagagccctgttgtaccacctggtatatgtggtgagcatgttacactgaggacattttaggtgaagttacaggaaagttgtgtatctgggcaacagatacacgcctgtggggtgagcgtctgcgaggacacagacttttgtcttgaccagtgaccttcgggctccacggccccttatcatgccccaccccacacaccggtatctccttctccatgcagcagctccacagctgggtcctgctcctcagacaagatggggccagaggcggccccagcagccacgcatgctgccccacaggccacaagagagaagatccggtccaggttccacggcagccacgacctcatccaccgcctgttcgtctgcatttcaggtgtcatgtcagggcctgagaccggtgcatggcttgaggacacacgggctgcgctttaggggaggtcaggcggggcgtgtacaacctccccctcactttcctgtaaacagcagcccactctgcccctaaggagccagcactcctgttcatggagaaggctggactgaccccacacaggcaggaggaggaggggagctgcgggtgagggtgggaggcgttttcctccagggagtggcggcgggggcagtggggtgggggcagaagagccaggcgctaggcatcacctctgggcagggtccaccctgggctcccagccacgtaggctgctggggggctgtgcctgcgaggggtggacatgctttgcaggtagacacatttggatgcctgagtggctgtgacagtcacaagcactggcctgggggtgggcacagtgcaggggctctgtaagtgtccctcagcgcgtagcctggccagcttagtggtgatggctgtgacctgtgcataaaaggtgtgaatgtcagcggcagaccgactgtggcggggctgtctgtctggtcgtctcccttcccctgatctctctcgactcccgagtttttattcttgcaagggaatcctcccccaaggggttgggcctcctccctccctgactgatctgagaacacgctggcctgg

SEQ ID NO: 110429 - DNA, 1049 bp, Homo sapiens
gcttttcctgtcacagacgtgccacgatgaacagcctcgcgcgaacagcctctcctctttcttttgggtgaggccgtttttgagatgcagcatgagcttcacggccgtgtgaggcagagcaccttttccccactactggatgctttcctcaggggctcagacccagttcactggcaatggatcgtttttctccgagtttgacatgaaaccatcagaaattctttgacaggataagtgggagagtttttggtttggggcctgcacatcttttgctgctgggggtggtggggggttgtccaggtgacagccagtggacgcccaccccctccagaagctcctcccaccttcctggcgtgagctctgtgccccatgatggacacagcctcttaacgcggcctcagcttcccaggccttatgcagctcagcacagacgctgaggctcagctgaggaaagggaaggagcccaggtggtggtgtcatcttccagggaagcgtttctggcagtgctgaggatccgagaaagcaagcacatcacagggtgatcaggacagtacatgttcggttcaatttaggtcagtgcctgggcccagcactgtgcccggaggtagctggaaatcaggtcagcgggcggcagcacatggcagctgtcccatccaaggcacaggcggtgtgcaccgtgggagcatcattcattcccccactcatctgtgtctcaagcatgttccggggtggctgggccaagcaccggagacccaccaaggaacaagagacatagcctgtcctcccaggtgtcacctcacaccaatacgggggtgatagcgcagtgggggtttttaaacagacagacacaggagaccagcttcacacacacagaaagttcacccaaattcaaacagccccgtgtcaggaagcatggctggtgttaagtgacgtttgtgcgaggccggtcgtgtgcacaggtgtggctgtgtttggttacgcctcccattctgcagtgggagagactgagacggagagggtggtatttgcctcagctgagagcatctgga

SEQ ID NO: 110430 - DNA, 1002 bp, Homo sapiens
actgagaattcccatttcctcagagaagcagagcaggtgcgtgcctcggcctatggagtcaggatggtgtcatgcgagagccagggtgccgggggcctggttggggtttcacttctaaatctgggtgctattcacatgggtggattcagcttatgaaagttctgcccagctctgcaaagcgcacttcctcacaatagccatggctgtgctggaatgtcccatgtgggactcagaccacagacacacccggagcttctcgcagcagagagcagcccacagtcggcctgtaggagcctgctccaggagcttcctgctcagcatcactgaattaactgcacctttgggtctcggcctcaatgcttcttcctccaggaagccttcccggcctcagccaggtgccctgctgcaccctccttcatggcttgcattgtctttggttgcagctgtcattattgtagttcagtcattgtttgtataaatgcttgtttatcatctgcctcacccaactgcaggctaagtccacaagggcaggagcatgcctgccttcttcctcgtgtcctggtacccagctcctgctgcatagccagtgcccaatggtatttgtggaatgaaaggatgaaggtttatgtgtaaaccagcatgtattttttcactccttagagtttttattcatgcagctaacacatgcctaacaattagggctttcttcttttcagcaaaagtttccagaatcttgttttaaaaaagaaactgtactagaatcccagccggccaccttgaacaccgttgtcctggccggcgagaccggagccttgttccgtggtggaggagacgtgctggtgccttgagaattcagttgcaagcattcagtgcctggctgttgttctgctggtgcagactccagggtgctgcgtccactcctggccaaggaggctggtgtggcttttgggaccctcacccttgggttttgtcttgattcgtagggatttgctgcagacgctg

SEQ ID NO: 110431 - DNA, 1168 bp, Homo sapiens
cccaggcacctgagacatggtctggtcccaagagacccaggaggaggcacccagagaaggtcctctgggatgggtgccctcaaggagagacgggctgagacatggatgatcaaggcacactcggagcttggcagggctggacggtgcgtggagaggagtgggtgccactggaggtggcatctgggaagcttgtccttcagcaggctttgagccggactctgggggagggacagtgaggaaagccggcctcagccacatgcggccccagtcctggggaggggagcttctcggggcatggtgggcaccacaagggaggtgggtcctgtgtgggggatgaggggaggctgctttggtctcgtggcttgtggagcgttggccaggctgcaggaagggaacccgtgcgggcctcagctcgcacctccagctggttttgcttttggagaagatggttccaggtccagttctcataaagctctgcagataaatttaaccacaaatccagtttttattacttgcaagaaggtagattttggtaacaaaccttgaggctaatttatctgattgcagcactgatgtgtgcagatacacttttctgattactttatgacccctccaatgaacacaagctaatcaactgcaaaagaggatgaagtctgggtaataattctcactgcttttttctaaacttatttacaatgcaatcacacaaggcaaagcatgaggcggcggccgtgctgggacagtggcgctgcagagtcccagcgggcgtggttttcgcaggtggttaagttgggccgtccgcggcacccagggggccacagggcctgacatcctggcttttgtgtctcaaatgcagtggcctcgtggtctatgcggacggacctctgaacttggaccgcaaggtggaagacatgtccgagctgttccggcccttccacacgttgctgcggaaaataaggtggggatggagctagaggaggtgggggaggggagggggacaggagggccacaggtgggcgctgaagtcatgtttagccgccgcctccaggtcctcctcctctctgtgaggaaggatgggctggttaatattccctagggaggggtcacaaacgacccatgggggtcacagagtcctggcttttgcccctgcctgggcatcgcatggggt

SEQ ID NO: 110432 - DNA, 1039 bp, Homo sapiens
tggcttgtttgaataatttgggggctggcagggaggtgaagcacattgggttgaagggcaggtgggggcagttggtctggctgatggaatacctgtgtggaacctttcctgccagcggggccgtctgggagagcagggaactcaaggcagcctgtagggtcctgtggggctcaaggacgtgaacacagcacatggaagctcaggcctgaaatccaccgaggcaggatgcgcggggtcacctgcttagcgtctctgagctgtctggggccaaggttagagcccaggggtcaggctgctcatccacaccctgactccagacggggattccccatgcccctgccaggcggatggtcacgggggcggaggagtgagtggaccacagagagcttagtggagcttgcagctgggggggaggcggaagtggggagggggaagaggggagggggaagaggggagggggaagaggggagggggaagaggggagggggaagaggggaggcggaagtggggagggggaaggggagggggaagggggagggtccagtgggcagcggccagcaggtgtgggactgggcagagtaggggatggggagcccttgagagagatgcccgtggagatgtggatgtcagtgaagtggtcggggagtggggggtgggcacagaggccacgactggtccaggctcaggctggagagacctcactgaggccatgctgaggagccccaggggaccccggggcacaggcacacgtggcagtgcactggggttgagcatggatacccctcccgtgggaaatgggggtgcagaggtgggagcacgcggggcggtggcagtgcagtgggctagggccagcggcggggcctgcaggggacagaagtgcttaaccccaggatgcgccgaacaccccttgttggagtggggagcaatgggggctgctgccggggccagtctggacacccctgggccaggccgctcactcccctaggtcctggtgccacctcctccgggagggctccagcgtggtctctatctgctgggc

SEQ ID NO: 110433 - DNA, 1051 bp, Homo sapiens
gtctcctccaagagctccgtccactctgggttacgtggtgtggtctgagcctggtaggccgtgcacccctggaggatctgggaaagccatgaactggtgcccccaaaactatacatacaaatgaaatttcccatgtggtttttatgaggttcacaggcccccagacagccaggacctaaaagtggtttttaatggcagtaatgcccacatcaggaacaagtgttcccctccggccctgcagcatgggcagcagcaggggctggggagccgtgctgcagccccacgcaggccacatgtggcaatagcctgtcatcttcatcttcatctcccaatcaggaaactgaggcaccgagaggaaggtgcccttcaaggtggcgggaacagtctcccccaggcccccaccatgcggactccccagcctcctccccttgccgtgctcccgagcctgacctcagccccgacaccgccaccctctctattgtgccgtccccatcctgcccgcctcccctttctaggaatccctggggtgcggagtcttcatcccacgctgccccgtccctgtgtccaccctgcccaccccaccttctgagccacctggttggggtgtcctctgccgaggcttgggttagttacaggggcccgcgggcaggttctccctcctccccagcctcagtttccacctccgtggagtgggtcctggggcagtcatgagatggagcgtgttctgtgcccggctggcctggcaggggcatgcatgcacaggggtgggcacagctccttgtgtggtcctggtgccccaagctctgtgcccacctgcagcttgggcctgggcgatcagcgccgtctcattctgtcacctgggaaatggcttcttgtcctgcatcacttgatcatccctgaggggacagcaggtggattggttctatcctaaacctggcgaggccccggcctctagacaagcctccctgtgacaacaggtctaccagggcctggactcagcccctgtgccagagggcagcttggtgaaattcccagttgctgagcgcacgct

SEQ ID NO: 110434 - DNA, 1006 bp, Homo sapiens
ggggtgggcctgcccaggtgctggtgcagagcttgggtaccatgcagtggtcacactctgccactgactaatggtgctgccagcatctgctgcataattgacagatggccctggaagctgccgctaaaaataccctggccgaggttttcttcccagtacaccaagcactcagaggcatttccaacacaacggcaaacggcatgctgcaaagttttatcaagtgatgacgaggggttttcacaaagttccggaatgttcttggtgtactcttcccacagggtcttgctgaatccttgcggccatgggaggtggggcctgacacatgctcctccaacaggggggagtctatcactgtgtcaccgtggtcctgagggtcccaccctgtggggctcctgcaaagtggccaagctggctgcaccccagccctggctctgggcctggccctgctgcggtgggaactcagcagcattagggccctgtgtgtggccaggacaacttttctggccggatcaggctctgggctcttttttgggctgttcagtggcagcctccaccttccatgtgttcagatgttcccacagatgttctggcccctccagggacagcctctgtgggtggggagagtccctgcccccaggagctcaggttagaaagaccttctgcccaggggacaggtgctgggggccctggagcctggaggaggaaagtgccacggaggagaggtgctagacctgccccgtggccccaccgatgaggaagggggatcagatgctattcctcatggcaacctttggggaggggctctgttccctttacatgctctgtgacctgtgtgcttttttgttgactgacagagttgatgataaagcctggttttaagtgagtttgagaggtgggggctgccaagctaggtggccccttctcaggcttcccgctgccacaggctttaattgggatgtatcaccgtgagaactgccctgtgagaaggatctggagggggatgctc

SEQ ID NO: 110435 - DNA, 1139 bp, Homo sapiens
agccagggtccggcttctggggagcatctccttctgtgggtgggagggggtctgtttccacatcagagactacactgaggtgataaaggggccctttgccatgccccaaggggcagaggcctctagctgcgtggaactctaccctctgccattggagggttttctctggggccactgaacactccactgagctgagtagacgatggctgtggggaaggctgccagctcttccacccttcacctgcccctccgagctggctgtggcttctgctgcaagtgagagcaacttggccgggagacgggtgctgcttggtgagacagcaggtgcagggaactgatttgttggggtgtctaaaccagtcccccaatctaaagcttcccagggcactgatttaccagaccatctgggaaactgcagaggcctgggcttgcttctgagggaggcccacgtgcagctttgcataagcaggttcttatgaaacatgagcactggtaacagctgtaaaagcattttaaataaaaatttagtgaggttaaaaattccatctcagaatgtacacgtgaatgtttttggtgcgtgtagagttcacgcctatgttttttgctggaataactgggtgctgtaattctgcgtcgcactccccccagaagtctctttgagaggtggcctcctggggacatccacattcagcctcagggtccttccttcactggctgcgctgggggagctgcgctgggccacctgagttcacagtgaggccggctgtatcttgccctggcttcctacgagcaggtcacatgggtcagccttcaccttgcccttagggggcaggggccgtgctctgccacctccacccctcctgtaggtagaggggagcccccagtccccagtgtctgaacctcagggcctggaaaacaaacatgcgtgcttgtgtgctcccttttccttcagaatttattctgcaggtggtccagttggggccttctggtatcaggggtgactctcagagcttgaaaacccaaagtccagctgagggcgagctggagggcctgggagacgtcctccccgtgtagcccagctccaggcacagaacccaggcccagccagtgctggccgtcttccagcatgagtggggcga

SEQ ID NO: 110436 - DNA, 1015 bp, Homo sapiens
tttatgcagcggatgcggtgagatttcaggtgccaccagcaacctgcattccacgggccgaggagctgtgggggtctcctctggggctctgcagatgagatgggattgactggccatgatcaatatgacagcgtcctcaaaggaggggcagacgcagcctgcggccctttcacggggagctttgtgaatccaattccttccaagacaggagcaaaagatcctatttatttgcctgaatctggaaagagataaaagcttttttcttttcttgtaattccagccagggtcgattctacatggacatatttttctgcatttttgtaaattccttacagctgaggtgtgtgaagtgcgattctcattaaactcacagggccaaagctgagcctctcgactgatgccactttaaatattgggtatgggaagagctgggaggtgggagtttgacagaagaatgaagagaacgtaatgtttcctttgataacttttccttggagttacatgaagaattgggtgacagtaagaaaggatataaacaattcattgtaagctgcaaaatttagttgtatttaaataatttaatatgatttaagagtcactaggatgcagtgggatggtcctattatcgacccttaatttatttttattcactgtagaggatgaatctatccggacctgcttgcagacactggctttaaatgagttcgttcccaaattccatgcatgctaagcgtggatgaaagaagacgtaatgtaacatgattgtacttttcttttagagagtcccatctattaatactttttgtcccatttgtagttgtcatgtttgttctgataaaggatgtacttacgcattggattatgatgggctggagagtgatcactgggctctacttgtttagggagaagctcagagtctgcgggagaggagatggtgccatccagccaggctggctgtggaggggatggtttctccctcagggagctgctttattcccccaggccatattttgta

SEQ ID NO: 110437 - DNA, 1019 bp, Homo sapiens
tcgatgcagctgcgcagagtggtgcctgttcacaggatcggatcgcagacctgtgtgacacgacacccaggcccctgcctgtgaccgagcagcccgagcagctggaagcatgtgccttgttagaaaggaggcgttgatgttttaggaccttatgtgcacacagctggagccatcataacttgtggttcatgacccttctcatgcggtcaaccaccccgtgaagagaaacgcagccagcctaggggtccaggaactgtaactcaagtccatggtgagagagcccctttgccagtcagctggcaacgtgaaggagccctccaggtccaggcattggagcaggtgtggccgtgggatcgcatacgtggctgctggggtgggtgacccagctgtgccacctgcggcaggcagaatgatggcccccaaaggtgtccatgtgtgaatccctggaacccatgaatctatgaggtgtgtggcaaaggggaagtaaaggttaaagatggaactacgcctgctcgtcagttgaccttccgatcatgaaattttcctggattatgtcggtggccccagtggaaccacaggagtcctcagtagtggagaagggggcaggagagtcagaggagctgggcctgggaagaaggctgtagacgtgcaatgccgctggctctgaaggtccgggaggcggccgtgcgtcgggaagtagctgtgcaagctggaaaagggaaggaaacagactcttccctggagcctccagaaggcacgcggtcctgctgacacctgcttctagtccagagagacccaggctggaattctgtcctccagaactgtaagatgtgaatgttgtcatcttaagccgtggagtttgtagtgatttgttgcagcagccacaggaactagcacacgcctcctggggacacgcacagccagctttgctcacaacagtaaagcccggaagtccgtcccccaatccgcaggtgtggccgagtgaactgggggtgtccagttacgggaggaggggcagc

SEQ ID NO: 110438 - DNA, 1059 bp, Homo sapiens
cctgagctcgactttgacgtgggtttagcaaccaggaaaaaagcccaccttgtccctgctgcctgagaatacccagaccttagtccatggccagcatctctggtccctcggcaccctcaggcaacgtgaaggtcaccccaaatgccttgggttacattgtttccttacagtgagtttgtttgttttagtggcgcgatctcggctcactgcaagctctaacctcctgggttcacgtgattctcctgcctcagcctcccgaatagctgggattacaggcgcctgccaccacgcccggctaattttctttgtatttttagtagagatggagttccatcatgttggccaggctggtctcgagctcctgacctcaggtgatccaccctccttggcctccaaaagtgctgggattactggtgtgagccacctcgcccggccaccttacagtgagtttctaacctcgaaaatggagtcaaataacggaatgacaaggcagatagaaaccagagcattaacgtttttgtgttgcatttacaaacaatatgtgtttgctatttttcgtaattgtaaggaaatctggcatggtagagtatctgatagataaatgtaattctcatgtaaaatatctaagtatttgtgttttttgtttgtttgtttgtttgttttgagacggagtctcgctctgtcgcccaggctggagtgcagtggcgcgatctcggctcactgcaagctccgcatcccgggttcacgccattctcctgcctcagcctcccaagtagctgggactacaggcgcccgccaccacgcctggctaatttttttttttttgtattttttagtagagacggggtttcaccgtgttagccaggatggtcttgatctcctgacctcgtgatccacccgcctcggcctcccaaagtgctgggattacaggcgtgggccaccgcacccagtctttttttttttttttttttttgagacgaggtgtcactctgtcagccaggctggagtgcagtggcacaatcatgactcactcactgcagcctcgacctccccaggttt

SEQ ID NO: 110439 - DNA, 1424 bp, Homo sapiens
tctaggctctgtttactaggtgtggatgactttggggaagttccttaactttaatccttagctgcttcatgggtaaaatggggaacataacagtgcttatttccttactgggtgatgtgaggagcacatgtggtgatattaatatttaggaagcgcagtgccttgtgcagatgcagagaaggcacctctcagctgttgttagttttcttattccattggactctcacctgcatgatccagaaccctttgtagttggtgagggctactttcccatgaccgctaaggtctccattcactctgcatttctacgtccccaccacgctgggatgctctgctggaaatgctcctgtctcacctcagtgccctggtgaaatccagcctcttggtggcttatccccaagaccagccttccaaattcctttgaactctgactcctgacccttactaaacccaaaagagagagaaaaaccagatttggggtgaattgctgtatgggccagggcatggagaatgagggggctccagaaagcttcccagggaagtagtaatggtctagctgggcctgcagggatgcaggaggctggtttcagagtggtgaggggtgtgcaggccaggacagccacaaggcacatcttcagcagccgtatttggaagcctcaatatcagtgaagtgggaggagagaggcttaggaacagcctgggtgtggacatcaggtgtttccctttgctctgcaggctgatttctctgtcttcctttgtcagtagcttctcttttctaaattctaagacacgctattgatgtggcggggagaacaagcccctatatgatagatgtgcacccaaatgtaagatatttcttgagatcagaaacattcgtggatatgagaacccaggacatgtggtggatctgggactgtcgtgtggtctgaatgatcttgtgagtcctaaggtgatgtcgaggcacctcccacctctgttgaaaccaactagacaagtcttttcctagccagagcctcttccctgaatgtctgtttaaagttgaacacttaccaggtgaggtgttgctttgagaagcatttgtgctccgggctggagtgcaatggtgcagtcatggctcactgcagtcttgacctcctgggctcaggtgatcctcctgtctcagcccctggagtagctgggactacaagtgtgcaccgtcacatctggctatttttttaatgtgtttttatttttattttttgagacagagtctctctctgttggccaggctggagtgcagtggtgccatcttggctcattgcaacctccgcctcccgggttcaagtgattcttgtgccttagcctcctacgtagctgggattataggcgcacaccaccacacccggctaatttttatatttttagtagagacggggtttcgccat

SEQ ID NO: 110440 - DNA, 1004 bp, Homo sapiens
cttcccttctggttcctgaggagttggtgtggtcatgtgtggcagtcctgactcgcacctcctcccagcagttagcacggtaccttgccaaggtggcaggagccaggaagaagagtaggaggtggcataataattacaattgcaggctttgggatcaggaagtcctacatgcgacaagaatgcttacttcctaagatgaatataggattaaggatgtcattgcgtgaaatagtaagcaaataacctagggacaggaaggaccagtacattattgagctcagctttgtttcaatgatgtaagtggcagtatttatcaaattaatatctttgtttttcaggacttgaaaatactggaaatctgtccggatccaaattattttgcaagccagatgagtaaccagagggcatgaaaggttgagaacatttgacttccctgcaaaccttggtatagatcacttccttttctgtaggaaaggaaaggcaccaaagagcacaatgagtacagtaagttttatcatctcttgaatttttaattttgtagggctaattaactaccttattccttgtagcacattagtgaaagtgagttccataatgtcacttctaagtaaccccacttcttgaaggagtatgtataggagctttctggtggttacatcagcttacttaccgacattgagctacattcgagtcataaagggcagagccctgaagacaaaaggctgagaaggaatagcttagggtttggtaatctcagaccttcacaacagttgtcagtgtcatagaaatactaaaactttttgctttttaaaattgtttgtagactgggcatggtggctcatgtgtaatctcaacacttggaggcgtgaaggtaaaaagattacttgagcctaggaccagccagggcaacataggccccatctctacaaacaaacaaaatgtagccaggcgtggtggggcgcacctgtagtcccagctacttgggaggctgaggcaggaagatt

SEQ ID NO: 110441 - DNA, 1050 bp, Homo sapiens
tgcctcagcctctggagtagctgggattacaggtgcctgccaccacgcccagctaacttttgtattttcagtagtgatgaggcttcaccatgttggccaggctgaccttgaactcctcacctcatgattcgcccacctcagcctccgaaagtgctgggattacaggtgtgagccaccatgcccagccgacctgctgatagtttgataaaacagaagttttactttctggaatttctactcattttatgttttggatggtttctctctccgtaagcattcagtattcttgaatctcaagttttgaaaggagccctaacttcaagtctactcgctggcttcttaatgaagtgaaccatttctattgcccatttagttcttcctgaaaccctgacattctggtgttcatgtgactcttctttcccccttgctactcagagaaagcgtcgtggtggagcaataaattctagacaagctcagaagcgaactcgggaagcaacctccacccccgagatctccttggaagcagaacccatagaactcgtggaaactggtaagattgccagggacactacaactgtggggtgttaaagtggagagagaacactgtaccagggtgagctagtagaaggtgctttcagtgtctttagaaggcctatgcagtctcacactcaccatgtacaactcaaagcttcacagattctgaaatagcttctcaactgggctaactgttcaactctggtaatgtgcagcagtggggtaggatccatttaaaaaaaaatctagcgcaaatgagatagcccaccttttctatctgaaactgcatccccaattgctggaccttgtaaagtacttcgctttcctcttctgtttttcattaggacatgaaatcacccaagaaggcaaacttgtccacagagctccctgtgttggagcttggtataggcagaggccagattggatttccccttctgcctgctcaagaagtggttgatggctggcctaagtccctttgctctgcatatattgtttttataactaggatacctgcaa

SEQ ID NO: 110442 - DNA, 1028 bp, Homo sapiens
aaaaagaatttgccctagattaaccgatgaagttactaagctaagcctgacttttggtccttgggccaagtgagagtggtcagcttcacctgctgggaggagcagaggtttcaggctagtccatcccaaagagaaaggcctggggctgggcatgcatggtgcgttctcccagatggggcacagaggcatagccgtgtggaagtgggatgccgtggaatagaggtatgcacatgcgcacacatacataaccccccaggtacatttgtaaaaaccatacctccccactcagagcagaattctggaagggtggttactggctttccctcctgagggaggtgttggtcctggtgctctttgcagtgtatacttcaggattgttttagtttggggtaagcctataacattagcagtcatactaaagtgtagagggatacaaccttactttcctcttaatcttaatgcttgttgaaatactttcttttgaagctggagatgaaattgtggacctcacttgtgaatctttagagcctgtggtggttgatctgactcacaatgactctgttgtggtaagtgttggagtgtgagagtcggctgtttcttgggtatgggtccctggccagtgccagcatctgacagccttggtcacagactccaagtcaaggttacagcttatgctaaagaagttcatgcatcttgtggaattgagcttttagaaagaaaataaacagtaacaataataataacaaagaagttcatgcattcagtgacgagagcccaaaatgaaaaatgtttctggaaaatcatttgttatagccttgtcgcctatggagtaggtctgtgtaacctgaccttgccacacctgggcacaaaagtggtttggggagaatctcaagacccccacatctgtcttcagtccctgattccacagtttacaccagctgtgtgaccttgggcatgtgacttagcctcattcactttccatgaaatggggacaggtcactcatgtcagcagggcatggtgtaagaca

SEQ ID NO: 110443 - DNA, 4769 bp, Homo sapiens
cccaggtcttgcagtcagcacatggtgtggctgtggcagcccccagatagtaaggaaggtccccaggtcttgcagtcagcacatggtgtggctgtggcagcccccagatagtaaggaaggtccccaggtcttgcagtcagcacatggtgtggctgtggcagcccccagatagtaaggaaggtccccaggtcttgcagtcagcacatggtgtggctgtggcagcccccagatagtaaggaaggtccccaggtcttgcagtcagcacatggtgtggctgtggcagcccccagatagtaaggaaggtccccaggtcttgcagtcagcacatggtgtggctgtggcagcccccagatagtaaggaaggtccccaggtcttgcagtcagcacatggtgtggctgtggcagcccccagatagtaaggaaggtccccaggtcttgcagtcagcacatggtgtggctgtggctgtgttcacgctccaggagactccactaaacacccagcagggagagacacagcacatcagctgggaggtggagtgacttgggaagtgggcttgactgactgggagaggtgcacagatcctctgtgggtgggaggagggtggggcctctgctgctcaccagagggttccacagagggtgtcacacgtcagaaaaaagaaatggcttcgtttatcacttatatcaaactgattgcttctttctcttttgtttttctccttctgtttacaagattgttgacggtgagtggtttcgtttcctttttcactgggtttggagaggaaactggcataggtgagagccgcggtgctgcaggtcttgccagaccatccccaagggcttggagcgctccaagcaggaagatgccttcgcagatgctgtggtcagacccacacagccagtcccccttgtgcctgctgaagaaacttcaccactatcattgagcactgagctatagtcctttcttgtggcctaccagattttggagaaggctggtagctcacagcaggggttggggggtttctcctgggaagataagatagtggcctccagagctgggcagaaccttctgggttatagctgagcatggcagcagtttgtctctgggggtcccaggcagggaaggaagagggtcttaagaggcgtcaggatgggagtggtgaggatggtaagagtagagagcctccaacctgaaaatgtgacctcttaccttagaaagaagaagaccaaggaggaatgctaggaggctgccccaggaccatgctgacagctgtgtggtgagcagtgacgatgaggagttgtccagggacagagacgtatatgtgactacccatactcccagaaacgccagggatgagggcgctacaggcctcaggtaccaacgtgcccccagctctgctgccgccatgctaggatgtggggccagggcatgggaatacttttcagcaaatctgtgagcccttggccctggaagggcttgcccaagcctctacccagcatctggatacagttggaactgggtccagaactgagtccagctattcccactgtaaccagaggatgccaagcgctgacacagtgtgtgcagacagtcccagtggccccagacagggatcctggggctggtaggggcctgggggagggcagggtgactcaggttgtgtgcaccttctcatgttcaccctcccacatgcccttggggcagttggctttcctgaaagtctctcggatgcccgcgctaaggcagagtcaggaggccagggacgggactcttgtaggggataggggccactcacgtgacagggtataataaaatgtttgcgttgactgagaaactaacgtgaagcactgtgctcttaggccctcaggtactgtcagttgtcccatctgcatggacggatactcagaggtaagtaaaccaagctgtatcttccaggcttctggtttctaaacttcactgaaagaattggatgagacaggatcttccccctcggtgggattggacacccctactcacagtcatgcctgggccgtcacttattgcagatctgcctgtgaggggagaatgtgccagtttctccttggaccctacaactttcaccttcagcccctatactcctgtatgccctgagcttccgggtgcaaatgcgtcctccttttttgtgccccatcctggctctaactgaaagctgctagtgtttactggggtccctcataaccctcttgggctgtcacactgttgagatgccatggcccctgcctcctgctctccagctgagagagaccacagcagacacagttagctctccagacccctccctgttgtagcctggcccttgctttcctttaattagtcatcttaggcataggtgggtgggattctctggccccatggctgctctgggacaagggcaaactcggaggctcttctttttaatgccttctagatcgtgcagaatggacgtctcatcgtttccacagaatgcggccatgtcttctgtagccagtgcctccgtgattccctgaagaatgctaatacttgcccaacttgtaggaaaaagatcaaccacaaacggtaccaccccatttatatatgaagtattcagagccccccaggagagacggatggacagacagacagccaggttctccagtggtatctgcctccattttcctgagatcaaaaagactgtttcgaaaccaacatctgatatgtaaactgctcttttgtttccaaccccttccttttgttatctccagtttgatgctatggcgctggacccagggccctcccaggccatctctgttcctctggggtggtccagttctagagtgggagaaagggagtcaggcgcattgggaatcgtggttccagtctggttgcagaatctgcacatttgccaagaaattttccctgtttggaaagtttgccccagctttcccgggcacaccaccttttgtcccaagtgtctgccggtcgaccaatctgcctgccacacattgaccaagccagacccggttcacccagctcgaggatcccaggttgaagagtggccccttgaggccctggaaagaccaatcactggacttcttcccttgagagtcagaggtcacccgtgattctgcctgcaccttatcattgatctgcagtgatttctgcaaatcaagagaaactctgcagggcactcccctgtttcctaagaacgaaaaagtgcaataaaggccattcgttacctacttttcagcagcccacaagatgtagcactattagtgtccccctcagaggcttaatgttgcctgtggagcagtgcccatcccagcccgtttctgcccaccagttgttctcaggaaccttacccatgctccagcgtccttcacctggcacaggacatgcaagataaatagggcaggcacgtgtttgggtgtcctctcttttctgataaaatccatcccgtgtttgccacacgccctccagtcctcagttcccactgcctaacgtctgcccccgtgtagatactgagaggtggtggcagtaattgtggccttatcagccgctcagttccaggcttttgcccaggtcactgttgccccatgttcggagaacctggcccacctgtcttggctttctcatccttcccaacccagtgccgtttatttcagaagcttcctggccactgggcttggatgcttcgggcttctgactgctccataggttttgactggtgaaacaggggcccagatgacaacctctccttcgctccacaggtacgcgggagcctcaggttctctcaggggcagcaaagtggcccaagctgcccctgacagcacagggcctggggggtggctaacgagagaggccttacagtgccggcatgcctcctcttccactgtcgtccttcctcagagggcctcacgccaaacaaacggccttttcgtgtgaaacatcttcagggcgggaaaggggccacttctggctttgttagcaataactgaccttcagtttacccttctgaaggagcagggactcagcacagaattcactttagacggggctgaaggagtgtccctcctctatgtgaaaagaaaattgttttattcttcattctgactttttaactgtttggctcacttccagttagtttgaatgaaaataataattttctacttggagttgaagagggcagaatccgcagctctcatcattgtgatgtgtagcatgtctgccctctgactggacatcattgccattaactttcttctgggcatcacggcaatgtcacgatgcccagacttggagcaaggcaaccttggagtcagtccactcataaaatatggtaacacccattttaaaatttaagttttgtccttaaagacaacttcagtggttaattataaaagttgtgttacttcgtcctaaattaaattgatagaaagatttaaaaatgtgttttgtttctactattcagaaactgcgaactagggaaaggttggtatgaagaaatgtctttccttttttcaatgtacatagttcaactctttctttgttacatttaaactatatccatggatatcagtctgctttggactcctctgctagtgttacagatggaaataaaaccattaatttgaaccaaatatcttttacacattcatttgctctttggaatcaatttcccccctttttgccaaggtgcggggttcttatctgcctcacgttgagtgtattttgcattggtgtgtgttcaggaagtttccatgtcctaaatcca

SEQ ID NO: 110444 - DNA, 1385 bp, Homo sapiens
caaatttttttttttttttcaagacagagtctcactgcgtcaccccagctggcgtacagtggggtgatcttagctcactgcaacctccgcctcctgggttcaagtgattcttttgcctcagcctcctgagtagctgggattacaggcatgtgccaccacacttgggtaatttttgtatttttagtagagacggggcttcaccatgttggtctagaactcctgaccttgtgatccacatgccttggcctcccaaagtgctgggattacaggcgtgagcaaccacgcccggccattttttgtatttttagtagagacggggtttcaccttgttggccaagctggtctcgaactcctgacctcaagtgatctatctacctgcctgggcctccaaaagtgctggaattacaggcgtgagccactgcacctggccgatattttaagcttttaaagctgtctttagtttttaagtttctttgtaagtattttaataattgttcattaaagaaactctttatggtaactggggtaaaatattcttgacacagatcacagaaagtcttaatgtaattctgaagcctctgaattgtttccccacagatggtgagctttttggagtaccttgtatggtgcaaaatggcacccaaaacagtatcaaccagaaacagtgagtggtttctggccctatggttcccagggaggctttctgagtcctggcaagcagcctctacactccgtagtcaccaggccaggaggtggataagagagaaggccgagtggaaggactgtcttgattttcaggagtggtcacagtcccactgtcctgtgtgcgggacacagcactatgtgttatacccaggaccaccttcatcgaggtggctgctgagccaaagagggtgtttctgcatgtgggtagcttcaacaaaggaggaggaccatgggagaagtaggaaaacataacttagcttatagggtctttgactcaaaacagaattcttatacacaaagcttggggaaccacaaatttgttaggctctgttccatgggcaaggtatcaaccttgcgctacctcagttttcttttcttttttttttttaaatggagtctcgctctgtcacccaggctggagtgccctggcgcaatcttggctcactgcaacctccgcctcccgggttcaagtgattctcctgcctcagcctcccaggtcgctggggctactggtgtgtgccactatgcccagcttattttttgtatttttagtagagacagggtttcatcatgttagccaggatggtctcgatctcctgacctcgtgatgtacccgcctcggcctctcaaagtgctaggattacggtgtgagccactgcatttggccactaccttgggtt

SEQ ID NO: 110445 - DNA, 1080 bp, Homo sapiens
ttcgttggtggtaaccagttctggtaaacagtctgaaaattgaggctgacagtttctagcatgtggtggaaaagtaatacagaagtcaaggtgaaggggttaattttgacaattttctaactcgtactaagataagattttctttatggcactatttaaagtattacgagtttctagaacattaggtttagttttattcaatacatttcctattttatgtttctgtatataaacatacacatgcattttagttttagaactatacatatattttaatattcttggctttgtagatgaggttttgaaaatagaattttttttttctattccagactccttttagttttggcatgaatcataggacaccaccctaccctgctggggattattgtcttctgtgcagaagtgaacggaaagactcatcattcttagagagtggaattaagactgcgagcaaattggccctttccatggctcccaagggcaacagcgtgctgcacctgccactgtgggtgtgcccggactgccgcaggaccgtggagaaggaggagaggcatggcggccttgaccagccagtggtgagtggctgccagcacaggcagcgcagggcgttggctccccccgcccaggttatggggtaactggcagtgaaagaaatggatttgcttttgcttcagggggcactccctcctgcaccaccttctagtctgtgtctcctggtacgttcctcctggtcttccctggccacactgcagtaggtggcaggacacctgccctccttgtctgggcacaattcagtcatcaagctatgtgaccctgaagggtgatttttggctttgagcttagtatttctttggtggtacagtttcttgaaaagggagtacaattttcatgtgtttagttctcaacaattcgacatgcaggtaattctttacgcgatgctcttaagcctcaccttcccttttacttatttgtgctgcttcagcctcttcgaggccacagcaggcttggctgggaagaccgcacccttactcttatctttgacctgatggagttttggtgggcccttgttccgggcag

SEQ ID NO: 110446 - DNA, 1480 bp, Homo sapiens
tgtctttgcagcccttctaaacttgccattttagaggggagatgtgctgaaatccatgtccgtgtagtcagagttctgatgcactgtgtgccttgagacatacagggagcagcacttctcataagctgaacactctgggcctgtgaagagggatgtgtgcgtggtggggggaaatggggaggggggagggaatccctctgggaattttctagtctttagcaattcactacatcttctgtttatcttttactttttcttaaccaggaaaatgaacacttgaaaaagttccaagtgacgtgggaactgcataataaacacctgtttgaaaatctggtcttttcggagccacttcttcagagcaacttgcccgcactggtgtcacagatcaggtattttgccttaacccgtatgtgtctttgtggtgtgacagcacagtcttttctcctgactggtgtgcgtgtacccgagtaccactgagtatgaaagttcttgcaggaaaaataacagggcttaaagaaaaagatagtttgggccaaaagctcaaaacctgagaagcaatacaattaaacttttaaatgataagtcaatataaatgctactaagatttaacaccacaaattcctcatacagaaaagctacagtaaatatagcacttttccttgacaagacctatccttggccgggcagctgtggtgtggttcatgctatggctcttggacatgtaggggaaatggaggagggaagaggcccaggtctgagggtgcccaaggccctccggatacagcttggtgtttcccacacattccgttgctacccgaggctctgttgctctgtctcctggtgtagcgcatccatgtggcttcttcacgcttgggaagctggctgggttctatgctttcactgagaaaaaggggtgcagagtgcagcagtcactcactgagtatttgctcggggtcagagtgagaagatttaggctgggcatgtgtttgccctgtggtaccatgttcagttagaaggcatgttcctcctgatgtgacgttactcagcagaacgctgttccctgcactgagtcatgcatgagctaccacaggtctgcagtttggtgattttgttctttggtgttttattctatttaccacatgtgagcacattcccataatacagacccatcgtgacagcagccatctacatttgaccacgttaacctatacttaggggtgtggtggctcacgcctgtaattccaacactttgggaggccttaagcaggcggatcacctgaggtcaggagtttgagaccagccttgccaacatggtaaaaccccgtctctactaaaaatataaaaattagccgggcttggtggcacatacctgtgatcctggctacttgggagtctgaggcaagagaattgcttgaaccccagaggcagaggttgcagtgagccaagagtgcaccactgcactctagcctgggtgatagag

SEQ ID NO: 110447 - DNA, 1313 bp, Homo sapiens
tgccagagtgggtccagagttccttctcctttgaaatgcagatgctcaccttgtctgttagaagttgaggtgccatttcctcaatagctccgaggccgaccccttgccctccacgtgccacttttcattcctacagctctgttctcagtaccttgcaagtaccaagcacatggcagacagggtaaaggccgggtttctgcatcaggtgtgtgctgtgagggcgcactgcagcatgtttgctgaagacaaaagcgattagggtctcctggtacccgagccctttgcagctcagcccccagcttgctgccgactccaggtctgctgcccctgtattcctggtcctgtcccgctgaggaagcagtgcccgtgaacatgatacatgtcagcagaattactgaaaaataatgagccatgtctcggggaagggtcttgcaagattaaagcattttaaaatttcctctagttaaccaataagaaagcagttactggcgagaacaacttcacagacaccatgaggcacatgttatcgtcccggctgagcatgcccgactgccccaactgcaactacaggagaaggtaaggctgggttgtggtgtcagcacgactggcccattggaccttcactgggctgagtggaggcctagaaccgacccttagagagcatggtctagtcttgtgcattggttggcttggtaactgtccttaattcctgatcagatgtgcttgcgatgactgcagtctctcacacatcctcacgtgtggtatcatggacccccccgtcactgatgacatccacattcaccagctcccacttcaagtggatcctgctcctgactatcttgctgagaggagcccgcccagtgtgtcatctgcaagctcggggtccggctccagctctcccatcacaattcagcagcaccccaggctcatcctcacagacagtggctcggcaccaactttgtaagttgtgactttgtaataaagtttccgaaatttaagtcgccccagtaatgagaaatacatacagtaatgtccacagaagtatgaacatcattattgtgcttttcatgacaagggaccctgaggtttttaatgcagcttttaaaacatgaaatcagtaaacccaaacttttaacactgtttatctgggaaaaaaaaaacatggtaaattaataaaggccagtaaagaaaaaacatgttggtatgcagagaagaagtgtctctaattccggcctcacatctcctcattctcctaaagggtgaccagtccgccgtctgtcctgtctccctgtcagcccagcactcatgcttgt

SEQ ID NO: 110448 - DNA, 1047 bp, Homo sapiens
catgactggccttaaagcaaaaaaaattagtcttctgttacataagtgcctttaaagttttgttcaactgactatttctgaaaatttcagccctaagttgaaaaagcaaacactaaacagctaaggtttaaaaagcaaacactaaacacctaaggttgccatcggtacccctttaattttaatcacaaattgtgttgtcttgggagtagcagagagactagttttataccagcgctcttcaggtcaaatggaaacgttaatcagtctggttaaatttttgtagtttccttaatatttctacttttggaggtttttctgtttgttttttgttttttactcttccaaatggcacaaatgttaatcttccaagcatttttctcatgttgaggttactaagaaatgttagtggtaggaatgatacttaactaatactctttgtaaatgaaagccgtgatctgtccaggaaatatctgtgcttagtggctggtttactcattgtctttcacaattgaatgacctcacagtgaccatctctgcttgtgtcagttgtagtgatgatgaagatgttgcaccattgtcagccaaatttgctgatatttatccattgagtaattatgatgataccgaggtggtggccaacatgaatggaatccacagcgaattgaatggtggcggggaaaacatggccctgaaggatgaggtatggacatggcttcttcgtagcaacaataaatgacataaaatgatggtctgacattttaatattttatattactctgttttgaaaagtgcaaattacaaaagattgtctttaaagtctcctcagataagcagtaccagcagtagttcctcagaagctgatgatgaagaagcggacggcgagagtagtggggagcccccaggggccccgaaggaagatggagtgctgggaagcaggagccccaggacagaggagagcaaagcagacagtccacccccatcctacccaacacagcaggtaggactttgcttgctgttttgccaaggatctctttttctgtgtgtatt

SEQ ID NO: 110449 - DNA, 1053 bp, Homo sapiens
agttcttttattcagaattaaatagaacagaaggatttttcaggtgctatttctaacaggttaaacctagggaatatttccacaggagaccagtaatctacttgtgatcttccagggcttgctcttcttcttaatttgataggtaaaataatgtgaatacaacatgagtcctctaacactggctggactctacagggtctaaaatgtctatgctgctttagcatttagaaatacacgagcctaaataaaggaagagccctaagtgtgatgccacagaaaactataacgccctgcaggtgatggagcactggggaggggagggtacagaaaggagaagctgccagaaacccagtgtgaagagcccattcaggaagtggagtgaggatgtagaaataagttgatttttatgcatttcttcccagagaacctcatgtgtatacttagtatcttagactttacagtgaaattcttaggctggtttctttctttggaccttagatagctttgcctctctagttattttgagcttaactttaccagaatgactcaccgtaattctgattgttttcttttttttctttgtaccagttattcttgtccaaaggtagctctaatcagtcaaaaatataatttatttcaaaccctaatttattatttaaaacattgcttttgagctggaacagaaagggaggaggacatgacatggaatgattttttccagaccacagtttttccaaacacatgtgtgttttctcccctctaggggtcactgtgaagtggggtacatgtagcccataagtgaggtttgttgtctctttgctagggagaggcgtaggtggaagattaacagacacaggtttagaatagagtgtaataagtttgccacatctattgtaattacttggcacaaccatccaaattcatgcttaaattttgttagattgaatattgctcagtttgaacttttaatgatgtcttaataatagaatgctttttaataacatttttcaggtatgtagtcagaaccaggctatcttcatggtccgcctggtt

SEQ ID NO: 110450 - DNA, 1589 bp, Homo sapiens
aaaatatgtggtggccattattatgtggaaacataagatacaattatcaaaatacttcatttgcatctggtatgaaaatgttcgtttctgtaaacaaacttgaattgtcacttaccaggtcttacaagattagtttgtgttatttgacttagtttggcttagttggatgctgttgaccacatctgtgcctaaatgcataatgcgttagcagccctgaaggggtctcctggtccaccagtgagttgtggacagcttaagaagcaaatgagctatatcagaattgcacaaatttcagtgacattggaggaagtttcttagagataatcaacagcaggattgttgggcaagaagttctgaatgtagggagcagaaggtgggtgctgaacgtggagggggccttgtgtactgtgtctgccatcacttttgcattgttggggccttggggagtttctgctgtgctggggtcacagtttttgccttttggcacattatgtcattgtagttgtaattcttataattcatattttaggctttgtgggtaaatatttagtacctaaaaagtttagcatgggtactatgaaaaatttattttctggctggttgtggtagctcacgcctgtaatcccagtgctttgggaggctgacgtgagaggattgattgagcctgggagctcaagaccagagcaacatagtaaaaccctgtctctaccaaaaaaaaaaaaaaaaaaattcttgaaattaaaaagacttgaagactaatttctgttttcaagtgtctccataccagtgacataccgaatttatatatggagtataagttatttgaaagttcaaagtattgctgagaaaaatacagtaatgaaatactacataaaataaaaactgtaagtgccagagaatttaatttccaaatatttggggatctcccaactatctttttgttactgatttctactttaattccattgtgatctaaaagcatgcagtgtataatctctggttttttgagtttattaaggtatgttttatggcccagaatttggtctgtcttggtgaatgttccgtgtgagcttcagaggaatatgtgttctgccgttgttcagtgaagtggtcttcagatgctcattatgtccaattgattgatggtgctcttgagttctgtcagtcagcaactatgttttgactgattctctgcctgctggatctgttcatttctgattgcgtgcccttgaagacttccattgattcatcggtttctccttgcacagttctatcagcttttgccctacaaagtttgatactctgttattagcggcacacacattgagaattgttacgtcgtcttggagaattgaccctttttcattatgtaatgctccttactaccactggtaacttcccttgctctaaagtctgctctgcctgaaattaatatagctcctctagctttcttttggttagtgctagcatggtatatcttccttcattgcttactttttgaaaagatttattatagtaaaatatgcactaacataaaatttacaatcttaaccatttttaagtgtagaattcagtggtattaaatacgt

SEQ ID NO: 110451 - DNA, 1792 bp, Homo sapiens
gtgccaagtagccttggtcccttgttagcttcgagggccagggtgtatctttacactccctctctgggttactttgagacttaagtaaaaccactggaaacgcatttaatacagttaaaatatgattcagttaaatatagtttaaagtataagtgcagatttagattgggcaggtaaagctatgtggataatagggtcataaataggttgcaatatggggatcacattgtgatcttcgacctgcatgttcttttagagctgagattcagctcttccagcctgaaaactggcacagccaaagcaaagatggtccttcgcctctttaccaatctctgggagaaataccaaaaaacctgttaagcagaaatacagagagtctgtcatcttaaccttttcgttactggggatacaactggaactcatttttgctcggatgcttagtgttgggaacctctcacgtgtgggcctcatgactcagtctgcggctcttgctcctcatgtcttgcacccatgttccatgtccgagtgggtgtgggtggtagaggacaggcgagtcacctagctcctggataaactcagtgtgtgcgcagtggaaagcagtttgttgtgtttgcatatttgtgtcagagctttcatttaaagcaacagttttccttttctatggattacttcttttgtctcaaagtggataaaaatgcaaaacttctgctagttgaagctttgtgggtttgtataacgagtgaaattggtgttctgattcaatagcgtagtccacgttctgagagagttactttacagttatatcattggtggacttataaagtcatggtccaaaaatggtctaggtgacagacacctattttttcctgaaagaaatccataagctattgaggtcagtaggcatcttctgcaaaagcattaaagaaaatacaactttttttgttactgatccctgttacttttgtccctacaactgggcttccgtttttgagtgtgtggggttctgaatagtgtgtaaatcaaatgcgtagaatcattgccgtatgtttccaatattacagttatatagatgcattcccttattcctctaagctagacactgttcagcaaacacttattgaacacccaatatgtgccaggccctgtgctagactctaggaagacaaaaatcggttagtcttggcccctcttttcaaagagttcacagtctaaagagaagacaaaaacataatcaaaatatcaaaatgttgtgacttacagatgctaggcagaaaagtaacaccgaagagagaaaattttaaatgagcccacgggtggttttgcagaggaggtgatgctgatgaaatagggttttgaagcataagcaagagctctctgaacacacatgggtggtggagcccaggctctcagccaggcttttcaaacctgaaaccaaacaactcatggtcgtgtcttgaggagtccaggaggcacttaacgtagcttcagagccctgagagtgcttctagtcatggtttaccagctgggccggcacaatgggactgctgctcaaagctagcagtttggcatctgtcacgggcttctgccttttacaagaaggtcctcaagaccaagaagtcttctacttgttactttttgtcaattacttctcagcaaagcagctcttagcttatcgctgctttgtagaaatgggtatctattgaaatacgtttttttattttcctggctcttgtcccatggggctcccttaccaaaacaatgacttcaggccctttactgtatcctgggtggc

SEQ ID NO: 110452 - DNA, 1113 bp, Homo sapiens
tctggctgtagtggggagaaggactgggaagagttcgtggtgcaaatgtgcaggctgttgcactgcgccactgtgagaacatggtgctcaggatctcctaaggaggtcagcagccagggcctgttgcctggatagtggctgaggcagagggaggacccaagggggccccagcctgtgcaggagcagccagatggctagtggctcaataaatgcatggatgttggctagccagctggccagaccctgctcaccttcccttggtgccttcaacaatggtctgccccacagggcccagggcggggcttgccaatgaggcagctcctttgagaacgccctggtctttagagcacagtatacaaatttctctaggtcattagatttgtgctgtaccttgcctgggtataagaggtcagtgtaagggttttatccattttcatcagtgattccaaagttgacttattagtgatgatcattaaaatgcttgctgagattaagccgtagaaacagatcttacgacgcacatggcacactcacatgtgacccagtaggaatgtgagaagttactgagttgtctaaagtttgttcagatatactcctcaaggcatcggttgcttttcatatctacatctggttgaaatttgacctgtcgtgtacagtctcataaatcaagtccatgttttgtgagatgtgctccccctgggctgagctcagctcatggcgagcacatcccatgaggctcataatgaattgtctgtctgtagtttaactacttacctaggtaaacagaatattaattttgatatgtgattagaaaatttttttttgtaggctttaccgccagcacctgttcagaatcacacaaataagcatcaggtattcaatgcatctcttcaagaccatatttatccgagctgttttgggaatactccagagtggaatagttctaaatttataagtctttggggatcagaagtgatgaatgataagaactggaatcctggcactttcttgccagatacaatttctggtaaggaatttgttaaaactttcttgaagttttaaaataacctgagtagactgacatctttgccgtagtctcccgtggaagccctg

SEQ ID NO: 110453 - DNA, 1136 bp, Homo sapiens
tttttaagtaaaaagctcggtacagtggctcacacctgtagtcccagcactttaggtggccctggtgagaggattgcttgagcccaggggttcaggaccagcctggacaacatagtgagacactgtctcttagaaaaaggtgattttttttttttctttgagacggagtcttgctccgtcacccaggctgctggagtgcagtggtgcgatctgtgatcctcctgcatcagcctcccgcgtagctgggactacaggtatgtgccaccacgcccagctaattttttgtatttctagtagagatgcggtttcactgtgttagtcaggctggtctcgatctcctgacctcatgatccaccagcctcggcctcccaaagtgctgggattacaggcatgagccaccacgcccggccaagaaattttttttaaaaaaccaaactgtcgatgttctgaggagttcataccgaagtgttcagaggtgagtgtaacttgcagacgttcggctaaaaagtgtgtgtgcctgtaagaaataaagtttataaatatgacagaatattaggtcgtgaagatgaagcaaggtgaaggatgaatgggtactctttgtgtgttctttcagattttctacaggtttgaacatttttgaaacaaacttggcagtgactctcgcctctctaaatgcaggtgacgtgtttcatggcatcagcaaggaggaccacagacactcggccccagccgccccgaggaatagccccacgggcttggcccccctcccagcgctctcgcctgctgcgctgtcacctgctgcgctctcacctgcctccacacctcaccttgcaaatcttgcagccccatcattccccaaaacagcaaccacaactcctgggtttgtggacacacgcaagagtttctgtcctgcacccctacccccggccacagatggctccattagcgcccctccaagtgtctgcaggtgagccaagtcctgactggggacgtgggagcactttggaaaatgggtgttatgcctcactaacacagctacagaaactcccctgggaccatgcagtggaaaagtctagtgaaatgccgagggaatgcagggatgtccccagcagaggccatgggtagaggggggctcc

SEQ ID NO: 110454 - DNA, 2096 bp, Homo sapiens
gaatggtgtctacgacccacagcaggatgatggggacgagagtgcagatgaggacagctgctctgagcacagctccagcacctcgacctccaccaaccagaaggagggcaagtactgcgactgctgctactgcgaattctttgggcacggcggggtgagtgcatgaggtcagcgcatcatgatgtgggaagtgtgcaacacacgggctcctttgcagaaattctgtactaggttgaattcggggtatattccacttctagggtatatccattgtaaagaaacaaagaaaaatatatgcccaaagatttagccataatgattttttttcttcattttttactttgtggtttttaaggtaactggtaaatcagcagtgaggtattcctactgaatacccattggtaggaggttgttaaccatggtgtatccatatggtggaacattgtagccagcgacagcagcgttgtgtgtgtgcagttgggtttctcttgtttgaatacagagggcgttggtacacacacatacttgtccatctttccagagctgtgatttaatttatacaaccaattatcacccactgtttaagagggatgggtgacaggaatagcaggggcttatagttgttctttttctgctttagctctgtttgcatttcctaaaatgttcacatgtttttatagcaagaaatttggcagtaggattcagggctttttttggcaccaaaaaggaaacccacaaatggatggaaagatactacagacacatttattgacatgaaaagatattcacaccatgttaaataacaggtagaggccaagcatagtggcttatgcctgtaatagcagcactttgggaggctaagggaggatctcttgagcccaggaattgaagaccagcttgggcgacacaggagaccctgtctctacaaaagataaagaaaattagctgagtgtgacagcacacccctgcttgagctcaggaggtcaaggctgcagtgagctatgatcgcaccactgcactccaacctgggtgacagagcaagaccttgtctcaaaaataaataaataaataaataaataaaatacattaatcaggatttgtaattgtttccttttcagtttaaaaaatccacttatgtgcatagctatacatgctttatcaggtttttcatgaatatgtaaaatttgagagtaggtatcaaaatgccacttttgggtgacttgctgataggtttttctctttttctgctggttgttgtatttccttatttttcacaacaaatatatactacttgagtaataaaacagtttatttttggaggtgtggtctgaaatttattatattcaaaatttttaaaacttaagcataactttgttgtttttctcagcctccagctgcaccaacaagtagaaattatgcagaaatgagggaaaagcttcgcttacggctgaccaagaggaaagaggagcaacctaaaaaaatggaccagatctcagaaagggaaagcgtcgttgaccatcggagggtggaggatttgttgcagtttataaatagctccgaaaccaaaccagtgagcagcacgcgtgcagcgaagcgagcaaggcataagcaaaggaaggcaagtgacagttctcagcacctggaggcgccaggtctgagggcatttgaaggtgccgtgccacgccagtctctaggcagggctgagccacaggaggtcggggctctgacgtgtgttcacttgcccacaactttgttctgagagccagcctgtctctggtggcctgaactggagactggtaaaaaacttaactttgtgttttcgggaaattacttccccttttgtagaatgggtttgttcttgtgctggccatcatgagggcagcagcagacactccagctttatctgctggagaaccttcttttcgaagaaaggagccgtcaactgtagagatgatagaagaaaggcccaggtgggcttttggggcctgtgggttcagaagtgtctttgatatgagactggggcggggcacttggcacagggaagtcttctggactcaggtctgagcatgtcccccatgctgctcttgtcccactgc

SEQ ID NO: 110455 - DNA, 1050 bp, Homo sapiens
tagccttcgcctggaaaggtgggtttgctcagagttctggcggcacgtgtacagcctcagtactgcccgggcagtctgtggtattggttacatcatccactcggccaggcggcatgatgccctgccgcacctgtgagggggtagctgactccctggatgtgtgctttgcagctgctttgtccttggttactgtgtttagtaccaggtcaaaggctatcgggaattttttgttaactaccacccccccccccacacacacacacacaaataagtaagcatatactttagtaaatagatgaagtttaacaatcctgcagagtaagagaattggaggtgggtgtgtgttaagttttgatttattacagcctcttcagagtttatgttccatatgtgattcgtttttgaaattatcttagtttttctgtatgacttaatttttagcactcactgtagtcttaaattgccttctttttgcattggcagctggaggagaaagctcgcctagaagcagaggccagggcccgggagcacctgcacctccaggaggagcagaggcggcgggaggaggaggaggatgaggaagaagaggaggatcgtttcaaggaggaatttcagcggcttcaggagcttcagaagctaagagctgtaaaaaagaagaagaaggagaggccaagtaaagactgccccaagttggacatgctcactagaaatttccaggcagcaacagagtctgttcctaactctggaaacatccacaatggctcactagagcaaactgaagaaccagaaacctcttctcactccccatccaggcatatgaaccactcagagcccaggccagggctaggggctgatggggatgctgcagaccccgtcgacaccagagactccaaatttctcctccccaaggaggtgaatgggaagcagcatgagccactctcttttttcttcgacatcatgcagcaccataaagaaggaaatggcaagcagaagctgaggcagaccagcaaggccagcagcgagccagcgaggaggcccacagagcccccc

SEQ ID NO: 110456 - DNA, 1355 bp, Homo sapiens
ccattcctcctcccgagtcctttccccttctcaagtgcagcctgtagcagggcctggaggggacccttgacactgtgcccctcaccgagaatctaaacccctgaccccgcagtgagtttctggcaagaacaggagtgtgatgggctttgccaagcaccagcttggttgtgggctgtttccttcagtgactgtttggctttttgtctttgcaggttctgcttggattctgctagacagacccgacaaagactgtctatcaactggtccaattttagcttgaaaaaagccacctttgctgcccactgaatgaggactccctggagagggacacgcgagaggcaggccaggctgcaccaccccaagagccacgcccctcgctggcgccccagagccgtggtgcttgccaagggctgtgcggagctggtgctgcctgaaaccccagaccgagaagttgatgctcggcccacgccgttagctcgtgtgcgtgtagtctgtgcgtgagactccttcgattgtagctctgtgctgtcggattggaacagtagttcccgccaagtcctcccaccaccgcggcctcggaggcctgggccgtggccagataggagtttgcatcatccacgtggctccgttgcctctgcattgcgccctgtcctgtcatgtgtcctcaccggggtatcggccgtcactcagctctcctgtgcccctgcgtctcaccctaggcgggctgggcggggcaggcctcctttgttctccacaatctactgtctccgagtgtacacgttgcgctgtttgtgtttgatccccctgacttgtagccagcttgtgtaagatcccttgcagaacgagaaagttaaaaacaagcccacccagtactcacaccatcaagtctgttatagagtgtacgactgtattaacacggaggcctgcctggctacttttttaacatattgttaagtaatattaaaatcatgtctttctttttgaaagatggaatacattagtacagcaggagacctcggctgcttctttctgctgggggagtggggggatagcgggagagggcgtgtaggtgatgtgtccgccatggggagccagggcaccaccccggagcaggtcccaggtctctccaggcaacggctcacccatcctggtgcccccaccatcctctgtgtgccaggcagagcaggcagcaggagacagaaagctcccaaggagctgcatcctggttacttcttactacctagaacactcagtagctcccacttctcccagcctcatgttcagcctgtctctgtgtgccctatcagagtatgacttcactctgagtgaaggtgaatagggcagggcctggttgg

SEQ ID NO: 110457 - DNA, 1075 bp, Homo sapiens
tcaggttgaagacctcaatgccaagtggcagcgctacaacgccagcagggacgaatacgtgagggggctccatgcgcagctcagggggctgcagatcccccacgagcccgagctgatgaggaaggagatctcccggctcaacagacagttggaagagaaaataaatgactgtgccgaagtgaagcaggagctggcggcctccaggacggcccgggatgctgcgttggagcgggtgcagatgctggaacagcaggtgtctgtccctcgggctccggacggcactgaccagatgtctgctggccggtggtggccgaaatcatgggacaggctgggctgaaggcttggtggcactgagtgggcagtggtcactgtgggggtgggagaagcctggtggggcgcttcctccttccttgagcagaaatgtgtgtctcgcctctcttcagattctcgcttacaaggatgacttcatgtcagaaagggccgatcgggaacgggctcaaagtaggattcaagaactggaggaaaaggtcgcctctttgctgcaccaggtgtcctggagacaggtagagtatgagggcgtttttcttcctgcttaggtttagtgtttttgtttctcttctcatgagattagagcctttctgtgtctgccaaggccctgatttgctggtgatgagggttgtggcgagcccctccctgctgtggggagagccacctggcctggtacctgggcgtggtcatggaaagcctccctgttatactgtttagttatggaggaggctggcatggcggcctgtcttagcagaggtggctgtcctcagggcccgtccgtcactgtcatgcagtcagagagcatatctcgggcctcaaagtgtgagctccctacgtgtcctgacctgtctgtgagacgggaaccccgcttaccttgtcatgtagatgtgatggccctgggtgtccagtaacatccccagctcagcctggcacgtggagctgggccttgcagggcaggggcccctcaccccacccctgggctcagtgcttttcctaccatggggtgccttgagggaggcctggcatg

SEQ ID NO: 110458 - DNA, 1016 bp, Homo sapiens
acgagtttcaggagacttttcattcagctctgtagttgttagtgggggttggtttgggttgtggcttcggtgactcctgaccctgcgtggggcagaggttagattcctgtgtccagaatcacctggttgaacccgattgtctgcagacaggacagtgtcatgggctccaaaggaggtaagcagggtgcatggccaggcccaccctgggcagctgggggccccctcactggagatcctctggtttacaatgggattcagcttcctgccttccctgctgtctgtgataatggcaaatctctggcaatgagaagactttatcatgtctggtgtgccaatccctgcagacattatggctttagaatatttacattccaaatatttaaaagacaaacagctcaaactggtaggtgggacgggataaggacagtgtgaaaggtggtgtggcctgaagacctcccatccgggctctggcctgggccaggtggggtgggcctgggcagggagaaggtggtcccttgtccctgctttgcttctctaccaaatgaatgatcactacccgctgcactgggggacgcagtgataatctgtggcctcagcctctgggtctagctttctcccctcttgctgtatgtgacagagtgtcttctctctgtcccttcctcatgcagtcggaacacacagatgggcacacctctgtccagagtgttattgagaagttgcaggaagaaaatcgactgttaaaacagaaggtgactcacgtgagtgtctttcacatttcgtttgagaagaacacatggcttacaaactgtaagtgagggttctttccttggctgatgcccagagtcgccccccgccctctggccactaggacttgatacacacagtccctagagactggacttttttgcttaaaacgacgtacgggacatgtcctgtccatctccatccccctaaaattaatccacaagtcagtaaaggagatgcaagagttagcagcaggaggtccattttctaag

SEQ ID NO: 110459 - DNA, 1020 bp, Homo sapiens
aactcctgggctcaagagatccacccgccttggcttcccaaagtgctgggatgacaggtgtgagccaccacgccctgccaaattctattttcacaagcaagttcataattttagatttcatatcatcaaaatgtttttttgagatgagggtttcgctatatatagcccaagctggtcttaaactcctaggctcaagcaaatcctcccacctcagcctcctgaatagctgggactacaggctcaagccaccacacccagttatcatcaaattatcaaagtggcaattccaagcacttttttgatgggataggtagaaactccactgtggtgggtaaccccaaaaagatgtccacaaccaaacctcccattccccggtatctgggaatgaaaccttacttagagatagggtctttgcagatgtaattagttaaggtggggacaaaatggattaggacgggactggtgtccttgtaagcagacagaagtctggacagacacacagagagaagacgaccacgtgacaacaaagataggagtgacgtcttgtcttgtggataaaggccaaggaacaccaaggattggtggcccccacaggaagctgaagaggcgaggaagggtccttccctagaaccttgagagagagccgatgccttggtttctggcttctggcctctagaactgtgaaagattaaatttctgttgcttgaagccccccagtttgtgttactttgttacagcagctctaggaaattaacacacccaaccccaattacttcttaaagaatttaaaaaggttcttaaaatgacaattttattttgagatagggtctcgccctgtcacccaggctggagtacagtggtgccaccatggttcactgtagcctccacctcccagactcaagtgatcctcttgcctcagcaccctaagtagttggattacaagtgcatgccaccgtacctggctaatttctgtattttttgcagagacaaggtttcaccactttgcccagtctggtcctg

SEQ ID NO: 110460 - DNA, 1011 bp, Homo sapiens
gattctcattttacagatgaagaaactgaaatagacagagatgaagaaatgtgcctaaggttacgcggtttagtgaactgggatcagaacctgggttctctggccttagactataaaccatagataggaattgagcacatttattaatcagcattgcaaggctggtggaattttgataaacacccaaaccagattcttttctgcactagtgataccagacagattttggaaatataaacaggatagggtgcattaaagttcactcacatttgttcagttaaacagatggttggcttatctttagttgcttcactcagtcatttccaaaaccacacccaaggccaggcagtggctcatgcctgtatttctagcagtttgggaagctgaggtcagaggatcacttgaaaccaggagtttgagaccagccttggccacgtagtgagaccatggctcaacaaacaaagaataataaacatatttactattatgggacgtctatgtgccagacattgtgctagacattttacatttattatttctaattgccccaacaacctgggaacatatcaccgagtgtattttattacaaatgtggaaactgaagtacagaagacaataagcctatgaagtgatcgtagggcgttgctggtacaaagtcaaaacctgcatcattgggccctgcgcctctatgtctgtggggagaagggattgttgatgatgtgatagctggaaaacataccattcatcaaaataaatcccaggtggattaaaaagaaatgtttaaaattatagaggcactgtggagaaaaagcaaaataaaatgtttatcagagataacgccttaacattttcttggaacattttattagatgtgtgcctgggaaggaatgataactttctttttaaaaccagaagaaatcacaaaggaaaaggtttgtcaacctaaatatgcaaaatgttaaaatattttcttattgaaaaataaaattatagaagatagtagtctgagaa

SEQ ID NO: 110461 - DNA, 1033 bp, Homo sapiens
aattactaataatcctatcactaaaaggattacaatgaacattttgatgtatttactttttttttttttttttttttttgagacaaagtcttgctctgttgcccaggctggagtgcaatggcccaatctcggctcactgcaacctctgcctcctgggttcaagcaattctcctttctcagcctcccaagtagctgggattacaggcgcccaccaccacgcctggctaattttttacatttttagtagagatggggtttcaccatgttggccaggctggtctcgaactcctgacctcaggtgatccacctgccttcgcctcctaaagtgctgggattccaggcatgagccactgtgcccagccaatgtatttacttttaatctttttctatgtttaggtatgtatttgctgtaataaggactggttatactgcttgataacattgtcactcaaacatatatcaagagcaattttatgccatttaagtttttttagcttttcatgttgaatgcatgcgtagaattcccagtgtatttgatcagtcctctgttgattgaaacgtaggatgtttttcccttttatcaataatactggaatgaacatacaaatgaatcagtctttgagcacttccttgaatgtttccttaaaatagattcctaagagtagaattcctgttcagagttttaagcttttattgtattaaattactttctagaaaagaatgtaccagtttatattctcagcagtaatgtgtgagaatatccgtttgcctttccagcactggatgaaaacaaaaattggtctatgtgatagctacttctgaccccctgcccaaggaacagaaaataaatggtatctcagtgttttaatattttttattaggctttctgtgaagaattggaatcaatgatacaggagcaatttaagaaggggaagaaccccacaggcctattggcattacagcagattgcagattttatgaccacgaatgtaccaaatgtctacccagcagctccgcaaggagggatggctgc

SEQ ID NO: 110462 - DNA, 1054 bp, Homo sapiens
gtagaagggggttagaatttgttctgtgttatatactagaggcagtggtgacaaacacaggaaaacagatttcttctcagtgctagaaagaacgttttaatccttaagtctctccagcatctgtttatgacagtgcttcagcgcccatgacacggtgggctctcagcgagtaggtggtcatttctttcctgaatgaataaatgagggaggctggggtaagcatcctcatcactgaaactaaaacaagcagaccctgggtatgcttctgtttgggccactacagaagaaatcactatgtggcttaggaagctggactaaacaccttaagtccttttcaacaaacactcagctccaactgtccgaccctagttaggattctgggttccttaacccattagtaaatgtatttgaacttaatctttaggaagccttttgagcctatactaaaatcattataaaaactagaatgaatatttttgagggcaggtctcttcttttttactgctgtattcctagtgtctagcatatgcttgatgcatagtgtaaaccaaatctgcattgaattaattactgtgggagaaaaacatactgtggaagaggcaaaccaatgaaggcaatgaggatgtggtgttgtagagacttaagaaatggattatggtgggcacagtggctcacacctgtaagcctagcattttgagaggctgaggcgggaggattgcttgagttcaggagttcaagaccagcctgggcaacttagtgagaccccatctctaccaaaataaaaaataaaaaaatagccaggcttaatgacttgtgcctgtagtcccagctactcaggaggctgagatgtgtggatcacttgagtcaggaggttgaggctgcagtgagcatgattgcgccactgcattacagcctgggtaacagagtgagaccccatctcaaaaacaaaaataaaaaacaaaaaaaaaaacagatcaagtagtaagggtacaagttggttttaattatttttttattttttatttattttatttatttttttgagacagggtct

SEQ ID NO: 110463 - DNA, 1067 bp, Homo sapiens
gaaggcagatccagttgagcccaggagtttttgagaccagcctggccagcatggcgaaaccctgtctctatacaaaatacaataattagctggtcacagtattgtgcgcttgtagtcccagctacttgggaggctgaggtgggaggatcatttgagcctgggaggcagaagttgcagtgagccatgatcacgccactgcactccagcctgggcaacagagtgagaccctgtctcaaaaaaaaaaaaagaataatgtaagttttggttttcattattatatccctgaggagtgacacctttttgcctttgacactagtagccaccagaaagtgtgacagagtaacccagcagtaatttattgacctgtcagaaggctagtgtggaactgttttttccctctataaagtcagttatcatgaacgtgagcaagaagcacttcatatatgtgataaattagtacagtagaataatggaaagcttccagtaccccttggcttcgtgacaggcattgtgcatggacgcttccctgcatagctcactcagtgttctgaacaaacccgtgaatttgtagcctgaaagagatgcaaataatttcacttggatctttgagctaattcagtcattttccccacagaccagagtgaactccgagcaggaacacttcctcattgtcccttttgggcttctttacagtgaagtgactgcatccagtttggtaagaatgtccttctctttggcagcttgtatgtgcaggtcatgttaggtcattcaacatcttcagatcagctaaatatgtaaaacccaagaaacaagaaagagcctatgttttatgtggtgtgttcagttagagaaaaacctttgagagaagttacaaatattgtaatcttgagtttgaatagtttctagttagggtaatttgaagtcctcttgggctggggtgcagtggctcatgcctgtaattccagtacttaagttcgagaccagcctggccaacatggcggtaccccaactctacaaaaaaataccaaaattagctgggcatggtggtgggaggattgtttgaacct

SEQ ID NO: 110464 - DNA, 1295 bp, Homo sapiens
aggtgcatgccatcacatctggctaatttaaaaatattatttgtagaggcgggggtctcactttgttgcccaggctgacgtcgaacttccaggctcaagtgatccacctgccttagcctcttgagtgttgggattacaggtgtgagccaccatacctgatgggaagccttcttttgaaatgcactgagtcctcagaggagtctgtggtctgctccttgcactagatgcagtgctcattgtataattaaatccaggtttacatagcacttatatcagtgggaaaaagtctagaaagatgtggattttcttttgaggctctcccagtttaggggtagttttgtttttaagtgtgaattgttagcactggaaaccaagtttgtcttaagttcatagattgattttcaagaagaggacaaaaacatttcccttcccattttatttctgtgaggaaagcatttaccatatcatcagtcattgtgtaaccccaggttttccttcttcatggcgaccatttggtctctaggtctctgcaatgaaatgtggcctcttgccaatctccccggaggcgctttcccttggagaagtggcttatcatgactaccatggcattctggttgatgaagaggaaaaagttttgattcagaaaaatctggggcctaaaagcaaggtcagtaggcatctaatctggtatttaaattacagcagaaagaagaataaagcaaaggaccagtcttcctgcccagctccacagagcattcatgcttcccctcaggttcttattctccggaaccatgggctcgtgtcagttggagagagcgttgaggaggccttctattacatccataaccttgtggttgcctgtgagatccaggtaggggacagccattccagtcactctgcagtttatttagatgtgtctggggttcacatagatttttttttgatacttatcgagtaggagaggagtctttgagcaatctctttgccaaagataagctcatggatttgggacttgatcaggacaaatgctgtttcactgattgaagttggcaaaggattactgggcttttcatttctaatttttaaattttcaaatatgtcagtcactaccatttatggagtactggtgtgtataggcctggcatcaggtgcttagtgtgtgtcatcgcatatgtgatgtcacgtgacccccacagtactctttgaaaaagcaggtatacagaagtagagactcagagacttgcctgcagcttacagctgtgagttcccctccgctccgtcagccgttagttcac

SEQ ID NO: 110465 - DNA, 1033 bp, Homo sapiens
tttgtaggatcctgaaaggtgctgtgttttctcatttctctgccaactttggtgcccaatatttttgtcatgctaaagaaatacttctgaaagtaactttgtgatcagtctgtcactatccattctacattttttattcttacactctagagatttggtttcttttgaaacctacatttttattcaagtcatctgaccctcttgatctcagtaaggaactcaagccatgctgtgtgtgttttggaaaaggttcgaactctggccagtgcaggaggaccagacaacttagtcctgctgaatcctgagaagtacaaagccaagtcccgttccccagggtctccggtaggggaaggcactggatcgcctcccaagtggcagattggtgagcaggaatttgaagccctcatgcggatgctcgataatctggtaagaatggtgccaccacttgatgataaaccttttgttctaaaagcatcagtgttggtgttcttacagcaagtgcgattgctgtcttttatgcagtatctgaataccttcaccttcaaagtcatgaagaagcactagggttgtttaacttctgaggtaaattacaataaaatgtagaggtgaaggattcctggtattgttttattttttaaagataaccttgtgtttggactcagtggggacaagagcacagagaatgcgtaggcagctggatgaccagctgtgtcagctcagtccccaccatcccacaagcaagcgagagaggtggcacttttgaaatcggtcagtcaggtatttaggcttttgtcttaacagcaaatcctggctgtctggggcctgatgactgtgttccatgggtatccactccctgtccacagcgtgggagcccctcagctgcttattgcagggacacagagcccggcatggtccagaaggcgggcttatggggcctgcagcacacagggaaagtgagcccacactgtgataggagggcagacacacaggatgtgttctgtgttacagggttgccgtgaagaatttcattctt

SEQ ID NO: 110466 - DNA, 1439 bp, Homo sapiens
gagatctggaatattgactgtctttcactctccttggaccctagggctacagaactggctacccttatcgataccctgctctgagagagaagtctaaaaaatacagcgatgtggaggttcctgctagtgtcacaggttactcctttgctagtgacggtgattcgggcacttgctccccactcagacacagttttcagaagcagcagcgggagaagacaagatggctgaactctggccggggcgacgaagcttccgaggaagggcagaatggaagcagtcccaagtcgaagactaaggtgtggacgaacattacacacgatcacgtgaaacccttgctgcagtctctctcgtccggtgtctgcgtgccaagctgtattaccaactgcttggtctgtgcctaccttactgttcatagttagatgacgtagagcaagttgggtagctggggcttcggaggctttgggaatccagcctttctgacccaggtgtaaagcgaaccttccttattcactttcttgtagtctgaacctaagtccactgaatgcattactaaaattcggataatactatctgcttgaaactgcttaagatgtaatgtaactccgcagtagttccagtatatctccgtatatagcaaaaatatacaataatttacatgtattaacctacaaataggagctcttcttatttaattcaaattatattcagggactcttaatacttcatgcacaaaaagacacttcagtcctaaacctgtattttagtgttgtgaactccagtggtttcaagtcactaaagtttcttaagtcttcagtgttttcttaagcagttttcccttgtggctccctggcgtgttctctgctgactcttgtcccctgcccttagtgttattcccctgctttctatcccaaagcctccgaatgcacacccccagctgccctctgcatggactgttgcatgtgagtagacggccatagtggcgagtcaccttctgactcctgttgggtgcggcatgacccaagtgcagcgcaggccatctgcaggcaccagcgacagacgctgcaaggggtgcttcgtttcagcgttaatgccgctcaagttatcgtttgtcctgagaggtgctcccatgtcgtggtgctgagacctcctctgaagatgggtctttattcctcctgtaacctacctctaacagtccacccagctctgctttaaactgtatgtagaagaggcccatttccagaagcccctggaatggaggagacaggggctgaagcagactcatctgtgcatgactagttcattaggagttcagttgaaattagattagatgctcctaaaaccatgggcaaccaaatacataaagtggggctttcttttccccttgtaacagtgttttactttatagatttatttaaagaaaaaaagttttatcttcccca

SEQ ID NO: 110467 - DNA, 2838 bp, Homo sapiens
ctgtcatttactttaatgcaaaactttggtgatgcccactcttgcctcacggtgcaggctcctccctaaccctgggtagcagcatcacattgcttttcatgaccctgtcatctcatgcttccagttggctttggtgttggatgattttcagagcagtgaaccaatggtctctgaggggcctcccctgctggtcccagggttatggggctcagctctgtcgtcagcctaccttatgacccagattcagctgggctttccagatggtggttttccatcagtcatgactttgacttccagcattaactggtctttatgtggctgcatcctgctcccatggcgactctgctgagtgacccagattagatgtggtcattggttcagtcctctctgtgatgttcagtgcatgaccagatgtgagataaactgaatagattggatgctatgtcacttattgttgtcataattctgacttttcaactgttcttgatattacagtggactaaagaggatggacatagaacttccacctctgctgtccctaacctgtttgttccattgaacactaacccaaaagaggtccaggagatgaggaacaaggtgcgtcctgcgtcggcactcagcgggggcttgggtgtgggattggaagggatgccagctgctttggggggagcgggtgcttgcttctagcagagggcatctgctgttgttgccactgttgcagtgaagccatctcttcacaccgctgctgttctaccaccagtgtgaagtatgagcagcagacattttttgggccctattgattcttgaactgatgtttgctcacgatgtttgctcaccggtcagaattggaagctgcaaaacctgttcttagcaagagcagactgctgtccctttcagggttcgttcaaagacttgtgagtggcatttggtgtatcagagcaggagccctgccagtgctcacatcactagacgatggacatgcagcgagtgtttcccccaagttaatgacagtgagagataggtgtcctgcccaagcatctggaagatgtggggagctgggaatagtctccatccctgcagacccacgccccactaagcaggcatggcggtcactcagaacacatggggccatcctgcctgcgtggggcagtgggagagctgaaatgtagcttccatgtggctggggcccaagtgcacaagcagcagggctcccaggcagcatggctgctcaggactgttgatgtgtgcctctccttcccaccctcagatccgagagcagaatttacaggacattaagacggctggccctcagtcccaggttttgtgtggtgtagtgatggacaggagcctcgtccaggtgagagcccagagtgtctctgactttagtgggtggtggctgtgtgaccgcctgctccaaagttattctgaaattgagagagtgactttatgaggtaagtattctaggcaaccagttacctttgttaaaaccttcatgatgagaaacggttcaggcacttttcgttgagttctagaaggagcgagcatgctgagggctgtgtccacccctctggtcatgccccttgtaatgcatgcatatgtgagggtggcacatacaccaccagctttggggctcagattcggcccgggttcagcagcgttctgtgtaaggcgctaggagagggtgggtttagggactcttgttctggtacatattgctgtctgcaacaaagtgctgcttgggttgcagaggggtgggtgcctgtaagtgtggtgcacatttacacacatttctacaaaatgactctaccttgtggcacattgaagataattgtgtaagtagttatctctgaaaactaatatgccacctaatgctttaacacctgactctgcaggggtagacgattgttggatttgtccagccgtggtcctggtttcgtgttcagtgtctgcacgtcctgccatcatcactgccacacttactgttgacagctgtccctgctgcatgctcttagccagctccatcctgtgctctcagctgatatttcacaggctgggcctggtgtgctctggtgactcagtttactgtttcaggatgcacctctctctgactgtacggaaactatcgaagggctcgagcttacagagcagacctttagtcccgctaaatctctctcttttagaaaggtactcactgccctgtcctcactacctgtctatgcgccttgctcccctcccctcccccctccccgtctcctctcttcaggcattgtcttagttactgaagtagcttcaaatggatctttaacctgtttgtgagattgtacagaaggttctgttctacctacttgattctttaattaaaacatttgctatgaggtgtgataacaatttccagcattcgaagttgttactgagaaatggccagtctgagcaacgtggtgcatttctgcagttccgcacgggactttggtcagtgcgtgttttgggtttcagaatttgccttttccatgactctgactgcagacagcctcttctgggcagtctgttgctgttggcagcggccactcccgagtgcccttccaccctcgctggttcaactttgactgtaaatgtcatgaatgtagccactagaggtcatatcattgaaagatgtcatttcagaggaatgggaattcagacagtctttgtcagcccttgataaaatgtatttatttgtacctcaaaaaaaaaaaaaaaaaccctaaataacatttttaaatgccacagaggagaaagacttaggagagtctgaaacccctcactgtgattccctctgtgtgcgggcatctagtatgtgga

SEQ ID NO: 110468 - DNA, 1323 bp, Homo sapiens
gctggagtgtggtcgggctgtcttggcccactgcaacctccgcctcccgggctcaagcagtcctccctcctcccatctcagcctcctgagtagctgggactacaggtgcacatcaccacacctggctaaatttttgtatttttttgtagagactgggttccgccacgttgcccaggctggtctcaaactcctgagctcaagcagtccacctgactcagcctcccaaaatgctgggattatagggtgtgagccaccgcgcctggcataacctgaaataattttggctgccctctggattcaattgcaagtgaaatgaaggattagagatgaagatgtgagtctacactgcaagctattcagcccagggaaggactcttgtgttcccatgtgcacctcaccaggggctgtgttctccaacacccttcatgctgtgtggtagaaatgcagaggggcagtaagctcaccccttggactctctcagtgacctgtgttgagcacctaacctgtgcatggtccagcactgggaatgccagtccagatccaagttggccctgctcgtagatgaaaatctgatggtcagagaggtcagccgctagtgcaggttgcacagcctcgggtggagctcttgttccacccaggttgcctcagtcaagtatggaaagttactgggcctgtgttttgctttagaggcttgtcaagtgacagggaggtgaggggagtggcaggaggggaagctaggcacatcttggtttcttgtctgggttgtccatgagtggcgtatgtttctctgcatctcagtcattgctctgtgtcctttcttgcagaggaatgtgattctctgttcccataactggtcttgacagcagcttaacccttagctgtggtctgtggaggagggagctctccaccactggggacctgctgcgctgtgcctcgggcttcagctgtctcagtatgagagagccccgcttgtcctttggggcatcaaaattgggaacaagggttttgatgtctctgtgccaatggatttttatttgtatttttatttttattttgagacagcatcttactctggcccatgctggagtgcagtagtgcaatcacagctcactgcagcctcgacctctcaggccaaaagaatcctcccacctcagcctcctcagcagctgggactacaggtgcatgccaccatgcttggctaatttttaaattttttgtagagacaaggtctcactatgttgcccaggctggtctcgaactcctgggctcaagcaatccttctgccttggcctcccaaagtgctgggattataagcatgagctg

SEQ ID NO: 110469 - DNA, 1549 bp, Homo sapiens
tgccaagtttaaattattgggataaaatgccctaccacagaattaaaaccaaaataatgctcatgtgatgtcccttaaggtggtgagtgggttcaggaccctcagccacctgctcagcagggagaaggcagggagggaggggtccctactcgcacaggacagcgggggacaggccagggcataccattcgagtccatcacagaagtggctctggcagactctctttggaataagaatagaaataagttttgtatctgaagttggttaagtttctctgaaattcgcatcagtcaacacccaggtcacagcttcctttatcctctcttggagaggatcagggaaagggttgagagagccctgccttctcagagggcggccgagcgggctgccccatctgccatggaggcaggtacaggctcatggcgtggcgtccacagctcctaccatatccttcttgcttctctgcagagaatctggacgaggctagagaacagaaagaaaagagtcctccagaccagcctgcggtcccccacccgcctcccagcactcccatcaagctggaggaaggtgagctctgggtggcagcggccgccactgtgggagggtgcacggctcgtgcgcgctgtggcggaatgtggcgggagtcgtgttaacagcaacacggaagtgtgtgcttgcatcagcgccaggacgtgacacctttctcctcctatattgcttctgtcctgggtaactccaggcaaaacagatttgtatgtgagctgtgaccaggtaggaaggccggcctcgggggtcggaacccaccatggttgctggtgtccacgttgcccattgctcgcacactcctcgtgccgtgttgtcatgcagatgccaccttcggaggtgccctccgctgtgtgagccacacgccggctgcctctcagccaccgtgtgtctgtggtgtgtgatcccgggtgtctgtccctcggtctcgtacatccatgtctctcgtgaagcccgtggccctgcctttcttcttctgtaacctgatggctgtgactgaatgcatagattctctccttgtgcttttttctccctgtggctgcgtcacaagcaggagacggatgcgctagagagtacctgttaccctagtaagtaccgtgctgcctccgctctccaccggtgccctgcgctttgcctcattctcctgcttctttgttgtttattaagttttgttttctgtttatttaaaataaaaacagaagccccccttttttgtacccagtcccttggaggccttcctggaagtggttcagtcacctgagtgctgtgctgccttcagcggcagcgggtacctccacgcacctaggtgccatggagcactctgggcctcaggagttcctacctccagcctttgagggtctctttggattgcttggtgggagggttttgccacactggatcagatgtaagtgcagcctcggttcagacagggtggggttctgccacctgccgtgtggggtcagattgccttggacctttgctgaagctggtccaaaggaggtgggca

SEQ ID NO: 110470 - DNA, 1035 bp, Homo sapiens
ctaggaaggcactgagaacgcaagtggccctcagatgcttcgaaatagggcagggttgaggggtgttgtctgggttgccaagccctactctgagccactcctggccttaagcgaccgcccctgcctcttggcccctgcccctgggcagatgggtgtggccacctcatatgcagtctgggccacctctcggagctttgcggccttcctggcctccaggctgattgggggcatcagcaaagggaacgtcagcctctccacggccatcgttgctgacctgggctcgcctctggcccgcagtcaaggcatggtaagtgcacaggctgggcctttggggtcctggtggtgacttctgggcctgggtctccctgtgcagctcgggtggtcttttccctaggcggtcattggggtggccttctcactgggcttcaccctgggccctatgctcggagcctccctgcccctggaaatggcaccctggtttgccctgctcttcgcagcctccgacctgctgttcatcttctgcttcctgccagagacgctgcccctggagaaacgggtagggctgtggtctgggacccacaggcctaggggctggaggcttgattccatagcgatgtaaagtgcccctgtgtgccagccccagatgccagggaggctgggccgctctcttggtgttgggacccttgaggccacagtccgtgggttgccaggccagcagccgctcctgcaggctctccaatgccatccccacaggcgccctctatcgccctggggttccgtgatgcggctgatctgctcagccccctggccctgctgcgcttctcggctgtcgctcgtggccaggacccaccctctggagacagtaaggactcgaccaacccaagcgtggagcctgctctcccctgggcttccccgggcggcgcccttccctgctgtggtcgccttctcagcacgcgccacctctccccagggctcagcagcctgcgccgcctgggcctagtctacttcctctacctcttcctgttctcgggcctg

SEQ ID NO: 110471 - DNA, 1102 bp, Homo sapiens
tcccgccctccaccgtcacccccgactgactctcctgtctccctcctgcccctccactttcctttctcgtgttctgtctggtccatttgctcctctgggtgctgtgcactgcctgtctccccgacaggggcagggacttcagtctgttcccggatgtggcctgagcgcctcatcagccccatgtgtgcctagtaggccccaggaagtctgtggccagcaggcctctcaggcaggatcaggcacttggctctcaccgcgccccctgccaaagcttttcccctcccctgaggtgtccctgcccacgctgaaaccctcagtgtctggcacaacccagaaacataaaaatcggtgtgcgtctgttagagggtgaacttccacaggctcggtgccgcagagcctgctgggagcccagtaatgttcaggccatctctgtcctgtcgcacttggaattcaggttccactctggtgcaccctttcagagcgcttgggaagaactcggaactgctcgtggtgtctgctagagaggatgtggccacgtggcagcagagcagcctctccctccgctgggcgagtagactgagggccccaacttcgacagaggccaatcacatccggtatgtgaggggaccccgctttggggcctgtgccctacagcgtccccagaggcaggagaagccactcgtgctttctgatgtgctgttcttagtgaacttgccgcccggccgtttggtttgatggaggccgaaagcctttctgaggcatgttggcttgctgtccctttttcttttcattttcaaaatacatttgcttgatttcacaaatcataatttggaaccaaaaatggagccgccccatcccagctggcgctgcggttcccacagcctcccctcctgcgttaggcctgaccctgagcctgccttgcccgtggttgcatgggcccaaccctggccggccaaggtggccacactggagttttcagcctagtggaagtggggaagttcatttttgccacgttattggttttgtcagtgacaaacagaacaagttggacctcctcttgcctcctgccctcacagactgtcctgcctggctgtgggcctgg

SEQ ID NO: 110472 - DNA, 1710 bp, Homo sapiens
aaaattacctctctgtcagcagacatgtaagtaattctcattttaaatgtgaaatgtgggccaggtgcggtggctcatgcctgtaatcccagcactttgggaggcctaggcaggcggatcacctgaggtcaggagctcaagaccagcctggccaacacggtgaagccctgtctctactgaaaatacaaaaattagccgggcatggtggcgagtgcctgtaatcccagctactcagcaggctggggcaggagaatctcttgaacccaggaggcggaagtttcagtgagctgagattgcaccactgcactccagcctgggcaacagagcgagactccatctcaaaaataaatatatatacatatatataaatgttaaatgtgcagtatgttttgtgtttttgatagcccctgaatcctatgaggaactgagatctctgttgttaggaagatcgatggaagagcagcttttggtggtggagagaattcagaagtgcaaccacccgagtctcgcagaaggaaacaaagcaaaattagaagtacgtggattgagtgtgtgtggagcgctgggagtgtcagcatagccccgtatatgaatgccagaattgtgtgaagttgtgcaacggccatgtgtgcctcaggccagatggggccagcccgtcacatggttacctatgatgatggctgggagtacttggtatggcaccggcagaggcctcccttggctttggcccctctctaggcctcgtgccagacccagccagaggcaggcatggggaccttcaccttcatctcacaggggaggacactagggttcacatagccagcgtgtggcagagccagactttgctgtggcagataggtggctgtgatcgtgcctctttcagtgaatggtggatattgcctgtgaggaggacgccgtgctgcccgtgttcctcgtcgtgctttcctagtggtgtgttgtcagctgttctgtagaaggatgcgccttgcccttagctttctcccccctacaccttctagtgcttagcaagttctagcagtgtatttgcttacattttagaaggctgctcgtgtctgtcaccctgggctcccctgccccacctggttgtcaccagaatgtacgtgatccagaagctgtgtgcctgtggctttgttcttggtgctgagcactgagctttatttcccaattcatgttcctgcagaaactgtttggctttcttttggaatacgttggcgatttggctacagatgacccaccagacctcacagtcattgataagttggttgtgtaagtaaaaatggtgtgtcatctgggatgtggggttaagcagaacaatttttctcccatttagagtcataaaaatacattccagagttactaaggtaggtggaatgatggtgtcagcatgccaagtgggcaggtggtcacccagggcttgtgagcctcacagcgcaagccggcttctcacacgtgccgctccagccactgtagagctgggactgacttttaaccacaaacaagttgattttgaaacaagtgaacccctttagatttgtggctgggatggggtggctcattgtaagtttcaagctctgggtgactgagcggtatttggaaagcacggtagacaccccgcccctcacccttcagtgaaacccagttgggtggctttgcatgccagggagtgtgtacctcttgtctgcatgggga

SEQ ID NO: 110473 - DNA, 1016 bp, Homo sapiens
atcacagctggctcagctggctgttttgacataaccacatcactagcttcttcccgtgtccagtgtgtggtcaaatagtggaggccgtggagctgcttgctcttggcgtcctggctcctattctctcggtgcagggggtgatgagtcccagtcggggctggccagcagaattgggctgtgaaggcctcagaataataggcttgcctggtgactggagagtattggccacaaagtttgaacagttgattttgttaaatgaggaatgtgctgcttagctagtgtttgcatgcctgattgaaaactgcaggcagaaagcaggctggatgcaccagcctcagagctgggaggaccgtaggcccagcccgctgcccagggcaggactgcacggccccctcaccatatgttggaagagtgtgctctaagacatctcattccttcctgctcaggctgagagacttcgaagaatgcttggaaaggatgaggatgaaaatgttaagaaaccaaaacatatgtcagcagatgatctgaatgatggcttcgtgctagataaagatgacaggcgtttgctttcctacaaagtaagatgtttgccttcattttctctttctctctctttttttaatttaaaaacatttttttggtattcattttagggatttattacagttgggaattttaaatctttttaaccagtttctctaaagttctttatctgggtgtttatggtatatcagatattaaaactttagagagaagactttaacaatagtatgtgcactcacttgctcacgctctctttctcactctctctctctgtctcaaaggaacacagataaaactgattactcggttaacatcaactacttttgttaataactgtatgattctatctgcatgacctcatcatactattgagggagctaactcaaggctagagttgtgaattttctttgagtgatgtcattgagtttccatgactggtgtagtttttaattcacgaactttataaatcggta

SEQ ID NO: 110474 - DNA, 2209 bp, Homo sapiens
cagtcttcgctagaaccagcacaatcaaaaataggtgctgggtgtttccagccacttgggttacggccagttgggagtgtaatgggtctgggttttctcagagtggcttaccttgggtatttctcaagtgccattgtgcctgtggtctcaggccaggctgttgcgtgtgagcatttttttctcaaatgtggacttttccagaccactatgggggaagcactggcagagtgctacaggaaacacttcccacgccagggctgggcttcactgtggggttttctgccttttgcccccagctgagctgactgctgcccactttggaggaggcggtgggctccttcacaagaagactcaacaggaaggcgaggagcgggagaaaccgaagtcccggaaagagctgattgaagagctcattgccaagtcaaaacaagagaaggtgggttagtgagtgttcttgatcatcttctccacggtaagacaggctcaccaaaatgtgtttgagcttttttttcctgtacctttttaggctgtgtttaatattttatatgagttcagtaaaagcatttattgtgagtaggaattttaaaaatcacataaagcatatacctcggacaggttttggttcttttgcctttttttggtttatgttttgttttattttgagacgtagtctctgtttcccgggctggagtacagtggcacgatcaaagctcactgtggcctcaaactcctgggctcaaggatccagtgatcctcccacctcagctccccaagtagctagtgggcgccaccatgctcagctaattactttttgtagagatggggatcgtgctgtgtcgaccaggctcaagcagttctcccaccttggcctagttctaaagcacagggtgggccactgcacctggcgcggatgggttttttgttgttgctggttttagtatctgacatgtgcccaaaaaatcacttttttattcatttgcagtgaactgctcagagcatctaaattaatggtttatggcaggaaaagatttccgtctgatgagatttggtagctttgcatttaaaatactcatttctcctggcctcttttctgtgttgaaacgtttggtgccaactgagtgatcactgtgtgtgtccttggcactgacattgggcctctgggttgaagtccagtagtaacggtatgtggtgtgtgtctgttattttttccccagagggagagacaagctcaacgagaagatgccctcgagctcacggagaagctagaccaagactggaaagaaattcagactctcctgtcccacaaaactcccaagtcagagaacagagacaaaaaggaaaaacccaaggtgggagccaagtactgaaacaaactcttcactcactgagcttgggtgaccgactttctccagagaaagggctggggctggacggctcttctacctgtctcctttagggcaagtttctgttgaacattgatactgaattacctgctgtgtgtaatcttggggtggaagtagattcagttacttgagtctctattgcaggtgaattaaactgaaaaaagtggtgtttctggatggaagaagtacttcagggtggacacgttagaataggtgtctgaacttccctgtgacatgtttgtctgttgatacataatacatacatttaatatacatttacttatttttgcctctgtaaacagttgtttcctactgcattctctttagtcgaaactattggaaaatgctgcatttgtttaagaaactgcgttctcagagaagtctagatcccagcagattagtgtcatgtggtcatctgtgcatctttgtcagtcagccttgatgttaccgttactttacttagtttcccacgtttagggcgtaatgcctggataagtagcgtttttgttgttgtttgagacggagtctcgctctgtcacccaggctggagtgtagtgcaacctccacctcactgcaacctccacctcctgggttcaagtgattctcttgcctcagcctcccgggtagctgggattacaggcgcgtgccaccatgcttgactaatttttgtatttttagtaaagacagggtttcaccatgttgggccaggctgatctcaaactcctgacctcacgtgatctgcccaccttggcctcccaaagtgctgggattacaggcgtgagccactgcacctggcctgttttcgt

SEQ ID NO: 110475 - DNA, 2498 bp, Homo sapiens
taaactgtgacctcgctaacttgtttattgccttgtgtctagtatgaactcacaactacacatttcttaggagtacctttgatgggaaatagtaccctcctccatgacggaaggagtctaaacccatttccacttttccaaatgtgcacgttttaaaccttaaggcagctgttacagccgagggagccattcatgccttgagcttgactagtgtgttcttttttacccttccttttggcaccggtagactctaaagaagaaaagaaagtgattgccccattatccttgaaagttgttttgctcttctcaaaattctgtgattagtagagaaagcctatcgtgcatgaaagcagattgggtgtgaactttgacatcactgtgcatagccctgaactttaaagtatgcactgttctgatgtcccctgtagtggaaatcacaagaattttttgtgagattgtttctgacctgttttccagcgtacacagactttactaaaagagtacaaagaaagggataaatccaatgtattcagagataaacgcttcggagaatacaacagcaacatgagccccgaggagaagatgatgaagaggtttgctctggaacagcaggtatggaaagaaactggaggagggtttttgctgtacatttcacagggaagtcaaggccaaggagaaggctgactctgcatgttttgcatgttcctgggcactcggaaggtccaggggatagccctcgaatcctgtgccttatctggctaggccaaaggagaagcaacctcttctgcaaatgttagctgaatggataaatgccttaactctactacacggcagcagtgtgcacaggagttctcagctgagcagcattgctggagtggaaactggcccctgggcttatttaagaattcccctccatgaggccgggcgcggtggctcatgcctgtaatcccagcactttgggaggctgaggtgggtggatcatgaggtcaggagatcgagaccatcctggccaacgtgatgaaaccccgtctctactaaaaatacaaaaattagccaggcgtggtggcgcatgcctataatcccagctactcaggaggctgaggcaggagaatcacttgaaccagggagtcagaggttgcagtgagcccagatcactctaccgcactccagcctgggcaacagagcgagactctgtctgaaggaaaaaaaagaattaccctccatgagtttcatttctgtctgaatcatgaatcattgcttagttgacccaaaatactctttaaggctgcttaggattcgttgtcatatttcaaatataatggaaatatatatatctaccttatctttttttttttgctgtgaaatggaagtggtaattttaggaaactttttttctcttctgtcagcgacatcatgagaaaaaaagcatctacaatctaaatgaagatgaagaattgactcattatggccagtctttggcagacatcgagaagcataatgacattgtggacagtgacagcgatgctgaggatcgaggaacgttgtctggtgaggctggggtgctgtgcacgggcctgtgggcgtggagtcagggagagtctgttcattgttagaccttctgctcttcttagagactagagaaagttattgcatgaaagttttactgatcattaacctctctacaaatttcacaagtgacagtttttatgtatttttgttttttttttaagttttcagaactttaagatggtgtgtagatagatgcttttatgggccaagaaagcatgttgatatccattattttatttgaacctcaaaatagctcgttctacccatgagctcagagaaataaggtgttttgcccgatgccagagtcagagctgtggggagaacccacctcactgactccaggtgcctcactgaatgcactactttgctccccctactttatcaattccagcctaatatttgtaccagtggcattgatgtagttcctttagcttttacctactgtggaattatagcagtttgaggaaaatcatattgagcctcatatctgtagataacaacatgaaacagataaattttggccttaaataatgttaacagagtttaagattcagttcgggtctgactgtcttgaaccctatttataaggttgcagtcatgacatcaattacttgacatttcttgtaagttaaagtaggtcccatttccagcatcttcagaacaaaggtgtacaaatctaaaactgactctcaaagctttgtcttgtcagtgtgtgaaagttaaggcgttaaagcctggggctgccttctgatatttggctaatccagggggtaaaaggcttaggaattagggcagcaagcatgtggtgcagaacccgccatctgcggcacaccaggaggccccgccactgctcggcttcacgggcgtgaagagaatggccagttattttaacccctctgtgcctttgtctttgctcttttcattgttca

SEQ ID NO: 110476 - DNA, 1016 bp, Homo sapiens
ttggagctggagagatgtgggggcagtggatgacataatgcttttaggacgcctcggcgggagtggcggggcagggggggggcggggagtgagggcgcgtccaatgggagatttcttttcctagtggcacttaaaacagcctgagatttgaggctcttcctacattgtcaggacatttcatttagttcatgatcacggtggtagtaacacgattttaagcaccacctaagagatctgctcatctaagcctaagttggtctgcaggcgtttgaatgagttgtggttgccaagtaaagtggtgaacttacgtggtgattaatgaaattatcttaaatattaggaagagttgattgaagttttttgcctatgtgtgttgggaataaaaccaacacgttgctgatggggaggttaattgccgagggatgaatgaggtgtacattttaccagtattccagtcaggcttgccagaatacggggggtccgcagactccgtgggcatctcagatgtgccagtgaaagggtttctgtttgcttcattgctgacagcttgttactttttggaagctaggggtttctgttgcttgttcttggggagaatttttgaaacaggaaaagagagaccattaaaacatctagcggaaccccaggactttccctggaagtctgtgtgtcgagtgtacagtaggagttaggaagtactctggtgcagttcaggcctttctcttacctctcagtattctatttccgatctggatgtgtcccagatggcatttggtaagaatatctctgttaagactgattaatttttagtaatatttcttgttctttgtttctgttatgatccttgtctcgtcttcaaagtttaattagaaaatgattcggagagcagtgttagcttatttgttggaataaaatttaggaataaattattctaaaggatggaaaaactttttggatatttggagaaattttaaaacaatttggcttatctcttcagtaagtaatttctcatccag

SEQ ID NO: 110477 - DNA, 1073 bp, Homo sapiens
aggcgtataccaccatgcccagctaatttttgtgtttttagtagagatggggtttcaccatgttggccaggctggtctcgaacttctgacctcaggtgatccactcgcctcagcctgccaaagtgctgggattacaggtttgggccactgcacccggtcagaacccaggctctttcttatacttaccttgcaaacccttgttctcattttttccctttgtatttttattgttgaattgtaatagttctttatatattctggatactggattcttatcagatagatgatttgtaaaaactctcccttcctttggattgtctttttactttcttgatagtgtcttttgaagtgtaaaagtttttaattttgatgaagtcgagtttatctattttgtctttggttgctgtgcttcaagtgtcatatctaagaaatcattgtctaatccaaagtcaaaaaggtttactcctatgttttcttctaagaattttagagttttacatttaagtctgatccattttgagttaatttttatatatggttcaggtagaagtccaactttattcttttccatgtggttattcagttgtcccagcactgtttgttgaagagactattctttccccatggaattatcttagtacccttgttgaaaattaatcgtccttaattgtataaatttatttctagactgtcagttctacctgttggtctttatgtcgatcctgtgccagtaccatacagtcttgattactgaagtttgtgtcacagtttaaattcatgaaatgtgagttctccaactttgttccttttcaagattgatttggccatgctgggtcccttgcatttccgtacgaattgtaggatcagcttgtcagtttcaacaaagaagccaagtaggattctgagagggattgtgttgaatctgtagatcaacttggggagtattcgcatcttaacaatattgtcttccacctatgaacatgggcaaactttgtgtaaatggtcagattgtaagtatttcgggctgtgtgggcacagtgtctctgtcacagctacgcggctctgccattgta

SEQ ID NO: 110478 - DNA, 1022 bp, Homo sapiens
gtgcccgtgcagattgcttgattacacaattagaggaggctggcggaggattgttttaatttttttttttttgagacagtctggctctgttccccaggctagagtgcaatggcgcaatcttggtgcactgcaacctctgcctcctgggttcaagcagttcttctgccgcagcctcccgagtagctgggattataggcgcccgccaccacgcccaactattttttgtatttttagtagagcagcgtttcaccatgctggccaggctggtctcgaactcctgacctcagatgatctgctgccccagcctcccaaagtgctgggattacaggcgtgagccacacctggccgtttgttttaattttgaaggtgaagtgaaagtgactacatttaccaaaagtgattgaaaagccaggactgttcttaccctgtttttccagttcttgctcagagcaaggtggtttctttttcacttaatcaccatacttacttttcatgtagaacaagtcagtttgagttatcagttcatcatcttaactaaattccatgggggaaggaattagttttagtttcttaaacttccaggtttgcttattggacaaaatgagatagcaaggcagtgtttttaagttagattttttatttctttggtaatacaattttctcagaaacttagtagtcttttagtttagttgtttttagttggtcctatgttttggatcacccctctctactttattttgatagtgccaactgtgaagacatctgaagccataggtttggatgggaaggaggcatctttagcctgatcatcttcgccaggctgtttatctccttttgcttggctgagaagtcttaataggaggcttattcccagctatttggggacatagaagcagttagccattgcttatattttactgaggtctgtgtggtatgttgattgtagtcagttaacgattttgagaactgaaggcagcctggtatatatagagtaggtattagactgtgtttcttctaattga

SEQ ID NO: 110479 - DNA, 1159 bp, Homo sapiens
atctgtgtgatcttgggcatgtcatggttggcacttcaatttcttctctctataatgggggaagtgaggccagtcatggtggctcatacctataatcccagtgctttgggaggccaagatgggaagatcgcttgaggccaggagtttgagcaattgggcaacatcgtgaggccccgtctctacaaaatattttgaaaaaattagccaggcccagtggtgcgtgcctgtggtccgcgccactcaggaggctgagacgggaggatcctttcagcctaggagtttaaggctaaagtgagccatgattgtgctatcgtactccagcctgggcagcagagcaagatcctgactctaaaaaaaagtaaaataaagtaaaatgggggaaatgaactgctttagtaacatcatctgttttttctgtgagcagcgtagcttgacagccattggtgaactcgtgccctgtgcttccctgtccagatccccattctgcccgcaacatggagtataacggtttattcatagtagtcgagaaacactcactgaatgaatgaatgaggtgtagaactaagtggagtgggtaattcaacacatattaatttccttcttttttttatttttagaaagaaagaactttcagctaccaagaaagaccgtgtgaatcattgtctgacaatatgtgaaaacatagtggcacagtctgtcaggtaattgcactttgaactgtctagagaaaataagaactttgtatattttcagtcttaatgggctagaatattctttgtgtcccagctattttaaatggattcagaaatccatttaagatgaagaaggacccttttcccatatttctggctatatacaaggatatccagacactgaaatgaataatgttccctttttgtaatcttttatgcaaaaattaaaaccattatggtaattgaacaacatgtttatgtttagttaacacccttagcaactatagttattttaaaaccatctatggtttgatatttttgcatttgttgcaatagtaggaacagcacaagacagttcagtttgtctctcttatttgctttttcttggcagtttgctgtcctattgtacctctgctcctagcagtggctggagcccactcctctgtgcttcgggattagtggggatc

SEQ ID NO: 110480 - DNA, 1049 bp, Homo sapiens
ctcagcctctcgagtagctgggattacaggcgcccaccaccacacccggctaatttttgtattttttagtagagacggagtttctccatgttggtcaggctggtcttgaactcctgacctcaggtgatctgcccgccttggcctcccaaagtgctgggattacaggcatgagccaccccacctggccaggatttattgtatttgaaccatctaccattttaattttgatgttatgtagtatttgatgataatgaaagttaaattgtttttctttccatttttctgtttaagtgaatgacctgtatctagtttattcagtaacttcctgcatatatttgtttctttcattcttaatgaatatattcttaatttagttgctattatgttttgctttgccccaaaattgaaatcttagtttccttttagctcgttttagaactagtgatgggatgtgtcttccataaatctcttgtgatttgttgtaggctttgatggattctaatcttccaaggttacagctcgagctctataaggaaattaaaaaggtgggccttgcttttcttttttaaaaatgttttaaattttaaatttttataggtacacgtattttgtaggtacatgtaaatgtatatatttatggggtacatgagatattttgatacaggtatacaatacataataatcacaccatggaaagttggatatccatgccctcaagcatttatcctttgtgttacaaacaatccagttacatgctttacttattttattttatttttgagacagagtcttgctttcacccatgctagagtacagtggcatgaccttggctcactgcaacctccgcctcccgggttcaaccgaactttgggctggtctcaaactcctgacctcaggtgatccgcccgcctcggcctcccaaagtgttgggattacaggcgtgagccactgtgccgggcctgattgtacattttaaaataactaaaacagtcagggcacagtggctcatgcctgtaatcccagcattttgggaggctgaggcaggtgat

SEQ ID NO: 110481 - DNA, 1050 bp, Homo sapiens
cgcacccggcctgccctgtcactctgtgtgttgggtgaattcctgtgatctgtgactcactgctctgtgtcctacacattcggcttttcttctctccccacaaccccattttataattctcctttttcaggaaagctttattcccatttaaaaatttttgtttttaaaatggtattttcttacacttattttctaattaaaaatgagtgttttaagaagtattatgatttactgcaaataatttttaaacccagccttttagatcctctgtgatcataagagaaatgaaggatgtctcccaacacttgagcttcatccacatttcatcctcctgttctttcagctgagttttccccatcccattagggactgttggaatataaaactggcttttccctaacagggaatgaattgcttctgtttctcctgaaggagagctggaagaatgacttgcgttcttttgcatacacaggccttacctggtgaaccttctgccgtgcctgactcgaacaagcaagagacccgaagaatcagtccaggagaccttggctgcagctgttcccaaaattatggcttcttttggcaattttgcaaatgacaatgaaattaaggtatgattgttgcctcaggtcacaaacatgcgagtgatgctgtgagtgagtctgtggagggtgagggcttctgaacagggagtcctgtgggagtgcttcttggggtatgttgtatgtcgtaatttagactaccatcatttgtgttatttttgaggcacctaaggacttctttccacttctcatttcttactgtggggtgaagagttgaattgggagatggtttctagatgcaaattgaaaaggcatttttccagagcagatttgttttcggcgtactagagtgactctttaacctagctgcgggaagatgactgtgccaagactgcaggtaggagaaagctcactgacgaggccttgtgggtctgaacgtcctgcagctatcagagcctgttggcttcctgttgtgcattccaacaaatcatcttcaaacccactttag

SEQ ID NO: 110482 - DNA, 1095 bp, Homo sapiens
ctgccacccagggcctggccctctgtctgtgtcggccatgactatggtgagtcttgtaggcttgagactgtgcctcgggttcctgcgggttctctgtaggtcagttgacagtttctcctgttgtttgggtaactgtggaaacgaacactggcaagtgctgaagcgagcatgtggacgtgcgatatgaaataacgacctggctttcaaaggcagtgaggctctctggaaaggaccttgctgagctagggatgtgggtgtgtagccattcccagtgggcctcatggcgtactcgttcatgatcatgtttgtgccatcttgatctctcaggatctcttcttttttaacagattaagccgggaatctccaaacagtgagtcagatgttaagatgtcttgcttccacccccacaggcttactcgttcctgtcgaggatgaacactccactctgctgattcttggcgtgctgctcaccctgaggtatttggtgcccttgctgcagcagcaggtcaaggacacaagcctgaaaggcagcttcggagtgacaaggaaagaaatggaagtctctccttctgcagagcagcttgtccaggtaggagcacagggtttactctaggccctgcatgtgaatgactgacattcaaagaaccgattaatttggaagagaagcggcagaaccgagagttagaggtgtggactctggagctgcgctgctcgtttccaaccctaggtgctgacctctagctgtcttccctctgtatgtccctgtcaccgtgagtcaaatgcgggtgatgcctcctcaggtgccgtgttacctaagcctctcagagaccactgctaccctgtttctaaaaccagaggtcacgatatgtgttcatccacccagtaaatactgattgagcacccactgtgtgctaggctctgggataggggctgggtatacaatggtgagtatttcagctgcagcttctgccccgtggaggctgtggcctagcacactggtctaggcacggtggtatatgctcactcaaggagatagggacgtggtcgtttggggtgtcggaacaaaatgtcggaacttctctttccaatgcagag

SEQ ID NO: 110483 - DNA, 1014 bp, Homo sapiens
tgtgatatagtattaaaagtgctaataaatatggcatactgcctttaaaatgtctggtagctctttctcagtggcactcataatagtgttttttgatttttaaatgtgtgtcaagctgactctcccctccgtgtatgctgggctttattttccctttcctagtcaccagttttgggaaatagagatcttcattctcatgctgctcctctagtgcaagtgctccatttatttttaaggaattaatataacaaaaaatcatgggaatttagaaaacaacatggaagctaatgatcacattggtggaagtgatagggaaatatttagggggagaagttaaggtataaactttgtcaatgaagtcctattaaaaacaacaaaaaagtgaagcttaggatgcattttataaactctgaccagaacacctgtgtttctctgtttctaggtttatgaactgacgttacatcatacacagcaccaagaccacaatgttgtgaccggagccctggagctgttgcagcagctcttcagaacgcctccacccgagcttctgcaaaccctgaccgcagtcgggggcattgggcagctcaccgctgctaaggaggagtctggtggccgaagccgtagtgggagtattgtggaacttataggcaagttattagcaaggtctactcttacaattaactttgcagtaatactagttacactctattgattatgggcctgccctgtgctaagcagtctgcattccatcttccttgccaaaacttataatacaaatttcatctttattttataaataggggagttgggctgggtgtggtggctcacgcctgtaatttcagcactttggaaggatcgcttcagcccaggagtttgagacaacctggccaagtgagaccctgtctctacaaaaaaaaaaaaaaaaaaaaaattagctgggcatggtggcacatgcctgtagtcccagctgctttggaggctgaggtggtaggattgcttaagcccaagaggttg

SEQ ID NO: 110484 - DNA, 1041 bp, Homo sapiens
tgtttctgaccactgcttgcttagagggcctgcgtgtctgtgaccgcctagctttgcgcccctgactaggctgccccttaattacaaatgtctttatatattgctccagctaaggcttggagtagtcggttaagaacttgaacttcggtttttgcagtgaaacagcatttgagaatatcaccttctgataagccttattttataaggtgggtactgtagtgggaggcagtgtgagagatgcttgaaggatgcactgctgtcctgcatttcagcatcttcaggatgctgtgcagctgaaacatttgataacggtggaactgttcgttattttgcaagcctgtgattccctattgaatgttttctctcgccatttgacaaatgagtgtttctctgtcttcagcctcagtgaaggatgagatcagtggagagctggctgcttcttcaggggtttccactccagggtcagcaggtcatgacatcatcacagaacagccacggtcacagcacacactgcaggcggactcagtggatctggccagctgtgacttgacaagctctgccactgatggggatgaggaggatatcttgagccacagctccagccaggtcagcgccgtcccatctgaccctgccatggacctgaatgatgggacccaggcctcgtcgcccatcagcgacagctcccagaccaccaccgaagggcctgattcagctgttaccccttcagacagttctgaaattgtaagtgggcagaggggcctgacatctttttttttattttttatttgagacagagtctcactccatagtgcagtggaggccgggcacaggggctcatgcctgtaatcccagcactttgggagactgaggcaggcggatcacttgaggtcaggagttcgagaccagcctggccaacatggtgaaaccctgtctctactaaaaatacaaaaattagttgggcgtggtggcacatgtctgtagtcccagctgttagggaggctgaggcaggagaattgcttgagcctgggaggcagaggttgc

SEQ ID NO: 110485 - DNA, 1055 bp, Homo sapiens
actattttagttttagagcagtaagtgttttgagttcatttgggatatttgacctgcgttgtagctcttcagaaaacacatgaatagtgaagttctttgtttcatgggttccctttagatgaaacccatagaggagaaaagtagaaacctcagcacgtaagagccaacatatatacacatcggatttaaacctaaagcacaaattgtgcctggtcgcagtggcgctgagtcgcactcagccaggccaggcattcacactcagggtgagtgggaaccaggactggctgaggcagcagtggacccaagtctccatcgcgcccatgcttactatggagccttctcgttctctctttttctttgggtgagagggtacacttgtgtttttgaatttatatgaggtaagtgtgtaatagggttttttctaatcttttttaagtggaatctggaattttaatcagatttattatctgacaacctagaattataatccagaaagtctgtggtattgaggacatattggcaatatgatgaatctctaattcttaaatcctgaaacttttttttttttaatcacttagggttattatagtgaagtcatttctgaatttggatcttctcttcacacctctttttctctttcctgagaattaagcttttgtttcgagttagaaagttgatagtagggaattgttccatggctgagcaatttatctccacagaggaacagtatgtctcagacatcttgaactacatcgatcatggagacccacaggttcgaggagccactgccattctctgtgggaccctcatctgctccatcctcagcaggtcccgcttccacgtgggagattggatgggcaccattagaaccctcacaggtaacggccagtttttcagctgtgttttttctagttatgcttactaaggtttaagtttagatgatgatgtttgttgcttgttcttctggttaggaaatacattttctttggcggattgcattcctttgctgcggaaaacactgaaggatgagtcttctgttacttgcaagttagctt

SEQ ID NO: 110486 - DNA, 1649 bp, Homo sapiens
aaaaaaaaaaaaaagtagctgggtatggtggtgcatacctgtagtctcagctactcgggaagctgaggtggaggggggattgcttgagccccagagatcaaggctgcagtaaggcgtggttacaccactgccctctagcctgggcaacagagtgagactgtctcaaaaataatagtaataataatcagttgaattaaaaaaaaaaaaaaaaaaaccactgtgctaggcccatagtatggtaagagttaaagtgagccttagggattatttactcaacctctgtttctgtataaagtggaataggctcaattctttaagtgatagcatgttgaacctttccataccaactggctcataagtcacaactggccagtcaacaagagtaaaaattaactggtaaaaatcaaagcaaaaaacctacaattgtcaaatttgtgggataactcccccttttaaaatgtcatgcctgacagtaatttctctctagtttccaggttttcagtcagttgtgtcttttttgagcagaaggaagcatgctaagagctcaatcttgtggctagctgggggtctttgtgtcagccatgcatgtgatggtgcccctgggtgcttggggctgcaggggaggggtacagcagtaggggcctgttctgttctctcgtgctgtggagtacatagtgacatagtggggtggtccttggtgtaggtcccttgttcctacccctgggtctgagatttatttagaagtggtgttggggctgtgcggcaggcccctctgtaactgatcaatgtttgtgaagttgctgtttgagagttgaaaccatgacataagcagaaatggaaggaagaaagaaccagttatgtgaaagggacacatttacttttaagcttgtatttactgagataaagtattcttaatcaatgttcttgagaggtgtgggaaaaatgcaacatcctggttgcagttaaacccagaacattgtgtgttgaagagtgacggttctcaaaccgtcaagacgcgggtactgagtgggactaacctgctgtcctcttgccttggaccttgtgttccagaactgtgtcatgagtctctgcagcagcagctacagtgagttaggactgcagctgatcatcgatgtgctgactctgaggaacagttcctattggctggtgaggacagagcttctggaaacccttgcagagattgacttcaggtaagtgagtcacatccattagatttcatgaactaagctcaattgaaagttctgggatcacttgatgcaaggaatgatgttatcaagtaccctgtccatcagaaatccgagtggtttaggtagatgacagtgattttctcctcccagtggctttttgctgaactttgccctatgcttggaattttattttattttattatttatttagagacaagatcttgctctgtcgcccaggcttgaatgcagtagcacaatcatagctcactgaagctttgaactctaggactcaagtggtcctcctgcctcagcctcccgattagctaggagaataggtgtgtgccgtcacactggctaatattttttgtagaaatggggtcttgctatgttgcccaggctggtctcaaactcctgggcttgattgatcctccatcttggcct

SEQ ID NO: 110487 - DNA, 1033 bp, Homo sapiens
ctgcctattctgttagcattcatgtgttaacttaaaatcataatctccttagttttgttgagtgtctccgtggacaagacactgtgagggatacaaaatcagattggctttattcaaaccactggggtattataattcatttataatttattttattttttgccttttttccatgtgttctaaaggaattagagtttgtatataactataatgggggatagaaattgacatgtgccatgaagggaatgcaaaaaagtgccgtgggagatgagaagtggagaaaggaatttcttttttcttggaagcaggaataacttcatgaagcatgtatttcaacttaaacagatagtaggcaacgctgtaaggggagtatggctgcagcaaaagtgttcggggcagactgggaggaagggagggaataaattcagccattgttatggaataatgatcaaaatttattttcagcccgtttcacttaaaagttgagactgcttaactttttttaatctttaatcttaaacttttaaatgccatttgatctttaaaaatatatgttttaatagtgtattttaagtctctatatttttgttattagaatatatagaggctataacctactaccaagcataacagacgtcactatggaaaataacctttcaagagttattgcagcagtttctcatgaactaatcacatcaaccaccagagcactcacagtaagtctctttcttgatcggtcttactgacattgtaatagtttttggtagcttgtatggccagttagttgtatggtcatcttacggtgaggtgcttgtcttacagctcttacttatccatgaggcttgctaagaaattgtgcttctgtgaaaagaatctcagcttactccaggaatgtaaatgactatgttttttctgattattaaagtaatacacgcccaaaataaaaaaattcagccaatttaggaagacacaacaattaaaataagccaggcatggtggctcatgcctgtaatcccagcactttgggaggcca

SEQ ID NO: 110488 - DNA, 1013 bp, Homo sapiens
cttacactgtcttttctaggggattgagccctgggtagtcctgcttatttgaggttgcaatttgtctttcaataacttttactacaagatatggcgtgttaaaggataccattggggaaccaacataataatatcaggaaaactaaccacgtcagacctgccccattgtgtatcaagtacactatttttccatagtaataaagagttcaccccagccaattctcttttattttgtgcctgtttactcaatggcattaacatgcccaaatgtctgggtagctgtctcatctccagttcagcagaaccattgtcatatgccctagtaaaagcattccttcattggacacttaggccccaatactttcattcagatctactacctgatttcatttctcaaatgatttttatggagctctgatttataggaaagatgttagttgattaaaaataaaacaatttctgagctggtataaaatgtattgtgacatgccttcctcttggaattgcaagagaaaggaagactgttgtttgcttaaaaattgtctataatttgactttgcaaatgtctgcttccagagtgcctccactgagtgcctcagatgagtctaggaagagctgtaccgttgggatggccacaatgattctgaccctgctctcgtcagcttggttcccattggatctctcagcccatcaagatgctttgattttggccggaaacttgcttgcaggtactggtactgagttgaaacagggactccaggacttggattttgatttccttagggggaatgggggtggtgagcatatgaggggaaaatactataaggtcattgccagtgatggcttgtccctttagtcaaatttcagatgttacctatatgcataaacacatgcagttggcagctgttctgtgctgagtattttaaagtagcctcttcccaatatagcccctcagttaactacaagtaaactcattttgaatttcattttaatgggcaccatatgccagtact

SEQ ID NO: 110489 - DNA, 1058 bp, Homo sapiens
ttcggttgtgaagacaaagaaacctgggatgacttcacatcctgggcaggtgtgtggtggtgacagtcatggaaattgggaacacagatttgtgcgggaaacatcagtttcagtttgagtttggcttatcagttgaatatcaggcacagatgtctggccaactctcaacatagggtcttaaatgacttcagttccccaagcaatttgtccttcccatgctattggggtggagaggtaatgtctgtgcccatatcacagccagtgctcccaaatctctgagaagttcatgggcctctgaagaagaagccaacccagcagccaccaagcaagaggaggtctggccagccctgggggaccgggccctggtgcccatggtggagcagctcttctctcacctgctgaaggtgattaacatttgtgcccacgtcctggatgacgtggctcctggacccgcaataaaggtaatgtcccacttgggtgctggattcatacagccttaatgactatgggtttccagactacctttgtttagtaatctgtcccttctttattctctttttgctttaaatgaacaaaattgctcagattgtgacactaaatttaacatcaaaatgtgaccatgtggatgggtgcagtggctcgtgcctgttattccagcactttgggagactgaggcaagtggatcacttgaggccaagagttcgagaccagcctgggcaacatcacgaaaccccctctctactaaaaatacaaaaaattagatgggttgggccgggcgtggtggctcaagcctgtaatcccagcactttgggaggccgaggtgggcggatcacgaggtcaagagatcaagaccatcctggctaacacagtgaaaccccgtctctactaaaaatacaaaaaaattatctgagcatggtggcgggcgcctgtagtcccagctgctcgggaggctgaggcaggagaatggcgtgaatccgggaggcggagcttgcagtgagccgagatcgtgccactgcactccagcctgggtgacagagcgagactccgtctcaaaaaaa

SEQ ID NO: 110490 - DNA, 2024 bp, Homo sapiens
tgcctcagccttctcagtagttgggactacaggcatacccaccatgcccagctaattttttgatttttttttttttttgagacagagtctcagcctgtcgcccaggctggagtgggttggcgcgatctcagctcactgcaacttctgcctcccaggttcaagtgattctcctgcctcagcctcccgagtagttgggattacaggcgcctgccaccacacccagctaactttttgtatttttagtagagacggggtttcaccatgttggccaggctggtctcgaacttgtgacctcgtgattagcccgcctcggcctcccaaagtgctgggattacaggcgtgagctaccgctcccagccaggaaacagcattcttgagataattcatataattcacccatttaaagtatataattcattctctttagtatgcccacagagttgtacagccatcaccagaatcagttttagaacccataaaggaactctgtactctttacccaaaacctccatgcctccagctgcaggcagccactaacctgccttctgtctctgtgactctacgtcttctggacattactgtggatgggctcatacagtcagtgagcttgtgactggtgccttctaccaagcagggttttcagtgtagcagcctctctgtttttcttttttttttaaattgtgacggaacttctgcctcccgggttcaagcgattctcctgcctcagcctcccgagtggctgggactacaggcccatgtcaccatgcctggctaattttttttttttttttttttagtagagatgggtttcaacatgttagccagggtggtctcgatctcctgacttcatgatccgcctgcctcggcctcccaaagtgctgggattacaggcgtgagccaccatgcccggctaacctttcatttactgtctgcatttcttccctgatgccttccagtccatgcacccgattgtagccattcatcctattatggtttaaggtgactgtcttagtcagcatgggttgccataacaaaataccatagcctgggtggcttcaacaacagaatttacttctcacacttctggaggttgggaagtccaagatccaggactttcgccttgccctcatgtggtgagggggtgaggaagctctgtggggcctcttatatatggatgctaatctcattcatgaggggtctgccctcatgacccagtcacctcccaaaggccccacctcctaataccatcaccctggtaattaagtttcagtgtataaatttgggggactatagacattgaaaccataacaagcacttttctaagatcagggagtgagtaagtagcagagctaggacctcaattccacatgtcagtcatcttgccttcactctgctccatgatggctgcctcctagagcattgggagtctcgatgttctatatgctctcatgtgttgtgtattggagatagttgaggctttatgaatacatctggatttgttgacttctagctttgctggtaaccagctgtgaccttgaataagttacttcatctctgagcctgtttcctcttttagaaacaggagtttaaaatgctgctttgggttgggcacggtggctcatgcctgtaattccagcactttgggaggctgagatgggaggatcactggagcttggagttcgagaccagcctgggcatcatagtgtgagatcctgtctcctcaagaaattaaaaaattagctgggtgatgtggcgtgtgcctgtggtcccatctactctggaggctgaggtgggaggattgcttgagcccaggaggttgaggctacaatgaaatatgattgcaccccatcctgggtgacgagtgagaccctgtctcaaaaaagaaaaaaaaaatgctgctttgtacccctttcatgtcatggcgtcatggccaacatagaatgccctggttgtttgctgttggagggcatgggcctgggggctccctgagggctccttccatcttcaactcattctctgtgcac

SEQ ID NO: 110491 - DNA, 1052 bp, Homo sapiens
gttacttacattctcatagttctctagtttcagtagtttcatttattattttgttatatcaatctatctgtctgctcatctattagaagcatccttgttttttttttttcttttttagacagagtcttgctctgtccccaggttggagtgcagtggtgcaaccatgcctccctgcagtctcagggctcaagtgatcctcccacctcagctcctgagtacctgggactaccggcatgtgccaccacacccagctaatttttacattttttgtagagacagggtctccctaagttgcctgggctggtctcaagctcctggcttaagtaatcctccctccttggcctcccaaagtgctgggattacaggtgtgagcaactgcacccggctacaagtatacttcttaattattgtagcttaatggtatttatgaggggatcagttcccctgttgttctttagaattttctggatattcttctttattgattttgggatgtgaacaatagaatcaacttctacttgtagattgatttagggagaacttatacctcagatgttaagtcaccctgtccagaatgtgggatgctttcctatttgttcagaactttttaaattacctcagaagcacatgaaatttaaaggattttaaaaaaaacttaaagattatttcacatagctcttgcacatttcttgataaatgaatcctcaggtattcctctgtttttgttactaatagttacttcttatgggttttttttcccctgaaaatcatttatcaaacgtatgtggcttattttctgaaggatgtttgataattttggaagatatgaaagtcttcatattttacaaggtttgaggtctctttaagctgcatggttctcatgtcagctcccaaagcagaagacggcatgttgaaaaatgccgtagagaagatacttcttttccacctgttttcaactcatatcatcttgaatttcagggcacctttccatgctcctagtgcttgctatctgtttattattttccttcctgaataccctgaactccagcatg

SEQ ID NO: 110492 - DNA, 1153 bp, Homo sapiens
agtctcgccttacctttcttgttatgcatgtctttggtcctgacccattctctgagtctgtaaaatagaattgctgtataatttaattacatgaaatcctttagaatcttaacacatcttacacctgatttaatattttattgtatccaaattgaaccaaccctatgtgaatttgacagtgatttctcccagggatcctagtgtataaggaataggacttagtattttctattttttgatataccacataccagatactgattatgatggacatttaacccttttttctcattatgaaagaaagttaggaattatttcttccagtagcgccagtgtaacctgaaagcctttgaaagagtagtttttgtatagctatctgaaaggaatttctttccaaaatatttttccagtgctgacaacaaacacgcagacacaccctgcaaggtgagtgtacggcgccgcacagtggaggcatctgctgcagccgtcgatgtttgtgtctttggttgtacattatgagatcgtgacagggccagtaaccgtgtgttctctccttcaccttcccaaggtcacgctggatcttcagaacagcacggaaaagtttggagggtttctccgctcagccttggatgttctttctcagatactagagctggccacactgcaggacattgggaaggtttgtgtcttgttttttctccttgggttgtggctggcacacttgatgtgcgtcttctgggctgagttcatctaggatggagcctggttctccagggtgcctccgggagactcctccctgccccacgtgcttgcgtcacaggacccaagtctgactctgccttagccatgaagtttagggggaagtttctatttgtattctatttttgtctgttatcatgtattagcttagacccagtttagtttggaaaatcagtgggtttcaaaatgtgtttgtagagtcctttatttcttaacttgaccttttcaagtggaaaggggcaaaacagacgggtaagggggcggggcgggaggtgtgacttgctcttttgtgcctgaggaagtaacagagctggggttgacagtcatattctctgacacagatagtctctgacttatctcacagaaagtcagcggcagagcctgagttaaaagt

SEQ ID NO: 110493 - DNA, 1050 bp, Homo sapiens
gtttcaatgctttctgtaaccatttggggtattaataagcatgtgagtgtgtgcatgtttgggttaatttcatatatgtttcttagaagggatatcattgatgtaaatattttaaaggcttgtcctccaaaaaaatcatgtaatttcttctaaattactgatcttttaaatgaccttcacctttctctcaaatctcacttaagactgggctgagtagtcagtttcctgtagcagaaaaaagctcagacttgagtagccttctgcgagtgaggagacttgatggctgtcaggcagctgtaaactctaaatagagtgtcattatctgaagagggcgatgctgccacactgagtggcctttcaagttgtttctcaatctgacacgttctgatcgtgtgaatgtgaaattggtttgagcaggagtatatctgagtgcagaggagattatttaaagatattctcattctctgcttcccttttattcccatttggcagatggtttgatgtcctccagaaagtgtctacccagttgaagacaaacctcacgagtgtcacaaagaaccgtgcagataaggtaaatggtgccgtttgtggcatgtgaactcaggcgtgtcagtgctagagaggaaactggagctgagactttccaggtattttgcttgaagcttttagttgaaggcttacttatggattctttctttctttttttcttttttatagaatgctattcataatcacattcgtttgtttgaacctcttgttataaaagctttaaaacagtacacgactacaacatgtgtgcagttacagaagcaggttttagatttgctggcgcagctggttcagttacgggttaattactgtcttctggattcagatcaggtttgtcacttttatctttcatccatcatacctgttcctaatttagtacaaattaccctaaaagacactgaaatctactttaaagaaatgtggtctgcatgtttccctcatcagttgctgctgcttatctttttcatgcacctagctggtgcagaaggcctggggcatagc

SEQ ID NO: 110494 - DNA, 1032 bp, Homo sapiens
tcaagcaattttcctgcctcagcctcccgagtagctgggactacaggtgcgtgccactgtgcccggctaattttttgtatttttagtagagacggggtttcactgtgttagccaggatggtcgcgatctcctgaccttgtgatccgcccgcctcggcctcccaaagtgttgggattacaggtggctctcgcaccaagccaagagtttgcatttttagcaaattcccaggtgaaactaatgcctgcttttctgggagcacactttgggactcagtgatagagaggtttattggtaggatagtaaaataggagttattttctttcacaaaattggcaattgggggaaatttaatcttccttttttcttcagctgtgacttatgtattatgtttattttaggcgtccgtgagcactgttcaactgtggatatcgggaattctggccattttgagggttctgatttcccagtcaactgaagatattgttctttctcgtattcaggagctctccttctctccgtatttaatctcctgtacagtaattaataggttaagagatggggacagtacttcaacgctagaagaacacagtgaagggaaacaaataaagaatttgccagaagaaacattttcaaggtatgctttctatctgagcctataactaacccatgccttttgggaagtcacgtgatgtttcacagtcagtaagtctggaataatacctggtcttgcttcacttctgagttgggtaaagaagtctgtatcagtgtaattttctaatccgtcctgcattatctatggctcttggttcatacctgtcttgaagttctgtcatgttctgtctcttgtcctcagtagagatgctacagcagtggctcgcctcaggcagggcagggcagtggggtggctgtcctgggggcaggcagtaggggcacgctgacgtcagggaagttgaaacccaagagaagccagtaaaagtgagtctcagattgtcaccatgtgctggcagttttacacgctgtcagtaataaaag

SEQ ID NO: 110495 - DNA, 1482 bp, Homo sapiens
gaggtgacggccttggtaaatcgagtttcctacctcctcaattatttgtgctcatacactgtatatttttagtgaggtttatatttgggatgtgttttctccttcttaccctttctggcctttctatggcattaatacctggtctcttcttgtgtacttgaaaatgaatctctcatcatatttttccttagtgtcagaacctccatgactccgagcacttaacgtggctcattgtaaatcacattcaagatctgatcagcctttcccacgagcctccagtacaggacttcatcagtgccgttcatcggaactctgctgccagcggcctgttcatccaggcaattcagtctcgttgtgaaaacctttcaactgtacgtcttcatcctgccgactattgccagttgcagttttccctgccttaaaaatggagtattgaaatttttaactttaatttctgatttgcaaaatagtcatcttttgttcttttccttcttgctgttagccaaccatgctgaagaaaactcttcagtgcttggaggggatccatctcagccagtcgggagctgtgctcacgctgtatgtggacaggcttctgtgcacccctttccgtgtgctggctcgcatggtcgacatccttgcttgtcgccgggtagaaatgcttctggctgcaaatttacaggtattgggaagagaaaccctgatattgatttatattgaaaatttagcaggccaagcaaaacaggtggctggctttttcctccgtaagtatggtcttgacatggtcaccgatagaaacatggaaacatctgcaaacttgccgttactcgtgtgtccgatctgactgtttcttgtatttttttctagtctgcccttactaggatgaactgtacacatcagttcatcctttttaaatgagcatgaggttattttgggttgttaggtgttacaaacacactaatgtgtttttgtctattagagcagcatggcccagttgccaatggaagaactcaacagaatccaggaataccttcagagcagcgggctcgctcagaggtaatgctggaaacacaggtcgtccttgtgttaggacaacccaggatataaaggatatagatttgtacgggaataaattcacaggacaagaaatcgatgtgccttataggtgggtttactgcagaagtgccataatagaaccttcctacttttaaaacaaccagatctcactttctaaagagtaaaggatgaccggcaggatcacgtctgtgacgtgagtggaggcagtttgcactcctggtggctgtttgagaggtagcatttagaatgcctgtattcactgtcctgtgatgagtgggaaaataggttatcaggtttatcttagcaaaatcaaagcatgtcatctaattgctaaacaagagttggcaaatctgagagacattactcaatccttggcatgcaggacttacatctgcatcctgttgccat

SEQ ID NO: 110496 - DNA, 1050 bp, Homo sapiens
ctttttcaaactttagggtggttggtgtatcactgaggtcttggatgacactttagctttgattttgtttttatgaattaaaattgtcataccaaaatttttatttcaagcaaatccaagagcataaaaaattaaaatattacttaaaatactaagagagaacagatatatattttactaagcatatgttgaatgaaattgttcaaatatttataacaggcatagagtagaattttcttaaaaatatttttgatggtataccaatttgtattttctcagaaacatttgccttattcttttttctgttgtgtttttcttacctgattgaaagctcataatctgttgttattgtttgttaacctttaatgctctgatttcaggagttcaacctaagcctgctagctccatgcttaagcctagggatgagtgaaatttctggtggccagaagagtgccctttttgaagcagcccgtgaggtgactctggcccgtgtgagcggcaccgtgcagcagctccctgctgtccatcatgtcttccagcccgagctgcctgcagagccggcggcctactggagcaagttgaatgatctgtttggtaattaaaattaaaatttatcttatttttaaaaagcattccagggccagtatagtactttgcaccaagtaaatgtacaataaaggcagtggatctaatacattgaaagcgtttacagaggtagctaaagagcagcacgggtgtcctcggctcagaatttcttcctgtgtgtttgccactttgccattcattgacatggtcatggacatagggctctaagcccttgaggaaggctgggccagacctcaggggagatgcagccccaaaccacgtgcagtcctgtggacggatgtgtagatgtgccactgaggaacaatgtcttgagctttcatcagattctcagagaattgcttgactgcctttcgaagttgatgcatctgtgctcacgtttgcacccacccacgaggtccttctgtttcaggggatgctgcactgtatcagtccctgcccactctg

SEQ ID NO: 110497 - DNA, 1907 bp, Homo sapiens
ctccaaactgcccagtcatttgcaccttcctcctgagaaagagaaggacattgtgaaattcgtggtggcaacccttgaggtaagaggcagctcgggagctcagtgttgctgtggggagggggcatggggctgacactgaagagggtaaagcagttttatttgaaaagcaagatctctgaccagtccagtcacttttccatctcagcctggcagtaagtcttgtcaccgtcaagttattgtagccatccttcaccctcacctcgccactcctcatggtggcctgtgaggtcagccaggtccccttctcatctgcacctaccatgttaggtggatcctaattttagagacatgaaaaataatcatctggaagtactttatgtcttaagttggcctggacatgtcagccaaggaatacttacttggtttgtgttagtgcttgtaattcgcccccagaatgtgtacacgttctggatgcattaaagtctggcctgtatccttaaagggccatcgctgtgctgcctgccctcagcaaggacacactttgcagacccacagaggctccgcctccacctcacaccaaagaaagggaggagtccaaagggcatcagtgccattactcacaaaatgataaatacacccttattctgaaccacgtggagtcatatggtttgtgatccctgtccttcaggtttcagcttagtggggaagtgggaaagtcagcgtgtgatcacagcacagggtgattgctgctgattatattatgtgcctgctgtatgcaggatgaaatactttatatgcgtcatcttatttgactctcacaaccccctgtgagataggctctgttactcccatttgacaggtgaggaaagcaaggcttagagaatttcagtgacttgcccaggtcctctgagctaggaagtagccattctggcatttgaacccaaggcctgctatccctagaacccacgctctcaaattcaacctatgacagaggcaagccctggtgctgtgggagccccaaggaagagcctctggcctggtggccacgtagcccaggagagatttctacaggagcccacagcgctgaaggagagagaggcagcagagtaagggggctttgtggcagagaggggactggcactttggggaataggtgggtcaggactgaatgtaatggagccatgtcagagctgtccttctggaagggcaagggcacctggacgcgctgcccctcagtgctttggacggttccacaactgtgattcacacggcttccccaaacgaaggtacacgagtgggcattctgtgactcggtacttccctttaggccctgtcctggcatttgatccatgagcagatcccgctgagtctggatctccaggcagggctggactgctgctgcctggccctgcagctgcctggcctctggagcgtggtctcctccacagagtttgtgacccacgcctgctccctcatctactgtgtgcacttcatcctggaggccggtgagtccccgtccatgaacggtgggttcctatcatagttcctgtctgcttcaccatgtttttattttgtgctgcctgtttgccaggtactaagctaggaattggggatggagaggtagataaaatatgcatcaggaagggctgggccccatctcttactctccaatatattggagtctacactggaatttaactggaatttgcttttttagtcattttatttagattttgaagtttcagctttcatcaaaaatacctctaaactttatgtctctgtgatctttggtcttagctgttttatgtatttagtcttatatgatcataagattaataacattacattcagaagattatttgttttctgtcagagttaaaatgtttgtttttatactgcattgtaat

SEQ ID NO: 110498 - DNA, 1045 bp, Homo sapiens
agatggcgggcttattccgaagaagaggccagtgcctggcggtgctggaagcagttgcagaacagggagttgtaggctttcctgggaagagagcagcaggggtgctggagaagcaggccacacttgctgcatggggttgctctcggccccactcttggtgcacagcgagtcactgtgggttcattagcatctggttatgagacagtaactgctcctttggaggggctcgtggagaccatgcaggagggcacggtcttgaggtcatgccgtccagagcacacctgaggataggccaggacgggctgcacgctgtaggtaaaattcctccagcaagctcttcactggcattgaggagttccctgagtgcggtcatctggaaggcagctgtaacaggcactgcagtctctccctgggtgggtaccagagaggagcataggggagcataaccgatttaaagagagggctttcctgtggtgaggtaagagattagctggtcattatcatagagccccctctgcctttgtgcagatgggctgtgggaatcctggggttccgttgggtcctttgtcacctcactgaaggcatgtaagctgagctggccagaccgtgagctgatcctgccacttgaacagcatcaagcctgcctctggattcttctgtgcatggcacttgtctgagcacctcacgcacagagaactggacttcagagtttacagaaataagctgtatggttcattttcatgcctgcttgccaataaacatatctgagctgaacctcattgaacgcctgcctttattctagcacagcacctgctgtttgtgggcgaggggtgctgtctctaactcctgcctgcttctcccagcactccctgagtggggtgtgccagcagcctcaggatgaggacaggaagtgggagggcagagcagatttgggagggccacttgatggggaaggaagtcccaggaagcagttggagctgttttctgggggagaaggtgccagctctgggacagtgttggggtagtgaggagggagcccagtgga

SEQ ID NO: 110499 - DNA, 1031 bp, Homo sapiens
agtaaggccacaccctgtgctggttggcacatgggcagttatggccgcttgcaggcctttggtggggaataaaataaggcagcaagctggtgttctttttttctcttaccttatttttgaaagagtagctgaatggtgtcttgactgatattccagagcagggacaaagcctgctgaggtctgggggctgcgattaccaatggctggaatgcattttattacggtgcattccatgttaaggatcaatacgattgtgccctttctggaaaatatcttttagtttatcaatattcagaggagtgtaggttgaattaaaatgaaaaggcactttataaaggccatgagtagtacctggtttcatttttctaatgtcttgcagagattttatcaggcttcttgaagtgttcacgtacattacgctaacacgatattaataataactgtgctctggtacagcggagccagcagaatgggaagttgtggaatgcaggcccttgattctgatagaaggtgtggtttgaactcacagaaatgacagtttggagggtagacatatgtcacaagtcatcaagattgtctttaaattcatgcatagaagctaacagggtgtcataagcaaggcctgtaaaatgtatgagggaattcaaagataatttattaaaaagtaattcatgtttggagttttgtgcccaaaggagtccttgatttgaaaaatgggcttttgcccatcagattgtttcagggcccgtgtgtgcggaggccctgccttgtgccccgtgagctcagcctgacagaaatcctttggtagcacttaaggctcctcttcctcccattgaggcagggaagactctgggttctgcaggcagaggtggttgtgggtgtcttgctgctcttgttgacatgtgggctctccttccaggaagacacagagaggacccagatcaacgtcctggccgtgcaggccatcacctcactggtgctcagtgcaatgactgtgcctgtggccggcaacccagctgtaagctgcttgg

SEQ ID NO: 110500 - DNA, 1011 bp, Homo sapiens
cttctcaggatttaaaatttaattatatcagtaaagagattaattttaacgtaactctttctatgcccgtgtaaagtatgtgaatcgcaaggcctgtgctgcatgcgacagcgtccggggtggtggacagggcccccggccacgctccctctcctgtagccactggcatagccctcctgagcacccgctgacatttccgttgtacatgttcctgtttatgcattcacaaggtgactgggatgtagagaggcgttagtgggcaggtggccacagcaggactgaggacaggcccccattatcctaggggtgcgctcacctgcagcccctcctcctcgggcacagacgactgtcgttctccacccaccagtcagggacagcagcctccctgtcactcagctgagaaggccagccctccctggctgtgagcagcctccactgtgtccagagacatgggcctcccactcctgttccttgctagccctggggtggcgtctgcctaggagctggctggcaggtgttgggacctgctgctccatggatgcatgccctaagagtgtcactgagctgtgttttgtctgagcctctctcggtcaacagcaaagcttggtgtcttggcactgttagtgacagagcccagcatcccttctgcccccgttccagctgacatcttgcacggtgaccccttttagtcaggagagtgcagatctgtgctcatcggagactgccccacggccctgtcagagccgccactcctatccccaggccaggtccctggaccagcctcctgtttgcaggcccagaggagccaagtcattaaaatggaagtggattctggatggccgggctgctgctgatgtaggagctggatttgggagctctgcttgccgactggctgtgagacgaggcaggggctctgcttcctcagccctagaggcgagccaggcaaggttggcgactgtcatgtggcttggtttggtcatgcccgtcgatgttttgggtattgaatgtggt

SEQ ID NO: 110501 - DNA, 1068 bp, Homo sapiens
cttggagctgtcctccagaggggtcacgtgtaggagtgagaagaaggaagatcttgagagctgctgagggaccttggagagctcaggatggctcagacgaggacactcgcttgccgggcctgggcctcctgggaaggagggagctgctcagaatgccgcatgacaactgaaggcaacctggaaggttcaggggccgctcttcccccatgtgcctgtcacgctctggtgcagtcaaaggaacgccttcccctcagttgtttctaagagcagagtctcccgctgcaatctgggtggtaactgccagccttggaggatcgtggccaacgtggacctgcctacggagggtgggctctgacccaagtggggcctccttgtccaggtctcactgctttgcaccgtggtcagagggactgtcagctgagcttgagctcccctggagccagcagggctgtgatgggcgagtcccggagccccacccagacctgaatgcttctgagagcaaagggaaggactgacgagagatgtatatttaattttttaactgctgcaaacattgtacatccaaattaaaggaaaaaaatggaaaccatcagttgttgctgtgtgaggcttgctttgcttcatgagaacctagaccttgctgagctggagtcttaggaagcagtctcctaagtgcttctccagcaggggcagaaactgtcccaccagctaacatctggcattatggagggtcccccaggcagctgccagcagggacaggccccgtgttttctgtagccagggatgaggaagtggccccagggcatgggcctggctgggtgcttctgcaagggccttcccaaaccacagtacaggtggtcttcctgccctgcagatgggagctgtgggagctgctggagctgctggagccttcatggtcaagtgacatcataagcttatatgacatacacaagcctcaggacttggcccatggcactgaagcaggtcatcaggcccagcacagagactagagctgtgttctcacagggcccaccacccttccacctccttggccattgacacctgcgt

SEQ ID NO: 110502 - DNA, 1063 bp, Homo sapiens
gagtgcctctgagaacctcccagagtctgccccttgtgttcctcagatggacttttcgtttcctggagttttgtcatgaggcttaattaactcatgtctctctctcttttctttcagtctgcaactgtgtctgatggcggtaagtcacaatttctgatgtatatattttttatttttcataaagttttcaaattgtgaaagtgtatttgccatttgatgccctcaggaaggacgggttgtttgcctttccctgtctccttgtgggcgggttctaggtgagttaattctgggggcgctttctgtgacacccaggtggcctcggcgtgtgttttggaagctgtttgttaagagaactgccatggccctgaacaccagtgtgatagagcgctgtgtgtctgaggagtgcacccacccgcctgcctgtgtctgacaagttaaaacgtgtttttgctcttcccttgttgtataaccagcttttaaaccagcaagttaagatttcaaagtgctttctgaatttgagcaattcaggaaatttgggtgagacccagaattttctcaagaaaagtataatagacgaattgagagtgtgggatgaagaggaatcaaaaacttactttctgtgtttaaagaattttgtgcacagggattcttttcatggactgattgaaaaggaagtaggcaggaatgtcttatttcactgaagatttctctgatgtcatccttatcattttggttcaatgatttaaaaaaacctctccaaagtaaggagagttcctccgaaatattcctcttttcttctaacactcctgacagtccgcaggctctcgggtttcatcgtcacctcacgcttttgtccccacttctgtccctgagagctggaataggtgcacctggcatcgctgtgggccagggatgggctgaggcacaggctgtgctgcagaagctgcccaggggccggtgggtttgaggtgccactgtatttgtgcgttaaagagaaaccaaatgtcgttctctcactttctgtggtcctgcagctgctggcctcagtcctcggcctcggaaa

SEQ ID NO: 110503 - DNA, 1032 bp, Homo sapiens
tatttatgggactaaaaattttttaatttaagttacatgtggaaagaagagttaaaaactatacaaaaagcctacaagtacttttttttcctttgccactgcttgtttaataaagcacaaattgctgaagtggagtagcgtgttgggaggccggggttccatctgcagtgtttatgccacgtgcagtcacctagctgtgctcggcccgccttcaataattcaggctccgtggcggcagcagctgaggggctgctgtgaattatgcatgcgtcttcggcaaggcttcgtgcgacgtctcctgttggcttcccatccgtgagcctgcgtgcaggcagggcagagccgtctttgtcagccgtgtgctgggatcgcgggagaaactgcaataattggcctcctgggagtgtgagctcaggagcaatgtccctgtgtgggacgcaggcctttgctcggggccgcccgggctctgccggctgaccctggtatggactcagaggggtggtttgcagtgcatggttggaagtatttggttaagtggcatcacagtggctcttatcagctctacccaggtaaagtcccttgtccccatctgcgtaccttgtcgcgttgtcaggggcacactgacttatgtggtcttcaggtatgtttgccgcagcgggattgtgtcggggatgaggggcccataggggtgcctgtgcagtgacgtgtttcgtgatctgacttggagttatgacttaaagagtcagagtgtttgaggttacggtttggatgagataacaacgggcccgggccgtgtgttacagaactaactgcaaacttttcatcttacggtattaacatttgtaacgtaacctacatgtttgacccaccaatatatacatggcggcttttccaattagcagcaaatctaaacagactttaaactctttttcaccaggaaagcatttctttgactcagatgggtcagtcgaaagaaaaaatcccacaacaataccgtaaactggaccgtgttctctaaggtggtgttgggat

SEQ ID NO: 110504 - DNA, 1045 bp, Homo sapiens
gggcaccgtgggtcaggacgtaactcacgtggcatacgcggcgccccgcgcccagctgctttcgctctagcaagcctgtttgggaaacatcttgttgccatgatggtcttagtgctctgtgtgcacatgctcctgtgtaaggttagttgcttttcctgttcaaccctgtggctgtagtttgttgttgcttgggcgagtgtgcacgtgtgagcatatgagtgtgcgtgcaagggtgctgtgtgggcctgcacatgtgaacatgtgtgtgtgctcgtgcacacacatgtgcagccgctcaaggttggggtctgtgttttgttccctgctccatccctgtgtgtagaatgcactggcaggtggtaggtgtgctgtgcatagttgttgactgaatgggtgttggaggggacagagcttgctgcgtgtcccagggtctcctgtgggcgggcagagcagtcactgggccggggcggagggcaggggtgcaggtgctgtctgtgctggtcccgcagagttgacgggcgccgacctgaaggactgcgtcagcaacaacagcctgagcagcaatgccagcctccccagcgtgcagagctgccggcgcctgcgtgagaggagggtcgccagctgggccgtgtcctttgagcgcctgctgcaggaccccgtcggtgtccgctacttctctgtgagtagggaagggcccaggagcagcggagcggtctgtgctctgcagagactaccgagcaggatctgtgggccgccctagagacagcggcaccctgcgggccctgagcagccccgtggcaggggtctcccctccctggaccgccaccctctcaagagctcagaggagggtgggttgaatcctgcccctggttctgcccccagggagcgtccctggccctcccgctctctactggggtctctctgcagcccgcagcactggagcttcctatctgtgttaagaagccaggtgcctgttgccagctcttcaaagagatgttttgcttttggggaaacagctggaagcagcagtgcggttccctaaagt

SEQ ID NO: 110505 - DNA, 1073 bp, Homo sapiens
taggggagagggcgagtggggccagtgcaggggagggggctgtggggttggcataggggagagggcgagcggggccagtgcaggggagggggtgagtggggcttgtgcaggagagagggcaggcggggctggcccaggggagggggaggctttggagttagtacacaaaagagaattggtctgggccccctggtccctccttggtgccctgatctggcgcccttccctccaggcacaaaacaggaagccagggcagtaggcgcctgtgctctgcccggcaaaatggaggctgcaggctcggtcatttgggctggttctgcagttccttgcgtgcagggaatcgggcggtcgacagagctctttccaacgtgttgccttggtcatgacagtcctgccctggggaagctgggtccggccagcagccttcggagatgggctcgtcgcccggcccccacctcatcctgacgcgcaggagccggccctccttagagcccttgttgagaaccgtgcgtgaggaaggttactcagacccaggagggtgggtcctgtttgtagctgtccccagggacaggcagaggcgtggccttggggcctgcaggtgcaggtgccgtagggaggtgtgtcttggaaagagctttctggaaacccacctgcagatgttctaggtagagagctcactttgtgaggagccacttcaggtgacattgggctgcccctctgcctttcaggttgttggccctgatgatgtcacgcagggagcacgtggctcacttgtccccacccagggagacctgggccatgggtcccagtcagaagcaagcgctgaggccattagtcctggagctccaactcttgctcccctccccaactcctcacagagcagagacccttccccgagcccaccctttgctctagggaaagccttacgctgggccctgacacccacccaggcaggtggggcaggcacagcatgtgtaacccagcagggcggccagcagctttgccccggctgaccctctgtgcccagggcctgctgggcctcggggcttgtttgtgtacaggcaagtcctgtg

SEQ ID NO: 110506 - DNA, 1071 bp, Homo sapiens
ctctgggatgaggcatcgggaggagcggggactcccaggggactgccactccacagagggggataaccactgagtcaggctgggcctggtgcctgcgggcgagggtgggcggtggtggccacctcctccaccgagtcttctctctgccacagacccaagtcccccgggaccctcgactgtggaggagcgtgtggcccaggaagccctggaaaccctacagctggagaagcggctgagcctcctctcacatgcgggcaggccgggcagtggaggtagggccgggggctgacctgggctgtgggacctcggctaagcctccagcaggagagctcaggaggcatccatgcatgtgtgggggctgcaggctccctctgctcattcattcattccttctgtctcctgctcattcattcttcccccaactccccgccccgcccgctactcattcatccttccttccccaccaccctgctcattccttccttctcctcctgctcattcattccttccttcttcctcctactcattaattccttcctccccccattcctttcttcaccccctcattcattcctttcttcacccccattcattccttttctccctgctcattcattccttccttccccaccctgctcattcatttcttcctccgccccccccactcattccttcccccctcattcattcctgtcttcaccccctcattcattccttccttttctccctgctcattcattccttccttccccaccttgctcattcatttcttcctccgcccccccggctcattcttgccttacctccattcattccttccttttccccacactcattcattccttccttccccccaccccctgctcattcagtccttctttcaccccccccaccgccccgctcattcattccttcatttctctcctgctcattcattcctttcttctccctctgctcattcattccttccttttccccctgctcattctttccttcacccccccgctcattcgttccttccttctccccctgctcattcgttttttccttctctctctgctcattccttca

SEQ ID NO: 110507 - DNA, 1051 bp, Homo sapiens
atgggtgtggaattggaaagtcagatgtgcagggcttgcgccttttccttttggatcgcgcgtctcctgacatgaggctgagctcacagagctggcctcgaggcgcgctgtccccagctgatgagacgtttctgtccacaggtgaagaagcatctgcaggacctgtccggcaggatctccagagctcggcacaacgaactctgaaggcattggggagcccagcccggcagggaagaggccagcgtgaaggacctgggctcttggccgtggcatttccgtggacagcccgccgtcagggtggctggggctggcacgggtgtcgaggcaggaaggattgtttctggtgactgcagccgctgccgtcgcgacacagggcttggtggtggtagcatttgggtctgagatcggcccagctctgactgaaggggcttggcttccactcagcatcagcgtggcagtcaccaccccagtgaggacctcgatgtccagctgctgtcaggtctgatagtcctctgctaaaacaacacgatttacataaaaaatcttacacatctgccaccggaaataccatgcacagagtccttaaaaaatagagtgcagtatttaaaccacccgcttgttggctggtcactaagtgtcctggtggctggggccggagccagtgctcttgaagggatcgcgtcatagccagcttcccctctgggccctgtgggtctttgcagccaacctccttttcccgtgagacggcccggcctgatttaaagccaagagcgcttgagttgagtttgaggggaagatgtggagcgtgtggttctgtggacagtcagagactgtggcctgggggcagcgtctttcaactctcacctctgcagctcagggacctcgggagacctcaccaaacctgcagggcctccgtgtccctaagtgtgctgtgtaaatgccccatctcatgggggagagacagccacggaggccttcctctgaccatagctgatggactggcggttgctcaggtccggctccgagaatgttcctgtgtctgagcctggaa

SEQ ID NO: 110508 - DNA, 1026 bp, Homo sapiens
ggcccgctgcgagccacggcggcaagtactcgcgggagaagaaccagcccaagccgtccccgaaacgcgagtccggagaggagttccgcatggagaagttgaaccagctgtgggagaaggcccagcgagtgagcgcggcccgcggtcggtggagcggggcctgggggcgggggccgtggttggggtcgttggagcggggcccaggggtcggaggcggaggggggcgcagccggggcacctgtgccctacgcgccctgtccttggcacagcctcccccaagtgtcaggtggggcgccccgaccccttctgcagcaggaaaggtacccgtgccggcgacgacgccgtgtgaagcaggtggcggccggcaccccgagggtcagtgtcgccctccccagcctgggcggcctgctgacccgagcgtagggacagaaccaggctagatcacaggtctcctgcctcccgagcctttgcctgttccctcaaccttatctccctatgtggggaaacaagaaaaacaaaatgttgggtagaaagacgtgtccagggacagaaggaatcccagtagcaagcccgtgcttgttcatttgagcgagaaatgaggaggtgaggagatgggatcggtttagagcacataaaacgcgaccttgggaatgctgaaagtcagtcttaacagggcgctcacctgacctctccttcatttgagagatgagggtacggaggccccgaggggaaagggcacccccaaggtggctcggccggtggggccccccgggacaacagcttcctaattggtgcgtgaccctgggccagctgctctcttcattaagatacggttgcttcatttgttaggtgttcctgaaaacacctgaaatgggtgttttcgaactatgccgaccatctgggcctcattatctcatctcaaatgcaggagtcagattagatctctgtctcaatagtccagttttaagcattcctgagtctttgagagggaaagtaagtgatttgcagaataagaaggaacttttg

SEQ ID NO: 110509 - DNA, 1001 bp, Homo sapiens
agctgcaggtagccacatctgccactaagccagggtgggcagggttctggagactggcaccgagccacgctccctgatccctgcttcccacagtcggggtgggaccatgtggggtctggcggaaaagctagggagggagcagaggtcacagaggctggcctactctgctgtcccgtttcggtacagtaggctcgggaaagttaggacacaaccccacctgcccgcctgcccgctggatttatggaacagacactccacaaatgacgctggagccgggtgggccgggctgcagtttaggaagtgagcaggatcaggtaggtgagtgggcaaagggagcttctgggaccagccttgaaagatgggtggaattctgcaaatgttacttgtttcttattgcaaaaagtaatacatcgttcttgccaacagaatgactggcaggattttcagtaaaggtccaagtcggaagtcatttagactgggtcccctagtctctgtcagaaccatggtactctgttggggtgtgaaagtagccacagatcatctgtagattaaggggtgtggctttgttccaataaatctttatttacaaacacaggctgtgggctggatttggcctgcaggctgtagtttgtgatccttgattcagacagtttagcaaggctgaaaagaacaccgacacccccttgttacccacagatgggtgggacttggccagaggccaagaggagggtgctcgcaggggagcatacagcatgaagaggccgggaggtgccccaggacaccaagtgtgggaaagtgggacatgcggggaagttcccagaaagcgtgatgtcaagttggaggcggagcgctgctggggcgtgaagagtctcgagtccaagtgagggagttaagaacttggtaggggttgttgttgggtcgggcacctggggtcagccaggtggtgacctgggatgcggtggggacaggcaatgaggtaagctctgctctttagtattatg

SEQ ID NO: 110510 - DNA, 1044 bp, Homo sapiens
cttcctcacctgaccctgtcacccatctccccttctcgtgttctcagccccttctttgactcttgaattttgagtttttacagatgtttgggagctcttactctgacatgaagttataattggtaatggagactcagacaatgttgtagattacagagtgaactatgctttttagtgttaaatgcaatagcttgagatacaatgttttacttggtacataaatgctggttttctttcagatttaaggacatacacttttttttttttttttttttaagagacagggtcttctatgttgcccaggctgtctttgaactcctgggatcaagtgatcctcctgcctcagccttcgaagtagttgggactacaggcccacgccaccgtgcctggctggacatgtaaatttgaagtgaatggttaaacatccagctagctgaaagcatggcagaccctaacagaaaagctacagtgtgtttttgcagctatgaagtgaatggtttcctggggaaaattgtgactttgtataactgttgttgaaaccagaataaattatatttcacttgcatatgcataaattattaaaattttcagaagtcagtgatacagaagtactattttgcaatgttaatctgtttgagtctttggagaaagtggtttcattgtaggtacatagtgcactgttaatattttaaacaagtagttcactcttccatttaagggatagcagttccttgtataaaatgactggatgtgtataaaggaattatgttgtcatgtgcctttaaccagctttagtaattactataatctcatatttatgatagttttgttaggtgacaggaccaaatgaaaatattttatgttttctcatcactttagattttatcattatgtacattactgggtttttagcatttcctaatgtgaagttttaatcacttttaagtatacatttttttctgtatcatttaaataaaatatttttataactttcttgtgagttttgttcatgcgaactttggaataacttctggtttttagcta

SEQ ID NO: 110511 - DNA, 1036 bp, Homo sapiens
aaagtactgcgattacaggtgtgagccactgcacctggctggaggggatgggtactttaaccaccaccaatagcagctgctctttccttcatcagatactttatggaggctgagatgtgtttggctgtcagtgccaaacacgtggaaggtgcatttctagctctccaacagctcattctaggctgcagcagacaagttaccaggccgcatggtatgtgctttgtaagtgtaggcgcagggtatcatgggagcatctaggagggatatctagtccaggtcagcctcaggactgagacctttttgaggttttaggagatgtgagagaacttctgtatttgtgtccttatattgggtatttttagtagtttagagaaatggcagagtaagaaatgatcacacataagatatttgggggcaactgcagtgaagtggagtgcccaggaccacataactgctgtgtggcaaagccgggacgcagacactgggaccagggctgtgggggttggaaagaaagtagaagtcatagatctgtcctcaacaaggtgtcatcttagagagaaaaaggcagaaatgcattctcaaaggctgaggattttgagtcgcattgttttcttgggaaggactcattaaggggagttggggggtattgaacagccatgaaatgagagggctgcacaaaagacagtgccggctgagttctgcttttggaaaatggctaaaatggctcgttcttctgacgcctgaggtgatttctttttcctctggctctagcctaagtttagaagcttgaggccttaaggttctttatattgttcaaagatgggagagcaggtccatattaaaaacaaaacaggccaggcgcggtggctcacgcctgtaatcccagcgctttgggaggccgaggcgggcggatcacgaggtcaggagatcgagaccatcctggctaacgcggtgaaaccccgtctctactaaaaatacaaaaaacaattagctgggcatggtggcgggcgcctgtagtcccagctacttgggaggc

SEQ ID NO: 110512 - DNA, 1026 bp, Homo sapiens
ccaggctctagcatcctgtccagcaggcctttctcctcctttcaagtcttgctggacgactcctgaaaagcaaaagtaggaaaaaaactgggggctgagagtggaaggctggacagagggtatgtctcctgctctggcacccggaagcctgcgagggcttcggaagcgcagcgtctcacggtcgcgcatcccggccctggacgcatccagcggcagcggtaatcctggtcctcctgggcttccgtaggtcggaataaacttgggaactcttccaccggcaaagctcagtgttttaaaattcaaatcacacttgccgacatgagagcggaacctttgaggccgactccaccctagctgctcgctaactaaacagcgaagagaacacagtctccaatccaaacgccaggaggtccagacccggagcggacgccggaagcgctgtgtctgacgtcacttccgtcgcatttcggggcggtaccaagatggactcctcgcgggcccggcagcagctccggcggcgattcctcctcctgccggacgccgaggcccagctggaccgcgagggtgacgccgggccgggtgaggcgcgcaccaagccgccccgaggttctcagaggcgaggcgtcggaaaacggccggcctccggcagccctggcccagtctggaaggactgagtttcggctttgcaagtcgaatatttaatgtcagggaagatccttagaatcgcggagtgctgtgcatcgtcatttcagctgcgcttcagaattctctggagagctgatttgacacctatttggaaatagcgattaaaattaaaaatacccaccagttttaagtcttaaggatttaccagaaacatgcgtgtaccgcagtgtacaatgatgtgcgcagtgtttcacttcaggattgcttgtaatagcgaattactggaaatatctgccttgcccgtcagcagaaagctgtttaagtaaatttgggtatatgtatacctgacacatcaggtcgactcgtatgtaccaatgggga

SEQ ID NO: 110513 - DNA, 1127 bp, Homo sapiens
cgcacctggcccagccttcttttttagagaacctcttagtgccttcatttatggaaaggaagaaactgaatgcactgcagagacttccttattgtgaagagcaagatgtttcatcccaatgtttgatgctggtgccagcccagtatgtaatgatttgcttagtaatcaggcagggagatagatacatgggaaagaaagaacaggagctttggatttctgacagacctggttcaaatccctgctgtgcagtttgcctgacgtttgatcttaggcacattatttagcctctgagcctcagtttccttatctaaaaaaaatgtggatagtaatattcattcatttatttaatacttaactgagtgtctgatctgtgccaggacctgaacaaaaaaatctaaagtatcccaggtggtggtgcatgagggaaaataaaacagggtgaggacgtagtgactaggtgttcctctggataaggggtgagggggtcacagcagcctctgaaggttacggttaaggtagatgagcagtgtgcttgaagcgccttccttctggtagaaggagaattcccttcaagtaattaaatcagccacctgttagtcaaaatggttgaatagagaccctaaatgtggactatatatgtagaaaatcttggtttgctatctttcagccacattgttgattacattgtttatttttgtgtaaatatcagtttcaaaaaacagtggggtcagaaccccactggtctttcattcttatcaaattatcgggagttgattcacttatgtagagagaatactttcggcaacaagtgggcatcaagatgaaaatttatctcggtagtacacctagcgtttgtctctttcagaaggtacaaattggccctttgaaaccgtataaccgatcattagattggcctttatgtggcatctattttttaaggttatttctgttttaactaagaatcaaagatttgaaattgcttcaactgcagggttttagaaagttttttccagtttcccttttgaagtgtgaacatattaaacattaaataaaataaggagtaaacagcccctggtaaaccctgagctctgcgaaacgcagcttgtcatcccttacctctgcctttg

SEQ ID NO: 110514 - DNA, 1087 bp, Homo sapiens
gatttaacaccctcaaagctcttcatcttgagagccaatctgccaggtttaaatcctggttctgttaaccgtgtatccttgggcaagttatgtaatctctgtgtctcagttacctcatataaattttgaacaataatagtccttccctcatagggttactgcggggattgaataagtgaataaatgtaaagcctctagaatagtgcctggcacgtggtaaggacacaataaatgttagccattctcattgttaatgttagttttacttatatgaatggtggaattttatgtagattgctaatcaactttgactctgttattttcatgtgaaattatggttgaaaagttaggggcatgagccatttattgaaatgagaagtttcagtttataattataattgtctttttttccttaggacaagacttaaaacctgtcttggatagagaatatttagccatttacctaaaaatggtattttttacatgcaatgcatgtggtgaatcagtgaagaaaatacaagtggaaaagcatgtgtctgtttgcagaaactgtgaatgcctttcttgcattgactgcggtaaagatttctggtaagcttcacagaattcatgtagatccatagtaaatccagatcagttttggaagccttggcgccacaaagcttggaaaaatagtggcaaatttgaagaatgaaattaagactaaaaactggtatgttccattgattaaaactggtgtgattctttcaaatgtgctttactaggccgggcgcagtggctcaggcctgtaatcccagcactttgggaggccaaggtgggtggctcatgaggtcaggagttgaagaccagcctggccaacatagtgaaaccctgtctctactaaaaatacaaaaattagtcaggcgtggtggtgggcgcctgtaatcccagctactcgggaggctgaggcaggagaatcgcttgaacccaggaggcagaggttgcggtgagccgagatttcaccactgcactccagcctgggcaacagagcaagttaaccccttcttgggggggagaaatgtgctttacgaaacaatttgctttttga

SEQ ID NO: 110515 - DNA, 2032 bp, Homo sapiens
agttttgctgttgtttgatgtcattgatgattttaaacaaaataagggggattaactactttttgttttatatttttggtgatgcatctgacttaaagttttgtaaatggttttataaagtcactttaaaaaggtgcatacttttaatttttatttcaactacatttttatatgacaagccatctgtctctaaagaaagtatagtaattttggtgcacccagaatttcaaattaattctaaaatggataagctatatttagttgtctttttagaattagattaagcttattttttgaaagcatcatataggttaatttagactaacctaatatactttgaatgattctacaagttctcttggaaggaatttgagtgtctaatttttaaaattctaatttgggagtcaggaagtaaactttttaataagaatcagctttaaccatttgatattctcaaaagaaaattcttccaatttaaacattgaattttcaaagttttgttatcttaattcatgcctctttctctttcccaaaagatttttttaaggtattctctctctctctctctctctctctctctctctctgtgtgtgtgtctctctctctctctatatatatatctccacacacacacattatgttatacaatacatatatattacttttcttcctataattaaacatgagtttaatagcacattacagatgaacaacaattaccttataggcatgagaagtaacatgcaacaggatgcttccacagcagctgcttttacggtgtttgtgtaattgtgtttgttgatgtgaccttctgttatcactatggattcacagtttgcattttacgaccttgtattattgggagatttctttgataattgtgaaggccctttatacattttagtgcatttgaatataaagtactgttattatcactagtagttcaaaattattccacgtgaaggcaatatcacagacttagttttgccctgaaaaaactttagatgattctgtttgcctaaatctcctacagcctaatgattactgcaattttttttttttttttttgagacagagtttcgctctgttgcccagactggagtgcagtggcacaatctcggctcactgcaacctctgcctcctgggttcaattgattctcctgcctgagcctcccgagtagctgggactacaggcatgcgccaccaatttttttgtatttttagtagagacagggtttcaccatgttggtcaggctcatcttgaactcctaacctcaagtgatctgcccacctcggcctcccaaagtgctgggattacaggcatgagccacaacgcttggcccgatggctgtaattttttattgtgaaacttacctgcttagcttttaaaggaatcaaaaattgtttattctgggagaacctctttgaatgacagatacagtcatggcaaagatgcttactggcacataaatattctaccgagaagggcagcaattctcaaagtatggtctggggaaccctttttgggggtctgtgaggccaacactattttcaaaattgtctaagatgttagttgttttttcctcctcttatgagtgtacagttagtctgcccaaagctacatgatgtgtgatgaagtcctcaccctggtggcctgtgaagtgtgtatttacctgttctaaaggtcactctgttttcatttccagtatggtagatatcaatagctatagcccatattaacaaaagctctttaggacctcaattttaaggtgaaggggtcctgaggccaaaaagtctgaggcctactggagtaggattgttaaccttggtcatttattagtcttagtaactggtgacctctctctcttttcaaattcttatatttcttatgggggctttaacttattatctgtcacccccaataatttcagacataaatgtagtttcatttattgcaatacagaattaatgtaattattaatttattattaatataaatataattattcagggtcaaggaagccattagaca

SEQ ID NO: 110516 - DNA, 1107 bp, Homo sapiens
caagccccaacgatatagtaggaagggaaaacattattgttactttttaaagaagatcttaatgaaaccatttgatttcagggaaatggagaaaatgagaggttcttagtgttcaaagtctattcattagcgttatatagattaaaggcagtaccatggagtgtgcttttaaattcagatcatgttctgtaggccacatttcagaacagctgtggtttttttgtagtagagtaccattcttagaatctgttctgtccccaagcgcagttacttagttattgaaattagaggtgataaagaagtccgcagaggagcacatctcccaaaatgaaatcttactttctctcgtgagaaccaaggcaggaagactgtggtgaggggctctttccttttcacactcatgcttcaggacgacccactgtgtttggggctctctgtgctcataccttgtgtggtgtgaaccagtgaccctgtgtctgttaggattggtggttgggtggcatcaggctgaagaataggtgagcgggatcgtgctgttcagcaggaaaactcaaccacaggaaaagaccacttccagaacgtgggtctgctctggatgcaaataaatacattgattttaacataagttttgtttggagaacagtttaagtttttagaggaaaatattacttttatcatctctgtgtagaaataaaggcaagagagaaatataaggaagtagacactccctattttcatactgttaggatgcagaatgtaatgccattttgaaagtacataggaggtcatttaaacaaaaaattattgaacaaatactagtaatgattttacaagttgttgttttgttttgttttaggtgagaaaccttttgaatgtaacatttgtgggaaacatttctctcaggtgggaatactcttatttattgttaataattggaaacctgcaacacagtgtttttttattggaaataagacatacttttgtacttgtgagagaagcctctaatgatgtctgtaacttaaagacttcagaataaattaggataaatcgttttcaagaaaacagatttctagttctttgagagaaaaatagcattttcatgtgtga

SEQ ID NO: 110517 - DNA, 1027 bp, Homo sapiens
gagctcagccaagccatcgagacctccgacctcgagaaatctcagagctcagactctttctcccaagacacgtctgtgacgctgatgccagtgtcggttaaactccctgtccacccagtggaaaattctgtggcagaatttgatagccactctggcggctcctattgtaagttacggtccatgatccaacctcatggagttagtgaccaggagaagctgagtttggatcctggtaaacttgccaagccccagatgcagcagacacagcctcaggcctatgcttactcggatgtggacaccccagccggtggcgaaccactgcaggccgatggcatggccatgatccgttcctctctggctgctttggacaaccacggcggtgaccccctgggcagtcgagcatcttccaccacttataggaactcagagggtcagtttttctccagcatgactctctgggggctagcgatgaagacgctgcagaatgaaaacgagttagaccagtgatgtaccgcgcttctccacggtagaggcgtgttctcagtttagcaggctggtgttaaggctgtaggaggacccagtttccccatgacagtgccttctaactagccagagaataggtagcttccctcctgatgatggctcataatctgaagcatcttgagctgggggtgtgagggggagggcctgctggctcaccgtgaggcagccgcgggagggagcgctgacgtcacagaagcgaaggcttgatgctgtctcagcagcctcagctgtgggggggaagcgcgtgtgcatcgtgtcaactactgtacatgttggtcatgtgaaaggaattatatatgtatagtattacaagtatttttgcatttttacaagattgaaatttgtagcattttgtattatttacacagaatttatttgtatatgaaactcataccataatttaattcgaataaatgaaacttttctatatattatatgtttcctctagcatttttattaatctaaagactataggggtataaaa

SEQ ID NO: 110518 - DNA, 1021 bp, Homo sapiens
ataggaagcaaggccataaggaggaggacaggcgagctgcagaggtctgagaagatgtgacacaagtgcctagggcagcacgtcgcctggatcaaggagaggggattgtaggatacggcgggggctcaggagagctgtagaaactagagaatggctgtttctcaccagcctggctgggctccctgtgtgtagtgctggaggttcaccaggtggaatggataaaggggttggtgggtgaaccatggccaaggagggtccacagggacagctaaggggatggatgcactgtaggtgctgggaggctgaagagctacacgagttgggatgagggaggagccagaggaggccatgagaggagaggacatggggaggaaggaggaagatctgcactcacgtgcggccattgtgttccaagttcactccatgtgtgcaatggggacaacagatgctcgctgagccagcctggcagaagcgtagtgcagctgatggatgggaaaacacgaaatgcacctgtaatggacttcagagctgatgccctactctgcaactgtgctgtttttctatgaaaatcctctcctcctcactggtctctcgttgagtatcttgtacttctgagttagagctgctcacgagtattcgagggtgctctccacacagtcctccgtgtagggtgctctccagtcttccgtgcaggcagtgctataagcagatcacctgtgacgtgccacatccccagtctcaccttgatattccagcgacagagccacgggcacatctccttcctgcagaggctgtcaagcccgctgggaaggggaagtaaatatttagaacgccctgtcaagggccaggcgccgggcaggtattttcaagtgagtgctcagatcagacaagccttgtgaaaatactggaagatgttcctctcatactgcaaaaaagaaactccagagaagatcctgagagggtgaacagctcacccatgaccttgccagtaagtggcagccaggagtcaggcagttctgac

SEQ ID NO: 110519 - DNA, 1050 bp, Homo sapiens
ccaacaccggcctcttaggatcacctgggtcctgttggccgacttggaggtgctgccttttcaatgacaaggcgtttgttatgtgtaaagaaaggcgttgaattggacggtctccagcttctgcccagcatggagcctgcaacattgtgtgggagtggggctcccatagggtaacaatggctcacccagctcaccgtgcccactgtttgccagccatggggtctcctgcacaccccatcatagacgcaggtgctgggccggcatccccctttcacaggaaaccaggcgttggggcgaatgccctttgcagggtcactgcgtgtggccgagcaggccaggaacccgggcttatctcacttttagtccctggcatgaatggctagttcgtccatcaagtattttcaaattggttgaacgatggagttgctggtggtcgtggttctccaagatgcttccgatcatggcatgttgttgtagaggaagcttaaaagatactgcaaggtcctggaggaaacgccgatgtctggctcagtaacatcatccaatgttccagaattcttctaagtatctcatggggagggggcagggacttaggaaagtctccaaactgtgacacttttatttcactttaattaggaaaaaagagatgctgggctccttggtgcctgcattcacgattggtgtcccgatagaggctgggatgttccagagccttcctggggcagggggcctggccagggctttgaagggcaaggagagagggcagggcagcctggcatggtgcggaaggaacggggtaatggcagagagaacaagtatgggggaggggagccagtcctgacccctgtgaagtcactctgctgttaggggccctataacaaagtaccacaaactggggggactcagagcaacagaaatttactcccccactactggaggccagaagtctgaaatcaaggcttcggcagaactgtgctcccttggaaacctgcaggggagactctgtccttgcccctcctagttcctggaggttgccaccatccttggctt

SEQ ID NO: 110520 - DNA, 1029 bp, Homo sapiens
aacactgccccgcatccagtgttcaggggctgccactggcaggagggcggcgctacaggagaagggaagctttggagccaggcccaccgtaccagctgagttcacgtgcggagtgttttctctctcaatctcaggtccctcacctataaaatgcggccaatgagtcacaccaccgtgttgctgaggactcaagtcaatgcacagtggctcaagtaaagaagccaggatgtgccccaggtcacagtgtggacagaaaagaaagccaaaagacaccactgaagtacagcccttttatcaacagcgtcttgatctcagtcccaccaggacgtcgggaagcacctgacacgctacagaacaaacagcccattcagaccagcagcgcgtgcatcaggaaggaggctctgcaggccagacaaactcccctccagcctcaccgccacgccccttcacgctgtcctctccatctgctgctcgtcatccctcagggaaacggaccaagggttcccctcttccctcccacctcggcacccagcagagtcctgcaagacctgatgcggccaacacctgtggagtggcggccccgctcagggctggcatacgagatggctcagaaacggccctgccctacaggtgccccgcccagggagaaggacagatggagtccccagatgcctcccagacaacgtggctgcccaaaggcaaggctggggaggcaccttggtgcccatggtggcgagcaccccagggggtgaagggcttcccaacggaagcagaatgcagaggccttgccgtgagcccacatgggccagggaaggctttctgagaggctcctgccgccccccatacccatctcatacagagccaccctcacctgtggggtgtgtgccttgaggggagcgtgactcagctgggcctgcacttggaggagcttggggaggttccccaacttctctgggcctcattccctcacctgtgaagtgaagctgatgacggacctgtcttgtggggcacgggaggactgaggtagct

SEQ ID NO: 110521 - DNA, 1042 bp, Homo sapiens
caagatcgtgccattgcactccagcctgggcaacaagagcgaaattccgtctcaaaaaaaaaaaaaaaaaaaaaaaaaagtgagtctggacctgaaaaaataaaaaatgaaagcttagaaagttctagacagaggcagcagcatgagcaaatgctcagaggccagaaagcctggagattgggtgggatatagtcagtaaagaagacccgtggggatcagtgaagcccatcagtgggaggagaggtgggagtaagcttggaagggtgggtagggccttgaatgccagagtagggagtctggacttgcctctgtggcaccagggtgcacgggtggcctgggcagaggactggcatggtgggtgctgtgcttcaggctgatccttagggcagcctatcaagaaggcttctgatggccacaaatgagcatgttgtagagtgtgagttctgctaagaaaactttcccattctagctcagagttaatttatgcttggttcagatatgaacaaggtttctgtttctaattttgatgtttttttccttaaaaaagaaatcaacaacagtaaaagcttgaaatggataccataatgaggacaagtaggagacagctcataaggtgggggtggggggtagatgaaagtacaaatgttcctacccaaagaatgtcatctcaggaaaatatcagatcatttctaaagatacttttagccaaccttttacaaacacatgtttttctataatgacacttctggtaaaaacagccatttttctaaaagcctgcatgcactaagttgtggatgacatgcagttttttttgtaaagatatatttctaataaataaccataactttcaggcatggcctgcctagtgagctttctctacattgttgctatcattacgttctcttcccctatttaaagatctggacttgttgccatctcatggggctgagactgactacaggaaatttactgagattgaggaaaaaaggaaaaagaagcagtatttgcctttgagtacttggaagctcactgataagccctg

SEQ ID NO: 110522 - DNA, 1042 bp, Homo sapiens
gcagacagcgtctgtcctgtagtgaaacatgcagagatgaaaaagatagtttctcacacactaaatatttatcgagcagatgaaggaatgatgcaagtcatcgaaaatgccatttggaaagaaaaagagaaaaaaacattataagcaacacttctaaaacgctttctggaatagactccagctctccatagacagtgggagtacaggtgtcttgtctcgtctcttcccctagctccatttgcactggctttaggatggcattttaccgtaggactcatcttcaaatgtattatgtaaattaatgaaaaagttggatttgacagataagataacatcattaggagcatctttttaggatttcatctttataaaacgaggggtggttgcctttcagaagcattcctgtcacaaagatagagaatataaaataaatcctgcttttttttaactttgtcaatatatgcaaaaatggaaatacttcttataaattctccaatagagaaaaataattataccctagttgaattttaaataatccttgatgctttgtctacttgcacttaacatccataggcaattttatgcttttaaatgcacttcatttgcattattttggaatatactaaaataattattccgatgcatagtaccaagaaaaccttatttttaagctctgagttaaaaatagttggttaacactagatcgcagtgtcaattttatttctaaaggtgtgtatgtgtatcaaatactgatttgataggctgtaaaaaatggaagctacagtgattttgtaaaactttacaaaacttgtataaagctctcaatttgtagcttctttctttagtatctgacaagttaggttgacgaggtggttgtaaatatctttcatacaaatcacttattaacttcccttttccttgaaaagaaatccagcaaagtaaatgcttagagtgttggtttgattcacaccactccttacgaaccatgtgaatctgtgaaactcagtgtcttcctctaatgctacaggtcagcaaataacag

SEQ ID NO: 110523 - DNA, 2193 bp, Homo sapiens
tcagtaatgccaaataattgtagtttggggaactagaagaatgggaatgaagatgtttaattagattgaagttagtaagttggggctggaaggagtgaggaggaagagttgagtgcataataaacatttgtttttttctatgggtgtaagagtcctagaagtcttttaaaatggaagttgcattgagtttaatgggaatcttaagcattataaggtgccactcaacttttgaaattaaatcatgagttctttgtgtcatcaacactaagattctaggtttttgttttttttaatttctgggtttctttaaagatgataggggcttaatattagaaaggaagctatacgttccaggttgttagaaagttagttgctaatatgagaaattagactgctaaatccacctacctagtgttaaccacccatgcccccctgttaaccagcctcattgtctgttacttgagactctctgcagtaagaaggttggatctagaaaagtcagtctcctcttttgtgcacatgttttctctccttctgtctctaaaaagacatatgctgaattctggaagccgcagtcccgtaagattagtattggttcttagcaataggttatttagctattgattatacttttcctaggttaagatggccttatttattttttctggtaagatttccagactgatggaataaagaacttgatatattcagctaacatttatcacttacagcttgcctcaaggaaggtggaaagtgaacccagaatactatattttaaagcctccttgggcctgcaattttgagtagaagttgagtgatgggaatgaagacattctgggcagagagaagcaggtgccagagtgcagggcagagaagaggaggcttgcttaaggaaaggctctgtggtctggcacgcaggtggttgcaggaagtgcaggaacagaagctggtagatggagctggctcctttagccagtgtttaacaaggtgagtggatgggactgactgaccaatttcatttgtagggtgaaaaagagagaagagtgtaaaatggccaaggtgttctaacttggaatctagaaaggatgaagactttctctttggggccgtcagaacaggagggactaggagtaagccagagggtgtgagtggctgcatgaggataccgttgggacatattgcttttgaggcgtcagtgggacacacagtggcagtatctaaaaagcatttggatacactcagcttgaacacaggagggaggcagcggctgggtggacaattcatgtagacagtaaataaagctatggattggaatgagtgagcttagcaagaacatgtaaagaaagagccaagggctgaacttacaagaagtttcagagattaacaaaggcagagagggaatgaatgaaggtgaagaaaaggagttataggttttagaaaagaacctagagacagtggtgttctggaacccgagggaggctagtgcttcaggaggggacaaggaaggaggaggcaggagcagggaggagagccatccgagtttggtgaggcctggtgaagagtgtccccctcagtaggaattgggggaaagtgacaggagttgcttactcaacaactgctgaaagaaaagaagaaagcgagaaaggaacagttcctttatgtattccctcaacaaactcgctgctgtggtcctgagcacagtggaatgtctgtggctgtgctagcctcttttgtgggtgattggtcactggggagcttcttttgcacagggataggactcagacagtccccactgtgacatcagcaggtcaacatgctccagaggtgtgttagttctgaacttttagctctgacttagtaattgctattgatgcatttttcaattaagagtgaaaggagttagactcggaatttagtcagtgggctccaaattaaacttgggtacatgatccttgtgaaaaatcactttaacttgtcagtagttggcaaacatacagcagtggtttttctggctgtgcctttggctgcatactaactgaacagcaagctgtgtccactgattgaatgaaaaaaaaataatgattttgtgttacagggacctttttacaatatgccagagggacctactggagtctctttaatcttgaacaatgcttgtttcttgcagaggcaaattatgcaaatcagtactta

SEQ ID NO: 110524 - DNA, 1167 bp, Homo sapiens
agaactcatgtagaatgaaaagatataatttgagtctcaaaatcaagatctttaatatactgctcaggacctaactattatttttctagtagttttcacacatttttttccggcaaatgttatgttacggagtgattattttgtgttactttgtacacttaaggagcaatccatttttagcagttgagccctcattttgtaaaactaagctgttggcaatttgctagtttctttaaattctagaaaccactaagttttaccttttcatttatttccaaacaaagaagatgttagaaagttctgtaacttatctcttgaaataatattttctggccgggtgtggtggctcatgcctataatcccagcactttgggaggctgaggcaggcagattgcttgagcccaggagtctgagaccagcctgggcaacatggcaagacctcgtctctaccaaaaaaaaaaaaaaaaaaaaaaaaaaaaaaaaaaaaaattattttgcatgtgtattgaagtgctttgagtttcttgccttgttcactccaaagacgatcataatgactttcctcattataggaaaaaggaaaaaagggatctgtatatttttgaggacagggaatgatgaagcaagaccctggactttgcttggaatttggacatttgtattattggtcaaggccagcatactctgcattttattcccattcacttagttgaaagatgactttggaggcaaggacatatatcttgttaccaaaccctctttctcagaactttgagataaaatgaacattcattcctttgcttttgtttttgctaaaagagaaaaaaaatcagtttgagtaaagcaaaaacatttctacttttggggtttgaatgataacaaagcagttgagattaaattattgacatctgacaagcagaatggatgttgaatgtatgttcttgctatgggccgcttgaagttgcttttgctattctctttgctgatgtgaagcagaaaatgaacaaggtaacagttttgatggtgagattagaggtagccaggctgactgtctcctggctcttagagacccttataagctcagggccaccccctccccttgtttagatattacttgctcttttgagtttcagattacaggagcaattggtctgcatgacctatctt

SEQ ID NO: 110525 - DNA, 1260 bp, Homo sapiens
ttttttttcactgataatgaatacagggaaaaactttttatgtaaaatttgactccaaacctgtgaaccttttcagtttcatttgaaaagatataaaaggaaaagttttatccttgagtagtcttttatgccatgaattttcaagaacagaaatattcttttacaaggacagtttttattgactcctagcttcttgctaacttagtaacactgcccatttccctaaattctttttctctgttttcccaattacattgttttaggtaatttttactgtttttcaggtaataagaaggttccactcaaattctttactaaaacaatgttagggtggttttggtacattttatactaatgtaattttcaccaaattaaaaaaaagtgctgtcatttgtttcccttttgcctatagtgctttcgaggtatctggcagatacttttaggtatattacacctaatagaggtctttgtgtgtacatcaaatgagtatgttctatgctgtttagacatattaactgcagattggcagcttcatctttccattaatgtgcaggttcttaatgcttaggagtatcctggagctttctgtttttctgagaaaatctaatacagattttcagttgccttttaaaatgctatacttctccaggaaaccttatctttaatatagcatctggttttctgtgaagttacaagtttgaatcagaatttccagctgtggcatctggttttatggagcctgaattgagaatcaaaaactgggttatgtatttaaataccagaagtaaatgttatctttctttttataaaacagtatggcattcgtatttaagtatttccaatttgccgagttattgttcatgatctgcttccagagaagcaagattaaataacagctgaacagctttaagtgaataggttacattttgttattctgttagtgtcctgtgatcccaaacactcggtgtctccacagcaaaagataagaatcataaaatgttagaacgcaaaacagtctgagaggtcatgtagtgtgactcccctcattttccagatgaggaaactgaggtcttattttccctcatatagattttccctcacaaaataatcactaacgagtgaaagaattgggtttaattgcattagaataatcatgttgtttactgtttttaaaatgcagtcattctgaccgacagtgagagagaggtggcagcaatggtcctggagtgtggcctgcctgcctaggaggctgggaggggt

SEQ ID NO: 110526 - DNA, 1050 bp, Homo sapiens
tgcctatatagtgttcagttcttctcagctgttttacagctaatgatttggttctattagggagaaggtaatacatgcttattttcgcagcatgttaattctattaactgttcagtaactgactcgggaatggaaggcacctattggtccctagtggtctgaaatgggaaatgcattccctgaaaatttcattaggactttccataaagcttaacatttgactagaaacaaaaatgttagtagctttagatagattgattaggttatttaaagtgttccttgagctacagatgaagttaataattttcttaatctcttattaaaaatagatgaactacatataaaaacttcagtcctagattagcacctgtatttcaagtcatttagggaatggtggaaaactctgtaaatgcttgtgtgttaagcatattgagtaaactgtcaagatttttctctttgtcatctttttgtcagctttatcatgcttaattttcaagaaaataatgtgtttgttactgtggtcacaccgtgattttgcattggcttatgtatgatattttattgtctctgtcctagaaaattatagcagtttttatgaggagtggtttgtgggttcacacaacccacttggagtgccatttactacaattctcttctaaaagaaccataaaacatcatgtaaattgtttaaaaagggaaagacctttttcgagaaaggctaagaagaaatctttccaggctttcttttgtttcttatagtcagttttatgattttaagctcccaatttatttagagcgttaatgtcataaaataaagtgcacgtgtgtataagtaaaccgttgtgagctagagctaggctagaactgggtgttgttgatgcagataatatcaaattcattattttataatcttttaagatatgttttctgtgactttggaaatgaaattaaagaaattaaggaagaaaggaaaagagagaggaaggaattaatttatagcttgtatatcttttttttaaaaacccttatgttttcttaagtagtgatgtg

SEQ ID NO: 110527 - DNA, 1120 bp, Homo sapiens
aacacatgtgtttgtacatttctgtctctctgcactcacatagctgctggccagttaatctgaaatccaaaattagtttatttgtacttaaataatttgattttctggaaactctgctagttccaatgcaacaatgcaagtatcttgacttcttgaaggttttccagattatttgctggattatttttttctactgatgattaattttacctctgactttgttatacttttctttgtttcttccacacttcacatattttttattgttcctaatactttatagcatacagcttttatttatttttaaaatttactttctcagaattattcctaaagttctggagtgctctgtgagttgctcctccacatttcggtcagtttctagtgtgttacttttaatcaggctagttttctcatgcatctaaaggaattggcaatattctcaactcctccccattatggtcagggatatgaacttactgtcttcttctttcattttcccaagtaaatgtcttgaaccactgattagatctgtgtgcccacaataacataagcaggcacgaagcttaaatctgatttaaaggagagggctgtatagtctattactccattacgtttttttaagtgtctagattaaaatagatcagtattcagggtgtgagtatattgctaagtctcttaacactcattgaaccagacgtcgtgtgtgttcatttttaaatgatggggtggattacttttatatttattatgaacacaaacactgatgctaacaactgacatgtgaaaggaaagcaggcaatagtgatgaaaaccatttaatgattagtgaggaaacaaatattgtttaatgaaaataaaaaccatgtctaaagggcctaatgctgacttttggaaatataaccatgttgcggtcttttgtgtaccctctgtcctgtacagtagatattgtttaaaattgcttgggaactggagcttgcaattgtgagcctggaatgtcctgcagataattaagttgtggtcaggctttggaaaaataaaaagttctcgaactatgattttataaacatgctacaataacatttctttatatttaacagtttcttatagaaagttgata

SEQ ID NO: 110528 - DNA, 1051 bp, Homo sapiens
aactgcagagatttcttgtagaataaggacactttgattctaaataaggtaataatgatcctgaattgctgggaactctattttcagattaggcatgcagatgagattttgttcttgataatacattcttttgtggaagctaaacttcgttttttatttacttatttttaggaattgattatcttgaatctttggctgaaattcagagttcttggagtggcccaaagccagatgatctggccctgctccctctctggcctcacctcctctccccctccttttgctcactctactccagctattctggcctctttcattttctcacatgcatcaggcacatttcccgcttagaacctttgcatccctctacctggaacacttttctcctagattccatatggcttgatctctcagttcctcaggtctctggttaaatgttgcctccgtgaggccttccttgaatgccctgcgtaaagtggcctcctttttctgtcccttcccctagcagatcatatatccatttatttgttgtttgtctactcgaatatatgttttctgaaaatgaagaactttgtgttgttagcactgaatctgtagcttctagaacagtgtggggatgcaggtgcttaataaatacttcttgaattaatgaataactgttaatctactgtctctctcagttttggggctaggtgatctctgtccaaggctcattgcagttctaaagctctgtgatactcacatgattcttgaatattacatgatgcacatttatacttagtccggtattaagagtaaacattcagtaaatagtagcttttattactaagattccgttcctccctcaacacatttacattctagtggaaaagcagacacaggtagcacaacaactcaggtatgagtaacaactgtaacttttttagcattgattccccaggtcctccttgatttccttttcagaggcagtgttgactttctgtgccagtgttgggacccaaaggttgagctgggaccacctggattataaattttacctaagggttgagta

SEQ ID NO: 110529 - DNA, 1036 bp, Homo sapiens
cagggaccccgggccccaaaccagaccccgtcccgtaagcattgtgtgaagggggtggctctaagggggacagaagagttggcctcagagaccctacagctttttgggggaaggaacagccttattttgaggaagggggacgcatattggggaacagatttctcctgcggcgacagggattgggggacaagaaaggagatcctcagaaatctctatctggaaagtgcatgggcggctttgtgaggtcatgagttcgccgtcactacagacttgcactcaggggaaacctcctgacagtccttcgcttcctgttgcagcactgaccacaccatatttgcctgttctatttacttgtctgcctcccacccctagttgagattaaaaactgtattcagccgaactctttcttccctttgtctctgcaataagtaggactcagttcctcttgagacgggtttagggtaatctttcgcaaacacagtgttacagtcacctcaactactttctgttccctgatcagagcaggtgtcccttcatctccctgggaacaggaaccttttccttaagggcagggacagtgttgttttcatctcagaatgcatgactcatagcattgcttagtaaatgtttgttgaatgagtgaatgaacaaatggctgtctttcccattaaacagaaaactccataaggggagagctgtttgtcttgttcccttttgtgttcgtgacaccaaggaggtatctaggttttgtggggcctacagcttatatagttctgtctgccctcttcaagaaataaaaatcaccaagaaagattcagagctttggaagattgaagagagggaccctaaagcttaagcctcattaatttcacagtaaatccttctctgcttggcatacacttggcactgtatagacactcagatatttttgaatgaatgtagtcatgcatgcattaatgacagttagcagaggatacttaaacattagaaaggggattggaccagatgaatacactcgccctattgatgaccgtct

SEQ ID NO: 110530 - DNA, 1263 bp, Homo sapiens
taggtggggaatgaggctgcaaggaaagccatggccaggatgaaaacattgcaccaggatgcagagctcacagcctcagcaaggatgcagaggaggccaggagggcatctgggagcccgagagcctgctgaaccatcatgactgtgtagatagcatttgtcctgagaaaaggggtaatgttttccttatcagagatactttttatcagagtatctgaccccaaaatccaagaagcgctgctgagggtgaatagagtctgaccagggtgagggggagggtggggaagagggaacatctgcgggtgtgggcaggaggccacagtgtcgaagagccttcctagtggccttggggcccagtatagtcaggaagtgggttgtggaccgcagtcagagggctggctgcatgttagggggtcagaggtctggttgttggcgtggtcagagggctgggtgtgggctggtcagaggaacaagagggagccagaaggaggccacctctgccaaacggaatgtccagtgacaggatgacagttacatgctctatgctacgctcctccatggaatattaggagccaatcatattactattattaataatattaaaaataaaaccaggtttcacagcctggttttcccagtgtgctgcctgcctgcgtgcacggacatgcaggtggcaagtattcaaggtgactctggagtaggaacgtgtgtggctgcggggaggccacttctgcctgcctaccacccctgtggaccttgtttttggtgcttccccttcagccagcttagtttgggaggccagtggggagagatggacaggccaagctgggacgaggcaagagggcttcaggtcaatgtcaccatgggcatgagcatggcctttctttgcccagcctcatggccaggcagcctggatgactctggagtcccaggccactaacccaatctctgagggcagggcatgcactattcttgtgtccccagcagctagcatccggccattacatcagttatgagtcttgggtttcaagcaatgggaactgaataattaatccaagcaagaatggggtgtattgagggccatgtcaaaatccaggaaagagccagtgttcaggcctcaggaagggcagggccagggaagcactctgggcatcctctcgggtgctgccttcagaagaccgcccttctctgctccaggagttagactcctgggagagagcctgcctggcccagtgtggaagaggctccatctccaccaccacct

SEQ ID NO: 110531 - DNA, 1019 bp, Homo sapiens
tgggatccttccagttctttcttctgactgcagagtggtatcctgtggcatgggtatagcacagtgtcttcaattgtccactggtttagggacacttctgttgtttccagagcctgcactgctcgcctggtgcctaatggcctcacagaatgtgaggaggaggagaaagtacattcattttgaatcaccctgctgcagggcttttgctgtggggatttgggtactgccccagtgacttgagagcagttggacgggatggatggaggctttagaagcgtcctggggagccaaggttgctgaccaaataggttttttttgacagctctgaaagttcgggaacatgttttccagactaagctactgaaatatttatcactccaggacagaatgtcctcagaatgtgataaattaaaaatgatggttcaagttgagaggcggcgagggtctgaactccctctgttgtttcctgtaggagctgagactggcatcgtacctggcgaggatggccatggtgcccggggccacgcttcgccggctcctgagtgtggtactgcccacagcctcacagcctcagctgctggccctgctggattcggccaccgagagacatgtggaccacgcagctgagagcgatggcggagcggagcaggccgacgtgggcaggcggaggtgagtgccgtggaggggctgcctcccggggcacgtccctgtccacaagggtccccatgagtcctcaaggtcatgggaggcccatgtattttgtccatactttttaattttgttaccaatttattttttaaatagaatcttaagaaaataagttcacccagagccataaatatttcatgcatgcccattaaagaaaacgtaaaaaaaaaaatgcataaaaagaggaagaagagaaagaaatatccatggttttatgacctagaaaaatgactgctagcatcctgttacatttcttcctccagaatgtgtttctctgctgggttttacaagtgtgtgtctgcaagtgtggg

SEQ ID NO: 110532 - DNA, 1099 bp, Homo sapiens
ctatcactccatgtatttatcatttctgtgtgttgggaacatttaagtcctcccttcttgttattttgaaatagaaaatactttgttattaactatagtcaccctaatctgctgttgaacactatgtcttatttcttctatctaactgtatgtttgtcctcattaaccagcctcttttgtctcccccacaaccttccccacctgtggtaactatccttccaccctctacctccatgagatccgttctttttgctcacgtatatgagtatgaacatgtgatgtttgtctttctgtggctgccttatttcacttaacactgacgtaactttaattgaaagcaaatccacgtgtgagtggaaacaggcaattcaaacccgtgttattcaagagtcaactgcttatctacttatctatttctgctttttgctttatctgaaacttgaagatttttgatatcaatatatgagagttcccttgttacttttcacagcggcatagcatttcactgtatatgtgagccttaagtgatttcatccgccctcaactactggatatttaggttgttttcaaccccttgatattttaaacaatcctagaccctctgcatgtatcctacacccctctgtagtgaagcaggcagagcaactattactatctccatttcacagatgagaatactgagtctcagaaagagtgagaggcttatccaaggtcacaaagctggtacatggtagaacagagcctaaagcacaggcctctccatgtccatccctgcattcggctagcagatccatttgatggatgcagaaatgaaaggacatttcagttcctctttggtgtgattcttgtgctgtttttgaacagcgtatacacaaatttctcacaaatagtctttaggaacacttaattataaatgaaaatgacataaccatatttcctcttcacccgttatttctggtcttattataatgatcttgctctctgtctgcatggcacatctaccatgtatctcttcacccatccactattcattcactgtttccagatttcatgatgtgtcgtgcatgcaccattcactagaaatgccttcattcagaag

SEQ ID NO: 110533 - DNA, 1019 bp, Homo sapiens
tctccgctgtcatggaagcattgcaagaacagaacagggacctcattcatagcgtccccttctcagagaggctgacaggtctgaggtcccgtggctagttaggaggtggacacgccttgggtctgctctctgactgcagagctgaggttctgcccagcaggctccctctgctccctttggtgggaggagcccaccagattgtgtgaagatcaaaggctctgaaactgagctccttccagaagaacatacctctctcctcccctctctggcctaaggcagagttttgcagttctgggagctgcagaaacttctcttgacctgcaaagccctcgggggagctgcatggacttgctggtgattgccttcttacccacgtcttccccaacccctctccagcaacagtccaaggtgagaaagtcacggtccaagagtaaaagcaagggagagcttctgaagaagtgcatcgaagacaaaattcacctctgtgaggaacaggcctctgaagacctggtggaaaaggtcagtacatctgcttcacccagctgtttctctctgcacatggcggggctgctctgatagctgacacatttgcaggcacacagagcccttggggctgtgccatccatctccacccaaccgctcactcactcaggtgctaaggtaagaaagagttggaagaccctccccctgggcctttcccctgtgcattctgtttggaaccctctccctccacttctcagtctggggatctcaccggatccttcaggcttcacctcgggtgctgcctccactggctgagtcacttgctgtatttgtgcctggctctatcctggggcgtgtgcacctgccatttcacctccatcacattctttttctctctcacactctcctccatgttcccacaaactcaccaggctctcccttcagccccatttttttttgtttgtttggttttggtttttttgaaatggagtcttactctgtcacccaggctggagtgcagtggtgtgatctcggct

SEQ ID NO: 110534 - DNA, 1029 bp, Homo sapiens
ctgccataataaatcaccacaaatttagtggcttaaaacaacagaatttttttctgttatataatagttctggaggccagacgtccaaaatctagttgtcagtaggatccttccatgtttggttcagcttctggtggctccgggtgttcctggggttgtaactgcgtcacttaaatctttgctctgtcttcctgtggccttttccctggtaaccctctcatctcctgtctcttataaggacatttgtcattgaatttaggtcccacctaaataatccaggatgatctcataagatcttaaattaatttcatgtggaaagacccttattctaaataaggtcctgaggttaggatctaggcatatcttttttggggggtgggagtgtcaccattcagtccactgcagcctccctcaccgacactgccctgtaatgcccagtctatgactgtgctgctcaacatcccacatccttgagccgagcccttaggaagaatgtattgaatgcactgttcggtgattcagctcctaaatgatcccattatctctcttttgattctttcctaaatctgttacaatttttttttttttgttttttgagatagagtctcactctgtcacccagatcgcagtgcagtggtgcagtcttggctcactgcaacctccacctcctgggctcaagtgattctcttgcctcagcctcccgagtagctgggattacaggcgcttgccaccacgcccggctaattttgatatttttagtagagacagggttttgccatgttggccacactgatctcgaactcctgacctcaggtgatccgcccaccttggcctcccaaagtgctgggattacaggcatgagccaccacgcatggccaatttttttttacctttaaacgtaatacatgctcaataagggaggcttcgacagtaccttaaggcagtggtcagcaaacaaggacccatgagcccaatcttacccagcttgtttttatgtggcctgcaagttgagaatgtttttttacattt

SEQ ID NO: 110535 - DNA, 1036 bp, Homo sapiens
gtggggtggctatcatttacaataatctattgcacatttcagaatagctagaagggaagaattctgatgtttctagcataaagaaaagacaaatatttaaggtgatggctatcccaattaacctgattagatctttgcacattaaatgaatgtattaaattatcacatgggcccagaaaatgtatacatctgttacttgtcaattaaaaaaaaagacgtcagctttaggggacgttcccttcctggccttttccggcttcttgaggctgctgcctacattcactgacttgggaccccttcttctatctccaaagctggtgtcatcactcctatgtcggcttccttcgccacagggcgttctccaactctgacccctcttctgcctgttttcctattttaaaaggccttgttcttgatctcaatcttaaggtcagctgatgagtagccttaattcccctttgccatgaaacctaacgtgtttgcagttctggggattaggctgtgaatgtctttgcgggggcactgtcctccctgccacataaggcttcgtttaagatgtgaaatccattctgtctgtctcagagtagagaagggattttgttttctgagcttgtacaacattgattgtttagttcatttgacatttagccatacacacactgctttgaggcagctcttgtgtttctttcttgctttgtaacctgcaaagcgctcgttgcatagacacatgttcaataagcactttttgagaaaatgaaagaagcaaatgaatgagctgttgtttaaaactaggctaagttgtgtcttaaggggacggaagctattttaatctaagatggtaaaattcgagcatcaaaaagaataaagaccgcagttgatcaaaacctaccaaatatataaaaatcttccatttcatagtgacactatgcagaggcaggggtcttcctaggttcagctacacatttggactcacaggactcttacagggcacacgtggcctcatctacccagaaggcttgaggggctgcagcaccgc

SEQ ID NO: 110536 - DNA, 1038 bp, Homo sapiens
ttgtcggtcaccatgcggttagacaggtggataccatgacacactttatttttctgtttcctgtatcttctcagcagaggaatattagagagcattaggaatagacccacagcgggttggggcttggagaatcaagtgcgtttgagtgagagaagaacacgtgcagtgcagtcagagcccaggattccatctacctctgtgaaggaggcagacgctgggagagtggaggtgacctgccttggtcacaggcttggagtcagtgcccaaccccaagcgtttctccacaagggcatgctgccatgactttctctggatgttagcgaagctggtgtttggatttcacacggcctccagtagagagggagggatcctatccccaaagccccttcctcctgatggtgagaccttcacaagctctgacctgtgcagcagttagggctgattgtagctccaggcttggagggttggaaatcgcaccaaatgttatcccacgtgtcagaccccaaactgttgctgaaagtgttttcttttttccttttctagaacagaacacagctgaaagtgcttttttccataacagcagaagaaaacgtaacggtaagagacatgacatgccctgagcaccctcaggacacacctgtgctgtgtgggtcctgcctgtccttggagccatggggagcggccagctgctggccttggtcccccagttatgcgttgagactgggactctgtgcagtctctcgggtcccccgtgtgccctgaggctatctgactggtttccctggatgaccctccacctggacaaggcaggtaggccgtgggctggacaggctgaggctccacagcccgtctgtgctactgtccagtcacgctcctacctatccccagtgtttgccactaggtcaagctgctggtgacattgtgttttcccagatcttcccaaagcctgcagtctgtggggcgggtctctctgcttctgctcttcaccataatacttctccatttctgttcttcagtttaatcatttgcagctcacat

SEQ ID NO: 110537 - DNA, 1042 bp, Homo sapiens
tttgcacaagctcttccttctgggaagccagtgtcagaaatcctggtgcacattggcctctgtcagccacagtggtgttgagggtggtccctgccagaagggagggacggtgcctactgggaagggcctgaagccatctaggaccatggtgggtgtagagtacctcaccctcaagggcaacccctgcctttgcaggaatctgggaatgagcacctgtattcaggtgcccttggcatcttgagcacgtcccctgggccctggccctgcccacgcccatcccagctgttgatgggaccagccttcttccgtctctctgggcctgtcttgcatagcccttctgcacactgtacaggaaagagctctggccatgtgtgtccctgccttggccactccctcttgtggggcctgggacaagtcacagccctcagggtctctgcttcctcttctgagcaatggtgtaagggctgttcccagagcacagttcccgaaggcacaggttagttcttcctattgtaattatatgatgccttcatgtaattacttgataccatctatccatccattcattcaatattatctatgtatgtatgtatgtatgtatgtatgtatctatctatctatctatgtatctatctatctatgtatctatctatctatctatgtatctatctatgtatctatctatgtatctatctatgtgtctatctatctatgtatctatctatctatctatgtatctatctatctatgtatctatctatatttattgcacctttgctaagtcccatgctgtgtgcagggggctgggagaccaatgcctaattgcacacagtgattgctgtgaggaggaggatggggagccgtgagagagggtggaggaaggaggtcatttagtctggaaggtcagtcaagacttgaaggatgggcaggtttagccagggaaggagtcaggagagaacatcccaagtggaggaatcgtcatgggtgtggcccgcatgtaggaggagcttggcatattccaagtctctggccccctgatgct

SEQ ID NO: 110538 - DNA, 1030 bp, Homo sapiens
tctactaaaaatacaaaaaattagccaggcctggtggtgcttgcctataatcccagatacttgggagactgaggcaggaaaatcacttgaacctgggagatggaggttgcagtgggccgagattgtgctccagcctaggcaacagagtgagtctccatctcaaaaaaaaaaaaaaaaaaaaagatgcggggaaggcctcttagccgactttccctaacatcgcatttcattggctctagacatccctgacctaagaagataggattcccatgactagtttaaaccagccatgcactctctgcctgcttcctgaccaatccaggttggtgagtaggtggaagatctgaaccagggcatggggaggcagggactggatgggccgtgggtggctcccacgtgtgacttctctgctgtccctgtccttcctttcttccctcagaggacactgatggaggcggcagtggagagcgtctacgtgaccagcgctggtgtcagccgcctggtgcaggcgtattaccagcaaatcggaaggatcatggaggaccacgaggagagaaaactgcagcacctgaagaccctgcagggtacgggaccccccctcagggaagccccagaagagactggcaatgtgtgcttttagtttggggcagaataggatgtcagatactgtgaattttatttttgggaatataattatttcagtgttttaatgtatttatcccgtgctttgtctcaaaaagcctttttcaaaaggcacttaaagaaacatatgcataagcacacatccagtgcagtgggagtgttttaagtcggtcactcaggacaaggataggatactgagatggagtcagggccagggcttatctagggcagcagtccccagccttttcagcaccagggactggtttcatggaagactatttttccacagaccagggtgagagggaaatggtttcagacgattcaagtgcattatatctattgtgcatttcatttctattattattacattggaatatacagtgaaata

SEQ ID NO: 110539 - DNA, 1142 bp, Homo sapiens
agggaggcttcccatggctggtcctggactgagccctgaatgaaggtgggtccagtggagtgcatggcagagtacatggcctccaggagcagcgtggaactgatgctaacagatcccatccagcagcgattggcgctctctttcaggtgcccagatagatgacaacaatcccaggcgcaccggccaccgcatcgtggcgccccctggtggccgctccaacatcaccagcctcggttgaacgtggatgcgcggaggagctagcctgaaggattctgggaatcatgtccatcccttttcctgtcagtgtttttgaaacccacagttttagttggtgctgatggagggagggggaagtcgaaggatgctctttcccttttctgtttaggaagaagtggtactagtgtggtgtgtttgcttggaaattccttgccccacagttgtgttcatgctgaatccacctcggagcatggtgttttcattcccccttcctagtgaaccacaggttttagcattgtcttgttctgtcccttccacttctaactccactggctccatgattctctgagtggtggttcctttgcaccctgtagatgttctaggatagttgatgcatgttactaaattacgtatgcaagtctgtgagtgcgtctgaggggacatcgccaaggactgactgagacacgatgccgagacctcaagccctgaggggcagtcccaaaacccttacagtgaagatgtttactcattgcccccacctctggtccacactagaaagaagctcgccccacctccacctgtgagatccgtgaattctcggaatggcaggggaagccttgcactaggttgcagagaagcatcctccacatcctgtgtcagaaaccctggtctccgtggcacttgtaactcaccgtgctgtcttctggtctgtgtgtgttcttcaagccagctctaggcttcaggccgagccaggttcacactcagaaagaggtctccccatccccattcggggctgacgatggggggctgatggctgcccctgcgtggcctgagtcctggtccctctgaggcagttgacggggcagtcagatttttaaagttttgtacaaagttttcctttgtaatcactcccatttttacttaac

SEQ ID NO: 110540 - DNA, 1137 bp, Homo sapiens
gtgatgggttgataatgatgatgatgatagtggcggtcatggtgatgatggtgatggggtgataatgatggtgatgatggtggtggtagtggtgataatggtaatgatgatgatgatggtgatggtaatgatggtcatggtgatgggttgataatgatggtgatgattgtggtggtgataatgatggtggctgtcatagtgataatggtgatggtgtgataattatggtgatgatgatgatggtggtgatggtaatgatggtgatgatggtggtagtggtaatgatgtggctaccattggaacacttgagtctgaagcatcatgatgcatatttctctgtcccagttgaccatgttgttcctgaacctgggtccagcctactgacctctttcgagaagtggcacgaagcagctgacaccaaatcctgctgtgattactccctccacgtggacatcacaagctggtacgatggcgttcgggaggagctggaggtgctggtgcaggacaaaggtcagttaaagcctcggaacggggttttggggaatcccttgttctttggtagatccaaagattatgtggagtgaaaaatccccctgtctgcatctgttctgagcctgattatgagctgcactctgccacgtgacagtgaggaaacaggccagtccctttacagagtccatccttttctccttgaaaacctctgggggtgtccttgttctcagaagcagatccagtctctgcagcctgctgtgcccaggcccttgctgatctaacttcacttttcttttccatcacccggatcactagcctggctgccatccctgaaactggctatgctgtgaggcccttgctcatgtggatcccctgccaggaatgaatgccctttctcctctgcctgcccagtgctactcaccttcaagacccaactcaaccattaccttctcccattgcttcattccttgaatagccaatgccggttacttaggcctcctttggggcactttttccattgttcctggattatgggacatggtttgtctgtctggctcttctgccaaaccctgagctctgtgagggaggggaccacgtctatatgtccctgcttcccaccttggctcccctctgtttgggttcaca

SEQ ID NO: 110541 - DNA, 1047 bp, Homo sapiens
ttcagtaactttggcttgttgctcatgtccatctgctccgcttgaccatggatacttggaagactgggaaattgtctgattctcctcaggagcccttcaggaacactggggattcacagtggggatgccacactgtgtgagtgagtgaatgggagcaagattgtggacttccttgctgagtgaggtttcagccacagctgcatttagtcttccttaacaaggcactgtctgtggatttaacatgaaggtagttactatgcagaatgagatgaaggtggcatgaggagttttggagctcaaagcgaaaagaaggtgtgggggcccctgaagtggtgctttgacaatggggagagggcagatctggtttagtaatgggcttcgctgcatttcacatggaatgggaagcttttgcaaaaggtactttttacacacaagtgggatcgtcacattgcacatcttgtgctctgcccagggccttgagtaaataatgacctggtgttggaacttggagtcaattccatgggaagactcattggatctgatgcagaattacatacagcaaaaaggtggctatttgaggaaattttgaacctgcccccaaattatgttgccatgtatttttaaatcataccatatccatagacccttagggcttaaggtctaataaaatctcagcaaatgtttgatttctataacctcaacgttgaatcgaacttttaaattatgtaaaattttatgttgtacaattaaggaggaaggaaaaagtgtctgtctactgcttctcccctgcccccaccattctcccctcagtgcagaaattcccagtatgttctctgcatacctccaatgacagggagatcaccactttacatggcaacctgctttactcttgtacagctctgttgttggaaggctcttctttatgtagagtgggattctgccttgtgccttacttttgttctcaagagtctccccaagtttcttcttccacactgctattcctagaggcactggaagatgtttctccattacttaggaccttctctt

SEQ ID NO: 110542 - DNA, 1126 bp, Homo sapiens
atttagacatgaaggccggtgcaactagctatgacccttgtcccttcctgtcgaggctgtgaggcttgaatcccttgagactaggagcaggagatgtagaagatcagaatgaactaaaccttatcaagacacagcatttccctctgggctatcgtttctggttacacgacatttcagtagtgttgagggcaactaacgaatggagacattctccattcgtgttttggtccaggcttggtgcttttgaaaacaccctgcaggctgggccatccccgtcatgcatccctgttcttccctagtgttttccaaaaaaactccaaggaatgtgattttagatggaacttagggtcccgcaaagcgtagcgcaataaagttggaaaactctgaaggacttcttggggtcttagcgtgctaaagggtgagttgaggctccgagaggaatgtaagcaagtggtgtgccaagttcagtgaatcactggaccttttttcaagggacatcttgcagaactggcatttcccaaaacacacttcggaacaccttggggtccacccttcctttgtctaagcaccaactcaggaaggcctgaggggcccctaagaatgctgaatctgcagaagaggcccctgcatgctggttctgccaccatacagaagctaccttcacacttggagtgtttgaaagcctgccatgggcactgtgctcccagtgggatttcagttgcatgggtagacaggagttctgacgcagcccctggattctcatgaacagtcaggaagtgaaatgctctgagagggtgacagggccatgtgtccatgctggggccaggacagcagatgccagatgcaagcctgtgtccctttgtcactgagctgagtgaggcggggcaggcccacaacgggatttccagaatcgagtggtgcgtttctatctggaaactggccacgcaggggtctcctgggagctcggctgctgagtagagaaggggtgagcctgcaggcaccagcaagctctgctccatgtggagcccacctgggggccccgcagctctgccagggaacagattccagccttctagttccccaagggcaactgttggggtgggtagagctgaaggtgatcatgttt

SEQ ID NO: 110543 - DNA, 1075 bp, Homo sapiens
tgctttgcgtgggagcatgcgttccagtccgtctgcgtctgcacgtgcacatgcatgcctttccgttctcttcatgacggaagtcccacatgctcactgtagaaaacccagagacgcaggaggaaatcaaaacccggtggaggaaacagtctgtcacttttgtgtatttccttccagtggtttccctgcgtccattgtttttaaacttagttgaaatgatacttgacatccagttttccatcaggctttagaaacatcctccataccatttaacatggttcataaacgtgtttaaatggctgtgcatctctccatcacacagttatactgttagttacttcagcccctcttagctgttatatatttctttctaccatcatgcagtggtaaactgcacattttttacacataaatttctatctacgtcttaaaatatgcccataagatatattttagaagcagaatgactgggccaaatagtaagaatgtcttgaaggactacggcattgtcaaaacagtgtccagaaaagcggcaccagataccctcctacctgcagccttacacgttgttgatttatgcttgacatggcatgttaccgctgaaaagaactttgcccatttgatggtgaaaaccgtatcacgtcattgttttaatttttatttcagtgctagtgatactgagttttttatgtgtattatctattttcttctccttccttgtgaattgtaattgcatttattttgagggttttccattggatttgttcacccatccatccattcattcatttgacaaatatgtattcattgtcattgtctttcttactgacttctctgagtgctttacatattaaaaatactaactttttgacctgtttgttacaaaacacattcctgatttgtttgccttttacactggtttatggtgtgttagaaatatacaactgtttgtggctaaagaccttttcctttcaaagcatatgggttcaactttaaaatgctatttttgcagtgatgaggtcttaatgatcttagttgggattctttccagaattgctggaagggcatttaaaat

SEQ ID NO: 110544 - DNA, 1003 bp, Homo sapiens
cagccgcatcagcaaaaaggacctgcagcacctacctcattcgtttgcttgctgcaaaccctgccctctcctgccccttgcctccgtggccagtcgtctgtttccctccagccactcagtcaggtggcctgtgaccaggggaccccagtgctcccacccatcctgttaatccgcaggtatctttgctctagatttacagactggaaatggaagagaaccagctgaagaatgaaatgcaagacgccaaggatcagaacgagctgttagaattcagagtgctagaactcgaagtaagagactctatctgttgtaaactctcaaacggagcagacattctctttgaacccaaactgaaattcatgtaaagctctcagatgttttcaagcatgtgtaaaggggacatgttatagtttctttctttctttctttctttttttttttaaatctgtatgttcagaataatttcactgccttaatgtgttctggagagcgtgctcacccaagtctatggacatgtaccagagctaatatatttattgcctatggcttgttttgcacttaataaaataatttgtttttgcaatattttgccttttttatttgtgtttcatttccataactacttctttcctgcatgcgtagtcaccgggtacgcattctgcacacccagacggaagcactgttgcaattaataacacacctttttaagtgatcttgcatgcagtaaatctcaccttttgaaatagcagagtctgacctgagccagcaattgactctagaatgtgtttaatgccagtttgggcccattttctatttgccaaggtaaacacaaggtaagtaaagacagggtagaaggatgtatttgcataggcgtttaagaaaactagttacgttgttcaaactcttttatccagtaaatacagacccaggcattgcagcaatattggactaaagaaattactatttgcaactcaaactgcacctcaaaactactggagggaga

SEQ ID NO: 110545 - DNA, 1071 bp, Homo sapiens
tactctccagctcctgactttctgtcagaaagaccctagcaaacctccctggactccctgcaggagggtgcctccagtccactcccacaccccagcttgcagaagatgcagtcagggcagagccttgcagaagatgcagtcagggcaaagcagagggtgtccacctttgtcttcccggagcgtttgtgtccctgagggccatgactctgccttactgggcctatccaacagtccccttatgggatctcctccagggacaagattggtgctgattatctcatttcccagggagcctgctggttcagcgtgggctcacgttagccccaaaggagaggttggaggagaaggatcctgagtggttcctcggactgtgccctggggactggggtagggggcttgctcaggacctgggcctctggccatgtggcagtaaattgtgttgcaggctattggaacttgcacagaagctgtatcatcacagagttctaagcatatgcataatggctaaaaatcagtacagtttacgcacacaccttggttgaaagaaggacccatcattttggataaggttgggaaattgtagccccaagcagtatgggagtcagaccctagctactagctggatgggattggccaagtcatctaaacgctcagaacctcagtttgattcttaaaatgaacattatatccatgggatctaaggaagcttctggttctttgcttggtgcatagcaggttatcaggaagtcagagtgtctccttcttcctttaccttatagctcaataactttcctttggagggcctgtgaaatgcagattcccaggccatgcctacaccctgcctcccccactaatttataatagtgaggtgggatctcaatgccctttgcagtaatcatcctttaagggagggctggggactgcgctgggaaccatcaaagcacattggaaggagaggccctttcttgggccagtgcttcagtgctgtgtcccctcctccccaaatgactctgggtctgctgttgccaggggttggaggatgcctgaggtctggcgggccatttttgtcag

SEQ ID NO: 110546 - DNA, 1016 bp, Homo sapiens
cagcaaattaaactccagagagtagaaggaaggaaattttaaagagcaagaagcagtgaaataaaatcaataaagaaaatcaacaaattcaagagttaattaaaactgataaattgacaaacatttagcaatattgataaagcaaaacagagacaataaattactaatatcaaaaatgtaaagggggaaataccacagctcctacagtcaataaaaccacagcaaacagcatataccaataaacttgaaacctcgataaaatgaacatattccttgaataagcacaatgtaccaaaactgacatgaaacaaatagaaaatctaagtagtcctaaagctcctaaataaattaaatctgtaatgaataattttcctatgaagaaaggcccaggcctagatggcttcacaagtaaattctttcaagtgtttaagaaagaagtaaaactaattctagccaaagtcttccagaaaatagagaattaggaacacattttaactaacttatgaagccagtgtaactctgattccaaaagcaataacattacaggataagaaaacttttggattaccttttatgaacatagatacaagagtacgagcaagatattaacatatcaaatccagcaatacataggaaggctaataagtcataacccagctgggtttattctgaaaatataaagattggcttcatattctaaaatcactgaatataattcaacataataatatgataaaaaagaaaaacgtggtcagtcatcttaatagatgcagaaaaatctgttggtaaaattcaacttcatgatataaactctccgaaaaccaggaaaagaatggaatttctctaatatgataaatggttctatcaaaaatcttttacaagtaacatacataatgatgaaatattgaacatttcccacccaagttcaaggtcaaaacaagatgttgactattaccacttctagtcaacattgcattggccaggatgtcaaatataaaataaaataaaataaataa

SEQ ID NO: 110547 - DNA, 1034 bp, Homo sapiens
tcttggtcctttcaggctgctataacaaaacaccttagactggatagcttataaacaatagaaatttatttctcacagttctagaggctgggaagtccaagatcaaggtaccggcagattcagtgtctggtgaggccctgcctccccattgacagcagtcttcttgctgtgttttcacatggtggaaggggtgagctagctccctagggtttcttttacaaaggcactaatctcatttatgagggctcgccctcgtgacctaatcacttgccaaacgcctcaccttctaatgctatcatactggtgactagaaacatatgaattctgggggtacataaacattcagatcatagcactgtctataggagacacactttagattcaaggatacaaatagattgaaagtgaaaggatgagaaaaaatatatcaggtaaatagcaaccataagaaagctaaggggctgtactgatattagacaaaatgagtttaaaacaaaaaaagttactagagataaaaagtaacattttataatgacaagaagttcaatacatcagaaatatataacaattataaacatatttgcacctaacaacagagcaccaaaatatatgaagcaaaaactgacagaagtgggctgggcatggtggctcatgcctgaaatcctagcattttgagaggctgaggtgggcagattgcttgagcccaggagtttgagaccagcctggataacatgatgaaactctgtctctacaaaaaaaatacaaaattagccaggcatggtgttgtgtgtctgtagtcccagctacttaggaggctgaggtgagaggatcacctgagcctggggaggttgaggctgcagtgagccgtgattgcaccactgcactccagcttgggtgacagagtgagagactgtctcaaacaaacaaacaaaaaacctgacagaagtgaagggagaaatagataattcaacaacaatagttgaatatgtcaacacccactttcaataacagatagaacaactctacaggaggtc

SEQ ID NO: 110548 - DNA, 1085 bp, Homo sapiens
ggtggattgggctgtgggacaagtggcagagggaacaatttctaatgcttaagccagcagcaattgccactgcaggctatggctatctgtttaactcctcgagggtgggaccttgtgtctcttcaggctctgagccagactgccagggttcccattcaggccctgcctcacttagctgtgactgggcaagtgcctccctgctgggctttctaactaaatgggggcttcccttggggagtctgaggatgactgcagtgtgtcccagttctgctgggtcactcctctccccatagtggcgacgggatcaacctgcagggcttctgaagttggacttgcctgtagtttatcccttgtcattgtgtgatcttgggtaagaagattaacctctctgagcctccatttcctgtataaaagggggcagtggcatctctttggctaggttggtgtggggatcagaggtgtggtctctgagcaaaggtagccgatttatgaggggtgatgatggtgaagaagctatgagaatatttattcatttagccttgtcacagagcaaactcccacgcccacatttggggtccttctttagctaacgatgaaactaatgatcagagcagtggccaccattgtggtgggctgagaggtatgagggaccaggctaggtcagtggaactgtgttgaggaccagctcccaccctactgacagtgtgacgttgggcaagtcgcttagcccctgtactcacttcttttgtctggataaggggaatgagggccacgtaaggaaatatcagcacttaacctcccgcttctgcctcgggttatctcatctttgctgcacgggcaccacacagggtgaggtctacgtgaacaccgcagagggagccaagtctcaggacactgggggactcagaagtggggctccctgactccgggcctcagatgttgccccacggagcacactgacccttgtaacggaaaatgaccttccaacagggatggcatgagaataaatcagaaagccttcttggtgcttttgttttttttttttttttgacagagtttctttcttgttgcccaggctggagtgc

SEQ ID NO: 110549 - DNA, 1041 bp, Homo sapiens
agcccagatagaggccgcttacgaggctggcgcttcttttcgccttagaagcatcccgctcccacacaccccagctcgccggtctcctgaaggctgggccagcctcggctctccgccagcctctgcccggctctctgagctccagcgatactgtatctaaccgccagccctcctccgccgcccgccccatctgcgcacactcgcaggcacactgtccttggcctttgccagtgctgtgctctctccgcgaacgccctaacttcagctggccagctccttgtagtcagggagatccccttgcccctcctgagctttcctggaacgtggcgctgtcccaggatgctgttaccatctgatggcctctgccttccagagcagaggaggaggtggggaggagggcaggggcagcctcagcccctctcccagggctccacccacagtgaatgttgggcatagcagggccatcccccctaagtcagagtaacccgctggtgtggagggcgaggccatgggaggagctggcccttcctgtagcaccctgggctggtgggtggtggctccactagctgggatgggcaaggaggagggacacattcggggatagagtgggggaattagaatcctttcctagcagggcatttccaccctcctggagacctgcagctctgcagagactgatgttgtagcgcacagtggaggcttgtggcttgttgcaagatttttgttgctgttgaggtgtgtaccggtctgtaatgctgaacatctctgctctggagtctggggtaattcttatctgtagtctttttgcagtaagcagctcccaaaggctcacagtgtggacccaatgcatgagatgactggcattttcctccttcacaaaccacccatgactcccaccgcccccacgacctcaccagttcctcacatcctggcttccccagcccatctctcccctctccctgccacaatgtctcagccacgcctgctgcctctgtgttgcgtagacatgtcttcacacttgggtttttcccccacatgctt

SEQ ID NO: 110550 - DNA, 1230 bp, Homo sapiens
ccatcagctgcctcaactgcatggcccagctctcacccaccaggcggcacgtgaagatcgagcacgactggcgcagcaccgtgcatggcgccgtgaagttcgccttcgacttctttttcttcccattcctgtcggcggcctgaggatggtccgccacgaggagcttccagtgcatgttgccatgaggcctttccccagtgtggccccagcccgacaggcatgcaccagtgccgcctgtgcccacgtgtgcagactgtggctgcagagaccttgcgaccatgtgtagattgcgtggaccccgacaaagggaaggctgctgtgtagctctgtccactctgaataccaagtgtgttgggaattgcatgccatctccaccctgagcctgacctttctgagtgacatgggtgtgccaggctagactaggaggttccggtgtctggaaaagcactttacagatgagattccctctcctcccccaccttcaagcaccctgttccctctttctttcttttgtgttggatttgtttaaaaaccaaataagcatctgtgtaacctccacagtagcatttcttatttgtttggtcactgctacaccttagcagctcttcccctttcctgggggatgtgcacggcagcttgagcctgtcacgtggtcaaggcccggccccatcagaggctgggggaggcggcacattggcagtgtgtcacactgagctgggcaccacaggctgcctcatgaccctcctgtccagcaggtagtgggtgaatgtgtgaaggtcttgcctgaatccatcaggacttgggaaacagagaaccctgtgggggcggctgtgggggaggtccctgccagtgtttagaagagcctgactgtgttcagtgccttggagcagaaagccagggtcctgagtggctgaaataaaagcctctggtggaacctgcagcgctttccttcctttctttaccgaaaagaagtctttcttgtacgtgcgtgagaatcagcagagcctgcactcctgttgaatgaaatgcaagtgcaatttgagttataaaagagcaaggttgatgtttcacagttgatggcttcctgccacagcgagaccctggcttcatctccagctggaggggcccctggggcatctgccgtaactgtggggtggcctgggcatgggctgcctgtgcagagagacctgtgctgaaggtgaccatggagtgtcagcccagccatcttca

SEQ ID NO: 110551 - DNA, 2064 bp, Homo sapiens
ctgggcttgcaccctccttgagccaatgcactgaactgcctttgaaaggaaattgcatgttctgaccattttaggatacctttactttaaggaccacacagtcccagaggacacatccctcgggaactctgcccctctgacaatgagggccacagagaaggtggtgtttccatggtagatgctcctgttctggtgataccaaacctgcccacccctctgagtcgtctttgctcatggacttgcagcagagccacgtagtttggcattttgattcagaaagtggggagcagagacccagccaaatccaaactttttttttggttttgttttgttttgttttttacaagatataacataacccaggaaacagacccagctgaggttattctcagtggattacagtatacttttgtgtgtgtaaaagcacaaagtgcatgtgtactcacttctggccatataacatttacacagggaaatggatcattgatttttttttaatcaacgtgaatgaagaatgtttgtttatatatcactataaaatccagttgacctggacagtattatatgtacatatctattctaattaaatttaacaatcaaaggattggattacttttttcccccttgtaaagaggttcgagaatgtggtcaattgtatagatagcgtgttaaagccaaaacccagctctgagggccttacccattacttggatatttgctacgatccatctccctttgtgagtcaaatgttaagagaagaaacttgtatttgcagctagaggttactgtcacatcatagatttaacatttaccatcttcaaagtacaaatcttacatgtccttcaaaaggaggtcttaatacagttcctagttccttacttctgttttaaactttgggtaccaaaccaaaaagaagaaaaaagaaaggaaaagatcttctttgaagaaaagtatgtctctggatccctggaaaataatgatgtccaaagcaaattgtgaagatcaaatgtgtgttaagaaaaggtgtcgaggggagggacaaaaccagaaacggtggaaggaccagtgtaatagtcacagacttgcatcctggctctgcttacatttcctggtactctcgaatgtacgggcgttcacatagtcattgtgaagttgttggggtttttttggttttgtttttaatttagctcttctctgaggacgaagctgttggtggtggtggtggtgggggtggtggtgtgggatacatggtggtcaagttgtcagccctgatcagtttggactctgtaactcataggtgcattctttttttctttggtgtctcacaaattacccaattgttgaataaaactataaatatgttaataccagctttttccaataaaataacaaatgttacatcaaaaacgaggtccagaatgctgtttgtttttagtgagtccaacctcatggaggtggagcccatcaggaggcaatacagtgggtggggatgcccatgggctttgcactgggaagctgggttcacgtcaagggtttgctccctctagctcctaatgcagctcttaactttccctagctctgaattcatcactgaggaaatggagctaataagacgacctatcttgtaggtttgtggtgggagaggaaggacaagattaacttggatagtgcaaaacacagtgcttggcacatgacactccgtaatgatagttgtcttgttttgtctggcagcaggtgtgcatagcccatcatgatctccacacacactcacactctccatgagaatatgatacagatgaggaaactgattcagagaggttaaagaattagctcgcaatcacacaggtagcacataactcctcatccagtgctcccccacagacgtgcctgagggtcccagagaatggaagcctgcgggggagagaaaccacagggtacctggattcttcaggaagccagagaggccccgccccacctgccacaatggctgagctaaacaggagagtgtgtgggtaagtgtcccacgcacgcctgggtttccctgcaccctgcctggagccaggc

SEQ ID NO: 110552 - DNA, 1433 bp, Homo sapiens
atgtggccatgtctgggcacaaaggctgctgggaaatgtagtccacatgtagacagctgtttcccagtgacagcactgcattgcaggaggaggtgaggaggcctggcagacaattggctggctctgccacagtatctttttgtttcattttagagttgaggaaattggggtataggagggttcagccacttattcacagacccacagcaggtaagcatccatgcctctcttgcagggctggtgggcggcgggcatttgccatctgtcactgcctatttcagaccacggaggatcaggatggacgcccacccctgtgttccagcctccggttgggatcacatgctcacggcatgctatgtcctgatgccaccacctggccttcacctcttccctgcctcctcatcctctgcaggtgccagtgctgaagcccatggatctgatggtggaggtgagccctcggaggatctttgccaatggccacacctaccacatcaactccatctccgtcaacagtgactgcgagacctacatgtcggcggatgacctgcgcatcaacctctggcacctggccatcaccgacaggagcttcagtatccttcactgtggcctggccagtgcctcccacgggcagagtagcttccgttgggtggtgggtttggtttgattggcagacagctggtttggggatggctgcattgtttaacttcttcagtgaggcacctctggctcctagtatgcgtgtgaggcccagatacaaaatcatgtcacgtctgtttctgaaaaccgcaaagtcgtggttgctgagcattgcacccatcgcctcctccagcatggccatgatcccctcatcctagggcctcacaaggggccaggaaggagacagagttcagggttcagctgctctggacgagggactgctggccttgctcagcgtccactgaaggcgcctcggggccctccccactgggacccaaggcaggctgtgttagcataggaggaccagcactggggccccggccagggcttcgggtgacaaccagggtgtcagaagcccagctgggttggggtcctgagggccccctgctcggtgttctcctgtgtcagggcaagctaggggaagcagcagcattgacgattcccgccgactgctgggaagagagctggtgatgacatgagcaccagcctgcaggcagggcgaggcttggcctgccggggggctggtgggcgggcaggcaggttgctgtgatgtcactattctgcatacaaccaatgataataataattataataacacacagtgagactctgtgtgccaggctctgtgactaacatcaacaagcattcattttaactcatttcaccttcacaacaaccctatgaggtaggtactattctaagtctcctttacagatgaggaaactgagtcacagagc

SEQ ID NO: 110553 - DNA, 1941 bp, Homo sapiens
ccatgctctgtcctagaccctggatgaatggtcaggatgtggcacaggcagctgctgccccagcttgtgccttcagtgaaaccttcctctgcctgggtgacctgcgttgtcctggccagactggggagcgggaggactccactcttgcccagctgtcacagccctcagactgagctaggtggtttttgctcaggcctgggcccttgtcctcacccctgtcctcacccccacccccgggggcttgttgtccagcagaactctgggtaagacagcagtggcctggacaacctgcccaggaccacgtttctggaacactgaaagagcctcgggacaaaagcccatttactgagaacacttgctaagtattctggagttgcttctggtttactctgcactgctcacctccgagggccagatccacacccctgtgacagatgcggaaactcagagaagccacccagctagtgaacagcagacctggctgcccgacgccaggacagtggccagcaacgtcacacaccacccggcctcagagagggcgtctccccccgcaaacacggactgtgcctggaattagatgcagaagacatccaggaaaccaaggaggagggaggaggggatggagcaggagaggcaggggaggggaggggaggaggagaagagaaggtggagaaggggaggtaggagggaggggaggaagccgggggtgaagagaggacctgcggaatcatctttcccccgattcactcctgagcatggcccacgaactgaggatccttgagtctgactttatcttggtggctcacataaccctcctcacggtgaccctgtgggtgtagtgcagtgcggctactcccctcattttacagaggaggagcccagagtgcagagggttaaaatagttgacaaggggcacatcctagctgccaatcagttcctcaaacacagcactcggccagcacctgtgggcttcaccagatgcacctgtggggtgtcccaccaggcactgcgaagctcagccttctttttgccaagctgcagaaagagatcggattggttgatgcgattttcttcattttgaatttttctcctttagtgttttcttccttctagtcccactgacctttgtcatagcgagtgctcatgggaagtgaagtgaattagaggcaaaaatattggagaacttctaagcttttcaaaagcaagacagggatagaaatatagatacttaaaaaaattaccaggaaatcttgaaattgttctgggttgaatgtctccgtttctccctggttggggtttcgtgttgtcgtatgagttgaactctctcctgggaacgtggtccctggcgcacacagtggactcaccacctgactatgctgggagctccacggtcaagggtctttattagaaggagctctgctgcctaaaccaggccaagcactgctgaggaaagccggggacagattccaatccaggtctgacattgccagacattctgtcccaatgttaaagtctgctcccaaattcatttattcctcaagtcaggcctgagttggacacgtggaatccaggagcaagtcagggcccaagacacgagggtggccagagcctcaagccttggcgtcaggcaggcctcggcagaggggtgctcgccggagagtgacctcacggctctgggaagtcacttcccctctgagtctctgtttgctggtctgtgaaatggggagagtcgtggtgctcaagcagaggaggcctggagggtagaatgcgatggtgcggggaggacttagtggggtgtccagcttgtagcaggcgctggggaacattcgcattagcaagttagccggctcgggtgtgagtgtttcatgggaccgcacgggagcggggcttgtccctggcacactgcaagtcatgggccggttaagctgcagagagtttcat

SEQ ID NO: 110554 - DNA, 1078 bp, Homo sapiens
cagccccctgtccactccccaggctccattctctctacccactgcctctgcatcctccgcccttggagtttctcagggtgccccgcagatcacctgtggcccaagtgctcagggacttgtttaaaattcagattcccaggccccgcccaggcttgcaggcagccagggccaaggaatccaaatactaatcaagcccactgtaattgccctgcatctgaggtctgaaatcactcgcctgctctggattatctgtgctccagggtggcctcagtttacaccatcctacctccccattgaaaccttactgctcacgatggcccaggttcccacccatcctgggagagaaagatgattggctcagttctctgggaggcctggtgattggctgcctctaggagggtgtggctacctcttgatccaatcagtggagggcagcatggggatgtgatcatgcagtgaagaacctgtaccgggggtagttaggcgccagggaaggggaggaggagaaaccagttctactgttagtatcagctcatctaacatttggcccctggtgggggtttttgcatccttttgggggtctaggtctcttctgccattttgttggcactttaatttcttgttaacaaacccaagagcacatacaacttaatttttaaattcccaataatttccagcatcctctaagttagtgctgagcgatagaaatgtaacggaagctgtacgtgtagttttaaaacttctgatagccaggttatgcacgtaaaaagaaacaggtgaaattaattgtaataatttgtatatccaaaatagtataaactgtaatcaatctaaagtaattgagacattttacattctgtttttcatattaaatctttaaaattcggtgtgtgttttatgcttaccatacatcccagctcagactagccacatttcaagggttcattagccacccatggctggtggtccctgtactggatagcgcagcactaaatgatggctttactttgtatccttggggaagtatgtatttttgaatccattttcctcacttttgaatagtttaagaacttcccag

SEQ ID NO: 110555 - DNA, 1051 bp, Homo sapiens
ttagcaagagttttctacgcagtgaagtgaagacgtagggcaggtggagtggagggttggcacctaaaggtcctgaaaaggaatggtgttgcaagaggcagcaaatagcatggggtgggctaagctccagctggttgagtttgggtcagaagtgtggacttggttggtaaggactcctgagagtgtcatgtccaggcacttggacttgatgctgaaaatacagccattcaacagagaagtatgtatgtctgagtgtgatgtggttagatctttagtttaggaagacctctctgttcatggtggggagagtggatgagatgggggtggactggaggcagaagagcagaggagaagagcagactttctaggagacgaagcgggaggggctgctcccagggcctggctgtgagtggtactgaccagagccatccatcagcccagatcatgtctccctaatttagaagaaaatgagaggaaagagccttttcatctctgcctcttctgggatggaaatgagctattttgaatcacgctaaagttagatttctagttttccttttaatccgtgtctcatttagagcattagaaactggaaaagcacccccgtatgaatgtagtgtcataaatcagtgcacgtcacaaactgcagaaggagtcatttctacaagagtgtgcagccttgcatttatgataaatctaatgctttatctttttgggcttcagactagagtaattagtcatttctgctgatactggcaaaccattgcatgtgcagtgttaatggagagcaaatgtatttgaactgcttttgcaattgcttgtgagcattgctgtgtatctcttctacctgtttctagaggggaaacatcctatatatttcattcttgcctattctaggaataggtgtggtaatagtatcaggtaacacttactgggtttcttccacatctctggcactgttcagagattcaataagaaaggatcctttgtccaaatggaagctgccgtgtgtgtgttgaggtccttgggtcaatctgatcatgctctgtct

SEQ ID NO: 110556 - DNA, 1081 bp, Homo sapiens
gcgtggctcctcccctgcagctggaggggccaggaagggctttaagccatggagtgagggaccagagttgggtttagaagggtcactgtggtgtcggtgtggaggggcttgaagggaggagtttggagggaggggctgtagcaatgttgagattccctaatcactttagtgttttcatgcatgagggccctgaggtgcttttttccagagcctgcactgaggttccctgttggcggcttccctcaggctgctggaacccccttttcctgtgcacctgcagagctggaggttactggaaactcatgtcctctgccagagtcagccctcacccagtcactgacaggtgcagtggtataaataccccagctccctccctcctgatcaggacactttgagatgggacctacactgtccccagagctcccatgggactgagctcaagtcgcactccttgagatttttcctgttatcacaccccacttggcctccttcatgtcctggccccacttccctacacccttcctggctttcccagcaacacttcctaatcacttccagaaaaatgttggcctcagggtctgcttctggagaacccagcctagcagagggcagcaaaggtgttgaggcactaggagaaacatggtgagatacagactcaggcggcgtccatcagctatgccaggaggctctgagacgtgccagtcagggagggaggtgctgaggccacagcaaaccgggggccagaagtaagcaccacagacagcaccaaggctgccagggtccatcatcttgggtctcccaattggttgggtccagagaccagcctgctggcgtttacggagccagcatgttacatctctctgtgtccccactgctgaaagcctctggtcagtgccatggtgctgagggagcttgggcctcccttagaggttgctaagagcccccaacacctgccctgtgagttgttggccccaggggactctgagtttccctgtttctggttttcctgctcatgggattgggagtctgacctgagcttgctgagacagataactgatcattcagatacaaaactctaaag

SEQ ID NO: 110557 - DNA, 1057 bp, Homo sapiens
agctgtgatggggggaatgggtgccccccttgggcgacttgtgggacccagaactcatcacgcagagcgtcccactgctgtgcagccactagctgctcggtgctggggctgtggtatgagcatggactctggagtcagaattcctgccttcaaagccccactcctcaccttgctagctgtgtggcctggggtgagttgcgtaacctctccatgcctcagttccttcatctatgaaatggggagactgaaactgtaccccacaccctaggggtgttggaacttaagtgagttaattcatataaaacacggagtgagtgcctggtacgcaggaagtgctcagttcctcttggtgcctgtgattattcccataatcatcactggtgtcaccttgtcgcctctcccagcccttggggccatgctatttgtggtaggaaatggggcctgaaaccatcaaactaaactggactgaatgatcagtccaccgaccaccacagtcacggcttggtggccccacggactgaagcacgtggccaagggcagttttcccttctctgtgtgggttccactgggtccaagtacattgttcctaagcccaggcctctggccactcacccacctcctgctgagagcgggcagagctgatgcccctctctgggcagaatcagcccacggctgggaggggaggccaggcctgctgctgggggtgcagatagtggggagctgcaggccagccactggaaacctggcctgtgtgctgagacagcacattggacacagtctggtggccttcccatagatcaggccacagagtcctcatcctgggtccacccaaggcactggccatttccagatcaaagagcaggtggattccagggtgagacggtcctctctgctggctgccttcccccacccacggacaccgtttggctttgatggggctgtgtcctaggcttgacccaggtggtcaggagccttccactatgcagtgggatatgctgcaggagtagggcggagaaggaagggaatggccggtggtgaacagctgccatgccccagg

SEQ ID NO: 110558 - DNA, 1065 bp, Homo sapiens
ccatgcctgcttggtgaggattccatcaagcagggagacagtgggccgttggcggggagtctgagcaggtgtaccagtatttccagtcagctgatggctgatggacatgttcttggaggcagggaactcggaggcctgcagacgtgccccaggatgacaagattcatcagttcctacaagccctgcctgggcctcatgcttttcagtgtgtcctgggctttcccgtgtgaaatcttacctgatttttatgccaccttgagaagagtgatattcatctccgttgtacagatgaggaaactgaggctcagggaggcaacgtgatctttgcaaggatccgtctgttccccccgtggcctggctgcccctcctggcagtgcaggtggagttaaaaccatacaggagttaaaatgagcctcgatgggggtgggaagctacgactggaaaacgtccgatgctctcccaagtcaaattgtgcttggtgtctgtgggtgtgtcggtgtgggggagggaagctcagcccttttgaaaagtggggggtggtttgacgacgctgcaggggcagctccgagttctagagtctcagaacgtggttctaggcggttcatgtggatcaagtgctgttctgagcactttaatatccagcgtgaccataaggataagtgccactgttactggctttttcacagatgaggaaactgaggcacagagggattaggtaaagtgactggagtcactcagccaggatgtgaatcacagcccacacccatgtgcaccaggaagccttggctttcagggtccttggagggtgtgccgggcagtcgcctaagctgggaaaccttgggcttgtctccaggccatgtggccatgtgagataggagtcctcctgtgttatgttctgcgacactgtgggcagagggctgaggaccccagccctcccttagaacatcatgttggtgtgagacatttagagccaggcctccctgcttagaaagcacctcttgggtcacttgcattagtgaagttatacatttgaaactccatttatttatttatttatttagagac

SEQ ID NO: 110559 - DNA, 1790 bp, Homo sapiens
catatcgtcagactctgcgagctaagttgtgtgtatgttaaggtgctctttttgagaagatcttaattttatttctctattttatttcattacagaaacgtttgaacgtgtagacagtagaataaaggggggggggggaaataacatccttcatttcactactccagaaacactgctcacattttgttgcatttccttctaactaccccctgcagattgtactatgttttgtgtcttttaaaatattaaatgcactgtcaacattttcccagatcatcctgcactctgagttaacaatttttattggctgcataatacttcacgatgtaggtattattattcattcaataactatttatggattcattgatccgattagtgttgattgtctataacaggtgtgtgggtggggtagggggattcaggaagaaggaatagggcgcagctccccccccccaggatttctggaatgagggagacataacagatggctgtgatccggtgtgaggggcagggatgcagtgggcccgttgcagcctgggagcaggtggtcagagatgcaaggctgtgggcagcagtggttggtggtccacagcagtaggcagcagggggagggggcgacattcatggcaggagggacattatgggcacagcacggcgtggtgtgttcagggttggtggagcgttcacttacagtcttgcagatcctggcaggtgtggtggtgatctgtccaggcaggggagggagagggaactgagagtcatcaaaagtctctgggagtttggaaaggagagtagggggctcagagggagtgtgagcacttccagcagaggtgagaaagcccccagtcagttgcccagggtgggcagtggaagggaagtggaggtgaacgttgtggggtggagagggttttcaggcaggctgggagctgcccagtgtgctggaggaaggctgggtctccttgaatggtgtttggtcaatgcaagaccacaggagtgtgactagaaggctgggggtgcagatggtggcaggtggaggacagagagagcttctcccactgctgaacaacgactgccccaactttatgggatgagcattcttatgaatgcccattgtcctgtattccagattattcttgtgtctgtccaggtagggatgcaatttcttgatgtagggctataggtgtttttaagggcttgcataaagatttgaatatgatgttgtctagtagagtaaaaatcaaattgggcaaaacatttttgtttgggtgatttttggaagagtaagtccacgaatgcaacgcagctctggagtcatctgtagattacagcaagcccatcagtctctatgtctcttgcttacaacaaaggattgatttcagctccagcactaggtgacttgtgctgtgttcattatcccttgataggtgtctgacaggagatggggcttgggctgtgccagggaggagccgtgtggtgcaccacctatctctgcaggcataactattttgtcttcatggcaaaataatagcgatgatggtgatgaggagggaagctaccatttcttgactgctcctgtgtaatgacatgttggtgatcacattagggctttatgtccactctgggaggtggtgagaatgacatcgcgtttgcacatcaggacgctgagcctcagagaggttgagtcccaggacgaaggccacacagtgagtgccacaggtaccattaccacctaacaaatgactctggagctcagtgatgtgatgagaaccattttattctgtctcctg

SEQ ID NO: 110560 - DNA, 1093 bp, Homo sapiens
cttctcatctgtcagctcccatgtcctctccattctccggggaagagggtatggggaaggtgcactccctccttaaacactttggcccagacatggcacttgtgacttccctcacattccattggccagagctagtcacatggccccacctaatgcaaggggctctaggaaatgtagtccctggctgggcagcccagtggctactctgcagtgggaagaacctgcatcttggtggatgtcttgccatctttgccacatgaccccacaaaacaaacctttacattctcagtccaaaaaaccctactaagaatcctgtgctggagacaccctcactcaacccctgaccctcccctctccctgcttcagtgtccacacgtgcacggtgctgtgagatgcagagtccagagtcatgcggtggctaggaggtcagggacgccttcctgggagaggcgatgtctgagctgagtctgcaaagccaaataggtgatgcccaggtggatcaggtaggagagggattccgggcttcggctgcagcaggggtaaaggctggtgtcttgggagagggcatcctgtgtagagaggggtctgtgggccactgagatttagaggatgtgtgtggggtggggtggagtgggagaggagctggagcgggatgggaagtgggaggcaggactgtttgtgaaaggcttcaaatgccgagataaggagtttggattgtatcctattgacattgtggaaccagatggagatggggcatttccctttgtttgaaagtattttgatttctattggctgtcttactacaaaaaacatatgtagtcatagcaaaaagttcagaaaatttagaaagagaaaaggaggaaaagaaaatcctaccactgaaaatattttggtatatgtgtttttgcctatgggtatacatactatctaggtatatatatattcctacatttttttattcactgaaagatggtttttgagcatctactgtgtgcgtatcctattttgtaatctttaaaattttctcttaatgatatgggagctttctagcttagaaaataacacagcccattttcttagcttgctgggactt

SEQ ID NO: 110561 - DNA, 1057 bp, Homo sapiens
ccagagggcgggatgcaggtattgcgaagaggcacacgctccgagaggaaccaccagagcgtgggctttgggcgaggaggggtctcctctggttgggggagatctggcaggcttgggggagatggggctgaaaggatggacagggagggaaggccagaaagctggagacggggatggagagctaaaccgcaaagagcaggcgccctgccccgctgagggccccgcgcctccagctcctccttcccgagcttcccggggtcggcgtccagccggcaaccaatgggccccgcccccgcccgcagccaatgggccgcgtccccgcccgcgcggccgccccgcccctcgcggacccggaagtgggcctggcaccttcccggcctgccgcagggatggggcagctgtgctggctgccgctgctggcaccgctcctgttgctgcgaccgccaggggtccagtccgccggccccatccgggccttcgtggtgccccacagccacatggacgtgggctgggtctacactgtgcaggtaggtgccgaccacgccccgcgcgcccctgaggctgcagcttccctctccccgcgggatctgagtgtgggtttgcgtcccggggcccgatgccggcgcagaaggaggctcagtgggttcaggaccccacgctgccattgactggttgcgtcgctaacttcgggccagtcacttcctgcctctgaacccccatttccccttctggagggtggtgcagattggagggacccctgcattcccggctggggaggggcttgggggttgacagtggtaacccattttccagggaagcctggagcaggagagggtggggctggcttcagagcaggtggatgtcaggtgcccgctgggaaggggccgggctggtcccctgcggggctgaatattggaggccagctcagcgtcctccgccccccaggacaggggtgaaggtggacctgtggtcacctcctggttctgctcaggaccttgggcgaggggctttggtccctaagcctcagtttccccatctgtaaagggtaggggaagca

SEQ ID NO: 110562 - DNA, 1018 bp, Homo sapiens
gcttgcctccgatcaggatccttcagcaccccaccccacctgccccagtgcagcctgtctctcccaccctgcccaaggcccatccagggttttctgggcagttcctagtctggctatgggaggaggcctgagttgggagccgtaagccctgggctcgctgcctgcccggcctgcctccttgggtgaccctggcagaggctgcctctgcagccccagcttctcagctcttccagggctggagcttagcagacttctgggtcatgccgtctcaagctcaccatcttcccttgtctcccagaaccattccaggcctggacgggcttctacacgtcccgcagctcactgaaggggctggcccggcgagccagcgccttgttgtatgccggggagtccatgttcacacgctacctgtggccggccccccgtgggcatctggaccccacctgggccctgcagcagctccagcagcttcgctgggccgtctccgaggtaacaccacatttagccacagtggcaggattggaacctcccatgctgcgcacctcccctcccttgtcctagccaatccttccagccctggggcactagaggccccactttacagaggggaaactgaggttccctttggttacaaggccagtgcatggtgaacccaggccaaggctgagaccacagcctgatccatccagctggtggcctcattaagctttgtagcagtttagcaaaagggataaaggacaaggtggagtggcatttgtgtccgacagccctgcctgcatccatatctcggctcagctgtgtgatgtcaggcacatgattcccacacccacccaagacctaattccctcctgtacaatgagaacaacgagcttgcccaggaggacggtggggcaattggatgtgctggtgtgcacagcctgcttggtgcagtggctgctgaatagccagttcatgagtttccgtctccacccatcccctactgtactgatgggaaaacagacccaagacagcctgtaac

SEQ ID NO: 110563 - DNA, 2899 bp, Homo sapiens
ttttggtagagacggggtctcgccatgtcggccaggctggtctcgaattcctgacctcaagccatccacccacctcgcctcccaacgtgctgagattacaggcgtgagccaccgcgcctgggaagtgcgggaggcctttttaaaaaatgtaaactcgcgtgctcaagaagccctatcggagggaaacacccagaagaggccaccctccaaacacagggtaaaacaggggtgacgcacagaggtaacgggaaagcaggaacgagcgagagcgtgcggtcccgtacctgcgcgtgcctgcgtgcgcgtccgtgcggccgcgacgccgccgccggtgcctctctttctagacgtgcgcgcgcccgcagctcgcccccctgaccgtaaagaggcccggctgtgtcgtgaaaggggccgcaacgcgcagagcgctggttgacggccgggactccattttgttcgccgttactctgcgcgtaagtcgcttgtccgtggcttctctgagaagaaaagttgaaaaagggtaaaagttttcaggaatattcgggctctctattgctaagcatagcgagtgtcggttttctctctccaacagacatcgctattgcggttccgaggcagtgggaagagatgcggcccctggacatcgtcgagctggcggaaccggaggaagtggaggtgctggagcccgaggaggatttcgagcagtttctgctcccggtcatcaacgagatgcgcgaggacatcgcgtcgctgacgcgcgagcacgggcgggcgtacctgcggaaccggagcaagctgtgggagatggacaatatgctcatccagatcaaaacgcaggtggaggcctcggaggagagcgccctcaaccacctccagaacccgggcgacgcggccgagggccgggcggccaagaggtgcgagaaggccgaggagaaggccaaggagattgcgaagatggcagagatgctggtggagctggtccggcggatagagaagagcgagtcgtcgtgagcgcggtcggcggtaagtcgggcacccgcgccaggccgaggagcggccccagcttggccgctcttcgagagcgatgatttcatcgagatgcaccggaatcgggggtggggcgggagaataaaggcgtgctcgggtcagggccgatctgggccccgtcttcgtgttttgttttttgacggtggcggcgtgggataatcagagtggccgggtttgggcgtgatgcgtgttcagtggaagggtcataaatctcagagtcgccaaggaaacagaaacggacaaggtcccgggccgtccagcaagcgggggtggaaatagaggattttcggggaagacgttggacaagtcaacgttgctagagactggagtgagtcaggtggtggccagaagaggtggcgtcctgcacagtggcgttcgtgagggtttgggggtcgttgtgcctgggattaacctctcgatgatgaatttcttcccattgtgctttaggtttccagccaatggattctggtcaactggtggagattggctgacaccctggagaagccgaaaccagagagccttttgttttctcttttttcctgtctatgctctgtctcacttaacactacgttttctgctatggtctgtggttgatgacctcaatatgagtttcgattgttaacgtgtttttgtttgggaagtaattttgtttgaaaatgctctcacatacaggaattagggcctagattgtaagctcttgcagcagtcacatttgttcccgggctttggtggttatttctaaatttttgaggtgctttgctatttcttgtgtgacctgatagctccctggaactttgggtctgtgtgtgacacatgagactcacagttggagttctccagctctggaggtgctgaaggagctgcattaattctggaagacgactccatgcagcaactactgaagaaaggaccagacttcaacggggagtgtggatgggccgacctggctgggactcgtgaatctggagaagagctggagaatggatagtattgtctgtatttggagactttaatttctgtgtgagaccaaaggaggagagatgtgttttgttcaaaatttaaatttgttgtggtacactatcttatgtaacctgtctggtgagtttgtttggacaacctaactcagctttatttgacatggaacctaaaatagaagataagatcttgatattctgtacaagttgatgtaataccctgatgcgttttagaggacttggcataaaatgaaagattggcaaaggcccttgaggggcttggggatgacagtatggaactgtctgcattggaccctaaactggactagaagaggcatcttcaaggttcatacgttgtccagctgtaagttcatttgagtagcagacctaacaaatatttgaggtcagaaccctaccatgttaaaacaaacaaaaacttaccatgttaataaaagtattcatttgcttgaaaagacgaaagacctaaaaggttattgagaaatgttagtcctttaagaatgaaatctgctgtctcccagatggttctcactgtcaaatggagggtgaacatcttaacggtttctgaggctcttagtctctaatcaaagggaagctttctctctctgctgttgggaaccgggtgaggaagaaacacacttggttcttagtgtgggaagaaaccacatgtaatcctgtggtccaggcctctgccttcagagagccaaagcaccttcagtctttccaattggaacattgttttctaggccttgcactgggaatatagcgattacagttgcagggtgagggatgacatagaggagatgtgataccccaccctccttccagattgaagcctttctgcctcagctgctagaagt

SEQ ID NO: 110564 - DNA, 1671 bp, Homo sapiens
gccgggccgcgacctgccgctgcttcgccgcgccgctgcgggctacgccgcctgcctgctgcccggggccggggcgcggcccgaggtcgaggccctggacgcgagcctagaggacctgcttaccagagtggacgagttcgtgggcatgctggacatgcttcgcggcgactcgtcccacgtcgtcagcgagggcgtgccgcgcatccacgcgaaggccgccgagatgcggcgcatctacagcaggatcgaccggctggaggccttcgtgaggatggtggggggccgcgtggccaggatggaggagcaggtcaccaaggccgaggccgagctgggcaccttccccagggcgttcaagaagctcctgcacacgatgaacgtgccctcgctctttagcaagtctgctccctcgaggccacagcaagccggctacgaagcccccgtcctgtttcggaccgaagactacttcccttgttgcagtgaaaggcctcagctctgacggcctgaccactgcggcaagaggaccccagctggggtgcttacctccagtatgaagtgaattgcaaatcctgcttatggacatatatgatgttggagtgtgggattttaaagtttactttctacaaactctccgtagtatattcatgattcagtgtagaatgtatagactttatgtcttccaagtttaaaaaaagagacagggtcttggtatgttgcccagactgttcggaaactcctgggctcaagtgatccttccacctcagcctccccagtagctgggactacggggtcgccactgcacccagcctgtgtcttccagctctaatcagaaagctgcttgtcgagggcatggggaatcaaactgaatgaacttttctctgcactgtggcaaaactgttatttttatggattttactaaatggcgttaccttttcaagatttatatgtttgtataatcataagaaaattgagccattaaagccttgttattcaatcctaatagtcagttttctagaacctacttttagggtaaatggtacattatttaatattatattaaacctcctatagcgtggattgtagaccaaaggaaatggtacaatttctgagaatatatgttgattttttgtgactaattccaaagttgtatttgaaagtatgacctcacagtcttcatttgtccatagcaaacatatgtgtgtgtgtgtgtatatatatatgtgggttgccaatgtttggtttataatttaaatgttaatagaaattttgagttttattggaaatgatttccttctgaaaagagctttacgtatttccttgtgtgtgtttgaaatagacgtactgctcatgtgcttttttagtagtgggataaagaaaaggggcttgagtatacctcctttagagagctaatgtgaaaagctgtagcttctatttcagagcatggtatatttcttttcttttttttttttttttttttttttgagacggagtcatgctctgtcgcccaggctggagtgcagtggcgcaatctcggcccactgcaagctccgcctcccgcgttcacgccattctcctgcctcagcctcctgagtagctgggactacaggcgcctgccaccatgcccggctaattttttttgtattttgtatttttttttagtagagacgggttttc

SEQ ID NO: 110565 - DNA, 1043 bp, Homo sapiens
tcgggtgtgagcccgtgggagggaacttggtcatcaggaaggatgcgaggaccctctggctgtggggtgtggggtccgcggtggctgcagagactggtccccccacaccagggggcgctgcaggagcgggaaaggcctgaaaacagctggtccagcccctgtcctcgggaaactaaagccttatatcctgccacggtcactgggcactggaaattcagagccccaagatcctgtccatgctcgaggggctcccagtgtgcagacagagtggggacggcagctgcagcccaaggcacagtggctatatttgcatgggggtaggaggggaggaaattaggtgagggaggcagacagggtgctaatttggacgtgccctgtctggtgggggcagaagacaaggcctgtttatgtccacctggctcttatctctccccgaaaggagcacgatcatttatttatgtacagtttgtctgtctccccaacgaggaggaagattgtggtgtttttccattttgtccactctgaatccgtgacacctggtaccaggcacctagcacagagaaggcactgaaaacgtacccactgagggaatgacagggacattgaggatgagcaggtgctggcaaggagagcagggagggtttcagggcccacaggctgctcccccgtcagcccagctcccgcctcccttggccagggcctgtggatgcgtcttcctccaaccttcccccttcctccctgctccatccttacgctctagatgcggctcataaacaagatatcatcggacttgactctccttgtctgacctgacaagcatttgtttcatagtaggcgcactcagtccgctgaaccttcatggatcaactccggcatctgagtgctgttcccgagtcacacctgccctgtgctccttttcttcccagttcaccctggctgctgggatccaaggcctctggggtcccaagcaaagggagacatttaccagcgcacaccccccaccaactccgtcaaaaacatcgcccagggccccagtgtccgcc

SEQ ID NO: 110566 - DNA, 1036 bp, Homo sapiens
cgcggcaaaccctgtcgcgagggcgccccgagttgctgcggggcctgatccggctcctttccaacaatacgcgtctgcagccggcatttctagagctctctgcttcttcccgctggagaaaccagtgtgtgtcgtgttggaatgcttcgtcttgccctagaattcagcttgcgtcttgtggtgcgcaggtgacaggacctgccgaactcttggtacagacccctaaatcatggcagaactgtcttgatttcttttttgccacctttccgtttttgtcctctataggcaagctataaagatttaacccagttaaaaacaggagggagattcagcggagaggaggcatgcgagattctttggaaaaaattatataaatgtagttcttgctaataattacctgggttggatactttgacttactgttcaagttcctaagaagggattttacatttctgggtcttgttttaaaaactgttagaaagctcgtgagggggtagggacaagcagttttggtaataggcgatgctgtggataaaactgtgcggtaaaatgcccaagctagattcttcctatgcaaaataagacccgttccagaacactttgaccatttcgtggacttagaatttaaaggcgggtgagggcggggggggaggaggagcggattctatcactctgcatcctcaaggtcaaatattcttccatcagttattttggattgaaccattcttaaataggtctcaggatctctatgtcgcttccttatgacagaacctatttccgagagtgtgcctttgcatatctatagaagctcctttcacttaatatatcttataactcagattcaattgctgtacttgctaaataatgcatttttaatcattcaaaaagtggtttacagcttccttgggtataatggtttttatgtaagcccgttacatcagtgaaatgccagtttttaaacattgaagggaagggagaatattattcttatttatttccataggaagtagaattcaaagtgcaggtgcttttttgt

SEQ ID NO: 110567 - DNA, 1050 bp, Homo sapiens
ttgcacctgtaccctataagttttgctttttctttctgagacagggtctcactctgtcacctaggctggagtgctttggcatgatcttggctcactgcagcctctgcctcccgagctccagtgatcctcccatctcagcctcctgagtagctgggactccaagcgcaagccaccatgcctggctgatttttgtatttttttggtagagatggggtctcaccatgttgcccaggctggtcttgaactcctgagttcaaacagtccgtccgcctcggccacccaaagtgccgggattattggtgtgagccactgtgcctggcctaatttttttttttttttttttttttttaagatataaacctttgtgttaggctactgtaatttgggagttgtttctgttgcataatctaccctattttaaccttttccctcagtttgttattgaccccttatcctaattattctcagttctctctttgttttgttaataggctttagttgttcttgttattccatacagtctgactttgtcattgaaccttccatgattacattgaaatgtaatgaaatttgaccttttgaaatttgagacctatcaaacataaagtagatgttttccagttctctcaaacagttctttctgggcacattgtgttatttcagagtagctgtgattagtagcctttcttccaggtagtgtcttggacaacctcctggaacgtggggaggggcatatgaactccattgaaagagctaatgagtctttattaagctcaacatagtcatttgctagaggggagagggtcaaaaccagtgtcgtctagtagaacttttgtgattatggaaatgtactatatttgcacaccggctccatgaggctgttgagcacttgaactgtagctggtgtgactgaggaactgacttttagtttaaaatagccacatgtgactagtggctaccatattgggcagtgcagtaagggtcttagaacgccatgggggtgacataatgccaggtgaaaaaggcagaatatgaaagtatatgtatgtt

SEQ ID NO: 110568 - DNA, 1051 bp, Homo sapiens
aagatcctatctcaaaaattaaaaaaaaaaaaaaaaaaaagcggggaggggtttgcctaaatcagtaaggtgctataatgaactaagaaaattgaaggacttaattcaagttgaagtattttcctctttttgtaaaatgatgaaatggaggctcagaagttaaataacttgtccagcttcacacagcacagcaggtctcgtaagtccagatcatgttccctttatgttacatcaccctgctaaagagcggggttacctttttctaagcctcgattggtcatattatttaattattataacagtttgatatcctctattttttgttgaaaactttaaccttctttttttttcagcattctaaagagtatataatctgtgccctagatcatgtttgaagatatttatccattggatacttctctcctactctgtatcattttctagagagcaaatgtgcatgagagctggagacaggccaatttttttagaccattccgtgttcaaggataggaatcacagctctcatacaggggccttggcagaaacagctttttatttagaggagttttttttcactttgtattgcttctctggctattgaaggcatgagtttgtgacccctggcacatattctcagtcttctcagttggtgctcttttgcttatttgcttaacattaatttaattctaaattttaaaaaggtttttaaaacttccagtcattaaagtatggaattgatcctttgctttccagtgaaacgattaccatgatcaccagtagtcattctatcagtatctagttgggtttcctaccactaatcttccaactctgctttaaagctaaagactaagatctgaaaaactgtaaaagagctccatgtgcagggctgggctgaaaataggagtgtttgaaagcctgtgcttcagttattgctacatgactaagtaccccaaaacttagtggcttgaaacaactatttacccacaattctgtgagttagctagggctcagctgggaggttcttctgctgttcttgcttggggtctgtgat

SEQ ID NO: 110569 - DNA, 2962 bp, Homo sapiens
aggatttgacctcagagaatgtggcttcagagctcatactcttgactgattgctaccgagctttttaaccgcatatattttcaacgctcacaataactttgggaggtaagtcataggatcaccattttgcagttgaggaaatagtctgaagcagtaaataatgagcttaaagtcgcaagcaatagtgacttagctgagattcaaattcagataatgcttactgaagagactgcattctttcttctactatttgtcctttttgacttcttaattaaaatgcaaactttgaagataaaaactgtcatcttacatattttctcagtaatcttacagtgcgtatcacagtgctgagcaaaatggtgcttgatgcatgggactaatcttaagcatattttactgtattataaattattgtaaagttaatgattcttggatgatgtgaatgttgacactactaaaatgaaatattccattcttctggttggtaatgttgttttactgtatctaaaaaatctgcatactcgtgttttgaagtctttactctgtttttcaggtactatgaagcatttccaccactttctgagaaaccagtttgcctgcaagaaatcatgactgtgtggaacaagtctaaagtctgttcttactctagctcttcttcatcatccacagccccaccagctagcacagatacttcctctcctaaggactgcaacagtgaaagtgaagtcaccaaggaaagaagcagtgaagtacccaccactgtgcatgagaaaacccagagcaaaagcaaaaacgagaaggaaaacaaatttagtaatggcacaattgaagaaaagcctgctttgtacaaaaagcaaatccgacataaacctgaaggaaagattcgccctcgctcgtggtcttctggctccagtgaagcaggctcaagttccagtgggaatcagggagaattaaaagcatccatgaagtatgttaaagtaagacacaaggcacgagagattcgaaacaaaaaagggcggaatgggcaaagcaggctttctttgaagcacggtgaaaaggctgaaaggaacattcatactggaagtagtagcagtagcagcagtggttctgtcaaacagctgtgcaagcggggtaagagacctttaaaagaaatagggagaaaagatcctgggagcactgaaggaaaagacctgtacatggagaatagaaaggacacagagtataaagaggagcccttgtggtacaccgagccaattgctgaatattttgttcctctgagcagaaaaagtaaactagagaccacataccgaaacagacaggatacaagtgatctgacatcagaggcagtggaagaattgtctgaatcagtgcatggtctttgtatcagcaacaataatcttcataaaacatacctcgcagcaggtactttcattgatggtcattttgtagaaatgcctgcagttataaatgaggatattgacctcactgggacctcattatgttctctaccagaggacaataaatacctggatgatattcatctatcagaattaacgcacttctatgaagtggatattgatcaatccatgttggatcctggtgcctcagaaacaatgcaaggagaaagtcggattttgaatatgattcgacagaaaagcaaagagaacacagattttgaggcagaatgttgcatagtgttagatggtatggagttgcaaggggaacgtgcaatatggacagattctaccagctccgtaggtgctgagggcttattcctgcaggaccttggcaatctggctcagttttgggagtgctgttcatccagctccggtgatgctgatggggagagttttggaggagactctccagttagactctctcccatcttagacagcacagtgctcaattcacacctgcttgctggcaatcaagagctcttttcagatattaatgaaggatctggtataaactcttgtttttcagtgtttgaagtgcaatgcagtaattctgttttaccattttcttttgaaacactcaacttgggaaatgaaaatacagattctagtgctaatatgcttgggaaaacacagtctagattgctaatatggaccaaaaatagtgcctttgaagaaaatgaacactgttctaatctttcaacaagaacttgtagtccatggtcccattcagaagaaacacgttcagacaatgaaacattaaatattcagtttgaagaatccacacagtttaatgccgaagatattaattatgtagttcctagagtctcgtcaaattatgtagatgaagaacttctagattttttgcaagatgaaacttgccagcaaaacagtagaactttaggtgagattcctacattagttttcaaaaaaacatctaaactagaatccgtctgtggtattcagctagaacaaaaaacagaaaacaaaaattttgaaactacacaagtatgtaatgaaagtccacatggagatggctacagctcaggggttattaaagacatttggacaaagatggcagacacaaattctgtggctacagtagaaatagaaagaactgatgctgagttgttttcggcagatgtaaataactactgctgctgtctagatgctgaagctgaactggagacccttcaggagcctgataaggctgtgcggaggtcagagtaccatctgtgggagggacagaaagagagcctggagaaaagagcatttgcttctagtgagctatcaaacgtggatggtggtgattatacaacaccctctaaaccctgggatgtagcccaagataaagaaaacacattcattcttggaggagtttatggagaactcaaaaccttcaatagtgatggggagtgggcagtcgtaccacctagtcacacaaaaggaagtctgttacagtgtgcagcttctgatgttgtgacgatagctggtacagatgtctttat

SEQ ID NO: 110570 - DNA, 1032 bp, Homo sapiens
aagcaatccattttcacaagttcttcatgtagaatgctcatttgaacctgaagggattgcatctttcagccccagttttaaaccgaaatcaatcctctgttctgattcagacagtgaagtgtttcaccccaggatatgtggtgttgacagaacacaatacagggctattcggatctctcctcggactcactttcgcccaatttctgcatccgaactgtccccaggaggaggaagcgagtcagaatttgaatctgagaaagatgaagcaaatattcccattccttctcaagttgatatatttgaagatccgcaggcagatctcaaacctttggaagaagatgcagagaaagaaggccattactatggaaaatcagagcttgagtctggaaaattccttcccaggttaaaaaaatctgggatggaaaagagtgctcagacatcactggattcccaggaggaatcaactgggattctttcagtaggaaagcaaaatcagtgtttggaatgtagcatgaatgaatccctggaaatagatttagaaagctcagaagcaaattgtaaaataatggcacaatgcgaggaagaaattaataatttttgtggttgcaaagcaggttgtcagtttcctgcttatgaagataatccagtttcttcgggacagctggaagaggtatgtgtctgcgtgttggtatttgacaaaaggatttgatcagagtttaacccaagaacagacatgccagtcaatgaaagatagggttaaattattgggaaattagcttaaatgtcttaaaacttaaattgttctaattttacatgtaaggacttaaaatggatttgatatttatgaatttgaactagacagtagagtttttctggagagaaaaagcttttaaaaatcacaggatgtaagattcctatgtgttgtcttaagatgcatgttattggccgggtgcagtggctcacgcctgtaatcccagcactttgggaggccgaagtgggtagatcatttgaggtcaggagttcaagaccagc

SEQ ID NO: 110571 - DNA, 1049 bp, Homo sapiens
cccagagtaaaactaaaaccaagcacctttctctttacccaaactaggagtattctgtgagaatttacagctgtgaagcctttgtttccttcacccagcttccaccttctaaagaatttctcaattttacatctgttgctaaaaacatttctggttaggctttttggattaagtttatgtcttcttttcactgtttcattcattcatcaagtatttcttatgtacctgctcggccaggtactattcttggtgctgggaataagtaacaaagctcttggtgctggtggagtcacatcccaccttggggagctgacaataaacatgttaagttatatagtgtgttacaatataaatgctgttggaaaggaggatcgctggacgaggggcattgggtttgggagtgatggcaggagtttgctgtgttatgggcggtgtgagagcaggcttcctcgccaaggtgcaatttaaggaaatacttagaggtaagagagtgagctgagaggatgcctggcaggaaagggagggcagcactgaggccgctgctgtgcctgcctgtccatgacagcgaccttctgatccgctttcagcttcctccattgtctcttcattcttttcattcccagccacagcagaagttgaattaatacattcgatgatgtattagatgaatatagcatgatccagcctaaaagttataaatgagtggagagatgtcataacaagatgcatattccttgaatatgtttagtataaaacgggacaaataagtccctgccataggaattgacattcaaatggaggatgcagaaaaaagactcccaaatttatggtagaaactggtgtgcccttcacagtggtttcagcaagagagagaagaaatgatgtatgagatagtcagagactgttggcctggcggaaacttttcttcacgtcagcagacactgagtatctgctttgtgcggggccccatacttgggaatgcaaagatgaggaagacgtggtcccgcccctcaggaagcttacagtcgggttctgctgggatctaaact

SEQ ID NO: 110572 - DNA, 1122 bp, Homo sapiens
tgccaccttgtggaaaagaaccaattccttgcagtggcataggatgattttgagacacagagttcatgtttctttagtaaagggcaaccttagcacccttagtccagttttctgtcattagttagtaaagaatccagtttcacctcttagctctaggttcctggttatctgtacagtctcttagtggatactggtgtttgtacataatatttttgtttttacagtgaagtggtatatagagaaactctcagtgcataaatactggtaattatttcttttgaatgacctttagctcacactgtgagttaagtccctgcatatttgccctgtagcatcatgaagcatccttctttagcttatgtgggttggggcatttagtctcagaaggatagccaagaaaacaggtagtcacttacctactcagcagaagtggctggggactcctaatgcttctaatattggatatgattcatcacaagcagttgctgctctgagccaggggctgacctgggagctcacagcatctctggaaaggaagagtagcattgtcccctttacagtaaggcgaggaaacaggctcagaaaagaggcagcttgttcaggtaaccatataagaaagccccagctttgtgcagtctgccccctgctggccttgctgcgcattcatatgtgcatcccttcagcacttgggttaggcactgttctagacttgggaatgcataggcaaacagatcgtgtccctgtcctccccctgctcaggtaccttctcaacagggacttgaggaaatagggcacagaccatgtgacagctggggctgcctgcagggagaggtgccaggcagcagtggcttgtgcagggacaggaatgcattgggtatgcccccaacatgactggcaaagaagggatggcatgggagtgtggtggggatgaggccagccaggcagctgggagccagaccacagagggccttgtagactctgtgcaccaggagtgccgtcccaaacagcagtctccacagctcacgcccctggattttcagtgctttcaagactcgagtaatgtaagcgtctggatgattttagcattaaagacagagagtcctgcagggaagcagtacagac

SEQ ID NO: 110573 - DNA, 1055 bp, Homo sapiens
atgtaggagggaaaatggtgatgttctcatcttagagatgaggatactagggctcaaagaggttaaataatttgtgcaaagttacatcacaagtaaatagcatgacctggaattgactgaagtctgtctaatcccagagcctggggtattctcatgaacctcaactagtaacttggagttcttggagccgtcagagagaacagctgtggagagtcttccatgtggccagtgcagctgcaggaagcagcccagcagggcccagatggtcttacccttggcacagcctcgctactctgtgccaaggtagaagggcgcagcagtcacttgctccagccttgtcctttggggtgttgtgcaaggggcaggcatgtcatctcgtcaaactaccttgtggcaactctgtggcaggggatggggggtgtgatctggttttgaggaagtagatgctcaagggtgttaaaggacttaatgcaccatgaatgtcaatgccagagtccaaaaccctggccaagttcctccttttactctgcactgtgcctctgccccagctatgtttctcatggaggtaaggggagtaagaggctgttctggatgaagaccagcagttctcagtgcattagaattgcctgggagcaaatctgcttttcagaaagtgcccagcccctgcccaggacagttcatttggaatctctggcaggagtctaagcctctctaaagcccccagatgatgagaatatgcagccagggttgagaactactgggctcgttggatttgtttgatatcttctcatcccagtttttttcccattttgtggggccatttgcctgatggaatcgctagcaccatttctttttcctattcatagatgtgatacatggttcagtatgttgttgaggaagaacacacaaggacgtgaccctgtgtcgtttctccattgcgttcccttctgtctgagcttcctttgttcctctgtcctatgaacgtgctatgatgcaccatctgtctcctccatccatttgttgtggagagcatgggccctgtgggtctctctgtc

SEQ ID NO: 110574 - DNA, 1062 bp, Homo sapiens
gacacccagtaatgaagagcgcctgttagattttaatagggtaagtggactgtcctcctcctcgtcattaacttacaaacagccaccacctccagttgtcactgtagtcaaaaacctgggagtcatgtgagtggaccccacctctcccaggaaccagccaggcctgtgggtgcagacttcctgttctctggcctttgttctgagtctgcattctcccccgcttccaaacccccttgactgttgactgccagtgcttcctgaagaatccccagctctctccccagtcttggctctacactactgcccgagggcattgcattacaaatgcagagctgaccctgttgctccttgggtgggcacacttttcatcttttttttttttgtttacctaataagtgggagacctagccttgtcctctttgaaagtgcaccctgaggcagccttgccagtgtgcttgttgccgctgtcccggcttctgcagaacgatcccgccctttccgtgtcctcctgcactctgtgcacgactcttcttgctgtagccagagcatgtacttgcgttccgtttctgcatgtctgcctcttccacaagcctgtgggcaccacgaaggcgggagcggggcctccgcctggtttagtctcgtcttagaccttccccggttaagaggcaggcaggcaaatgaacctaaggaaaattctttttatttggtgtgaattgtcagtgtattagggttctccagagggacagaactaatggaataggtatatatatacacaaaggggagtttattaagtattaactcacacgatcacaaggtcccacaataggccatctgcaagctgaggaggaaggagagccagtcccagtcccagtcccaaaactgaagaacttggagtccgatgttcgagggcaggaagcatccagcatgggagaagatgtaggctgggaggctaggccagtctagtcttttcacatttttctgcctgctttatattctagccacgctggcagctgactagatggtgcccacccagatgaagggtgggtctgcctttcccagccc

SEQ ID NO: 110575 - DNA, 1741 bp, Homo sapiens
tcactgcaaactcccttcccaacacacaggtctgtagtgtcgcctcaccatctgtactgtgtcactgcaaactcccttcccaacacagaggtctgcagtgtcccctcaccatctgtactgtgtcactgcaaactcccttcccaacacagaggtctgcagtgtcccctcaccatctgtactgtgtcactgcaaactcccttcccaacacacaggtctgtagtgtcgcctcaccatctgtactgtgtcactgcaaactcccttcccaacacacccgtctgcagtgcccccctcaccatcggtactgtgtcactgcaactggcacatgttggtttgctcgttcatctccccagcgagcctggcatgcgccttccactgctggagtccctgtgcccagtaaagttcctggtgcatagcaggtactcaaagactttgaaaatgaaataattctttatcctaccctaacatggctaacattttgtccaagtgactgaacatgtggaattaggattttggatccttcatggatcagagaagagaggcggttttgctctgaaacagtaaaactctgcatgtttgtaactccacaggaaaacactgatgatttattatttcttctttgtatatagatagagtatctcacccttttggggaaaaaaaagtctttttgatgtgttgaaaattgttttaatcttaggtgtcttctgtttatgaagcaagatgtacaggagagagagattctggagcaaagtcagatggcttccgcggaaagatgtgctccagcgccagctccacctcggaagagacaggctcagaaggcggaggcgagtgggtgggccctagtgaagaggagctcttttctcgaactcatctctaaacctgcaaaatagtacaaattattgtttaaaaatgatatgtgatggaaaattactcttcagtgagacctgttaatctaaaacaacaacttaggtttcctcttcaattaactgattcagattggtaataattatctttctcttcttgcttattttagagttgaggacagctatcctgttaaagattttttttcccagctgttaaattcttggctatttgaaatagactagattgtgttgtcaaatcaagaatgggtgtgcatgtgcttgtcttagaagtatcactgctttttgcatcttaactgcagttaattttccttccgactgcggttatatcactatgaccttactagcattgcagtgtcaacaaccacttctgctcttcagagacttcagctttggagcatttaggctttgttctccaagaactgggatatccattcttaccctacagtggcttgatgcctttctgaaggcgagagggaagcctgggtgactcagcggtggtctccattcagcaaaatctcatgtacatttccagtaggaaccgcagaggtgtgcttttcaagactcaccaaatactgtgttttctctcttaggatttcttttcccctaaagtatcacggaagatactatggttcgtgactttcttgctaactgaagaagccaaggatttggggtgtggggtcgtatgcgagacacagtggggtaagggtgcataccccaccccttacctgctctcatactgcagttacatttacaccaaaaccccatgcagggttctttgtggtgagtgttccatacgtgctaaggaccttagttacagattgttactttctggtgacctatgttgaattgaaacccccaaa

SEQ ID NO: 110576 - DNA, 1372 bp, Homo sapiens
ctttggctgctgcagctagccgcttcttggctgtgatgtagtatagcttcgatctcattttgtgtttgagagaatgttctgggcaagttctgtgtgtggtgggttggggcgggtagagtcatgagttttccacatccctgtgtggtggttttgctgactgtcgctccgtgggactggctcccgtttctccttggtgagcccggggagccggcgcatcttgtgagtcgcgtctgtgcatggcgatccgctcctccggctctcatggcattgtgccacaggcagaggccaggaggagcagtatgtgcacagccgaaacattttacattttttacattgtttttcttttttaaccaactcattgtttaaaaaacaaaaacaaaaaaaacctaatctgtgaaatcagcgtagcatgcctggagcatcaggaatggcagaaaagtctgatgcgctctagacagcttcaccactcatttgggcaggcagtaaacacacatataatttattagctgggagctgaactggctgtgaaatctatgatttgctttgaacatttgggttttgttgcctttttcttaattgataacacagaaaagaaagtaccatcaaagactgtggagtcattgagggtctgtgtgtcctcaccgagagggacctggtgtgcccgccgggtcgatcttcccacgtgttagggtttatttttatacaacacattttttgacactttaaggtgggtgggtgtgtgtgtgtgtgtgtgtgtgcgcgcgtgcgcgcgcgcatgtgtaaggttttatgttgctgttatttatttacgaacttcagatacgtttttatgtatttttcattcttctggagcttcctaaaaattgataagcatctgcactgaaatataatttaacagcaaaagtaaaaaaggattgaaagttgtaaattcctcatatcactacagtgacgattattctagaaatcgttgcttgtgtagcaaagaccaaataaatagatttcagacacaaccttgagcacagttgattttggacagctgctgtttattaggaaagggctccaggtggcaaaggtgcacacttcctcagacacaggtgagaagatgcagcaccttccacaggtgaatgggacggattcgaagtgagcaaagggattcacaaattatgtatttatttgttttcatagttaagtagctgaagctcagaggctttcagcaacagagatgaaagtgtggctttttagttttgtgaatggatgatcacaaagaaaaagcatttttaaaaagttggcaaacgctgaaacgcactgtggtatgaagcgcattgcatttccatagcactgaagtaccagtttccattcctgggctgagatt

SEQ ID NO: 110577 - DNA, 1029 bp, Homo sapiens
aggtggccagtgttaccaaatcagcagcctgagcctctgcggggccctgtgcactcataacttaacgtttcttgggccaagcagagggcactggtgagggtgacgccagtgagtaactctcatttctactgccagcccctgctggcatagtgcagtgctggcatgccgggtgttccagccgtgtccccgtgcccctggatggctgtgctctcgtgtgcctgtcctggccctgcctctgctgtggaggtgtgtgctctgctgcactgcagccccatgcattcccaacgtgctgggcctggccatgcactccgtccccatggggccttgtcacctgagtgctggagttcctgtgtctccctgaagccctgggggggccgcgccttcagcttctgcctctcgtttgtgctctcatgcttttgttcaacaagtgcctatttcctaggccctgttctaggctggtcatgtggggtaatacggtgagagaaacgatgttgggtcatgacttagggtgggcttgtggcctgggggtggtgggagtggacaccttcgtcacacaagcaaatgtgaactcccgaacggtggcgtgctgggaggaagggcacaggggctgtggagagtacgtgtagaattgagatctgtggctgggtgcagtgggtcactcctgtaatctcaacactttgggaggctgaggtgggtggagcacctgaggtccggagttcgagaccagtctggccaacatggcaaaaccccgtctctactaaaaatacaaaaattagccaggtatggtggtgcacgcctgtattcccagctacttgggaggaggaggcagaggttgcggtgagccgagatcgcgccaccgcactccagcctgggcgacagaatgagactccatctcaaaaaaacaaacaaacaaaaaaagaatcgtgatctgctccatagctgctctttggagggctctggggccggggcttggcaggtgggaacatttctgcagttgaccctggctgccccgtgtgtgtgtctctagca

SEQ ID NO: 110578 - DNA, 1047 bp, Homo sapiens
agtaccgtgagttttcatttacatgtgaggaaactgaggcaaggggtggttaagtggtttgtccaaggatacagggaaataggaacaagttcatgcttctgagggttgttgggattaaatggggaggaaatgtacatacatgggacgcactgggcacatcgcagcatgttaatgtctagtctatgtttttatgttgcctgactgtaatttactcctgctttggccatcttagaattagctctagtgacctgagatggaacattgtaactatgccttttctgtgcaaacagtttgttaatattgctggtgactttgccctggcattatggatatacagatggcacctgctatggacctgcattgctgctggtgtgtatgagcttgtatgttgctgtgatcctgagagggagtgctgggtggtggtctcttgatgtcactgtttgctggtgtgtggtcctcggtaaggcaggtgctcagtctctctggggcttagtgtccttgtttgcagaatgagctgaggggtacgtactttacattagagttgcggcgatgaaaggaccattctaatcaaggtgttgggctgcagttgtcagggagtaaggaagcaagaagattcgaaggtgggcagactagtgctggaggccactgggtcagtccctctactgtgtgatgaggatctggagagagatgtgaacaaagcagcaaagcccgttgacagctcagaaagaagtaacagggctgagatgccagctggccttcgaaagtgctgtccacccgcctgagggtggaggtggtgagggatcagcttgtgcaaagtcatgggggcaggagagagcccagccttcctgggaaggtgccgtagcatgaggcgctcaggaggggcaggggtaggaggggagaccacagagatggtagacgcccagatggggcaggactttgaggacgacatttagtctcaagactcaaagcctgtcacagccagactgcataagatgaaagtctgcacaggagcggatgggctgccttgatgagaatgagttaaactgt

SEQ ID NO: 110579 - DNA, 1080 bp, Homo sapiens
acagaaatttgtttcccacagttctggaggttgggaggcgtaagatcaaggtgccagcacgttcagtgtctggtgagctgttgaacatgtttttttataagggcactaatcccactggggagggctccaccctcatgacctagtcacctcccaaaggcttcatttcctaatactgtcaacctgagggttaggatttcaacatgtgaattgggtgggggcacaaaccctggggttgtagcagtggggatggtgtgctgggttggaagctgtgtgaaagccatcaaggcgtgtgggagaatggatagagagggaaggaagcgttgctggggggcagcaagggccctgccaggtgatcagggaccagtcagcgtgctgcgcgtctttctccagccatgttttttgcacaggtacacgtgcagggcaggcttgtctttgagctaagtgtgtacagggaagggagagagaggcagggctcagggacgtgtgagggtgattacattggggcatggattctccgggcggtggaaggagggtggattagagaagcaggatggagaccctgaagcctggagggtagtggggggtcgtcaccgtgtgggcggggaggctccagtcacacagccggctgggagtggaacctgcagggtcagtttccaccacgtctgacgtaggctccccccggggccgttgcattgctgattgagccgcatctggtgagcctggtccaggagtgttggagaaaggaagtggaggtcttcattccactcctcccgggtgctgggtggggagagggaggcagcagtgccgtcccgggcgttgtggtggtgggcgctactttgctgggctggccttgccgagacacagcttcttcccatggtgtaagagcctccccatttgtgaacagcaccccatcctcagggagagcttgtctgggggaggaccgtggggatcagccctgactgttggctgtgcagatccctcttctgggggctgcctggtggccccagtgctaggagctgcatgagacagtggtgccatgctcggccaccctgcccttgggtggacataacctcacatgct

SEQ ID NO: 110580 - DNA, 1097 bp, Homo sapiens
gaagagtatccgtcccggctgcaggagtggagatctggttgtgcagtagtgcagcagcggcgccatcccccaggctctgtgggctggcctgagtgctgcatgggaaagcaccgtggacaccatggggaagagatgctagtgaaaccctctccggctcagccggtggcctcttcctcatcagcagtggacggcatcctggctctgccacccactccctctgcatctggggcaagtcgctttgcagacacagctttcccacgtgtgaaatgcagagttgcgtcaggcggtctcggcatcttccagcaggaagaaccttctggaatcagcagtagtccctgctgtcctcctgcaggcctggagacccctcctggaatggttttcctgcctgcctcttcctgctgcataaatgagaagaatccacaggagccccccccaggaagaatggccccctttgctgtgtgtcgactcccagctctgtggctggggcacctctcatgcgcaatgccacccgaccaggtcccccccagaagcatgcgcacccctcgagggactgcctctcacttattgtacgctggtgctcattagaactcagcaagtgcttgccagatggttgaattcagacgtcatcccttttcttagagattatctgcccgaggacccggtcctggggatgtagtggtcagcatacctgcgtcagtcttggggatgtaacggtcaacacacccacttctcccaaatcaaagcacccaacggcaagatagtcgactgagaccacactgcagagactgataagggatgctcagtgccaggctgtgagtcctgtggcagagttcctgaggagaggggtgggggtggggtggtggtgtggaggtggcatgggaaagctgggagaggctccactttacacaggggggtcagggagggctttggtgggaaagcagcatttgagcaaagatgtgagtggtgtgcgggtgaagcgtgttcttccgaaggacacagtggagacgaaggccctgaggccggcggggactggccttgcttttcaggcgtcacgacctacaccaggctccttgagaaatgggcaccagcggcctgtg

SEQ ID NO: 110581 - DNA, 1023 bp, Homo sapiens
aagtagcaggtgtgctggagtgtggcggagtggagggattgtgcaggacagaccacccctggccagaggctcctgagcagctctggctcactgtggccacatcttctattccaagagaagctggaaacccaggtttttctgtttaaaaatgttgaacaaatcaaactgaagaacacggcgtagacagaaaacacaggctcccaacacgccatccccgctgatggctcctgcgcacgcgcctacacagacctgccattgagcgcctagagtgtgtgggatgactgacacgcccggtcccccttcactctcgcctggccctaggaggaaggtggcatgatctctaattgcagatgaaaggaggcccagggaccggggttgcttgcccggggctgcttctctgtggaagggcaaggctggcatagccactgcttggtctcctcaaagcctcttgtgcctcacttctcagccaatgcaggtgatacgaggttacctcccaccttgtggctttctagatgcagacctgtgcctgagctgcctgtgcggggaaggagcactgggtctgtggccgggctcaggtgtgggggccttctcaccaagagagccgcggttcctcaccgctccatttgctagaagcgaacaaaggtggccccgggagtgggatggacagccagtaagctgcttccggctacttggttgtctttgcctttttaccattgatttggtatctcctccaccacaccccacagctttgcctttcttaggaaaagtctgggagtggagcaggagcatggttgcaccgtgctgggagccacatcgcttgctgtgtgctcctcttgagggtggcgccggccagctgttcttcatttgtactgggaggaaagtggagaaacttgtagcctgcactgggaaactagactccatgggtccaccggtacttgcctggggaggcctggaagggcctgagtttgagtcccagatgggtgaccttgagaactgacctaatgtctaggctattttccttgg

SEQ ID NO: 110582 - DNA, 1048 bp, Homo sapiens
aaaagaaaaaagaaatattacatgagtataataccgcaatagtttctacatctagtgagtttacactgaagatgtttgagatcgagcagtgatatatgtgtgtgtgtgtgtgtgtttatgcttggagtttctttgtgtttattctcctacttgtccttgctttccactgattgttattgatgagaggcaaaatgttagattttgatttcagactctggaaaatatctaatgataatctagaattagctggtgccataagatattttgttctctaagaaaccctgcaatctgttaaatactctgaagctgcactctgagtcaagatgtgattaggtcagtgtgcttctgaaaaacttttttccgtgttttgttcttgtaaaacttcaaaggctcgtaattgtcctacattcgtgcccttgaggaatgtaattatttttggcatcttttgacagatgctggtttttcagcagcagacagagaagccagtctggagcttattaaactggacatttctagaacatttcctaatctctgcattttccagcaagtaagtggtggtgacttgttgctttcaagtatgttttgtctaaaattcatagatgctgaactgtgtatatttgttgtcaagtttgaaaggtacttgggtttttgggggtgttaggaggtagggtggatgttactattaaatacatttagactttttaaaataagtgtaactgatcatttccaacaaatatttactatgtccatacttgtgctccaaaagacaattctgtcttcctcttgagatacatgtctcggggcccctgtaggtctggtctgagagggtccccatgggtggctgtgtctgctggcgctttcttggacactcctctgctctcaggactgtgtgtagcagtctgcgctcagcaaggccatgttggtgtgatgggcttcggctcagatgagcccagtgcagtgagcccgtgtgagaaagggaaatccctggcagcctgggtgggtggccaagccggggtgacaggtttctgagcaggtagaccaggagagc

SEQ ID NO: 110583 - DNA, 1031 bp, Homo sapiens
caccatgcctggctaatttttgcattttagggagagacgggttttcaccatgttggccaggctggtctcgaactcctgacctcgtgatcagcccacctcggcctcccaaagtgctgggaatacaggcgtgagccactgcgcccagccgcatcattgttttcatttaagaaatgacagaaatgacatttagcaccaaagtgagatggaaggatcgaaattacaacggtagaaaacctttgaagttaaacacatttagctttaagagaagttcagtgtaatgctcttgttttcttgtttagccttggcctggataaaactttgttacagtcacactagtccttagactggcatttggtgccactgcagaccgtcacccccaccctaggcctggatgctggcatttttaccctctcattgctatttttccttttgtccctctgtgatttggaactgtcttttcttttacttagctcttttcacatgctagaatatgatggtctgggccatggcattcttttgtaagccacctgtggtcacctgtggagtgacttcttatctctcaccatgtgtgatttttattccttgtgttaaatgtaggtacctggtagacatagacagtaagtgtttgggactgaacctgtccttttgttgtatcttctcacatgctaacttcagcgtgaggcatctctgcactttcttctgtgctccattggggaaataattccaacaattgactttttggaagcagttataagagcaagtggaaatgttagaggggtggaagagctgggagaatgtttaaacaaaatggtagccaccaggacttagaagagtgtatttcctaaacttgccattcagaaaaccaacagaaacaaggagagtgataagcctgggaggagaggcagaaaggatagtcaggatgtggggcacagtgggagacggcctgagtgacactgagtagtcacctgctttgaagagcccccgcatacctggctctcctggtgggctttgaaagggaacacagttataca

SEQ ID NO: 110584 - DNA, 1081 bp, Homo sapiens
gatacttctgtggcttcgcggatgtgtgtgcgcatgcatggtttgatattaagcttattgagatagataacacaagtctacggcaccgggacactggacataggaaagagcagtatttcagatgctctgggcctaagagggctggtttagggttttccatttgcggggtgggagcaggggtgggaactgaaggagagcaggccgggtggctggggtggcagagtggtggttctgagtgagggcagttcagcgttgggtggccggaggagtggggcggctctagggacacttctagtgtgagggtggtaggtttgtctttgctaaaaatgaacacactacggtgaccctgtggccactgtgattttaacgtgcctttctctcctctctcaggtccagggcatgtccttcatagcagcagtgttgatcttgaacttagatactgcagatgcctttattgccttttctaaccttctgaataaaccctgtcaaatggcgttttttagagtggaccatggccttgtgagtatcctctgtgttcgggccctgggtactgtgtctttaaatgtcaagagttgcttactcgtctgtgttttcggtggaaaaaaagaatacattttctctctgtgaagagatgtttagagtaagcagcactgtaaggtggaggatgattttgagcagcgtattgcatggaagctgaaaaagacacggttagtagccgtatgtctgggtttcttaatacgttctctcagaaaaacattacctgtatttttgaaaatgtattcttttaatgaaggaagaagtgtggctcctgcttaaacttaacacacacttggtgtcaaagtcacagcttgatggcagtgcccacgtttgggcctgttgggtagaacatgtcgtaatcgagcggtgttgctgctcattgtcaccctgctttgtgaagtgtgcccacacccgggagaaaggagacacgctggagaccatactcctttattttttaaaaggcagccatttgtttagtggaccgctctagtctttatgacactgcgtaagtgggaggcggtgacagtggggggtggtgacagtg

SEQ ID NO: 110585 - DNA, 1053 bp, Homo sapiens
aaaataattagctgggcgtggtggcaggcgcctgtagtcccagctagtcgggagactgaggcaggagaatggcgtgaacctgggaggcagagcttgcagtgagccgagattgcgccactgcactccagcctgggcgacagagcgagaccccatctcaaaaaaaaaaaaaaaaaaagttgttggtaaatttggtagctattactgggactgtaaattggcacagtccttttggaagacaacttggtattaagtatcaatagctgtaaatagcattggtgtgcagttctgctcataagaatcacttctaagaaagtcataaatgtggacaaagcattatgcacaaagatagtcattacacacttatttacaattgtaaatgtgagaatagctgaaatgaggttaggagaatgcagaatggtaaattaaaatttggtaagtgatcagtagtgatgcttacaaagagctgcattgtgagaaagtgttcaagatgttaattcagtgtatgtaagataaaacgtaaactatagtgactgttgtatttaacaataaaaggaaatatgccacagaattactagtgtttatagttttttgaatgatggattaatagtgtttatgtgtttcctaagttatctacagtgagtgtttacaggtatgactttcataatcaggtaaaaacttacctttccaagaaaagtaatggtcagaaacagaaaataaatcttgaggaagcgttcttactcttgaaataactcattggcacagtatatactggccttacgttgcttgtgatattaattcctgaaaataattcctgcatgtaaatttaattttatctttttataaataaatacatgattcccatctaagtttctgctgattttgaagataagaccccagctttctctttggaaatgtggtagaaattgtgcctaggaatcatagcttgtattttgaaggagaaaccatagagtcataatgttgagtggggtcttcatgacagcagcagattttctccctggcagccccgttgaacttaggactgtgtgactctgc

SEQ ID NO: 110586 - DNA, 1111 bp, Homo sapiens
cctggactgttctcactccactgacctttgctatgaaggacgagggttttggaggttgaatcttgtagctgaagccacaaggcgctggtgacaggacagtgaacatggggccgtgagtggcgctggcggggatgctgggctggcctgcctggctatactgggtagaagtgtttagggcctgctttaaaggggacctttattcagcaaatggtgattttcttcacagctgtgaacacaaagctcctgcacaggctgccccaccgtgtgcatttgactgcgagccctgcccctcagattcctggctggggcccgcggtgctggaggacgggaggggatccaggcaggacctgagcctttagcttctcccttatctgttttagggcttctgattagtttcttaggattctaggccaaaagtcaatagtgtctttcaaacttttcccacctttacttgcaaaaggaaatgtgttttaaattgtgacccaatgtgtgcagaaacttaacacgtacgtatgctgggaacggtggtttcatgacccagtacctaaccctgaccatgtgaagcattctgaaatattgtactttgttctatttattccaaaaaatgctggtgataatctgctttcgttgccttcgtgatccactggctgttgtctgggtcatgcctggcagtgtgaaaagtacaggcctggagaatagtgttgtctgcttctgtcccagcctgaagatggttgtaatccatgtaggggcaaagacaaaaggcaccagcgttttttgactcgagtgcttctcacacatgctgtctttgaacccttggaacaacctctccaagcccagtgtaacacttgtgttttatagaggaaaaaaacaggctcagggcggggtgcactagctcacgcctgtaatcccagcactttgggaggcccaggcgggcagatcacatgaggtcaggagttcgagaccaacctggccaatgtggcgaaaccccgtctctactaaaatacaaaaattggctgggcatggtggcgcgtacctgtaatcccagctacttaggaggctgaggcacgagaatcatttgaacccaggaggcagaggttgcagtgagccgaga

SEQ ID NO: 110587 - DNA, 1093 bp, Homo sapiens
cacctttcccagagacacgtccacacccatcacagctgggcctgcctccacattatgggtctgcactgtgcctggcggggtataaagcatgctaagttccagggctcagcagctaactgcctgagcaagagagccttcctcctgctcgcggcaggggctgaggggcctgtgggtgtggccagctcagcgtcctgggtgggctgtgtgggtagcccattaaaatggctacactttgggtcagaaaaatctcctgtcctgccacactgcctgcccaccaaacctgctccccaccgccccagctccacccactctctgagggtcccctctgtcagctgctgccccagtggtaaagcttcaagagtcacctctgtgtccccagtgcctggccccatgcctggctcagtgtcctaggtcaaagaatgcgtctgtgcctgagggtcaccttcctcggtcccttttccagtgcaccctgtacgctgcctaaccagtggctcatgaggagtcagggctgagggttcgctgtccttccaacaccgccttcctggccgttctttaattgtggcttgccactcctcccgatgaggcatgtggatcagagcaggggcccttcagctgtctccgtcttcctacagagttttcagtgtttcgactgtcaagcatctacattttgtaggactgactttaggtcatttcacttctgaaaatatttcccattgccggccagtggcagaattatctagaggtgtgagtgagctttataataaataatcttgagctaacaaaagaatcggggactacattccatgttatggttagcgtttctgaaattatgtttaatgatccttggagatgctgtcattgcctggagtttccatctttttttgttgttgttgttgttgagatggagtctcgcactttcacccaggcttgagtgcagtggtggatctcggctcactgcaagctccgcctcccggattcacgccattctcctgcttcagcctcctgagtagctgggactgcaggcgcccgccaccacccccagctaatttttgtatttttagtagagatggggtttcactgtgttagccatgat

SEQ ID NO: 110588 - DNA, 1039 bp, Homo sapiens
tatgtctacaaataacttaaaaattagccggtgtggtggtgtgtgcctgtagtctcagctactcaggaggctgagctaggagggtcacctgagcccaggaggtctaggttgcagtgagccgtgattgtgcaactgcactctggcctgggcgacacagtgagaccctgtcttaacaaaaagaaaagagaagaattatgttattttgcattagttgaagttgtacttgaaattacttttttttttttttacttttaaaaacatacttttatttattacttttaaaaaaataccatttttgatctacaacgcaataatatgcagtggtcggaggcaaaacgtaaacatcttttgggagagaaaaacccttgaattctgtcttccgaccatgggaggagtactgagccgtctctgggaaggccaaggggcccttcccgtcctgcttctgtgagcctgagggcagcaggggaaggtggaccttgaaccaggagggccgtgtggacagtagcccccttgttccgaccggttctgatcccatggcagggcttctttggggccaggacagagcctggtgtcccccttcagtggcctgttcacggctggctttcaaatctaaatgtggtttaaaataaagcccacatttggaagctcctgataatgatgtgggagcacctctgagcagtccctgctggaggagagaatgggagaagaggagcctcagttcaagactgtggggcggggtctctgcccttgaggcacttccagcctggagcaggggacagaagtggcttaggacggtgcagagctcttggagtggagtccaggggctggagaggccatggggagccctgactggggcagagggcctgggagctgcttgctgagaggcctgccagagcctgcaaggcccaaaagatgcaggatggtatgcgaggcagagggaagtgtccaggagtgtcaggagcgtcccttcactgactcagtgtaaaggaaggtgaagaatgccagggcctcatgaaggagggtgcgtgcagtgcagcgt

SEQ ID NO: 110589 - DNA, 1030 bp, Homo sapiens
cacaggcatacccacacacacacagatcacccccatgcacacacattgcacacccagtcacccacaatcacacacatacacaatcaccccacacagttacccacacgcacagatcaccccccacacacacattgcccacccccccacacatagatcaccacttacacatcaccccacacacacccacacatacatgcacacatcacacacctacacattgcatacccacacacacacctacagatcaccccccacatacacctatcacagccccacacacacgtcaccccacacatcacacccacacgtacacattacacacccacacacctcacatgcacatacacacccacgtacaggtgcaggtcagtccctgcgcatccacatactgcacacccacatacacaggaaaggattaaacccagatcagccattttgatccttgcatattttagggactaggtaaaaactattggttaaaactgggtcagattatttgaccgtaggacattgttattaatgggatggtgataggagttagtctgatgatgggggtggggggcttgggcatcagtgacgtgctgtcagttttttgtttgttttttttttgagacggagtctccaccctgttgcccaggctggagtgcagtggcgcaatcttggctcactgcaacctctgcctcccgggttcaagcgattctcttgcctcagcctcccgagtagctgggattacaggcgcccgcctccatgcccagctaatttttgtatttttagtagagacggggtttcaccacgttgaccaggctggtctcaaattcctgacctcgcgatccacctacctcagcctcccaaagtgctgggattataggcgtgagccaccacacctggtccaggcatcagtaacttttatacagttcaggtctcatgggacttgtggtccatgcacatttctctcaaatcctgtgcttaaggttaagacactggtgagctttctttttctttttccttctttttttttttgagacagagt

SEQ ID NO: 110590 - DNA, 1006 bp, Homo sapiens
gagttctctgcttggcgtggagcctgttagtgttgctgcaattgctaagcagccacaatggcgtggaatatcttttaaaagaagggtgttggcctggcatggtggctcaagcactttgggaggccaaggcgggcgtatcatgaggtcaggagttcgagaccattctggccaatacggtgaaaccctgtctgtactaaaaatacaaaaattagccaggcgtggtggcacacctctgtattcccagctactcaggaggctgaggcagaagaatctcttgaacccgggggtcagagattacagtgagccgagatggcgccactccactccagcctgggtgacagagcgagactccatctcaaaaagaagaaaaagaaggatgttgaccaagaactgtgagaacagaggagggagcaggctctgggtgagctcaggaaggcaggcaagaggaaccagtgccttgaggccttctcaggtggcaggcttcctggtggaggaggaacagggtggcaggagtgcagcgggatgggcacagggcttattagcatcctagcgttcaggcctgggcttcctgggtggccactgcaggaccccagtgaggcccccagctgtgctttgacgtggattctgtggccggctggaaggagtgcagctagctcaccaggccagagagggcacgggcaggtgtccatgttggaaagaccacgaaggacgtaggagtggaagaccctggagggttggaggcagtggaagtggggagccgggggaccctgttaggaggctactgctgtctctgcttcgctgctgtcaggatctgtgtgcgtggtcacttaacctcagctgtcttccctgtgacttctaggtactgactgcattgcagaaagacagccgggaaatggagaagggaagtccgtccctccgacactgaggctgcagcgggaattcgcactcggcaccaatcagagccccatgccgcggcccctctgttgtttcagactgacacccgggc

SEQ ID NO: 110591 - DNA, 1001 bp, Homo sapiens
gaacaaaccacttcttacagccgtagtcccggctgatgtttacgtttacttcttgccttgaccactttgggagcctccttgttcgttattccccctccaccccattcccctattccacacaccataaccggagcgagctttggaagcacaaagcgcctcacaccggcctcagtggcttttacttcaattaaggcagctttagaagtgttgagcaatgagatctcatctgttacctcccttgatcgttttatatttcttctacctagagtgctctccctgtaaatcatggcccaggattgagctttccacttaaatatcagtgcctcagagggcccttcccttcaccatcccagcacttacctctacgttagctgctaaggaggcgcagagccttggtggcatatctgtgcgtatctcaggacattttcccgacagcccttggcagttggctttggacggaccagtttgacttcagagcctgtactcttaacttcactgtctgcactgccttccctgcggcactgtggaaaatacacagaacacaagacctggggaacaaaaacatctatgtggttttggaagaaaccaggctagaagtggagaggcctcttctaaaacaatactttccgaacgaatgtgcacacagagcacctggggagctggtgaaaatgcagattctgactcagctggtagaggaggcagagccaggacaggaagagaatggggctgggacttggtgcacagcgagcctggccaggctgcggtcagggcgttctcccgttgcaccagcgcgaggttacggtgaggcctgagagcctgcattgcaaccaggactcagggggtgcactggcccgtgaccacccacccccccggagtggtgaggcaccagtatttggtcgtgctgccatctccctggcagaacctcgttgcgttatcccccgggactttatttttcttcctctgaggctgttctgcagctctgagatgggtggtgctcttct

SEQ ID NO: 110592 - DNA, 1056 bp, Homo sapiens
acgatgacaaagggcagaagttagttccaccatcagggtgccagatttgggttccgcacagattctcttcacgtttttacaaaggctgacctagagtacttcctacagcaccgttacccaccctccccaaaggcattcagtcacacactgtcttatgagctgggctcaggggagagatgacaatgttgaagcaacaacacatgctgattctgtacatgagaaagtgaagacccagagaggcacaagctggcacaaggtcttggggtgagctggtggcagagctgaggccagaacccctggctgaggtttggactttgttctcattccccacctgcgaccagaggagcccacctggtactgccataaaccctgcactcaggggctgtctgaatgtcccaggagacagcagggcaggccaaggaatgcctgaactcgcctcattcagactagaaaacgggcttgtgccagggtgtgagaccaggccaagtccacggcactgcaggaggggacccagttctaccatgttgccacccgctggaaaagcaagggccaggacacctctgtgacgcttgtcctggccgcacacccatcctggccttcatgcgccgggggggctggcgtggccctttcctaggcagtgactgcagaagatgggcctgtggctcttcaagggagcaggccttcatttttagcaccttccacggttaagcagctggctgggagtctgccactggctgaaagcattcatcattcctacaagagggtaacccataaatacaaggtttaatgggaggaaactgtataactccctcaatcttttccttctgccgagaggcctcttcctcaaagtcaaccgctaaagccacttcagaaagtaactgcccaaagtgcgcactcattccctggccaccgcctctcagccacccagcccccacctgcctctgcccgcctgggtgtggaaccagcactgcagcgctgcctgcagcactgccagaggcccagctgaaaccagagggaccgccaccccatccaggctgatgactatgagctggcgtc

SEQ ID NO: 110593 - DNA, 1047 bp, Homo sapiens
ctgatggtggaactaacttctgccctttgtcatcgtaggaagatatggctgcccacgttggtgcttcccggactccccaagaggtgatggagcattacgtgagcatgtacatccacgggaacctggggaaggcctgcatccccgacaccatccccaaccgcgtgacagaccacacctgtcccagcggaggccccctctcacccagcctcaccaccccgctgcccccgctggacatctctgtggctgagcagcagcagctgggctacatgccgctgcgggatgattacgagatcgagtatgaccaggatgccgagacgctcatcagcgggctctctgtcaactatgatgacgacgacgtggagatcgagctgaagcgcgcccacgtggacatgtacgtgcggaagctgaaagagagacagcggcggaagaacatcgcccgtgactacaatctggtgccagccttcctggggaaggacaagaaggagaaggaaaaggcgctgaagcgcaagatcaccaaggaggagaaggagctgcgcctgaagctgaggccgctgtaccagttcatgtcatgcaaggagtttgatgacctttttgaaaacatgcacaaagaaaaaatgctccgggccaagatccgagaactgcagcggtaccggcgaaacgggatcaccaagatggaagagtcggcagagtacgaggcagcgcggcataaacgggagaagaggaaggagaacaaaaacctagccggctccaaacggggaaaggaggacggcaaagacagcgagttcgccgccattgagaaccttccaggcttcgagctcctgtcagatcgcgagaaggtgctctgcagctctttaaacttgagtccagcccgctacgtgactgtgaagactattataattaaagaccacctccagaagcggcaaggaatcccctccaaaagccgccttcctagctacctggacaaagtcctaaagaaaaggattttgaatttcctcacagaaagcggctggatctccagggacgcgtcttgaagctgagacgctttga

SEQ ID NO: 110594 - DNA, 1058 bp, Homo sapiens
acacacatttgcttcccccatgatccaatataagattgttactattgcttctttcagaggaccatgaaaagaatttctatcttaaaaaaaggaactcaatttgtttaaaaaagagcaacagtggggaagcggctcccctcccccaagtcattttggctggcacactgtctgagcatcaccctggctttcaaagcgtctcagcttcaagacgcgtccctggagatccagccgctttctgtgaggaaattcaaaatccttttctttaggactttgtccaggtagctaggaaggcggcttttggaggggattccttgccgcttctggaggtggtctttaattataatagtcttcacagtcacgtagcgggctggactcaagtttaaagagctgcagagcaccttctcgcgatctgacaggagctcgaagcctggaaggttctcaatggcggcgaactcgctgtctttgccgtcctcctttccccgtttggagccggctaggtttttgttctccttcctcttctcccgtttatgccgcgctgcctcgtactctgccgactcttccatcttggtgatcccgtttcgccggtaccgctgcagttctcggatcttggcccggagcattttttctttgtgcatgttttcaaaaaggtcatcaaactccttgcatgacatgaactggtacagcggcctcagcttcaggcgcagctccttctcctccttggtgatcttgcgcttcagcgccttttccttctccttcttgtccttccccaggaaggctggcaccagattgtagtcacgggcgatgttcttccgccgctgtctctctttcagcttccgcacgtacatgtccacgtgggcgcgcttcagctcgatctccacgtcgtcgtcatcatagttgacagagagcccgctgatgagcgtctcggcatcctggtcatactcgatctcgtaatcatcccgcagcggcatgtagcccagctgctgctgctcagccacagagatgtccagcgggggcagcggggtggtgaggctgggtgagagggggcctccgctgggaca

SEQ ID NO: 110595 - DNA, 1051 bp, Homo sapiens
cctggaggcctcgtgaaaacagctcgctgcaccctgccgcacaccattttgattcaggaggccaggtggggcctgcgcgtctgcattctaacaaacaagttgctgctgctgggccaggagccccaccttgagaaccactggggctaagacaactgtaaaaacttagcaccatctccatcactgttcagtggtagacagcataagctttctgtcatccgcatttattctgcaggggacaatgtggaggtggccctcatgataccactgctcagtactttattgtcaaaagagaagttctgggcttagctaaaagagcgcttctctgtcagcatgcagtatagtttacaactaaagccatatacaatatatttgaaatgttttatttaatgctgaaaattttaccctaagggacagtaggatgtgtaaaaagaaaggaaaaggcacagtaattaagtcatccttagaaatgatgaggttttctttctttcaaataacttcactttaatgtaacttcaagcccaaacattctgggaggtaaacagtctcttggtacctacggggcccgagaggcaagtcaacctccttgaagaacggagcgctggagtctgagcacgccaaagactctctttaaagcagggtcttggaccagagaaccctgagcagctggaagacaaaagacttcctcaagtttcaggaggaaggtaccgtggacatccttgaaagaggaccccagagaaaaacttgtaggcagggctgggaagaagccatttctgagtctgattcaagacagtgacagagagcagctcgaggctcagggcaccacccgggctccctcgtgctccaccagaaccaccgccagccaactggtcagacggctcttgcctggctagtctgaggcctcagctggcgcgggcctggcgacactcttacagatgcctactagccaggcgggcatgctcatattttcagtggaaaggtacttgcaactgaagaaaatcctgaggaagctgacgccagaattcagaactcttagccttgaactttgtacaat

SEQ ID NO: 110596 - DNA, 1065 bp, Homo sapiens
ctgaggcgattgatttgacaagttactaaatagcctccacatcaggtcagcagtgctcagtttggaattgccctgtgcggttggtatggagtgcaaatgatcttctttaacttcatccaggcattcaagccttctgcaaggacttgttggaggtggcagacgttctggagaaggcaacacagtgtgttccaaaagaagaaattaaagacgataaccctcacctgaagaacctctatgaggggctggtcatgactgaagtccagatccagaaggtgttcacaaagcatggcttgctcaagttgaaccctgtcggagccaagttcgacccttatgaacatgaggccttgttccacacaccggttgaggggaaggagccaggcacagtggccctagttagcaaagtggggtacaagctgcatgggcgcactctgagacccgccctggtgggggtggtgaaggaagcttagctgctgttgatggggtgggtgtttttaaactcacttgatgtaactctcaaggctggttcattgtttctcatctatgagtacgtgtgaccttttcccaaaccttattggaaaccttaagtaaccagtggctaaacagaaaagccggttgcccaactgcattaatgaactctaattcgggagtctgttcccttttagtgccacgcgttgaatagttccacatactttcagaagagctcagcagggccctgcctggtctcccgagcatcatgagtaacgtgtctgctcagactctgctgacaccaaagtattttaaacaaataaaaggtcttggggaattctgtttggctacctgggcacgccagtctgcaccatgtgtccctgcggcgcatgagtgactggcgtatttagcccgtcacatttcattcgctgaaggaaaggcaagagagttgaaacatttttcttacttaaaaaaaatgatctttgtgaagaacatagtgagttcgtttgtcttcagtcaacagcggctgaaactgaccactgagaaatgggtgtgggcactgacagttctcccccattatttggccaggaattgagcttg

SEQ ID NO: 110597 - DNA, 1038 bp, Homo sapiens
gctactaaaaatacaaaaattagccgggtgtggtgacgagcaactggggaggttgaggtgggagtatcccttgaacccacgagacggaggttgcactgcacttcagtttgggtgacagagcaagactctctctctcaaaaaaaaagaaatacatatagatatagatagatgtatagatagatagatatatagagagagaccaatcctgtctctaaaaaaatatatatatgtttatcttagatctaataaaggcacattgtatatgacttacagcttttatatttactaatatagcttctatatgtcacgtacagtgtgcctttattagatctaacagaaatgttttctccccaagtaatagtaaatagtttgaagctattttaagtttctaaagtcatacatctgactttaataagcacaaaaactaagtcttcgtttctcacgtgtggacttccctgtaggccatctccccggttgttgtgcacagccacgaaacaaaagaacagtggccagaacctggaagaggacatgggtcagagtgaacagaaggcagatcctcctgctacagagaagaccctcctggaagagaaggtcaagttggaggaacagctgaaggagactgtggtgaggactgtgaggctcctgtgggggcgggctcggctgaactgtttctctcctgggccacataaaggttccaggtttcattggtgacagactaaagccagagttaagccgttgtccatggcctgcagtgggcccaggtggcaagttactgccaaagcaaagactaaaacccaaatcctgtgcaactctggttctggcaagagactaatctttacacgctgttatttgtcattgaatgaaaacttaaaatcatctttacaaatgaggaatgctcagtatggttgtttaggctgggacttaggagaggaagcagaaaattgcaagtacaagagttgggagcaggagtgtggttttatgtgatgctctcataggcaggtaggagttttatgaactagtaacatggattattactcc

SEQ ID NO: 110598 - DNA, 1104 bp, Homo sapiens
taagggtaaccgtttgccttccaagttcaagcccatttctcttcctcctctgcttttaggcacttttcccaattgactacctcattgaccagttaagtaattcaatttgcactctgtaaaaataaagcactcaataaaaaccctatgtttttctcaattattcccatcaataccacttaaccccagccaagtttattttctgatttttcatttgaccatcaaataggccttctgggcatccactttgagtcctgcagcagctatgacgtcaggcggctgctgtgtacctggctgtgggttaggctccttgggtggaccaaggacacacacccaggggttttctggctttgaggaccccaaactggcacaggggctcttagctctctctgtgccctagactcctgcccatcccaatcctggagaagctgatgaaactttctcagaatgaggattttataattagcataaaacaaagtatagatccagaggaaaccaatttcatggcaatgaagttatcaaaatacagttttagtatttcttcagtaacacttccgtaagaactagcagcaggtgtgatgatttccatagttttgaagttgtgctgagtgtaagccatactttgagatcgataacaactgtgatctggtcttggagatagctgtgatttctgttggtgacactcaggtactgatgatacatttgtgacttgttgcctacttcataatggaggaaatgcctaatttcagctggggctggttgaaaacaaagaggccattgtttctgcatccaagttcatgggttcctgaagaaacagcaggcagagagaatcaggagcatgtagaaataatgccctgaggccggacgcggtggctcacgcccggaatcccagcactttgggaggcagaggcgggtggatcacgtgaggtcaggaagtttgagaccagtctgggcaacatggtgaaaccccgtctctactaaaaatacaaagaaattagctgggcatggtggcagacgcctataatcccagctacccgggaggctgaggcaggagaattgcttgaacctgggatgtggaggttgcagtgagctgagatcacgccactg

SEQ ID NO: 110599 - DNA, 1075 bp, Homo sapiens
gctctgctgcctcctggcttcatgtggccctgcaagctgcagacctcgtgaaacttcatctttctcttccctaggagggaaaggacactgaactggccttgttgtagatgggagcacatcacatgtggaggtcttgccccggtgccggacagccagcatatgctcagatgccccctcctcagctggctctgtcaccctgtccttcagcgcccgagagcacgccccgcccccgtctgtgaggacttgctgctgtgccgctcaccttgggccttgcttgtcttcatatctttgtatcccagggctcggactccatcccagcttctggatggcctggcccattctggggtcttgagatacttgtggcctctggggtgggaggacttgggaggctgtgtagagagtcaggccaggcacctctctctttaggaagctaccagcatccccttccggaaacggtccctgccgggaccccagcgtgaggctggcttctgtggccggctccatggtgctgaagcctatccccttcgtagactgtttttggtgggtgggctcgtccccttctcgactgcatgtttggagcagtcaggcacagagttcctgaagtgcaggtgctgatctttgaattttgagatcacttccaatctgtttttttttttttaatcttttcactcacctccctgctgtggggtcgggtttttggcatgatcagagaagggacgaagaccaggcagaacctaccgaccaaccatgagtttttgttgacatcatggattgctgacatctacagggctttggcccaaatttgtgtttgccccagagagcattttgggaggtgttcttggagcgactcacgtatttagcagtgagctatggctctgggccagatcctctgccgggggaaggggtgaagtccatggttgggaccgagcatggtccatgtcctggtgaggttacagccctctgggacgggagcagatggtgacttgggggccccagggcaagagcccatgtcggggaggctatgaaggatgcatgtgtgatgggggcctctgactggggtggcatcagggagggt

SEQ ID NO: 110600 - DNA, 1138 bp, Homo sapiens
tggattcagacattataatcaccacaccaggtgcgtgtcctagctgtgtgactttggtcaagttacttaacctctctggacctccaattcctcatctgtaataaagaagatgatgacctttccgtgccagtgtcctgtgagaattgaagacagaatctgtgaagtgcctggcctgccaaaagccttctggaacagtagtgatgatcactgtcatcgtgtgtgaccctgggctgtgtgcctgtcttgtctcattctcagttttctcatctgtgaaaggacagaatttgactagtctattttttaaggtccttgttctttattcgattttattcctctttccgggtgtacactacttttttagtaattataatatttgaagcccaatgctttaatcagactttggcaaaaataactgatcaccttaagaagacaaatgttccagagattggagaattccattcgtggcctgagaaaggctggcttctgtgttaggccagggtatgaggatagctcagggggtgggaaccctgagagcttgtgtctggcactgtagggatggggacttgatgagccattggattaggccagcagggttttagccagaagtatcatgggccccttgatttttactgtaagtcagtttggcactggtatgtgggattatgcagtttgtatcagtcaggataggtagatagtgctgcagtaacaaacagccccaaatctcagtggcttaaaagaatcatattctattatctcatggttatatgggttaactggatcccctgaatagttcttgcttgcttgtgttcagatggtggctgggactggagtcctttgaggctcaaccgggctgggtgtccaagctggtttcttcactgacattttaagtacctgggctggaatggctggaagagcttgggactggctggtgtcactctctctcctgcagcctcttcatgtggcttgggcttcctcacagcatggtggtcccaagagtgactgttccaagagtggaagtggaaaaaaaagtggaagccacctatgtcttaaggctgaaaccagaagctggcacagtgtcccttcagctgtcttctgtgggccgagaagttgcagagcaagcccaggttcaaggggaggg

SEQ ID NO: 110601 - DNA, 1021 bp, Homo sapiens
ctggtgtggtttcaagtcagccagcttattccagagacatttcgttgtgagtattaataaaaacaacatgcatttttgtatgtttccatagagactttccaagatttatgtccctgagacatatcgttggatcctgtggaataactacgttcccagcgtcccgtgatattctgcaggtctccccggctgagaggcagatgttgaggccatttgtgtatgaacaagaaaaggacagactcaaccggccttggggtctttcatgtattcggggagtgcgaggtgtcagggtacaaagaggcgaggccgaggaacagctgggcaggcagcgcttttgcggctgcagttggggctgcttgaaagtggactgtgtctgccaagaacagtgggttccctttcactttgttacttaataggagaaacccaggctttcgctgaaggcgagaagaacggggccttttaatatggactcgttgccggaaccgccacgacaccagggcaggctggccagtgggcgcagggccagccaccagaggcaacgaggaattctggtgaggacgctggagtgggcattaggagggtagaattcttgtccctgtctgccaccaaagactgggtgacttgggctaagacagagctctgtgggtcccagtatccttgtctgtaaaatgggtgcattgggataatagcctttgatttgcaggtgactgaagcccaattcaaagtagcatgagaagaaaagaggactatatatgactttgcatcatggaaagtttcaagggtagtggccagcttcaggtgtggcttgttccaggggctcaaacaatgccttctgagctctgcctcttttcttgctctctggtctctgctaagggatttgctctggaggtagtaaggagtcatcataaaattttattagggaattgaacaaattttttaaattaaaacaaatatacatacgaatattcaaaacgtggagagagggttggggggaccaggactgattttcaccttgtccagttgt

SEQ ID NO: 110602 - DNA, 1082 bp, Homo sapiens
aggcaggaagaaggggatggggaggtgagaagtcctccagagacaaggttttttaaaaagcgatcccagaacccccaccatgtgactttgcttatgtcttgttggtcgcagctggatcacatggccacctctacagctcctttggagtccaggaagcaggtgtctcagctgagcacattgcatccgggacagaattgggtttgggtggcaaggagaaaggggaaagcagggactgggcatcccacattctgggggcaggacctaatgatgacagcggccagtacttatgacacacacccctctggctgagcctcctctaaacgtatggtgccagtcatatcacttgcaaggtggaaaagggtctgggaaggcctcgagtcactcaactccctgacccctgcagtaccaccctcagcagtgagcccctcacccctggcctgagtcatgttgcagagctgagatactacctggcatctggggggcctcagcacttgtggaggctggggagtcgccaaggaggcccgaggcaggagagtgggagggcagggtcttccagagagagggtgagcaggggctctgggggaggaaactgcaggaactgaggggccagtgtggctgggagggagggcatgctggggccaggtgtgggcaggatgggcccgggtggggcagggcagagctcaggggccggcagtgcatgggtttagagcaaaccgcaagactctgggggctggccaggagggtggtccgtgcttctcacccccttctctttttttggaatgttcctatgatggttgaactttttcattgaacatgtgttacttttataacacaaaagaaataatagagtgatttgacttttgaaaataaaggctctacatacttccccaaatgtctttgcaccagacagcgactctttattagctccaccttcacaagccctgagtgaccgtgcaattcatcacccaaaccaggatgcttctgagaggggctgggggtgcgggagggattggcattgtgccggtctgacaggcgtcagccaggactgttgcaggcatggagggcccttcctcacctaaacc

SEQ ID NO: 110603 - DNA, 1053 bp, Homo sapiens
gaagcggctgagggtgggtgctgacaactgttctgtaagcactgagggagaacagggcttcaatggggtccacaggggcagactgagaagctgtgagtggtgtgtttgttcatgagtgtgtgtgcccatgagtttgtgcatgagtgtgtgtgtgcatggtgtgtgtatgagtgtgcatgcacaggcctggtgtgtgcatgagtgtgtgtgcttggtgtgtgtatgagtgagtgtatgtgcatgggtttgtgtatatgtctgtgcatgagtgtgtgtgcatgagtgtgcatgcatggggtggtatgtgtacacagtgtgtgtctgagtgtgtgtgcgcaggcctgtgtgtgtgcacagagtgggaggtaggctcctgcccactgtctttttctagaggccatctttggctccctatggaccctctgtttgtgctgctggcatagtcaggatgcctggaaccctgttccaagtcagaggtgttgggagcctccagctgctttcatccctctccctctcaggggcactttcttgactccaccccaggccgagtccctgcgtgaaactcctttagggatcagtgttttccactccaggatggaggtcagtgcccggtggggcctcaaggcagtaggagcacccccaccaccgcctccaaccccctgccccttctgctgctccagcctggctggctaccttgggctttgttgagcagcttctcctctggtcacctttccagggggcagctggggacttttctggcctgtgtgtttggggtgggggtagatgggctccgtatttggggtggacacctgctcttcttccgatgccaggttgacccttacatgaaacccatccccttcctgggtttctagagcggtgtcagactggcctgttacactgagcactggtgggtttggtaacttgaatgaagggcgtgaccagttggagttgatattgcagacatgccagcaacctcagggcagttcctaaaggtgcccactggccacccacagctccttgcccaccccacacatctcttcttcactccccctc

SEQ ID NO: 110604 - DNA, 1086 bp, Homo sapiens
agtgggtgcccaggcctgagagtgggagcagagggggcggtgaggatgaaggaggagcctcgtggtggccatgccccctctgtcctgggccctggcatgcagctgctgtctctggacacaatgtgctccctctatctgcctcctggcccagcccagctgcacttgctgagcctgctctcactttcccggggcctcatgcactggggcctaaggtgtaccgcgtcccgctgcacgggaaggccagagttggcctcatctccgctctaccaggggcctggcagggctggcaaagtagatggtgcccagggggttcactgggtgaatactgttgattgactcacacagaacagaagtcggaaatgcaggaggaggggcgcagacaccctgagaggccgggacagcccaacccccttgtccagccgctcaagagtctcagcccctaagccgtccctgggctgcacacactccgtggactacaagcttggcaaagagatttccttctcgggagagtttgtgctttggattcaaatgggggaggacctattctgactttcaaatgaggtgctgagaggaggggctgaaattccagtgccctctgcagagatgattggggcctcaagagcactgaccagctgcggctcctcagcccctgcctgcctagagcctgcctccccacccccatccagactgtttcagtttctgctgaaatctactagggccttgaggacggccctgcccgttttttatctttttctgtattccagtagctctagttcccagttctgccctcaatgggtgttatcacacataggaaatgcctttatgaactgtgcattattacataagtatcactcagcaatggggtcaaatattatttatgtattaataaccgccagttttgcaaatggccttaggtagcttacttgtgtacttacacttcactaagataacaaatagttgagggaattagcacaaagagcacataatgatagcaaaagaacaaaactgaatgtaagatgaggagcatcctagcagccaaagtgaaaaggagaactggattggttacagtagtcctgcgacccagag

SEQ ID NO: 110605 - DNA, 1047 bp, Homo sapiens
tttcctttcaaaccgagggcggttttgtcacttccccagtcgatgctgctggtggcagcgtggggtgctggttgagcccacagaagctggcggcagctcctggatttgactctggctctgctgagcgccctggcctggaaggagtctctcaacctctccgtgagatgggagggcagaaggcagtggggatgtgggtggcgcacaggaccttgggctgcagacgaggctgtcatcctgctgctgagtgcacgcaccaagctcatctgcatcatctccccaggtccccaggcccccttgggtggggcgggtgttggccccatctgcagatgaggaggtgcagggcactggggagtaggtggggggcttttcatcttggctctttccctctggacaaaggcacttcaggtgtggctccaacacctgccagccaggcagcgcgcttcacctccatgagcctcagtgtctgcgtctgttaagtgggggtgattgctttgaggtttaaattaaatgttggcaaaaacctacctcccgtggtgcccagcacatcacagacccctaggaaataatgaatgaatgaatgaatgaagcaggcaagaaggaacagctggaaaagctaactggttatctttattcctgaaaggagaaatttggggaaaactgttggtctcacacagctgcagggcactcggggctttcactgggcaccctaagggcctaaatggggctgggggcagctccgtggaactcaatggttttaactctatggatctggactgtactttgctgcgaggtaatgagttcactataccttggggacatgcacggcgctctggaaggccccttggcagggcttttccaggcctggcccttctcagatgagggaatcaagtgactatgaaatttccctgcagcctgagctctgggaccttccctccccccacgcccaccctccggtcttcttgctcttcaggcacagagacacccgttaccatcctctaagcatctgttgagcaccagacataggcagtgataacccagcgggatcca

SEQ ID NO: 110606 - DNA, 1108 bp, Homo sapiens
cttccataattgttataattcctctggcccagaggcctgtttcaaagctgttgctcctgggcctccaaggctctgtggacggcagtactgtggaaggcacgtggtcgtgctggggccgtgaagccatacccgcaccagggagctgttggtctttacagtaaaccccaggatacccagcaaccccctgacacacttctggcagggcagagcctgccaggggaactgcacctcttggccaagacgggctcttccattctgcctggaaattcacacagatgtggtatcacctgccatttcgccgtggcctggatgtgaactgtggcccgtgagggtggggacaggagggctgctttcctaatagagaaaaccagcccatggagcgctgccctttttctcacccctccgtgtgcacagctactcttgggtaggaaccaaggctttctctttgagaaatggccatctgtgggacaggaggcaccagtatgagtgacaagacagcttgatccaaggatgtgcacaggaaggaggactcctgactgcagtgcaacagctggtgtaggaaagttgtatgagtcagccacagctgcgtaacaaagtaccacgggcagttctggaggccggaagcctgagatcgaggtgcctgcaaggttggctgggttcatctgcagctgggtgggggcaactgtcccaggctgctctgcaacttctgggggctgctggccatccttggcgtgcatggcctgtagatgccccaccctggtctctgcctgcatcttcacacggtgttctcccggatagcgtctctgtggccatttttgtcaggacacccagtcatattgggctcaccaaatgacctcattttaccttgatcccttctgtaaaggccctatctccaaataagggcacattcgtaggtcctgggggttaggacttcaacataggaattttggggagcacagttcaacccataagagggagaaagcgaagaaccagctcagacgtgttcatatttgcaaatcctgggtttgggaagtcctgggaggagtgtctcctaaaagggagggtctccaggaagatgtcaagggagaaggccccaacccaggctctg

SEQ ID NO: 110607 - DNA, 1058 bp, Homo sapiens
aatgatcattctgacactccctgtgtgccggccctggtgaggctcaggagatggaggtgtctgaggctgacgcagttcctcccctcctggggtgcacagggtggtcagggaaggcttctaggaggtggtggccttgagaatgagcaggagggaggcagtggagaagtgagaaaggggagagcatagcgatccaagtatgcaaatgcctgcggggtgggtgacagagtcaaggccggagctcatggccaagggggtgtgtttggagtgcagtccgcggtagtgagagtggagggaaccagactgctgagggatgggaggagccccggcttcctgatgaggctgaaggacagtgagcaggggtgcgggcctccctcctggggatgccttgccagggtagcccctcaaatgtgagcgacgaaatgaagcttctgcaggcctggggtggggctgcctgtgggtctgcatttccaggagctcccgggaagctgcatggccagtccccactgtgagggggaggcccacggctgtgcagcttagccagggagacctcagtgacactgcgggctttcaggggccttggacactgaccttaagttctccctttttcaatggggtattgattttggagttggcaatcaacactaagttcttgcagtcttttagtagtagtatttggtgctttatgtgtattgattgacaactgaattgggcctgagtctgtctgtctttttgatgattcttgagcctccgaaaggcagccatgtgtcaggctgcttcacaatcatttcccactggctgtgtggaagactcagtgtcctaagttggaggtgctcagaacgtttcttgcttcttgtcttaagaggggcacatttgaagaggcgatgccgagtgctcctgaagagcaaacctggtaaagacgaagcttgggggaactgggcgctcatgcagggccagggttcaggctggctcagaaaacctcagtgtgtgtctctccaaagggattattgcgcgtctctccgtaaggagcttgtacccggggccattgccgtgctgctgaa

SEQ ID NO: 110608 - DNA, 1050 bp, Homo sapiens
tgtgaggtgactcactgctccacaccttggagtcatcagactttccatgtttgcactcaagtgggtgtgagattacagcttaatcttgttattttgcatctccctcatacctggtaagatggaacatatttttctgtgtttattgactttttgggtctcgtcctctgtgactcacctgctcatatctcgtgcctgtctttttacattgggttgcttaactttttcttgacccgtacctctctactctaaaaagcccatgtcatttccaggccccttaattttaagatgtgccctccaaatgtgtcttgaactcctgccaggtaccattcattctttcccaacaccttctaaggaggtttcctcctaagaatgttttgccataccacattcatgtctcgaagtgcaattgttagaatagcaattctgatggatggtgtattagtcagctatatggcaataacgaacccagtggcatgcactcagcatttattctcacatcactgtgttgactgtggtttggttactttggccaaggcttggctgggtgttcaggctgttggctgatgggcttgggtctgcttcatatctgtttatactgggactcgagctgacaggaacaggactgaggccaccaggacatgttcttcttatgcagaacaccagagctcaggaaccaagctcaaccacacaagcacattttaagacttctgctcaactcacatttgctagggttccatttgccaagccatggtcaggttcaacctcagtggggcagggggagtacagtttgaggaggttggtggggtggagggaagggaatgcttcctgaatggtaatttaaggtatttcaagtaatagctgattccagagaatacatatggtgtggtcatatttgataaatatattttagggaagaaagtttcagatttctttacggtaggatttatcagcgtctctgatacactaatacacattatacttctccaggagaaggttacacaacatttcttaatctcatttaattccataatctttaatttttctttaaat

SEQ ID NO: 110609 - DNA, 1043 bp, Homo sapiens
gcttggtagtccttcctcccttgtctctgatgtcctcagggatatttctcccttcagcacttgagttgttttctatggatcatggcaggaacagtctcccgccagagaacccaagatgatggggaagctggttgtccacctcaatcccactttttccagggcagaaacagtgagttggtggtaagttttctgcaggctcagtgccaggcaggatggggacagaggcatcaaggatgtggaagtccaattttcttaccatctgctctgagtcttttcacttctctgtggctctgggaacagtctcatcttcacatttgcattctgaaatattgctggtgatcatctcagtgttgtatatttgtttttggttttctgtgggtgggagtgaagccaggttgcttctatgctaccattttggaaccggaagtctccttgtttttttctgtcttttaatgtatagaattttaacatatgttgtgaatgcagtctgaggaatttgagcagtgaagcccaacagcaatgcagcgtcctctgacgctcactgatataaagaagcatcaaagtccttctctgcagaggccaatgatggccctgggggacatccccatggtgtgaccatgctgaaattgacaaagccttctgcagagtgtcttaccagcctatgggctgtcctgggtatcacagcattcctctctgtgcccccataatgttggagcaaacaaagagctgtcatgctgattaggctgttcttggtagataacgctgagagttcatagccagttttcagatgggaaaatttaagaggtgatatgctttgccctttggtcatccagaaagagggggacttcagagagaaacagtcttacactgtaaggggaactctacccttaaggtgatgacaagcatggaaagtcctctgtgcacatagacaggccttcgtttcaattctggctccatatttcccttcttggtgacctctctgggtctcctctgtaaaatgagcctaaacattcagacctcattgtagacctcatgggctctta

SEQ ID NO: 110610 - DNA, 1050 bp, Homo sapiens
cgaccttgagatgctcacttcccttgtcgacccccacctcctcatctgtgaactgaagtgggaggggttgaaccacaccggtgcagtccagcctggtcggtgccccctttgctacttttcctccatgagccctgcatttcggaaaaccaagtccaccatcttgtacgggttaatcgtcacccacctaacgtggtcagacacgccacctgggttcagcatgtcagaacctgtgcctccgtcaccatccattctctgaccttctcctgtcactgccctcttgagtgggccacctgggctgatttgtctcagagcccagctcagcctcctcgggccatgccgttctctgggacaaggggcccccaggctgggggaatgtgctgcccggagcctgcagcctcctctaggtcctggatgccctgcccgcttctacagcctgggcaggcccctcccgtggccttcctttccgtggacactgcccgtgggcccacaatggctgcctagggagagaggtgtgtggaccgggctggtgtgtaggggctggggtctacactcaagtttgagaccccctgctgtgcaagtcagagctgggggcagaggtggggtggtcccaggcccccttggtgctcctgccctaatccccttgtgtgtgagtgctgggctaggttgccatccaggccatctctcagacccacacactccttagtgtctccctcatctcatccacctgcaattcctccaggatgtcccggaacagggacctcctctcccatcctgtggcaccgccgtctctcgcctggacgccacaacccaggtctccctgcgcctgcccttgtccccgagagtccgttccaacaccaaagtgaacttcagagagcacagaggcctcgtcactgcctgctaataactgacccagggcttctcagcacacccggaggtccatgcagcctccagggcaccccgcggggatccgcagaccacggcccctctccatggccagatctctaaaggccctagtatgtacccgccccagcacctgccacccctccccta

SEQ ID NO: 110611 - DNA, 1006 bp, Homo sapiens
aattattcaccaaaaaaaaaaaagagacagagagagagaacatcgttgggtatatttgtatctggtttgaagtttctaacaacacatcacttctaagaaaagccccaagccaaaacaaacaaacaaacaaacaaacaaaacaaaaacaacaacaacaaagcagctggaccaccaagcccttttccaggctcccacagcccctctgcatctggtgtggccgagaaagcccgaggggcagcatccataggtgttctgggacgtcccaggcctccgccttacgatggcatctgaagaatgcccagcatgtgtctggctgaaggtgcaggtacttgctcggctctggcagcccggcgggagccctctccctcctcccaggcagagatgctcctctgtgcggcgcagtcaccacctctgggaaatccatgctcaacatctgtcttgatttcccatccttgctgggatgggtctcccaaacttctaggcccagtagggccagctgctcttctcctgggctggtatctcctctcccacagctggacagttacagcaccctccgctgaaaagccttttccagcctgaacgcggcggctatggagtcatttggatggactccttaagcctcagtctcagtgctgaatggtggtgctgccgtcagcaccagtgggcccgtcccttgctcctcctgcctctctgcctttagaccccaaggcagccactccccacgagcacttgcagagcacctcctgtgttccgggcttggttccgggcacaggggatggaggtgactgagaccctgccacaggcctccacagctttggtggcggatgagtgagtggaggggtcagagggcccctatgggggtggggcagggccgtgctcatgacctgggtgtgcagctgggcctgtggggtcatggccagtgagctccgttcatcacgggcaaccatctagtggagacgcatgtgctcagtgggtctgtgggagcagctggtacccaggcccaagg

SEQ ID NO: 110612 - DNA, 1054 bp, Homo sapiens
actcatgtgtgcggctcccagatgtgtgagcacctgctgcgtgcagatgctgggccagctgcaaggacactgcagggtcatgcccaggggctctcctggagggggcacagtgtcttaggggggccaaacagcaggagcagaaaccacaggagcacttgaacccagatggaaaccccccccggaggctttctgccagagggggcaccggggcgaggtggaggcaccagggtaaggtggaggctgttgtagcagctctgggatctgcgccttccctgagaataaaaacacggcacacggcatttggagaacgcttgtggtttatacagcgcttgcaccgccagactctcctgggtgccccgctgggcccctgagatgggttttctggtcccagcagactcatgaatgccggtctcgggggaaaggggctccagaacgtctctgtgaattgtctcaacattcttgtgaggcaggtatgatcatccccattctacagattagaaaactgaggctcagacagctggagggctgtgttcaccgtctttgccctcgctgctccacatcccggtggccaccccagactcctccggcttttcccgggagcttttgcctggcatattttgctctcctgactttgagcacaccccaagactttccttctgctcattaccagggcagcggagggtctggggtgcaaggagagagagggaccctgtagtggctgagacatggggggggactgctccgaagcccagcagcccttggagaatgtgaccaaagccccagacctctccccggaaatgtccagggatacgtgcttgtcatacacacctttggcagccacccccagggactccaggttgagaagctctggcctgagcgagacccagactcccacccccggctgttggcaagaggtaatgaccctactagtgatgggccctcgaagcctccgtccacccctgcctccgctcaccccggccatgaccccagcctggctcacagccagatgtccatccagcagaaggtaaaggggcacctgagcccatgggcaggc

SEQ ID NO: 110613 - DNA, 1271 bp, Homo sapiens
gccatgccaccccaacccctctggggcattggtgcacggatcaggggacagcctgggaagctcagagaagacaagcctggagccactgcgtggcccaacactgagttttctgatgttgctataatcttgggcgagttacttaatgttccttgggactcagtttcctggtcagcgaaatgggaaggtgtcctcctgttctgaagtgatagtaaggtctcggtgaggttcccttcactctgtcctctgctggtgtccagagcatggtgggcaatgatctcgctaactcctccccaaacagctttcgtgctgaagggcatcctgctctctccctgtatctctgtgggtcgtgggttcagatcctgctgccttcgctgctgcgtatttgggtgacttgcctggcagggtctcctcgtccctaacactgggcaccccctccggcaccgggctgcacttccttcccctctgttcacccacctcgctggcgcctgatgccccctttcacactcagaatctggagcgccttctggaattttattgaacaacttcactgtcccacaattgccctgtgtcaccttagttccctcttcctctctgatcctgggagggtttgttagaaagtctgggtacctcttcgcgggttctgtggagccatcgggtcctgggcgccacagcggtctgtgtgtcttctcatctcacagcacagacctagcctgaactggaacgtgaccgaagctcagaatgaattcccctgggaaaacacatctgcagcacctgtcacctctgctgagactgaggttccagtctggggttccctttgggcaagtccctttcccactgggcctcagtttccccatatataaagtgcaggtgtgaatacatgtaccctcaagaggggttctggggtccactcaaggggccttgcagctgccaagtgcagaacaggtgctggcactcagcctcgcagctgttagggacacagcggctgcgtcttcaagcaaggggtggtccatgccgtaagcaggggacaagctggagcacaccggcttcccttcagtggcacagtgacacaggcagtgccacctgcccaccactctgttcctgcttcgtgcatgttctacacacacctctggaatcctcaggacaggcacaggaggtccgcttcattaaccctttgttcagatagaaaaaaatcctaagtctcagaaaggtgtaaaccttgcccaaggccagagcttgcaggcgggtgctgcctttcacacctgcgcgtgtga

SEQ ID NO: 110614 - DNA, 1053 bp, Homo sapiens
aatagaggattgacccgggtgactctgattgggaaaagatcactttgtttacaggggcagttgcatgagtgtgtgccttgccaggtctgcctctctgttattggataatggataggttttgcaggaagacgtgaatactattaggactccatttagcaacaattacaggccgagcagcactttatagcttcttggagaccactttgcaacctgtcttagggaatgaattcccttttatttttgtctcgcctgcagcagaatcagcagtccctggccttgctgctcctggccaggcagcctactattgtcatggctggacccaaggccctgggggccctgacgacccccacacatcccctgcaatgctcagatcagcttcgggccgacagcaggtttccttcccacttggccccaggagccctgtggcatggggaagtgtgaaggcacggcccagaggagctggcccaggcatggaatttcttccaagcattgtgttttatatgaaaaatttatgtgaatgggcatcttactccattatatatcagtgttggcttgaatattaaaatcacacacacacacacacacacacattttcaccaaaaaatctttatgtcaagctggtgatctgggagaaggccaagtcctgggacaccctggcccacccaccatatcacccgggcccttgaccccagatatgagaagcacagggttaggacaaaatctccctgagttcacctcttccctcattccgctcactcgcccgtgtcttcgtaggggaactgccacgtgttagtaagcactcaggactgagcaatgaatcaagtgaaaattttgtttttaagaagctcaaagtattgcggaaagtgaaaacctccacttggcagaggcggtgtggtcatgataaagcatggccctgtgtcctgaaggccttttatgaaagttcagccctgttctctaatctctacagcagccctgcagggtaaggatgctcatgggccattgcacaggtgaaagaaattgaggcccagagaggccaagttgtttcccccaggc

SEQ ID NO: 110615 - DNA, 1043 bp, Homo sapiens
aggtttgggagggacttcgggcatagaacatatggtatttggtggctggttgttagcgatgataccaacagcagcagtagtgagaataacgacctttataggcatgccctcttggctgagacccgttttttttgtttgtttgtttgttttgttttgagacagagtctcgctctgtggcccaggttggtgtgcagtggcacgatctcggctcattgcaacctctacctcccgggttcaagcgattcttctgcctcagcctcccaagtagctgggactataggcgcctgccaccatgcccggctaacttttgtatttttagtaaagaaggggtttcaccatattggccaggcttgtctcgaactcctgacctcatgatctgcccacctcagcctcccaaagtgctgggattacaggcgtgagccaccgcacttggccagctgagtcccgttctaagtgccctgtgtgtagtaataccatgaggacatggatggtaggaactatttttatccccattctacagagaggaacctgaggctcagagagtttaagtaatgtgtctgaggtcacacagcaggggaaatggcagagccaaatttgaacccagacacctggatctgtcatatctagagcagcgcaaatatggagactcaccaggtctgtgtgtgaaccaagagctttccatgtgactgcctggggcacggaatggcggggctattggagcagcaaggagacatgagagagaaagggctggaggatgcatttataaaagacagccgagaaggggaatggctatttattgctgttgcaaaggtctgtctcttaaaacccgagtcgaataagagaaggaagctagtgcattctggccgcacagacaccctgccagggtactgccttgtttatgaagaagaaacagtaaactgaaaacatgacctccagtgatttgtcccaacattaaataatgactagtttgaatttaaatatgtggcggaaaattatgctccgatcccttcctctggaaagggttcagggtgtttgattaccga

SEQ ID NO: 110616 - DNA, 1022 bp, Homo sapiens
gacggggaaggtggacgtgagctccagagagcggctcaggaactgttcaagccacccacccccaccgcccccatgacccgggacctccggatgggccttgggatgacaagggtctccgctgcgcactctcatggtgacttgtctcttgtgtatcagtggtcagcccctctgctcagtgtgtggagtctgcctaaccccaaactccaatgccatctgccctgcactttgcattttatttttagcgaatgcagccgggcaccctattttccttcattccttggcagttgtgctcggggcggatagcgccagtgaatgtctgaccgtaatcatccacaggccagttttcaatcatgaggttgatgattagctcactaacaccctctccccagaccgtcaccttggggcccccagactaattactgcaggacgcgctgagtaaagttcacaatgccagggaattggggggaaatcttatcagctctgaaactactgaacagcaaatgtgttccgaagatgcaattagccgcggttggaatgggagattgttggagagggactttgtgggagtcacgcccacccctccctgccacatgtgtcctctccacacgtgagatgctggtgtcaagttgccagttaaatgaggacactcatgagggacgaggatgtgggctgagctccagaggactggtgtttccttatctccatgggaccctgtcctccaccagggcccccagcccacccctgtctgtgcatacctccactgtcactccaggggagctctgcacgaggccccccgggttcattgcatggcacattggcagagtcaacaccgggccggggacgcagacgagcagacctgcccttgtctcaagaaacagccgggccatagctgaggtctttccacctggggtggggcttgggggggtccttaagtaccttaaaaatgcaggcagagtggtgtggagggggcacattctgtgctcggtttttctaggcagcaaatctgttgattccatcagatt

SEQ ID NO: 110617 - DNA, 1040 bp, Homo sapiens
gtcactgcagcaaacctcaaataaaataagtgaatgtgccttaaagaaatgtgtgccatgtccagtagagatgcaagctgagctactgttcattgcctcgggcgcaaataagatgactgaaggatcggcggagcgttaggggaggacagggttcacactccaagaaggtggcagctttgggaactgtggagtttagggtccacgttttaaaatgagaacattgaggcccagagccaggagctcctggccttcgtcagaatcagcatctcctctttcctggtccgagtcctcaacggctgcagcaaagggaaatggtaggagaaggactctgatcccttagagaactgctgaatttaagtttcacaacgaggacctaagtcaggggagctcgacctcagacgttttgtggaagttcttcttggggaccaggtgccttctctgttgtttggagaacctgtgcctgccgcgggagtaacggcgtttctgggaattccaggcaggaagccgcaggcgatcctggaggagaagctgaagcagctggaggaggagtgccggcagaaggaggcggagcgtgtcagcctggagctggagctgacggaggtcaaggagagcctgaagaaagcgctggcgggcggagtcaccctggggctggccatcgagcccaagtcagggacatcgagtccacaggtgtgtgtccttctggctcacctcggaggctggcgcggccttgcgtggccgagggccagtgcacccagagagaatgtggagtggctctggggcgtagcttgcttgtggccccttagtgtgcccagcagaagacagttcatgtgttagcatcagacactttcatcggccgggcctgtgttcctgacatgctttctcacctctcgctgaaatgttaaaagctgtggaaatgctgagtctgtgtctttcccctttgcacaatctgtttagaacagatccagtcctcgtgtctcttctgaaccaggtcatgatttgatgccagttcagtagagccggtgcttacaaaccgtctaaca

SEQ ID NO: 110618 - DNA, 1015 bp, Homo sapiens
taattagacacatggattcctatcaaactgcttagtggacagcttttgcctcaatattaacagaacatcctctgtccacaagattttaaagctgtcatctaattccttgcaggggaaaggggagaggggaggggcttttagaaaaataaaggggcaacagtgaccattttcagttattttagtacagctgcaaagtttcaggcagaaaaaaggagctggacaaaggcccttgagactgagcctgccaagttgagtctccgcagctgctgctctctgttccagggagatgaagggccgagctggactggccggaagtgcagtgctgctgagcccataggacagagctcccaggagccactgaaagcggagttcaaatgccagcccttccacacagtgcagctgggtcagccgttcccctaaatgcaggacagagctgctgtgagggccttgtttgtgggggcaggggagggaaggctctctgcaggtgcttgccggctggaaaggtttaggggggtttgggccaaagtctctcaattgcctttcatattaatgtggcgaggattgcagcctggctggccaggtccgcccgcctaaccctgcaacgcctattgagtgacgttgactgacgcatttagcattgggcaggtcagctcagcacacagccgcgtagataatatgatctgagacatgcgcaaaggcccctgaccaaaatttatctcttatttgcccttctcctgggcttacaagtcctggaattattgtcaccgtatgaattaagccgttgttaccaggaaatgcgtttccacctttttctctcttccccatccctatttccgcctgtggctgggactgtggcaccttttgactggctcacctcattctactctgcttccccctccccaggccaccagatggaagttttgaaacgttagactaaccgtatcacattctgcattgagaaaaaccaaaagtgcctcctttgttgccagttcagggcctctaacactgctgtccc

SEQ ID NO: 110619 - DNA, 1130 bp, Homo sapiens
caggagagcttttttcccctccagatgatccttctggaagtcctgtgattggaagtttctactgtcgagcttacttagccttcccagcatggaactttaatatgttatacatcagccaccaccattaccaatttcactaaagccctttacactcacaagggacttctctgccatcattgcttcttaacctcaaagcaggcgtgtgtagtttcatttgtcagctgacagcctgagtctcaggtgggcgaagtgctaccatgatccatagcgatcaagcagggggtctaagtcagggtttcctggcttcacatttcattctcactgtgttgggccatctgacagtttgccgttccctcttttattccacatttctatgaccatagtgccatcccttccgtaaggagggaacgacaattatggaattcagtgtgaagctttctgtatgattctgttttcttcacccgatcccatgcttttggtcacctgtacccatccttctgcgttctgtgcttagctcttcctcagtggaaacccaaaaaaggccgctctgaaatttcagctttcttctttttctcctctgtccttacagttagttaagtatttcctgcacactgaagagcagcccccttcttgctggtgctggtctgacatgaagtcatcctggagtgtcactgggagagggcgtagagccgacagtgcgctgacaaacagaccagtaaaaacaaaactttctcaagatgtcagacgctgatggggtgaaataatcttgtatcgtgtttcaccagatgggagctacttatagatcagaggcacttagctaattatagaatgatgactccatttatgaacggaagttaattgcaagaattttttttttttttttttagcatttgctgatttttcttaaaaggaaagtaaataatacggggtaaagtatcttttctaaagagtttaaattgttcagttactctatttttcatgtctgtgatgttacttccagtacatataatggtacaggaatctaagaagtcttgattagaaaggaaagtcagatgacaaaactagtttcaagcagttacagaattatcttgggccagcagagacttgagatgggctagtgtagtttcttc

SEQ ID NO: 110620 - DNA, 1012 bp, Homo sapiens
ggaaagtaagagagacacatcagggctggccttccaagcctcttcgtaggatgaggttctcttttgccgaagactttacaaaggaaagaggaaaagactggccacacctgttaattggaaatccagaatttccttctaatggtcatgctaatttctgtgtcacttttcctttcttcctcagcctcctgacagtgggcctccaccattgccaacatcctccctcccagaaggttattatgaggaagctgtgccgctgagccccggaaaagctccggaatacatcacatcaagtgagtggccagccctgcccagccatgctgcctttgtgattggcaggactgttgcagagcctgtcccctttctgggtaggaagggcaacagggtattataaaacactgtgggccaagtactttttgaacccaaagagattgtcagtacaggaaaggttttgagaaggacaccgagtgcctcacacacaagcctctcttccgattgctgtcttccttgtgactcagaggtagtgaaagcttattgctgtggcaacaggtatcagcagtgcggaagagaaatggctctttgtggtatattttttgggtgcgtgctacagcccccacttccttagtctttgatgctcttgggctgcacccattctgccacgattaaagcagtttccaccaggttggctgttgggccagaaataattgggtacagcacaaacaggcgtctctgtcatagacttttggttttttcttttttgggggtacaggttctattagatgatttttgcctaagttctggttctcctggccccagttagtggcctgctggtagcactcagaagtacctgtttgttactacccagcttcaagtgcggatgaagcatgacatgatgttgagtctccggaattcatttctgaattggtggctctatgtctcctttcagtatctgtcaggcggggggctaccatctcataagaaagttgaatacctgaatgtatgtcaactaatggaa

SEQ ID NO: 110621 - DNA, 1034 bp, Homo sapiens
tgtttttatgcctcaccctctctgtaactgttggccacaccaagaccagagagaagtgaccaggccggttggtagcagggctaggactggaattccccagtcttttgactcccagcaggctctgttttctgtattgcactgcttttccctgtttcgactcctgttaggacagtggatgtgaaatgtagctgggcgcttttgggggtgtgctaggagtgtggcagatgcctcagactggcatttttccctgattctgaattttcatggctcagagtcagtccctaggccactgaccgggaagatacaagaagttgttttgtatggcagcctataccagggtatttttttcacccggcaatttatttggtttggactggaataaatctctgagattggcttctttgccaatattattagggagtggagcctgatttgttttagcccgattcgtagtgcttagcatctcaatgaatgtgtgttgaactgagccaaggtgtgagagcgtcttggacagtggtttgcaaccctagctgcatctggggggctgtgaaaaaagcatgcatgctgactccagaccagttgaaatagaatctgcaggaatggagcctgggcagctatagttctgttaaaaacccccagatggttctgatatacagtaaaaattgagatccactgatccacggtgaattggagtcctgaatcatacacatgccttatgctttcactagcttagaatggctcttgcgctttggaaccatgaaaaaaatgttatgcaaacaaatgtggaaattgcctaaatgccacatcctgttactacctgccgtgaagtatatttgccggttattcactctattccgatctctacccattccaccttttcttcatgaaacaataatttgacagttggttatgcagaaccagagtaagtctagtttgattggcaggaaacgattttgggtatgaagtactctttaggtatttattgaactcttgtttgtaccactgctgtgctggacagtttataaataatactt

SEQ ID NO: 110622 - DNA, 1050 bp, Homo sapiens
tttaataaaacttaactagttaattctgcttctgtgtcgaggtgtttttcatttacagcaggcttgatttttatgtggattaaatgaaagggaggggatgcatgggtatggagaacacagaggatatatttttgagctctgcatttcagagttcttttctctagccctggccggggtcccaaacagggaacttaattcgctctatcactgaagtatacccttgctttgatgccattggtattgtatcctagagatttgctgtggctgctaggagtgtttcatagtaaggactgatgcgacttctcttttgtcagcttatgagtctgtaagccatcttgttccctttagtattatctgcctggaactggaaggtcagagatgaagttttcttagattataagtctcaagtctttgctgtctaccttcctctctctcccatgtcacctgctgttttattttctgtttttcattttaatgtttttattgtataggtgtctattatttcaggctacctcaaaacagttttggatattgacaggatataagtatgaataaaatgtgaaagataactttagttctttttagcagaggactggaattcgatatgtggccctactaaagcttttgttaagtccaagtacttttctgaacttcagttcccttacctgtaaaatggagttaattgctagtaacacctgttctgcctaactcaggagattgttttgaggatcaaatgaaatcatgaatgtaatggaattttgtaaattttaaataaaatattgtattacctaagatttaaaaaaaaacccattaagaatggaatgaatctgagttttcctttgaaatcccaaatgtttaatgtacagagaagtcttaatgtgtctgttggggagcttgattagggttttttctatctttaattggccagtattgttttatattttagcatttttggggaacatcaaatttgtgtttcagttatcattaatattttgcaaaggtattgaatgtgcatgatttagtctttaacaatctcttcaattatttaca

SEQ ID NO: 110623 - DNA, 1991 bp, Homo sapiens
ggcgccgaggccaggggcccctggcgagaaccgcacacacccctcccacacaccttgctctggcttctctgtgtccatggggtgggcgggagggggtcccccagcaggtgcggcccctgcacctgccggcgacactcctgccggtagtttagggccgagacggctagcttcacgccacccttccccgctgtggcttggtgtcagggagaggctgtagagtggctgtgtcgggcatcagatggagcacacaggtggctgcagcccagcccaccttcccagcgttctcgaggtgccctggccccggtgctgggcacgtgggggacagaggtggccgggacgtgagctgtgaggcttgttgatgatggttgctgacaccatcatcgggggtgggcacacggcccttcggagcctgggcagcctggcctcacaggcagactcgcagacggggcagtgagcgtctgggacagtgccaagagtggggtgtgtgatttttgcaggcgtctgtgatgggtctctttagggacaaatgtcaacaagggacaagacagggcaccttccgccagcgcccctccatgcgctgcgttcctcctccagatcgacccctagatgcctacacaatatctttaaagtaacacagaagtttttattttattaaaaagtatagcctacttaaacgcgagatgacatatatagagtttaattttacggtccctccgcaggggagcggcctccagccttattctccaccgctcggatctgtgtggtttcagtctgttcttggtgtggtcctcatacacagagctccctgtctagtttcttttctttttcttttttctttttctcgtcacacaggtaaccttaaagacagacccctctaaagaacgctttgtaaatacatgtgaggtatagccaccactgttttccttgctgttatttttccaagtcttggggagaaaacatcctcctctgatggccaaagccctggaatcaagggtttccacgtaccctgcctaatacccgacgtagctcttgatgcaccgtccttgtgctgtggctggcggtgtctcagcctgaaacataaaccccacatgccccaggagcgatgtgctccctgaaacagacaaccacacgctgttggggagagaaggatggagataggatggagataggatggagatgtggctcttctcatctttgaagccagcagggcatcccggagcaggaggctggccgggctccccaagcgaaggcgttggtgtctgtcattaggtgtgtgttagggtgcagcaccggccgtcacaggatgctgataagcgcgctgagaggtggatgaaacaccaaagtctgtttccccgtccgcagtgggtgttgcctctttgtgtgtgtcccgatgttcctgcctgtgagtcggccttactccgtttccttagcgcccatgacacgccaagtcccgtttcgcactcggcttctcacccgcccagctcggctagggagggggagtttttagcacctaatatgcttcctgccattgcgcaatctgagcctgagcaactggaaacccccatttctcattagtgcaatgtcatatctgatcccaggaagcctggaaaataaaagacgatgcattataacttgcggaagtacaagatcacttgttatgaacttgtgtgattttaaaggcaaggccccttctgcaagcagtgcttgcggagggcacccgctccaggctcaatgctgggtgtgcgcatggggcaggtgaggccttggggaggggccaagtgtctgcattagggccctgtaggacattccccagaggcagcttgcactgacacattcctgggccctcaccagggccaggccctctgctgatggcagtgatgagggaaacctgatacgcacctgccccggaggctggggagacaagggcagccaggctgatcgctgctctgtggagctggccccaaatacacccctaggtcaggggaggcttt

SEQ ID NO: 110624 - DNA, 1073 bp, Homo sapiens
aatgtaaaaaatttcacgataaacaaaatagcaaaaatgtaaatagagaccagttccagtcctctgcctgggtgcttaccccactcgtgagcctgactctagccctctgactccagctctgcatcaggaagaaggtccagcttccctcggggcctcggttttcctgtttcagataaagggctttggactcggtgccctctgaggtcttcctgctctcgtgctctctaggctgtaaccagctcctcactgatttcctactgcaaagctcgcgttgaaaacactttgccctgtgacagacccgctgggctgagcataccgtctctcctttggctgcagaactctccctgctgaaatgtgatccctgtacccagtttcagcagcactggccgagagccctgaccccgtttgagaccccgttccaggtgctggggaacgaagcgtgaataagacattttcttcaacaggctccgtccaccgcgggcagccaaggcacaaccgcaacagagcatggctcagggctcatagtgcgaaccccgggccccagcaaggggcaggaagtgggcaggggcaggactgcccgacccctgtgggggttcaatgcatgctttacaggttggggaaccctccatagaggtttgcaggacgtgtcgatgatgcttccaggtggacagaagggaaagcgttccagacactaatggtctcaatgcgctaaaatggcagagtttgctgatgaatgccacgggcacctgagacaggtgcaggagctctcgggcccatccccctcagagtgtcacccttagtcattgtcagagacacagccaccctgtatgggtacttacaacatgccaggtgacatgccaggggccttacagacacggggctcctttaacctttgaaacagtcacacgcagagctgccgtgagtaccacggtttccagggaggtaggagccccctcattttggagcatttggggtggatggactttgactcgcacgcacagccacgtgcgtccgcgtagctctgagaataccctaggagttccacaaccgtgcacagtgccagaagacggcag

SEQ ID NO: 110625 - DNA, 1046 bp, Homo sapiens
tttcacatgtttggaaaatatttattaaaatgtttatgcatgtgactacaagacaagcattaacaaattttaaaagtttggtatttccaaactgtaatgctgaaaagaacacatgtgttagcatcagacagtcctgagttcaaatcccagctctgtttttgggcaagttacttaaattttctgagtctctcttttctagtctttaaaaaattatccttacctcttgaggtctttttgaggacaaataacattagagttgtgaaatcttttataagctccatagcatggttcccacatgagtaattatttaaaaagcaattcctgctctatcttgcttccatgtcgctagctgctgagtaaagtaacacattccaatgtgagctttagcaaggaaagaagggtgaccagtggcaaatggccataatctcaattcctattagcaatttcagtacagtttttggaaaataaaacacatgggctcaaatatttacagtcccatgtatttgtcatatgatctcaggcaagttatttaatctctctaaggctcatctgtaaagtgataatcatgcccacctcctggagttgcagcaaaggttagagaatgtacctatagagccacaggcacgtaagaagtgctaaacaggccgggcgtggtggttcacgcctgtaatcccagcactttgggaggccaaggcgggcagatcacttgaggtcaggagttcgagaccagcctggccaacgtggtgaaaccctgtctctactaaaattacaaaaattagccaggcatggtgacgcatgcctgtaatcccagctactcaggaggctgaggcaggagaattgcttgaacccagggacggaggttgcagtgagccgagatcacaccactgcactccagcctgggtgacagagcgagactctggctcaaaaataaaataaaaataggtagtaaacaaatgggacagctaaatcatttgttgcttttaaaatccctggtgcctgcactgagcggcgtaggggagtcagccaggaatatgccaggcagtgct

SEQ ID NO: 110626 - DNA, 1063 bp, Homo sapiens
aaccaagggctgttgcatttggtgagccagtgtgagccaagtgcccacctccttctcggggatgccctggccttccctgctattactgttaccgtgatgacaccaaataatccttagcgtccaaggctgttacttgaggctgcacggagattggattaacttgaagtcaggctctttggctgcccctagctgaagactggtgccacctcctaccctgagttttctgatgcttgggacatctgaatatgagcccagacaatctgggggctgattgccttgcagaggggccaggccctgtgccccaggacagtgaacgccttaggaagagcggcttatgtttgttcctctgcccacagcgtcacaggggtccccagtgaggatccttagggtggggcaggcttgctggtcccagaccccccaacacacagacacacacacacagcccaggggtctccccattgcgcaaggcagcctcgtcccagtctggaaatttgttcataaatagaggcaattcacctctcaaccgaggccactaaaaaactggccccctctttgttgcgctggagcagccgtggctgtgtgtaaccctgggatggcatccctaagcaggtactctccccaggggcaaggccacaggacaccatctccagaagccgtgggtgtcctcttgggctggcatttgttctctccgtctccttcaggctctgtcagacctgctgctgtgtttttgtccaaggcccagcctccccggatctcccccagggcccaggcacctctgcatggtttgaatctagcaaaccacacccctcaccccacgaactgctcttcccattctggaatgggcctaactggggaccatgcatgtggcacgcttctttgaattttctccaagggaattctccatttttcatcttccacatggaaagcaggggagataagagagctggaccaatgtccacaggactcctacgacaccaaaagacgtgcaaatccctgagctcaatgttaggggtcctggggacagtgggaaaactgtctagaatgttcccttctcacctggaac

SEQ ID NO: 110627 - DNA, 1032 bp, Homo sapiens
ggaggctattgattttatgttataggaagttttctagaacaagactcgctgccttgggggaggaacacaaggtggtgtggactccgtgtccccggcagtagggcctgctgctgcttggggtcccacattcctagccccttgaggccccatcctctcttttgaggtctctcacgtcccaccctcgaaggtcagaggcgtgtcagcataatacaaacccccgggcagcttgaggcactgcccagaggactcagtggcccctagaaaggacccagcacttccgaagggaataagaccctttcctccaatcccagcacatgaggcatgtgtgagaggtgggatagtgggagccaagggtggtctggccaggtgggagtgggggtgaggaaagctctgaattaactgctgcagcagcacaggggaggccccagttgggggcacttcacccccaacctgcctgtggcttggcattttctgtcactttctgtgtgtcctctcgctgtgggaccgggcggagtcccatgtctggtgggaggtgcttgtctctgcttgtctctctgctgcctggtctcggagcccgttgggagggagggttaggagacagcgaccctgctgcagcttttctgtggaagggaaggtggtgggtggggaccagggcagaggtggtcttcctcctttccctttttactcctctggagctgcaagatggggcagaagagttcttctcgcgttccttagtccgtggtcgaaggaagagcctccctgacgtgctactgtcaatctcgtgaggatatctggtgggacgggcagggcacctggcctcaggcttagagacgtgagaccccctaggtatggaatatgcagacatcagaactggaagaagagggccaggcacagtggctcatgcctgtaatcccagcactttgggaggccgaggcgggcagatcacctgaggtcaggagttcgagaccagcctgaccaacatggtgaaaccccgtctctactaaacacaaaaaatcagccaggcatggtgga

SEQ ID NO: 110628 - DNA, 1090 bp, Homo sapiens
ggcgtcacccaggtcacctcggccctctggatgcgtgacttgataatccaaccttgttcgcaaaacagaattatagttccaggtgagctcagcaattgaagcagggtcagaggatgctttccatttaatttgccaaaaagcagttgtatttaagaatgtggccagggtgcggtggctcatgcctgtaatcccagcaccttgggaggtagaggtgggcagattgcttgagcccaggagttcaagaccagccagggcaacgtggcaaaaccccatctttacaaaattaaaaaaattagccaggcgtggtagtgcacacctgtggtcccagcaacttgggaggccgaggtgggaggatggcttgagcccagaaggtggagtctgcaccctgcagagccgtgattgtgccactgcattccagcctgggtgacagagtgagacactgtcccaaaaaaaaaaaaaaaaaaaaaaagaatgtggtaatggatggatactactcttttcttatcttctgcagctggcaaaattttactcaatggcttttaaaggacaattttgatcattttagtgctttaatcctattctgagcagctaatttttagattctcaaggaaaacagcatgtttatatacaaggataattaggaagaggggcctttgttttggcgaatttgcagttggttggattcaaacaccagccaggatgcagaggcgcagatggagtgagccccctaaggtgttcttagttcaccgcccagccctctgccctcagcaatgtcgctcctctgccttgggactctggacagacttcaactcagggttggattagcaagtccttggacacagtctgggaacgtggatgaggcccacactccttcccctgggcaggggatctgggctgctccaccagacaggagagatggggctcgctgcaaataagcttttcatgcttgaaatattctactttgctttcccgtttccccttctatctgctgcctttgcccttccgtctggaggcagtgaaagtggccggagcacccccagcctctccgtgctctctgacagcaagccgcccccctccacctaccagcagg

SEQ ID NO: 110629 - DNA, 1062 bp, Homo sapiens
ctgccagaccccatgccaggtacatcacaggcatggcctccttaaccccagagccttcgggtgtgatcatttccctcattttgtacagaaggaaactgaggcttagagaagacacttccgcaaggcctactggctcttttgtggctgggcctcaggacccaagcctgcctgctctggagttccctgtgcttttgaccccgtccccatttcacctataccaggagctgggggtgagctcagactctgcccaaagcgctgtgaccccagcaccctcttcacggctgctggagcagccactgccctctggctttgggggcactgtcctgtgggatgcatctggctttgggggcactgtcctgtgggatgcatctggctttgggggcactgtcctgtgggatgcatccggctttgggggtgctgccctctggggtgcatctggtgactgtcccctccccaattctctttcccctctcaggccaagcttggtggtgagatcctggactacagggacttggcagcccttcctaaaagtaaggccatctatgacatcgaccgccccgacatgatctcctactcaccctacatcagccactctgcaggggacaggcagagctacggcgaggtatggaccctgcccacatggccctggacacctgtgtccccaagtgctgccctgcaggacaggcgtcatccctagcatgtgtcctatggggccagagccacttccatcttcaccactcacccacacgctcagcctcttcacgcccatcagatagccatgtgcacatcctatttcagtaatgcccaaggcactgtggccccaaagctgccgttgctgaaggagtgagcctggaatgcctccttaaatggagtagaaagtaggaagcatgctggtttgtaggaaagatgatagtgactcagtgaaaatctcctaattttcttaagtattagattattttcataaagcatgagatgcatttcctctgtagcggactcttggcccgtgccaccctcgctgccatggctctgccccatgctcctctgccccatgaattcatgagc

SEQ ID NO: 110630 - DNA, 1024 bp, Homo sapiens
ggccctcggctgagcgggagcccgcagcggggaagaagcaaggggaagtgtggcagctctccagtgggcagaggaggcctttgcacccggattccgtggttggattcagggaggaaaggggcctcctgcctcaggtgtgaggggctcatggcagagagggctgatccattctccagaagcccaaagacgggggaccactagctctcctctgctgggacaggaggggtttctggaggcgggacagctttgccacacctctgtcctgctggccctattctgcacgtcacagtggggacgtcccttaaaccgctgccctctgacccagcactggctgaggacctgtggtcaccctgagccaccacaggctgtgggtgtgcttccctggcacctcgttctgccttattaaagatgacagccacccttcagaaggcacaagatgtcttcctaaaaccactcactgcaaagtctttcagttgctcatatattttgaaatccgagccatcatgagccccacgcgggcgagggtgggacttccgcctgcctggggagccgtgcgcccactggaacaaccagcggccgaggtttcaggcactcctcgggtggcaattgggaggatgtggccactgtaccgatgactgggacgccccagtcactatgagagaatgggaatgacaacaggaggtgacacagggaatgaggacacttctaatttttgactccatcagcccatcgatggccgcctgtgacccactggttctcagcaggaagtatggggtagggagggggtgacctgtgccatgccggtaccttccagctaaatgtcctctggaatcacagagcccggttatactaccccagcctgagagggagggacagtcctctccatcttatacacggggacactgaaccccagcacgtgacacagggcctgagtcacacagccaggaagagagaatctcaggctggaatctgtcacctccatggctttggccacgagcctgggacaggcctgagcaccggcagg

SEQ ID NO: 110631 - DNA, 1021 bp, Homo sapiens
gtgctcagggatgcgggctgctgtgctggggatgcgggctgctgtgctcagggatgcgggctgctgtgctggggatgcgggctgctgtgctcagggatgcgggatgctgtgctggggatgcgggctgctgtgctcagggatgcaggcttctgtgcccaggccagcagagggtggctgagagcatgtgagagagtcagggaggggtcgggggtcctcccaggcccttgtcagtcccatctgccctccgcatgcagaaacagctcatccccctcttttactaaagtcatcatagttctcgtcccggtccccaccctggcaggatgcagctgcagaggttaggatataattttctgcactgcaggtggcgacccagtccctggcaggaaatcagtttagtgggtcgcagcagtgtgcgttatataagaaggtgagttgagtagaaaatagtagagcacatcacaaggaatgaaggtgttttctgtgaattttttgttcgccatttacatatagtatcagttaagctgctgctgcatgtggttggctgagaaattgtgccccacctcagcatatcaggtcctgatccctgtgacctgtgaatattgccttatgtggaaaaagggtctttacagatgggcttacaccaggatgctgagatggggagctgatcctggatgatctgagtgggccctcagtgccatcacagttattctaagagagaggcagagtggggtgaccacagagccagaggctggagtgatgctgccatcaccaggaaatgcaggctgccccaagagcagggcgaggtaacggcagcctcccctagagcctttgggggagctcagccctggggccaccttgccgtccacaagtcaggaaatgcaggccgccccagcagccaggcaaggcaaggacagcctgccctagagccttcggggagctcggccttggggctgccttgacatcagcccagtgataccgattttgtattcctgtccttgttgtactgctctctgcccagacc

SEQ ID NO: 110632 - DNA, 1016 bp, Homo sapiens
aatcgtcccacagagggaccggctgtgtggggtcttactccataggccccgtcctgtctgggcgcagggccagtcctgagtgtgaggtgctggggaagtctcagcctaggtccgggccttctctgtgtccagcagtcaacagcctcccaagggctcagagctcttccagaatgtcccttctgtccctccacgactatttattaagcacctactatgtgctgtctttgccctgatcccccaacagccttgcattcttcctgccgccttctgcctgcccccgctcccctggagtccctcctcctctccctttcaaggctctgccggactccagggcctctgtgaagctttcttcccatctctaggccctctgcttccctccttcctctgaacctgtggacacagaccaagctggggtttcctgtggagatttgtgcctgctcctgcctgctctgcagcctggagctgggacctgccctctctgaaatacctcctcttggatggtgttggggggctgaacagtggactcaaaggtgcccatgtcctaatcccaggccctgtgactatgtgacctcatgcggcaaaatgactgttcatatgcgactatgtgaaggattttgccacagggagactgctctggatttcagggggcctgaggcttctcgctaacgggaggcaggaggcagcagagaggagagagaagtctccacgcctggctctgaggatgaagggaggggccccacaccaagaaactcgggtgcccctagaagctggaagaggcacggaagtggatctcccccggagcctccagatggccccagccctacagaccccttcacactctggctggatctgccctggtatctggggaccccagatctcagcgtggcctgactctccgtagtgtctggggaccctgggccttggcacagctggactctccctggtgcctccagatcccgggtcctggcgtggcctgatctcccgggtgcctgcggagcccaggtttcttggtacat

SEQ ID NO: 110633 - DNA, 1061 bp, Homo sapiens
agcgattgtttatatagcacatggcaaggtggaaggagatggcatcccataccagacaggcctggatccgaatccaatgtcctagctgtggggcgccccctgcctcagtttccccagtagtatggccggccagtccacacatggtgagcccagcaagtgacaatcagtgtggtgtagcttcatctcactgcagcccatgtggtcacaaggggaccagtagggggtggggttgaggaaggtacctgagctggggcagggggtggggtggggggattccagtgccaggtctgccaccagtgggcaccagatccttgagcaaggcctgtgctccttctgagcctaaatatcctcctgggcagctgctggcctggcagatcagattcccccaggtggacagaggctcctgaggggttgtgttaatttgctccataacaaagtactaaagaccaggtggcttaaagagaagacacttatttttttgctgattctagaggccagaagtctgagatcaaggtgtcagctgggttacttccttccaaagcccctctccttggcttgtggacggccgccctctccctgtgtcctcgccccgtcttccctttgtgtgtgtctgtgtcctcgccccgtcttccctttgtgtgtgtctgtgtcctcgccccgtcttccctttgtgtgtgtctgtgtcctcgtcccgtcttccctttgtgtgtgtctgtgtcctaatctgttcttatgaaaaccccagccagacttggttagagcctaccctcatgacctcgtttcaccttagtggtctccttaaaggtcctgtctccatgcatagtcacatcctggagtactgggggttaggacttcagcatatgaatttagacaattcagtccataacaggggtgcggggccaagggcggccttgtggctggctcagccttctgtttccatgctgctcttaggatcatggaactggaagggacatgaggaatgttccagcccaaacccacccacctgcacaaagggggaaaccaaggtttagggaaggaaaagcagctgtccagggccaagg

SEQ ID NO: 110634 - DNA, 1039 bp, Homo sapiens
actccgagcggctgctgagatgagtgcaggtgggtgctggggaccgagggaccaacgggtccccgcgctggctcgcggcgccgcaagggctgggtggcattcggaggctgcacctgcaacgccggggaaaatcacccagcggctccacccaacttttgctccaggattttgcagccccgaggggccagagcgcagccctctgccctgcgcccggagcgcgtagctcagtggcgcgggccggggatcctttcccagcgcgccggccggcgtggctgcgccaggatgtctggaaggcgccccttctttgcttctcacgggggtccgggttgttccaggctgcagaaagcggtcagggtccgcgcgggggcctggggtccgggcgaagggccggggccccagcagacctaggcacgcagaggtgagatgataggcggggctttgcagctgggggcgccgcccttgcgccgctctggcagcgcctgggttgggggcgtcaggccgaccctcggcgcccaggactctccgcagcagatctggggacccggagcccgcatgtgtcagacccggccccgacccgatctctgcgcgtctccagcccctcgcccctgcgcgtcgcacccctgcctttcccgccgcacccaccctccgggatctgacagcctctgtgcggggctggaaaaatcccacagcgctggagcccagccgcgccttgtgctgttggggaaactgagacctagaactggagcccttggcggtgagccctggaggcggcctgaggatgcccggatctgagagcctcctggggcccgcaccgggctgagggcttgtcgttgcattcccggcagggaagggctgtcaccccatttttcagggtgtgacccgaggcgcaccaggcttgagtcacttgcttggctcaggaagggggggcggggattcgaaccccgggctcactgactcttgtgctctttcctctaagcctgtcgcgccagggactgcagtatggcccttggccatggtgcagaaaccaatggggacagcc

SEQ ID NO: 110635 - DNA, 1018 bp, Homo sapiens
cagagcaccattgcaaagattaactctggagcttggtgctcgaaggagtgggtgttaggttccctggaaaaccccagactcctgggcaggacttgcttcccggggtttccggcaattgagggcaccactgcctttgtctccggctgctccactcacaccttagaaagccccagagggcagttgagggaggggtgaggaacacaggtttggtgctggaaggactgggatctgggctggttctgccacataggagctgtgtggccctgggcaggtcatgcctcctctagaccctctgtgaatcagtccagcgggcatcaggagacactcaccagcaggcatcaggagatactcaccagcaggcatcaggagacagtcaagctggtggcgccatcagcaagccccatgtgatgacaatccttgtgaaggactgagcatcttcttggcaagtgacaatttgaatttattacaaccacatcagggagcagaactggagggcacttagaaatctccaagcccaactctaccatttgcaagatggagagactgaggcccagaggagtgacagattgtcccgggagaattgaagcctgagctggggttcggacaggtcctctggcaggcagggctgtgtgtgcttctgccccagtgtctgcagcctccagttgggcgtgcttggaaagcccccagccctgaaggctcaggcaccttcctctaggaggctgctgggtgtgctgtgtggagtcggggtgctctgtgcagttggggaggctcttggaaaattcccccggccttgggccagaagtacagctgcagagacaaacaggatacggggtctccagccacagcaggggacaatggccaggagaggaaatgtctccagacccgtgtgtggatgtggagcccgtctgggggcttttttcaacgtagcttccagaaaaacaaacacaggggaagccaagcatctctggccaggagatgaaatgtgttctgcctactctggagaaggggtggaggtgtg

SEQ ID NO: 110636 - DNA, 1060 bp, Homo sapiens
ccagggagctcgcatgcccagggagtggattccagcgctttgttgagacgcctccatgtgcttccggagaggagatgggaagacagcctggccttgcaggcaggggcttcctggtgctgccacagactcagggccaggtggtgggcacaggcagccacaggtgccaggaccgcagtcctgcagagcaaggaggagaaagcaaagtccgaggctgggcgagggcagccagggcatcctgcactgcccctgaaggtgcccagagctctccaggcgtgaccagggtcccaggacatgggaacagggagggtgaaggccccaggctgcacagggcatttgatcagtgaggctgtgttctgcgtccgcagttccactcacgcttcctcctttggaaagcaagtctcatgggctgcaccctgctcccactcctgggcgaacagcttccccggagggtctcttgggtgcctcttggcgtcagatgtctcctgattcaccattcccggcccccacaggtcctggtccctgcccctcagaggtggttggggggtgggaaggatttggccacaaactgatcaatcagattacagttggagcaggtgtgcagatggaaggtggggtgccggggcacttcacagccaggggctgtcgcctctgcaagccttgctggcccggggctgatccggctgaggccctgcactctgagcatccccagggagccttccctgactgtgggattccctccccggccagagctaggggaccctctctatgcctcatagaacctccctcacggaaccatcactattctgtcgaaattcccaacttagcaggcctgggtctccctccctctgtgtgggaggtgggtggttgttgaaaccaaggactttagaccgtgggctcctcccgcccctgctctgctgatggagcccaaggtatgaggtgagctggggcctgggaggccagttctcagggtgacagccacagccatgggggcaggggtgatggctgggcttacatgacacccactcgtccctgtctgcagccaacttgccccccatgaggg

SEQ ID NO: 110637 - DNA, 1067 bp, Homo sapiens
acacgtgtgtccttctgcctgggatgccccctctccctgaaccccgtgttctcctggggccttccatcagcccccgtggctcctctggggggggcactcttctggccatacgcctcttcctatgtgatttacacgccacccatgacctgcctgctcccagccagggaactccaagagaagaattccctggtcacttctgtgttctcactgcccagtgcgagcagcagcagggggtctttggagaggagtcagctgtgcccatcctttgatggaattctgtttccctggccttgtccttgttaagacctcagtcaaggagcccagagaatgtgggtgcatggagaggccaccttctgggtcatgtgatcctggtcctggccccaccaatgagatgcttgtcttcagtggtcctgttcaatgtttagggctgcgacagaccaacacctctcagaccaggtctcagaggccgtttgtcaccatgcctcatcaagccgttcacttgttcccctcatggaaagggtccgtctgctctggtacctctggcacctgtgcatcagaagcagctggaagctggccaggccatgcactgatggcaggagctagaccagcagttcccaaagcatgttctcacacactgctccatcatagacttcatcatgccctaaggagtggggaaaagctttgtccacatcccttgtgggtgatcccagggattcccagcacaaacaaggcatctttttcctgttgaaatgccttttccacacttacttaacctccagaatcctccacaaccctgtttgcttttggctgagctggtgttccatgggacactctttggggatccttggtctagctgatccctaccatctccaagggagaccacaaattctcaacaggtcactgggggccgtgtgaagtcaacatgtactgaacttacaaggggtcagagaagagccagggaatgagctagtttgttcccttcctttaacccagaaggatgacggggctgggtgccattagtcctgttcacagctggagaaattctgacttctctcattcactcaaca

SEQ ID NO: 110638 - DNA, 1050 bp, Homo sapiens
gtgttagagccatgttctcaaagtgtggtccctggaccagcagagcagcatccatgtcacctaggagcttgtggcaagtgggagttctagggcccgccccaggcccgtggagccagaagctctgggggcaggccagcaagctatatggacaggcctctggatgactgtgatgcctgcgcaccttgagaaccatcggcctggatagcatctgaacactgatggctcctggtgcgtctagagaagacacaggccatgtctgggacgcgggggagatggactagcacgctcccccagccacagggcagcatgatgcccagttccctcagaaggatgtccttcgtcttttccttgccgtgtgtgttcaaccccaccctctcagcagcccgggaagggcaggacactgcacacacaagagggccgttcccagtcccattccagattcatctgtcaccagacccacgggaggaggcagactggttccaggaggatgacagcccttgttctgacacctgtgtctgataccagggcctacaaatccgcactggactacaccaaacgaagtctggggattttcattgacctccagaagaaagagaaggaggcgcatgcctggctgcaagcagggaagatctattacatcttgcggcagagcgagctggtggacctctacatccaggtgagtgatgagggatgcaggagggcctctgcacatgttcactctccatccatccatccgtccattgatgatgatgatagatgatccttccatcatctatccatttacctgttcatccttccttccatccatccatccttccatcatctacccattcacctatgggtccttccatccatccatcatccatccatccatccttccattatccatccattcacctgttcatccatccatccatccatcatccatccatccttccattatccatccattcacctgttcgtccttccatccatccatcatccgtccatccatccatcaggcatccatccttccatcatccatccattcacctatcatccttccattca

SEQ ID NO: 110639 - DNA, 1048 bp, Homo sapiens
cacaggtcacagctgtgggcaactggggctcactcctagtggggctctctgggagactgtggagcacaccccactgaggcacgagaaaactgatttcacccataaactgctctccctcctggtagagggcaactgtagacattgcctccccagcatgtctggcctgcagtgcggacaggttggcacactcccaggctggtcctgtggcctgaggttgccacaggcagacagacagaagtggcccttagctggaatgatggaagccatctgcaggtgagcttgccaagggtgggcggacagagcatcatcggagcctgcttctgtgtcctccgacaacctgaggacctctgagactgcacccatgtcctgcacaggagcggcatttgatgattagcctgtgccgagggcccaggggagttgaacagtgagaccacctgcctcttctctgagtccgtgtctcctctggcccaaagcaggtacttagggaggtttgatgaagaaaacagagggtaaggagtgttcatgccagctctaacccagtcctggagaggccacaaagcattcattcattcaacaaatatttattggcagcctgtaactgccaagccctgaacttaagcctgtcccaaaggctagttgcagctcagagatcctgactcaaaagtaggacccttagtcacttgaaaaacaagtgaaggcagaggctggaggtgcggggtgtgtttacaggcagcgtgcgtggtatgcacagcttgggctttggaatcagataagcccagtcttacgttcagttctgccaccctccagctgtgcatcctgggcatgtcccttaacctctctgagcacatctcctcatctgcaaaagtggaccacaaatgaggttacagggtcacctgaggatttgatgacatcatggacatcaagtgctcagcacaatgccttccacatggtgagtggtcaacgtggcatcactatggtaatgggcatgttagatgggtctctctctgcccagaatttgtgccgagagcaaagatactgggtgcccaca

SEQ ID NO: 110640 - DNA, 1009 bp, Homo sapiens
actgcaagggtgcagcccccacacacggtccctgctcctaaagctgttgcccccactgcaagagtggagtaggttgaggtgtagccatgacattctggaaactacattttttgtaatagtcattttgaaaataaaacatttgaaaatactgtgcagcaaaaacttgaataattggaataaaaatgttcagtttaatgtcattgcttgctgccaccgttttctgattgtaaaactaacgtgattattaggtactattttggtaatgtagaaaactttaaagatgaaaatagatatcacttataactccacatggagaaatagttgcccctccaatttaattgatttacttttgggccacaggggcccagaatttgattcattgtactccttggttcatgccagtgttcctgcacccagcactgaagctgaacattgacagtgatttgcccctgccccagagtcctccctgcattcccctcgagggcccccgtctcctggccctggtgtccacttttctctcagctgctgggaacgtgttagtgtgcactgttctcctttccctcacctgctggcttcatgttagcatgcaccgttctgctcactttcttcccctcacctgccgggatcatcttagcatgcaccattctgctcactttcttcctctcacctgccaggatcatgtaagcgtgcaccgttctccacactttcttcctctcacctgccgggatcacgttagcatgcaccattctgcacacttccttcccctcatctgccagggtcatcttagcatgcaccattctgctcacttcaccttcttcttctcgcctgctgggatcatgttagtgtgcactgttctgcacactttcttcctctcccctgctgggatcatgttagtgtgcaccgttctgcacactttcttcctctcacctgctgggatcatcttagcatgcaccattctgctcactttcttcctgtcacctgctgggatcatgttggcgtgcaccattct

SEQ ID NO: 110641 - DNA, 1005 bp, Homo sapiens
cctgccccctggccccgcaactgagttatttctgctgaagcacctgctgaagcacctgggtctctgcccaaatggagattgagccttagtgggcaggaccctccctcagtcctcagggaatgctgaagtctgtacatgagcccttaccggcttagccagggagggcccagcgcctggcctcagcgcggcccaggctacacctgggttgggctaggtgtgccaagaggcaggtagtgccaggagccgggtgggcagggcaggaggtgagagttccccgtagtaggagaggcagggatggtcatctctgcagagggcctgctgtcctgcatcggggactgaccactgaccatccccagagcccatacagcccagatgatgactgccgctgagagctgagagccagagaagcccagtgggtttcccagccagggagtggcagagccaggatttgaagagactgtgccctgctgtagggagagaagacttggcgggagccttgggtcctgggggagcgcataggagagggacttgccctacccaccttcctgggagaggcagtctccccaggaggtgggggctcaccaggcagacaggcattcgaagggacactggagccagacccgccatggaggacccccaagcacacgggactgtctgccccgtgcaggagaagccggagcggccttgagcgtctacctgctgtgccttgctctgcagaggcaggcccgtctctgaggcagggaacgaccaaggaaaggagagaccttgcccatgatggaggggccccctggctctgggttccatagttaaaaccagagccagctggaggtgtcgctggcaggatggtttattaaacgtgcattcctggctgagcatggtggctcacacctgttatcctagcactttggaaggctgaggcgggcggatccctttagcccaggagtttgagaccagcctaggcaacatactgaaaccccatccataaaaattacaaaaactgaggtg

SEQ ID NO: 110642 - DNA, 1015 bp, Homo sapiens
tttccttgctgttcgtgaccatctgccctgctggggagagcttgggatgttgcagagcctttaggaacaggcggtggtcacaagggcctcccctcagcattggttgcaaaatggacctgagttttccagtaaagtcctgaagggtagcatgtgaggctcaaggatgacccctgggcagcctgccagcagcagagagccacggcctgggcactgaagacagcagacagtgactctcttggtgcagaggcagaaaccccaagtcaggatggggcagggctacccgcctccctctcgtggtgggggggcttttcccgcccaggctcctggcagctccaggagttcttggctgtgggtgcatcatgccagcctttgcctcctctgtgactttgctgtctctgcatcttgtaaggacacgtgtcattggatttagaatccatcctagtccaggagtccctgatgacctcacctgaatacctcaacttcatgacatcttcaaagaccctcttcccaacaaaggtcacattcacagctgtgggggtcagttggggccaccattcagcgccccatgcctggcaggacttggcgaggggagccttggctccctgaagatgcctgcatggaggaagcctccgcccaaccctgcctgtgccctgcctgcggggtcagcagcacccgtctttccatcccactccctctggggagctgagacctccggcaagccgcctgacgtgtgagcctgggaaacggcctgctctggtttgtgacgggcttctcagttatgccgtgagggtgaacagatgtaacagccgaaagcagtcgggtgtgctgtggcaggaactgcaacgttgggtattttcttttcttttttttttttttttgagacggagtctcgctctgtcgcccaggctggagtgcagtggcgcgatctcggctcactgcaactccgcctcccgggttcacgccattctcctgcctcagcctcccgagtagctgggactacaggcgcctgccactg

SEQ ID NO: 110643 - DNA, 1050 bp, Homo sapiens
cggggtttcaccatattggtcaggctggtttcgaactcctgacctgaggtgatccacccacctcggcctcccaaagtgctgggattacaggcgtaagccaccacacccagcctattttttaacctacatttttttcttttttagaaacagggtctcactgtgttgcccaggctggtctcaaactcctgggctcaagcaatcctcctgcctcagtcttccaaagagttgggattctgggcgtgagccactgttcctgactagactacttttttgaatagaaagttggttgaatgttcctgtctacttgccctctgccattttctttgtcctcggggattgcatcagcttttaggctgcccttggagaagagaagagcctcagggcaggacccctgtttaacagaagccctgctgcttccccacagtttcgccatgttccacaaggtcagagttcctcgccagagccttctgaaccggatgggagacgtcacccccgagggcacctatgtcagcccctttaaggtacaggcatggggggccgttcgtgtgccgtgcttcccaggtgccttcctctgcagggcctggctctgtgctcctccctgcacctggaaaggagacccctccacgtaggccaggtgtcgctggggcatacttctcctggctcgggttctggtgctcccgctagaaggggactcttggggcagccacagcaccaggtgctggtgtccagggggtgagtccgggccttacaatgcccactccccatcgggggctgcgattagaggactgctcgcttccagtgatgcttccctgaggatttgaaggagacgggtctcctggcgaactgtccacaaagggggacgacaaacagagttccccggtgtccagaactcacgcctggcttaagttcacggagagcagaagagagaccgtggtcctggggagcgatggcccaggtcatagctgatgaccctcaggaatcatgagctcacagcaggtgggccaccccgagcatgcacccttggaataacagtccccagcagcatgcagc

SEQ ID NO: 110644 - DNA, 1073 bp, Homo sapiens
tacatcattcttatgaaacagccatggctgcactcagacttaggaaggcactggctgtaatgccagcactaaaagcaaaccagaacccaagtggagaaaagttagctttcataagaggactcatcttttacgttcacaaacttaggctccctgacttttatcggtaatcagtactgaggacaatgcgttccacacccgctggctggctgatgtttgattctgtaactataccacgcccagaattctctcaaaagggaataaaacacaggtcaaattcctcacccacacactccacagttcaacccctgccagggaaaccaaaagcaggaaaggatctccagcggcgccattctcatttccggtcccagcaccccgcctccatgacgtcaacgcgccgcgccaccgggctgcgtcatctcggcgcgccgctgccagggctgtacacctgctggctgccatggctgaggtgggccgtaccgggatcagctacccaggcgcgcttctcccacagggcttctgggctgcggtcgaagtgtggctggagaggccgcaggtggcaaacaaacggctttgcggcgcccgcctggaggcccgctggagcgccgccctgccctgcgcggaggcccgcggccccgggactagcgcaggctcggagcagaaggagcggggtccgggacccggccagggttcccccggagggggcccgggtcccaggtcgctatcaggacccgagcagggcacggcatgttgcgaacttgaggaggcccagggccagtgccagcaagaggaggcacagagggaagccgcctcagtgcccctgagggactccgggcaccccggccatgctgaaggaagggagggcgacttccccgccgcagatctggattcgctttgggaggatttctcccaaagtctcgcccgtggcaattcggagttgctggccttcctcaccagctccggggcgggatcgcagccagaggcgcagcgtgagctcgacgtggttctcagaaccgtcatcccgaaaactagcccacattgcccccttacaactcccaggagggaaatagtcgtgc

SEQ ID NO: 110645 - DNA, 1022 bp, Homo sapiens
gaagacctggaatgggggaggtaagctgtccaccatcttagggaggggctagcacgctcccaggcttgagggcaggaattcacgtcttcagaaccgacatgaaatggtgtggccctgtgactacacactttgaaaaagccattgatggtgggtgcataggctctcttcaagcaaattctttaaaattttccaaatagctcttataaacataaaggactttgttatttccagggagtgacagagtttggacccttaattaacttttaccaaacatgcaggtttaggggctagaactactcattttcaatctagaaattatccaaagagaaaacaggttactgagtgcaagcaaaatgcactgtccccttgagtatgtggtaagatttggagctgttgtgattcgataatttaattctctttgaaatccccaaaacacaacaatcatccatggcaaaaggagaaaattacatcgattgttctcatggggtgagtggtgtgctgaaattatgttctcaggtgagtggtgtgttgaaattaacggcattcagagagccagccagggctgtaaggacctcgcctccttccgggcagggatgctgcttggccgccagagggtggtgtagagctgcagccaacgcctggcttctcttgcagttttgggaactggagaagagcacggagccccatcccctcccggcccctccgtcggtgacttctgcctggctgcgcatttgagggaaacccttcttctccaggctttgctttcctcacctatgaatgttgggacaaaatcatacccgtttccttcttcatcctttgtcctcttgtaccatgtgtacgtgggatgggaccgggccatggagcatagacggcccctccagaaatcattcgaacctgatggtacctggtcagcagagcctctagccatctggcgagagtggccctggctcagtggctgatggggccgactagctgcaaaccaccaggcaccgtggggcctctgggttggccctgctgactaa

SEQ ID NO: 110646 - DNA, 1042 bp, Homo sapiens
catcactgtggtgtctgtgctgttcctttttttagtgcctagcatggccttgctggccaccctagagccggtagcgccaggctggctgccccatggttggagcagccactgggaaggctcaggccccaggcttgccagcttggccttccttctttagtctgagaaaccctggctccaaacagccaccccccttcatgggtcaccagtgagaagagcttgaggtgaccacccagagcaggcagcatcacctgacgcctggccctgtgcgggcatggggcatgtgtggggctgcgtcttgtcaggctgtgccaccttagctgggtggggacgccacggccctcacggtttggtgcggtgtggtgtgggttaggtgagatggaatcgtccttcgtgctggagtgcataacgcgtgtgagtgtatggaactgaaatggactgtttctgcctgtgtgacaggttcgtaatattttgctgttgttttggggaaaaaaaaaacccgtttttccacagagagcctatctctggcagaagtagccaacgagctggacacggagaccctgcggaggctgaagcgggagtgtgggggcctgcagacgctgctccggaacagccaccaggtgttccaaggtacggagtccgcctctcccccgccgttctttccttctttttcccccttttttcagttaaataatgttttattttagagtggtttagactcactgaagaatctgacagaagcagcaagttccgcggtgccccacccagctctgacgtgggtggcatttgacctcagggtgggacgtgggtcaccccgttccctccttgctcctctggacctcgtcccatgcgatgtccccaggctggtctctctccccctatgctgtgcttgctgacgcctcagctccacttgctccacgcaggacagagcaagtcgggtagccgctggccggtcccctgttggctgggggtcattgtttggcgtcatctttagctgctgcaaactgaaagcatcctgagccacagagccagggtggggagtggg

SEQ ID NO: 110647 - DNA, 1050 bp, Homo sapiens
ccgaggactgtaatcctcaacccgttcctcagagcaacttggtgaaagggagtgtctgtctgctgtcagaagcagtggtggagatggcggctcctgtgctgaggtagagtcccaggggatgcgcacggtaaggagggaggaggcggcaggaacttgggtggagcagactgtggctctgtggttccatttcaaaatgaggagcacatttccagaggaggagagtctttctagctgttggttgtctttctagctggctagagcaagtgcctctggaaggccgccccttctggcacctggccagatgggggctcaggtgttaagaggggcggccgggagctacctgccatgtccagggttgtagacacggggagtgggtcagtgaggctgggccagcctggagcctgcctgcgccgttcgggagcctcatctctatcatcagcgcccgctcctcagtccttagacaccctgcaggtcctgcttccaaaacatggttgggtgtgctcttaactccggagccgcgtgggagggcctgccgccagctggcctgtcacgttgtggtggggaagggggtgccgaggctggctctgaggggaatctgtactcagcctttggcctcagtgatcccccaccccccattctcttgacaggtcagggcatcaggccagaggcccctcactgtttgggatcatggggagttggggggaagctctggcccctggggctcctcctgagcaccctttagagggttccaggtccctcagtggccaggatgtgcccttctgtgctgcgccaggaggtgctgctgtggggacatgggcagagtgtcgcgggactgccttaacaggagacttcaggttaagaaacctcagctccaatgttgggaggcgagacagagaggcagccgtgggagggcaaacagggtcaggcctggccttggcggtgcttccagccaggctgtgagggtgagcccccaactgtggcgccgttctctgggctcatttctctagtttcaggggaaactgtaaaacatcagtctgtcaaaagcacaca

SEQ ID NO: 110648 - DNA, 1045 bp, Homo sapiens
ccatccatcattgatttatccatctatccattcatccatcattgatatatctatccatccagccatccagccagccattattcatccatccatccatccatccatccatcattgatatatccattcatccactcaagggccaaccaccttcccagctaagtaccaatgtgcactttgacttattacacaaacatgaagagagaccatcagttaaatttgcatgaatcaatgataacatatattattcatattcttgagttatgctaactaagaattctggctaggcataaaaaacgagcttaacaaaagtgatgaccttgatgagacctcattatatacagaggttcttgagtcaaaacaagtatgaattggtcccagcccatctggtcattcttgctgagtgggggggcctcatgcctttggggacccccggctttgagatgatgccccaagtctctgtatttgcccccagtggagcccgaggtgaagctcatcggcaacattcatggcaacgaggtggcgggccgggagatgctcatctacctagcccagtacctgtgctctgagtacctgcttggtaacccccgcatccagcgcctgctcaacaccacccgcatccacctgctgccctccatgaaccctgacggctatgaggtggcagctgccgaggtgagcgcccagatgcctggatcctgtgggccaccgcccgaaccaccccctcattcatccatttatgagtagtttatcccagcagtgcttcgttcctgcctctctaggagaggagcattcagcaggtgtcgatactggcaaacccctgcttcaggggctggggagaaggaaggcactgagaattctaggtgaattaaaaaggtgatgcgtgtgatagaggaaaatgatggaaagggagtcgatggtgcccgtgtgtgtcagcggggggtcagggtagctctcggggaggtgggcaacgagcagagcaggtgactgtcgagggcgccccactcagggggagcagccagggaaggccccaaggctgtgacatcagcaa

SEQ ID NO: 110649 - DNA, 1060 bp, Homo sapiens
tacctggacatcgccctggatatccaggcagctcagagtgtccagcaagctttggaacagttggtgaagcccgaagaactcaatggagagaatgcctatcattgtggtgtttgtctccagagggcgccggcctccaagacgttaactttacacacttctgccaaggtcctcatccttgtattgaagagattctccgatgtcacaggcaacaagattgccaagaatgtgcaatatcctgagtgccttgacatgcagccatacatgtctcagcagaacacaggacctcttgtctatgtcctctatgctgtgctggtccatgctgggtggagttgtcacaacggacattacttctcttatgtcaaagctcaagaaggccagtggtataaaatggatgatgccgaggtcaccgccgctagcatcacatctgtcctgagtcaacaggcctacgtcctcttttacatccagaagagtgaatgggaaagacacagtgagagtgtgtcaagaggcagggaaccaagagcccttggcgcagaagacacagacaggcgagtaacgcaaggagagctcaagagagaccacccctgactccaggcccccgagttggacgagcacttggtggaaagagccactcaggaaagcaccttagaccactggaaattccttcaagagcaaaacaaaacgaagcctgagttcaacgtcagaaaagtcgaaggtaccctgcctcccgacgtacttgtgattcatcaatcaaaatacaagtgtgggatgaagaaccatcatcctgaacagcaaagctccctgctaaacctctcttcgacgaccccgacacatcagcagtccatgaacaatggcacactcgcttccctgcgagggagggccaggagatccaaagggaagaacaaacacagcaagagggctctgcttgtgtgccagtgatctcagtggaagtaccgacccacacgtaggggtgcacacacacacgcacacacacagacacacacataactacacccagaagcgcgcacgcaaacacacacacacccacacaaacacgaacacc

SEQ ID NO: 110650 - DNA, 1056 bp, Homo sapiens
gtgcggtggtctttcgctgttgttttgttccacttggtgaagaggatttgagaataaatagccacatgattcaactccctcctcagttctgagtaatatagccttgtcctagcaagaaagaagttcatattgtcgtggatgaggcaaatatacattcactaatctaacatacaaggcagtaagtactgtaacataaacaaagcactttggactttcagaccaggagcaagtggggtgattaattcttagcagggctagtaaagtctgggaagtgttcactaacacaatgtctggtcattaatgaaaccaactggtttctcaaaacagtctaatttattgtaacaatataaatggttgtttgttcataaactttcatcttttgccaaaatgtttgtagcttatgtccccatttaacaaggttttctggccaaaactgcacccacatcattctaatgacctggctgtccaataaaaaaaggactctcagtcttcccataaaagcaattttgcatgcatagaacacctctatctatgaatatccctaatgaggtacagaaagactcttgttatccaaacagagacattccactggtgctagacagccacagatggaagttttctctgcctcctggaaatgaagacaaacttttttctttcttcagccatgaggattgctgtcctcctcttcgccattttcttctttatgagccaagttctaccaggtaacaaaataaacttggtaagagtagagtgcctaacaccttacagggattcaatactcaaagagaaatcaccatcaactatgaccagaaaagagggtctcataggaaatctggaagactcattggctgagaggcctgcggccatctaattcgttaattctccatagcaactcagttaaatgaagtcaatggtgtttcaagtctttgaaaccctcttattccatctccaaattaggcaagtttactagcagttactagacatcaaaaattaaaaatcaggcattattctactaaatattggtctccaaagctcctctagtttctttcagcaaca

SEQ ID NO: 110651 - DNA, 1156 bp, Homo sapiens
tttttcttatataacatctgcagtgatatagagtaggaaaaatatactatggttgtgctgagaaggcaagagaaaggatagtaagcatagagaaaactactgaattagagcacacccttagccatatgcttctcaacaaccagatgaattaagagaacatgtggatacacttaagggaaaataccttttagctctgtgagtaattctccccaggtgtctgtctgtctgtctgtctatctatctatctatctatctatctatctatctatctatctatccatccctccatctatctatgaggtattgagcaacataggaaaggtatttcttacatagtcctgaaatgaggaaattagtttagataaaatctcaaggattgataggctttctatgaaaggagatgaagatatgaacatgaaccatttgatagggatgatgtatgcacagatgggaatttggagggacaaatacttcctttgaaactgtttcttagtggtggcattgttggtgtttggtgcaagacaattccttaggtgaaaaatttagcaatgctgtgctatctgctaaataccaaagacaccttccctaggcatggtggcaagaacaaattgtcccacacatttcaaaatgtacatgctaggggatgacaatccctctaaaggattttagaaattggcctatttcctccaaggtgtatataatctacaatcttagctcccttcccataaaaaggcactatttctctctacgggtctgatcctttcatatagacaatgttttctttgttatcccaaagccattcttctgggtgtttattgttttatgtatattttcaatagtgaattatgatgtttttaaatctcttcctgtgtaggaaagactggcgttattccaggacaaaaacagtgtattgctttgaaaggcgtgtgcagagacaaactatgcagcacactagatgataccattggtatatgtaatgaaggaaaaaaatgttgtagaaggtggtggatacttgagccttatccaactccagttcccaaaggaaaatctccttagctgggagcaaacattaagccctttgaactctagaatggatggataagttttgcagactcctgtttaatccaatgtcttattcttccttgactggaaataa

SEQ ID NO: 110652 - DNA, 1533 bp, Homo sapiens
atgatgcctctgtcaaggagtggacaatcacctactgaggagccccacccccgcctctggatggaccgaatcagggactagagtttaactgcagcggaacatgtcatttctctatttctgtgacgcgcccccatgcccccaccccaccacaagaggcaggagggcccagtcatgaccctcgtctctgcagggtgtctgtacacgttcttctgaaagctttagacagtaacagtttgcacatgaaaaataaagcgagcacctaaacaatgtgtggagcataactaaaacccacagcccaaccaaaccttgagaatgcgaaacattccagaggcagtagcctccaaagcacacagagcccctggccccgccgcggctctcactatctgtcaggggaggttgtacaggtgaatgagccggggggctcatgttcctgcctgcagaacatttctgtactagtgagaagagggaatatgcattgcagttcagcaaagccggaattctgtgttgaacagatgtctgtctccctagtgtgtgactcacaccttgtggctgccttcagagcgccacctccagatcagatggggacacacaacccctggatatgtttcattgtcagattttgtgcttgattttaagaatggaattgtgggtatctttcctttttttttaatgtatcttaactgttgcctgtcagtgtttacaaactagtgcgttgacggcaccgtgtccaagtttttagaacccttgttagccagaccgaggtgtcctggtcaccgtttcaccatcatgctttgatgttcccctgtctttccctcttctgctctcaagagcaaaggttaatttaaggacaaagatgaagtcactgtaaactaatctgtcattgtttttaccttccttttctttttcagtgcagaaattaaaagtaagtataaagcaccgtgattgggagtgtttttgcgtgtgtcggaatcactggtaaatgttggctgagaacaatccctccccttgcacttgtgaaaacactttgagcgctttaagagattagcctgagaaataattaaatatcttttctcttcactgtgggtcactgactttgtgtgatgggggtgtgtggggcggctgggtggggaggaacgtttgtgggattttcatggctttagaggtcttaccagtctgcagcctcaggcaggaaatgtttggaacacaggattgtcagatccatcatgtggtggaagggaagccccagagaaggggctggaaccctcggttcctgctcccaaccataccgccagatcaccctctgacctgggtcacatccctgcccttctctgagcctaagtttctttgtcaactgaaaacactggaccagatgatgtctgcatcccatctacttctcaaattcttagcagcctgtatagctttcaggtaaggaatagcatgcatttagatgttaaaaatcaaattcccaaacatccaaattcattgcaaagtgaaaggcactgttctttgaaactgccttttgtacttttgtaa

SEQ ID NO: 110653 - DNA, 1023 bp, Homo sapiens
gttggagactgccttttgtgtggacagctctggtccgcatgtgctgtacctcccaaagggactgtccgggacccaaggaggtccccccaggctgggagaggagggcagacatgccaccctctgcccccaaaacataaagaaatgtggggttagagggttgcgcctacccgataactagtagcagaggagacgccggagcctccccagcttgctggtccccagtaggccttcagcacggctccctttctgcctcatcccaatccctgtgtggtgcacccacacttcagataccccttcctaagaacgtgtcaacagtggacactgcaggcttcccagggggaatggttatgtccgtttgcggcgagattctcattcttgatgtaaatggagaatcttaggactgaagccacacctgagaacacccagcagtcctgggagccgggcttttccttaaccccaccctacattactgggattcagagacgggggagaacgactccttcgctgggaaaggccacacgaaccaggtgtccaggatgaccgtggatgagtcggggcagctcatcagctgcagcatggacgacaccgtgcggtacaccagcctcatgctgcgggactacaggtgagagcactcgggtctgcgggggttccggatgagcctcagctcccctcggagggcttgtgccctccagcagttactgttctggaggacgcctcacttgctcctttcatctctcccaccccgtccccagcattgttctcctgttgttgggccctgagcccagcactgtgttacagatccaggtggtctgggtaatgctcttgcccacagacaacgaccaggtgtggactctgccctggaagcaggggcagcagatcacagccctgttctccaggaacctgctgcggtctctccctgtgtccctttcctcatcagtaaaggcgggtacagtggagcctgcctcaggctgttgtggattaggtgagcctggcacagggcaggtgctgagtacaagacagcat

SEQ ID NO: 110654 - DNA, 1895 bp, Homo sapiens
tcccagctactcgggaggctgaggcaggagaatggcgtgaacccgggaggcggagcttgtagtgagcagagattgtgccactgcactccagcctgggcaacagagccagacagggctggtgcctccaggaagaggcctcctggtctcagccatcgtgaagcttaaggattggggcttgagctctttcagagcccagagggaagagggcagctgctgggggcacctcactggggggggcataactggaggtggtctgccttcgctcgggctaatcagctttcccagcaggtagagcggtcagcatggcaggcaggctggagcagactcctgcccctccactaagggactgcccaggatgtttttttaagctctgaaattttccagtggactaacagttcacactgatgaacagctggagctgcaagctgtgtttcatagagagcattcttgaacctagagtcaggcctgcggcccctcatcaggcaggtaattgttttcctgcaggaccacagccgctttgtcaactgtgtgcgattctctcctgatgggaacagatttgccacagccagtgctgacggccaggtaagaactgggatgggttttggggtggggaatggcttgtctgcctgctcccgtgactgctcagagccgcaggctgcctaatgctagtcctgacatgcagaacttagacatcgccctccccacatctgcagactcgtcgtcagagcccagtaaatgcatgtctgcttttaaaccacactgggagcttagtctgtgagccccggttttctacagccacagtccatggagaaactgcttactccagagggtgttcacacacacatgacccacatgtttttatttcttggaagatatacatctatgacgggaagactggggagaaggtgtgcgcgctgggcggaagcaaggcccacgacggtgggatttacgcagtgagtatgagcgtgtttcccggcctagtggtgggaatttggccgagtccacgtgtcagtccatccacactcactccggagttagacaaaaacttgaaatgaggggctataagtcggggcggttttatatctgcccagaaaagctttaaggtcgcaataaggtgatgggagaaggtagtggctggaacgggagacctggaggcgggtgttgtccttggcctcactcatgtcccaccctctctctgggctccttctgtcctactcaaacagtcgcagtggacaagctgctttttggggtctctctccagtctgtagtcctctggcacatgacacactgcttttttctgaatagattagttggagtcccgacagcacccatttgctttctgcttctggggacaaaacttccaagatttgggacgtcagcgtgaactccgtggtcagcacatttcccatgggctccacggttctggaccagcagctgggctgcctatggcagaaggaccacctgctcagtgtctccctgtccgggtacatcaactatctggacagaaacaaccccagcaagcccctgcacgtcatcaaggtaaggcctgccctggggaaggctctgcccgctgggtggacagggaagagaccagagtggccagcaaggaaggggaaccgaggggaagccaggtggaagctagagaggtgtcctcaggcctccttggcccttggggttttggtggaaggctgggatgctggttgctttcttgggacatgagtttagccatggtggcaggccaggtgccaagttccccttgagctactgtgagaactggagagtcagggcctagtgattcggggcagtggccatcacccccagctgttgagagcggttacttcctgcagggctctgccttccctgaattgggagtgcacagcctgtgctttacccga

SEQ ID NO: 110655 - DNA, 2132 bp, Homo sapiens
cagcatctcagaggcccatgccgtgcatgcgccccgccttaggcacccaggccttgccaagcctcctcacttctcccttctgcaagacgggggtgtgccggggccagcagcatctgagggttttgactatgaatttgaagtaggagagccacctggcaggtctggagcatctgtgatgcccattttcctgccccagctttgtaggagtgaggggaggagcccagcagccagtctcagcacaaccccacggctctgccctggctttccccatcccgcttgtgcttgcgctgaggatggacaagaacaatggacccggaaatgcacattttagggactgttgatgtccttggaggaggttgtgtttgcagattggaccaagttctcgggactcctcttggaaccgtcagtggtttcactgtctgcctcatggaggattaatgagatcatgtccttaaagtggctcagtgaggagcactgtccattttagtgacatcatgccatgaatcataaatagcctgcgcagtgcagctggaaagggcgaggacgggacccacaaagtgagcagaatttccagagactgttcttggcttagggtacaggagggggctttccaaggatgccccgttcgtagtgaaacaggcttcattttgtcacggaaccgcaggctgagctgggcctggctgggcaggtgaaagcatagggaggctccctgtatgcagctgaacacgcggcagctctcagactctgctcttgtggctaccacctaatgggtaggtagtggagacctggctattttgggagctgtattgaaggctgtggcttcaggccatgtttcttcgctagggtggaggcactgcagagcagggtgagtaatgctgagtcagctgcacaccccatctcagcccagggcaggaggaagcagctcagagacttctgtggtagctagaagccggctgtgggtgggggctccttggcctgccctgggagggatcatttccactctgcagctgtgcattaaacccagcacagggtgctcagcagggtcaggggcaccagtttgttccaggggtgggctggagcctgtcttcttcaccaggctgctgtgcccctgtgtgcttgcttggggacttgtccagaacattctttctctttagttgtcctttctaacttcagaaaggacttcaccccactgccctggcccaggagtgttgggtacaaatgtctgcccagctagcccagctccagggtgggtaccaccatgtgtcttgaagtcttttgtggaacccacaaccatgggccctgcctgaggacctgggagaaatagaaagggctgtggcctggcacagagctaggtggctgtgcccccctcgggtgagtcatgcctctgggccctcccggaaacagggtgacagtgacccttgcgtgctgcaccctcagccacagggagggtgtgagaggcagcagtgaccatccacatgctcaggagacatgtgcggactcaactgcccacgcataggaaggacaggaagggtgctcagggaccccacacctgcccccaaataccttctgagttgcagatacactttggtgtgtatctgcacttaagccctccggaccccagaggaaagctgcggtcgtgctctccatgaccaaccccaagacaaagggagcgcgtgcaggctgggggaagtgagaggaggtgtgagtgctaacatgaggcccagccacagtcagctttgaggacatggtgggctgagcatcgctgggcttcctcccgtatgtgggctcttctgatgtggtcggaaagcctgggatgtggaagttctcaggaattaattgagcctgttatagtaaaagattttaaaaccatatgtgggcattttttattttagagggaattaagttccacttgctgtgaaatccacatagcagtggtcttttttccccagatctttcattctgcagcacatgacggctgagtctgggctgcctttgcctccgcaccagcgctcaggccttggtggccttgcctgccgcccctcgcctcctgagaatgagcagctgtggtggcaactcgggcctgtcttcatctgcgccttctgcacccactccctgcagaggccccctgtggc

SEQ ID NO: 110656 - DNA, 2279 bp, Homo sapiens
ggctgctgatttgccaggcagcagcacgctgttgggaagctgcacaggaagcccggtctgcaggcccaggtggaggccgccaggccacgctgaggcatcgcagtgggcagcacgctgcaccctcacagctgtgcacctcgtttccagaagtcactgcagcaactgcaaaggagaggcaggtgtagccagtgccgtcccattccacaaaggtggcctgaggcccacacgtcattctgatgcccctacaagaaaagaaacacagtgagaaaactaaaccacttcctggcatattggagtttaccatgatgtgtccctgggctttttctgatgcctaagcagggtttgttatccagatgatttctggcaagatttctggcaaaatgcagaggcccaaatggcaggcctctggatgccacgggctctgacttaagggtggctgaatattgttgccctaagacacgttctcttcactaggccttttcctctagaaagcctaagcaaccagacatggttctgagtgggcctatggccacgtggccctggcccggcagtgacctgtggctctccccctgccctttaccccaccaccgcctccccccctcccccgcccgctgtgccccacagatgtgtctgggaagctgaggatctgggataccacgcagaaggagcacctgttgaagtatgagtaccagcctttcgctgggaagatcaaagacattgcttggactgaagacagtaagaggatcgccgtggtcggggaaggaagggagaagtgagtcactcctctcagcccctccctgccctgttgctgtggctcatgcgtccatgtgctatgaccctgggagggggatgcgctgatgtctgtactaacttgcactcgtgagggttgagctcccagtaggtgccgggccccgtgagggctggctgcagccccaggtaaggtagaactccacatcacactgggtttgtcaccagggcccagcactcatgtatctcctctgacgtcctgagtgccttgcctgctagaaccccagctctcatgcccacctgcaggcagcaagaaggggacagagtgaaagagcaacagcacttctattcggggtccctcacagcagctgccccatgaagctgccagggaggctgaactgtttcttccagctgggcacctcccccaagggtctctgatggaggagggaggggcagtggatgctggctgggtggcactgggtggctactgacctcaggggcctagtgactggtgaggttggtgccgaaacccaggtttttttaattcaagagagtcagagtcccccctgcagcaccatggctggccataaccccttgaacttgacagtggcatgtctgttcttcactgaatggcactttctcgtacatgttctagtaggtgtttttccatggcttctcaagtcattcctgttggtcttaattccttcttttttcagtagcaaatagtaactaaaacagtgtttttgttgaatgtcagccaagagcagggcatctcattcctgtaggggatggtaactgttccctcccaatagaactgtaaggagaatggtgaagctgtaaagatagccctgggccctgtggcgtggggccccacagacacacacatgcatccccttcccgaaggcgccggcttgccccatcttgttcttgggtcctttggacaaatgccttgtggagccagaaccccagtgcttccctcatttgtccctgtggcgttctgagctgcctgctgacagtcactccatcctctgtgcactggcagctcagctatcagattgcttaccagccttctgggattgattttttttttttttttttgtcttccacctgtgtcattgggtcaaggtttggagcagtcttcctctgggatagtggctcttctgtgggcgagattacaggacacaacaaagtcatcaacagcgtggacatcaagcagagccggccataccggctggccacgggaagcgatgataactgcgcggcattctttgagggacccccattcaagttcaagttcacaattggcgtaagtgaacttactttttgggtgaaatttgtggtttgtacatgaggctagcagaggctgagcctgtttagatgctgatggcagagaccacagcacatgccacgtatgccatgatacacagaagtgggctcccaggggtgtgcagagagagggagggctcccccacccagcactcgtcctccccaggccctcagctgggcatggatggttcccacaaggaagggcc

SEQ ID NO: 110657 - DNA, 2421 bp, Homo sapiens
catggttttcgaggtcacactcagaccatggcagcctcttactggtggcgtagccttagttgagtaactcaccttcctgggcccaaattttctcttccaaactggggctgctagtgcctgcctcttagggtgtgaaggagccagtaaggcatggatatgcccagcatggctgttgcactaatgggtacttacccctgggtgacccgttacctgtcacaaaactggggctctgttctgatcgagccaggcggctgggtgagctggctgactgctgttggcggtcagctgaggtcacggtgaagggttgggcccggagtctggctcatagtaggcatttaatggtttttgtgtttagatcttctccagctccatctgtaaaacatgctctcatttacatcccatgatttatttagctctgtgatttattttttccccaagccctgcttgccagcaaaagtctcttcatttaaagccccaagatttggcccgaatgtcttttacatgtttaacatggagccgaatgctcttagaagtgtcttctcaggagaggaatgcagttggcaagggcctccgctcctgcctggcacattgtccgtgccctgtcagctgcaagctgagaacctgcgggcccaggcctgccctgtccccagtccccagaaaggtgtccaatgagacagaattcaatggaaggctgttgcggagactgttgcaaaggacagaccacataaataagtggccatcgtgggacgctgtcctccctgaaaagtgccctgattttgtagaggagccaagggagtttggggccatcctcaggtccaagtgttcttgggcgagatcatattttatgtttctaatacatttctttgaatagagcgaagcaattgttaaggcttacattggaacgtttgctgcagagatgaagtggggctaaaaatagtgtggtaggggggtggtttggagaagggggctgagaaagagccgtgctggcccactaagtgggttgcctggcagctggccccagccctctgcaggatctttagaccctgtcagtctgactggttcatgactgctgaagtgttgaaccttgggaagggctgcgcacctgggagcctccggcactctgggagcccacattcccacggggcagtcctcagtgcacaggtcatttcgggggcaggcccaggcctccttttcctgaggttattttcatgatactgttctgtctgccttggcgctggggccgtggttccaggctgcccttgggagttggcgagggccatgtgacaggcgtgtggtttggccttacgtaggcccagggcaggcttcctggaggaaggcgcctctttcagggtgggacgccctctgccttgtcctgagagcaatgtcttctccatggggcagcatgggccctggatgggcctgagcatagcagaccacgtggtcacatgtgcatgtgtggacatgtgtgcatgtgtggatatgtatgctcctgagtgtatctgcatgtccttcctgcacacacagtgctcccctccgatgctgccagcctgtggtgacttcctcttctgaccccttcttcccccccggcctgttttatcagtgaaaggacttaactaagcagatctccaggtcacctttggaactcagctcaggtagcacagcaggtggtcttcctggaccttgtgcagagaactgggcccttctgggactccccttagttagtgctgttcactggatttggcatcacctcttgcctgtccccgcagctggactgagagcaggacagtccttacgtgcatctccctcatctcagaggatggctcagtctaggctcgggctgtgtctgcccacaagcaaggcatcttcgtggcctgtgtagagcctccgttaattcgtggactcgttccacctgactcgtaacgagctcttgctgtgcactgaagactagttggagacttcgcacgtgttaactcgtggaacctacagcagccctgtgagtggctctgttatttccactcttctggataaggacacaagccatgttgcttgctgagccccacaaagcctgtgtgtggcagaggctggatttgaacccagggcccctgctcccaaggcctggctcttagctgctgccctcctttgagctgctcagttgcagcaagaaaacaaaagctcttttcactggaagcagctgtagagctgtggtggttgttaacgtgtcctgacaatcctcttaaaaaggcgcctttacctgcttagcagatggggctgaggttttaaagcgtgaagccttgagagttagtctagaatgctcccatttcttcacgccaacacagtgctcatttggagagggtgtgtcgggattgggacttggtacttggtgacaggatcgtggtgggggattgggggtacgtggccccc

SEQ ID NO: 110658 - DNA, 1038 bp, Homo sapiens
ttcctttccaaacccaagtttttgatagagagggctcccacagcgtgtcctgctctgctcctgcacagcacagccaggcgctgagtttggggtccaacattgattggcagccaggagagctggtcctaaacacggaagagaacagagcgctggaatgaatgcagcttcccacaaatgggagggattagaaccagggcttcttgctctaatccaccttttgtgtatctgtttcactgatatatttgttctgtattatggaaagtacagaaaagcagaaaaggaaaaaaatcaccttgttgtacagtcatagactaaggagaacgaattaaagtaacatgaaattctatcacccagagataggtaggcaggcagtagatacgtaggcaagtggtatgcttctgcggttttcttcacggttttagcttcagtgtttctttgtacacccctttcaccccatatctgttgatgtggagagctggaagcttgactgcttctccattccttctgttcattccggggtctcctcctgcagaacccagcccttgctgacatctacacagagcacgcccatcaggtggtggtggccaagtatgcgcccagcggattctacattgcctccggaggtactgtatgggggcaaggctcgtggacacctgtgggggcctgggtggcgctcagggcccagggcgaagctgggcttctggccttgggagagtgggaggagggaggtggggggtgggggagcaggctgggggtggtgagttgaggggagccagtataattagtttcagctgaggctgacaaggaatgtgtaagccagccttgtccaaccggtggcccatgggctgcatgtggccccggatggcttcgaatgcagcccaacacaaattggtacactttttaaaacgtgaggttttttttcttttcttttttcttttcaagctcatcagctatcgatagtattagtgtattttatctgtggcccagggaagccaaaagattgaacacccctggtgtaagctaccaaaatgccccttt

SEQ ID NO: 110659 - DNA, 1072 bp, Homo sapiens
ccgccaccccttccaccctcacccccagcagctgcttatctgctttctgtcattggggttgccttttctaaaatcttctttcatatgaagtgagaggcaatgtgtagtcttttctgtctggctttttcactttgcataacatgttggcgattgatagctggtgttgagtgcatttgcactttgttcctttctatcactaagcagtgcggtgtgttgcctgtttctctgttcacctgttgatggatatttgggtatttccagtttttggccattgcaaagaaagcttctgtgaacattgctcctgtgtcttttggtggacacatgcttccatttctccagggcagatacctaggagtggggttgctggtgtttggtgtgagtagtgtctgtttaggtttataaataacctgcccaactcttttccaactgtaccattttgcatttccaccagcagtgtgaacattccagtgtccccacccctctacccttgccagcacttggtgatgtcagtcttttctttttattgattctagtgagtatggagtggtattctgttgtagttttgacttgcatttcccaagactaatgacactgagcgctttttcatgtgcttacttgtcattcgtagtatcttctttggatagacaccttgatacattctaatttcactggcgaacgattatcccaaaatggattaatttatgactggtgtctattatatcacataatgctgtgttaagtcttagggatgaaagagaaggtctgtgtgtacttctttttttctcccccaaaccacttattgagatggctagtgagataaaggtcatgttaagcagggcacagcagagttggaggagatggacaggaatgctagggactatgatgtgtgttgtgccatcccggtggacatgttaaatgatctggaagcacagaagagttgatacggatagcttgggccatacttggaggcttcatggaggagggaacgcttccgttaggcctgatgggtgagtgggtgtccgtaggcagggagaggtgctggccaagggcacagactacacacagacgtgga

SEQ ID NO: 110660 - DNA, 1036 bp, Homo sapiens
catgcgtaagactactggagagatggccttgcccaagagtagttggagatgcttctttggagagtgacctccaccttctgcaaggcccttgttagggacagctgtggacacaggaaagggccctgtgtgcgtctcttcgccgtctcagtgatgggcaggcactccctgccctggcgatgtgcctgctccttagacctgtgggtccttagctttggtcaccttgcttgtcacttctacgtatgggtcctgcctgctctccagggaaaggccagcatcccacccctacccccgccccactgtccaatccagtgtatacccctgagcacctctctgttctttgttgagtgtattttgtgctggtctgtggctgaaacttggtgtgcttgcctcttctgtttccatgcctgcgagagtgggaggaatgttatcatgggatcagtgtaagatttaacggagctaattcgtaaagcatcttcagaaggttgtctgggccctggcagggacctctgctcttgtcttcatgactgccctgttgggtggataccctcatctctcttttgagaggtgaggatgctgaacctctggaaggtgctggaatttgaaccctgggagccacccccaggtctacctttgcaactcatcagttaaggccctggtgggccctgggtggggagtaggagaggggaagactgaaaacggaggtggtggtgtcccgctcacacgtagtccaatgaggggtgctgctgtgcagggccacacggtgagtacccccaggcctgtttcaaggcatctgaggctgagctgggaggcaggaggggaaagtcgttcagggcatggcggcctgtgagtgaccaccccgtcctcagccagctcaaggagctgcctgtacactgtttggaagcacacagctggttggccagtgcagactttattctctgtattaaagaatcacactaacattgagaccaaccgtaaggaagacaacaaaaccacagggaggagtaaaggccgccacatatggtccctgatttgcagt

SEQ ID NO: 110661 - DNA, 1179 bp, Homo sapiens
aaaaatgatgtctataaaattgagtttccgggagtgcaaggtttatagcaatttgacactgctgggaacccaggcgcagtatcagtggacttttctccttgaacagggggcagaccaagtggggggttggggagggtattgggctcactcttggtttcccttggtgtgagctgccaccattcacatgcagaggactcacctgtgtttcctgcgggttgggggtaatggtggcatgacagagggcttgaggactgacctagctgcttctccggaattggacgcctgctgactacctgcgtgtatccagatggccattggcctgtgggggtgcaggatggaggccctgcccacatggagctcactgtcctgggtgggagtgaaataaactctaggtggcagaaggaagtggtgcgttggattatcacctgggtgcaaacgagctggcagcagcgcctgccaggtgcagagccaggaacctctaggccttcagtctgaccacctgatggcaggggaagcagagggtggtggggggccttcatctcaggagaatctgagtggctgcaggtgccagtcaggacgctgggcttctgcagatgggaccacatctgggaggaccgaagggccgggtgcttatgggctgttactgtggcactgagcgtgaggggagtggacaggacccaggctgagaagtgctggtgtgcagtggtggcaggtggctcacacagccctaccatagcgcagccctgctctgaaggccactggagccattcagaggtctcacagacaagtaatcagatccagcctacggtaaggagaagttctgtatctgagatctgaggcagggaagccaattaggaagctgctcaaagatgaaggcggcgtcagcgcaggttccgttgcgtggtgcagccatctctggctctcacgtttcccacacatgttcactaagcccctgtcttggcaagccataccctaagccacagaggaccaggattaaaatcagtgattttcagggaggggtaatttcccccacctcattcccctgagggatatctggcaacgtttgcagacatttttgtgccactggtatctgaagtcagggttgtggccaaacatccgacaaggtacatggccgtccttccacaaagaactgtccagccccaaatgccaggggtacca

SEQ ID NO: 110662 - DNA, 1044 bp, Homo sapiens
agtgatctgctcgctcgccttggcctcccaaagtcctgggatacaggcgtgagccaccacactaggcctttccctttggtttatacttagatgtagtcaccttagtagaggggtgtccccggaatagaattttccatccccggccttctgtctttctcattgctgacaataagtaggaagcaagctaacaagcagcaggctacggctgcctacaagtgtacataggtatctgcctgtccccctaactgggcatcagctccaggccagcagggctttcccctctctttcagtcactgccgtgtcctcgcctaagagagtgtctggcacacagtaggtgctcagtgagttactcattgattaaaaagcctggaaaaccaggctgtgtcgtgaagataataggcagccactgaggtcttactgcatgagaacaaggaaagctcagctcagtgtagattgccggacctaaattttgtggaatcgcctttcatacctaagaggcgagcaccgttgccagctttgcacttggagccccctctgtcatttattttgttgacttaaaagctgttttgtgaacccagcataatggcacttcttaaacttgtagaaaaagggtgtttcttacctgtttatttcaacacatctcgttgcctcacctggagaggcaactctcctctgtagagtgaaagactataatggtggccatgtagaaactaatattccagaaggagagagctccaagaaggggattccagtgaaccatatgtacactgtgtttgagagacattagttccccacggagaagggatggatagtctgtgcttcgggggtctaaggaaggcttcctgcaggtgctggtacctccttaggtctggggtggttccttctaagtttccttaccctgcctgcatcacctctgcctcttatgacctctgtgcaaagactgggaagggtcacccccaatggctgtgaacgaacctgtttgtgattctaaacagggcacgggaccatcctacaataaaaattacccagcctaaaatgccagta

SEQ ID NO: 110663 - DNA, 2350 bp, Homo sapiens
cccggcccctaggcgccgtgcgggtggcgggggagtcctcggcgcgggggaggggtgcgggcgccggccggaggcgtggcggggccgccctcggtggtgcagggcgggacccccgacggggggtgcgcccccaagttggcgccgtgggccgagccggaggagccccgctgcccccaagggcctggcccggggcgcggaccaggaagtcgcgcggttcctggcgctcgtggaaagtggaggccgccctcccggcgcagtcaacaggtgaccggccgagaccggtccggggctccttctcccttctgtccccgccgtccccgccctgccctgacatgccccgccgcatttgtgtctccgcagagaaggtgttcgccagcctcccgcaggtggagaggggcgtctccaagatcatcggcggcgaccctaagggcaacaattttctgtacaccaatggaaagtgcgtcatcctaaggaacatcgacgtgagtaccccctaccccgggcgcggttctgctccggagccaccttgggatgggataattcgccttcctctccacttctcacctcctgcccattggcccggggagggtgagggcgccacgccccctctaccgggagccacacctcggagccccggaagccggcctcagattcacccaggtccttgtctgctccttcttgatgaggaaactgagtcttagttcgtttctgtctacggtcatagcaccctgaaagcgccggatcgcctctgatcttggaagctaagcacggtcaggcctggttagtacgtggatgggagattagattagttcattccttaaaagcaagggctccggatttgagggatcagactgacccggtcggccgctgcgtgaccttgagaagattggcgatttgggcatctctgagccccagttttctcgtctgtaaaacagatgatgagatgatgaccactctcgcttcgcctgctggctgggcagatggaatgaatgagctgctggcgtccctcaagcccagcggtgcctggtgcactttgagcccttgctgaatggaatggcactcagctaactcgctgttaataccctggtcttccagtatggcagagcccggaaaaacacccgggcctctgggccagccagatctgccaccatggatctaagccccaaagcaaaaacaggaagcagtgttttcccatgaatcattctctgcaagcctccggtacccaggctgaaaaggcttctagagccagctccttgggaaatccttgcaaattcatgttattcctctgtaattgttggggtgacccagtctgtcagtctccctcccttcctgggttacacgcttaaattttgcttttcccttcctcagcctgagtgatggaattggtggggtgggagttggaggtgccggcccggccattgggtgatttctcctgtgctgtgcttagtgggggcggctggcacaaagatgtatgttttgattgatgccataggcatacaagggttgtcaacttaaagtcagcctgatttcccttggtaggttgggactgttgatcggacacacttgccctccaggaggccagcaactggctgagggaatgaaggggtctctgggtctcagtttccttctctgtgaaaggagaagcctcttggtccgaagagctgctggctctgcccgcatctgtctcgttaacccaggcagtcgctgctgttcctctgctggaagacagagctctacctgccctggattgctgggcccctcaaatgagggggtgggcgggtgtgaatgtgctttgaaggtgctaacaacttgctagtcacacagattcctagaaagccgaagggccttgcttagaactggagaaaatcaccagggatctaatggtaatgatctggaagtctccgaaggcaggtcctgaggcttttgagaaaataaaaattgagacaaccctaaagagatatttagtagtttggcaaataaaatccactaacacgtcctcggatacagagcagtaggatatttcgttttgcccctaaccaggccttccctgtcgttgcagtccacattgacttccagggagggggcctcacataaagtacctgctgtgcatctggccctgtgatagcttcttaaactgtagcatctctttccaccccacatgggtccgttactctaaagaggagtcagacttagcaaggtgaggcaggccagtaactggagctgcttctaatggagtggtcattcagggacaggcacccctttgcagaaagcatttcccagcttgtgaaacccattctgcctgtttctgagctctgtattcttaccccttccccgtggtttgccattttct

SEQ ID NO: 110664 - DNA, 1050 bp, Homo sapiens
tgagcacgctctgagtcctggcttctagagccacaaactgcaaatacgtcagatgtgtgaggcctatactggaagctttggggaggaacaaagccacaggagagctgaatttctctccaaagcctgtcaagctgcttcctcactttcaaccctcatgggttctgtccaggctcaggaaaagggggctttctctttcctgttgcttcaactgtatcaaccccctaggaagagccctatgcaagggtagcgctgctcccgtctagctcaccctgtggactgaacccccgccctttccacaaaggactgttgggtatagtgggggaagcctttctgctccaggaatttcagtcccttttgcaggcctgtccctgtctcataaataagctcaagtcatattcaaagtttcatctccggagtgtccctggagtaaatcacctttatctactacctcaagccagtctcgctgcctccacctccccatctgcacagggagttggagtgattgccagtgagtcctctagagggtctgacacatggtgggaagtggctgcccacagcctgagttaatgtgtaacgcttttagcttcgctgtcaggctttcagatctttaattctcaaatctcactggttggatcgagtccatagtccgttactagctgtgactagggagggtggtgaaatgcatggcaaaagcagctactggtatccaccttttgacctggaaaaatccgggttgtggggcctgggctgtccctccaaagtgaactggaaaccgggctaccttgccagaagtgcttggatgcctttgtcagaggactggtaacaaagcctttaacctgctagcataaaccttatgcaaaaggggttagcccggttaattctgccaaggcaagaaatgagttatctgcaaccctccagtgaactcgtttactgaatcccttcttggggggccctatgtgttgtaaatacctttctttccagttgagcagcccattggaaagtgggttttgcaaataagcaaataactaacacctgcatgctgcagcagct

SEQ ID NO: 110665 - DNA, 1124 bp, Homo sapiens
tgaacaagtgagtagaaacccctttggatcattttattactgcatttttatttggtgctttttaggaagtagatctttggtaccacttcactacgtagagcattcgaagttttatccatgttatatattgtactcctgtggcatgaaaaatagctcccaagatatagagaggagaggagtgaagaaaaggctgtggtttttttttgttttgttttgtttgccacttttttatctcctattcctcaccacatagtgctttttcctgaaaagctggactgagaattggccttgaatcaggtcagagtgttaactgtcaacatgaagtattttcacttcgcagcatcaactttcaagcataagtaaaaacacaacttgcatactttgatggagcttaattgtgtgagtagaatatgtagcaaagctttttaggattttcagaactagaatactttttaaggaattaaaagtgtttctggaagtcaaaaatgggaaagcaaaaagtagctgtcctccctaaagagctttagaagatagcttaacctgtaggtacatgttatgaaataaacacatttctaacaatacaagggagtaggggcagacctgtgttgagtatttgtgtgggttcttaattttgaaggacctccaatcactacattttgttaatactgccaataaaatcattttcaacttattttttaaagtaggttttcttactttggtggaccagaagtgagagattgttatatttaggatataggcaaatacagtaaaagttaaaaaaaaaaaacctgacccaaagtatactctgatagactatattatattcaattttgtatccccagtcgagaacatcttgtaagccttcattaagggccacctgctgtctgttgaactagactgaacaaaatatattttctcacaagctccatccctttttctttaggacatgttatatataatccatctcagaagttgaagatgtgatgttgctcggcctttggaataatttttaaatctgtaaatgtctatatgagcagaaacaaaacattgtgtaacatgttttaagcattattgtaattcctgtgttaacagtttgtgtgtctgctgctctggttttgaaacat

SEQ ID NO: 110666 - DNA, 1904 bp, Homo sapiens
aataagtaaacagttactctttaaagcaagttatcttttagtttattctggtttggagtccctccaccaagattcagtagaagaaatacagactgtagaaatgagaggactgctaattcttcagaactgtaggaatattgggagctaggagtctgaacctgaagtatgtgattggaccccagaatgtatttgaaggctctgaaattgtacatgcaaattggtacatatgcatttttctggagagagcctgtgaaactgaacagattttcagtgggatctgagacttttctttgtttagcaccccgttttctgagtacatactgatctttcataatccattcagaggggcagattgagaatgttttacacatgctcttcatataaatgctacagaaaaacctttgttttggtgtgcacatccattttgtttttgctttaatttgtgttctgagtatttggtgcacaatggaaattatattttctactttactgtcttcaatttggttatagagaaatggccattcttttactccctccctggttttgtaatactcccgagtgttccgtatagcacaaagagttttgcttttactggccattttaaagaatgttttcaactgcttgcctgaatttactcctttcacagcaagtgttagaagaaagataacattttcaaatacttagcttttgctttctttaaaatacattggtttatgacatatgggaagggaacgtacctttttgcaaagacaaaaagagattacaaaaggaaaatatctaaaactattttctctttgcccttaccactcccagaaacataagtgaccaatttaaaatgctagggaacaggcttacaacataggtaaaactcgcaaacacagttcaaggtaggctcataaagttgtgaaaagggtttcatatgccctttagttttcatttgggattcatccaaagaccatgggtggatgctgtcttctctcttcttgatccctttgattcatggacactagactccctttgccatttcttctgaaccggccctcctgtggactagcacaacttccttgcccactgtttcttcctttctgtgcctttgagaccccttaaggttttccctcatgcgattactagaaaatggcaggaatcaacaaaatggagacctcccactgtttttgctaaagttacaggaacacgatccctagttttcattgatagtaacgctgtttctaatttgtcttaaccacattcatgcttaccctgctgctcagctttctcagggaagcaactccaggaacactccttccactcccctctctaccaacagatgtcaggactgtcatttatctacacatttgtgttctttagaaaaaggcccaccccctgcacaagcacagcctcttgggcagataggtggctgggtcagtgcttaagacaggattctagtcttcacttgcctgtgcagctgggcgctgaccttccaggtagagcacagatggcacaaccccgaggcagccccaacttgcatttccctccctccaggggctattcctgtcttaggcgatttgtggggtgcagtgaatgaaactaaagagttgttgcacctgaaaaagacaccagtgattgtttattgggtagtcgattggagactttgatttttttttttttttttcacatgggaaagtcttagattccagtagatggaattgcaatcctttgcagtttgttctcattacagataatcaacatttcttttgtataattcaatacatgatcatcaagttaattggtaaatttttattgaaatttaaaacttgcatttttatatatgtgtatgtgtacacataaaaatattttttaccatatgaaaattgcagtagctaattttctgatttcctattttataa

SEQ ID NO: 110667 - DNA, 1013 bp, Homo sapiens
ccttttgtatcaaggctcagaggcagaggctgccatgatgaccattgctacatgtgcaaagtgcaaaagtgttcacaagatctctcttcaagatttgcagaagggtacagggaaggacggtatgtatgtctgcttccagtgcagcctcggtgcagctcctcccaattttcattttgtgagcaataattccagtgcgactcatgttggaaataaaactgaaaacttctcaagttctgtcaatagcaaatttaaggtaaggaactttaagccaggcaaatactattgtgataaatgtcgattctctacaaaggacccgctgcagtacaaaaagcacacccttcaacacgaggagattaaattcatttgttctcactgcagctacatttcgtatacgaaaggagagtttcagaggcatttggtgaaacacacaggcatatttccttatcagtgtgagtattgtgactatggtgctattagaaatgattatattgtcaaacacacgaagagagtacatgaaagggcaggtgcgaaacggccagtcaaagctgttgccaagctggagccaaaaagaaccggaacttcaaaacaaaacccagagcttctaaaagcttccaatccacggactacatttcaaaataagtggtcagaccaactgtcaggtttctctctccatgcaaataaagacaaaatgcacaatatcatgttgttacctgaaccaaaggaataccaaaaagatgtagtttgtattccaaataaaatgaccctgtctgagccaaatgaagtcaacctatttgagaacaaaaatgttgaagtagaagtgttatcccctgcaaaagaacctgttcagccaggtatgccattgacagttgttgcaccagcagaactagttgtccctgcaaactgtttagcccagttgatagatgtgaaggttgtcaatggtacacagcagcttgttctgaaactgtttccgctggaagaaaataattgccttgaagctgggagggataatggag

SEQ ID NO: 110668 - DNA, 1007 bp, Homo sapiens
aatacagcttgtcatcagatatgatgtgttattttggtgctttccaaagggcaggttttacaccagatctgagtgcgttactgttgcatctcttgagcccctgtggaggggcttttttaaactccccgacgtcggtctttcagactacctttatatggctcttggcctgttagcattgtgccagaaggaagctacctgtgttgccacccatcattgtcattgaacaaacactgactgagtccctctgggtgcctcttgacacttggagaaggactcaaaaatttcaaaagtcttctcttatactctagtgttcttatactctagcattctaatcatcatggcggctctgggaggaattggataattgttcctaattctagttgctagatgaaaaactgaggttcagaagatctaagtgactttcttaagtcatgaaagaaaggcttttagcagattccaaactagaatggattttgttatgctcctagtttgccatattctgggaaaataagtgtctttaaagattgtataaaagagtcactgtggccaggtgcggtggctcacgcctgtaatcccagcactttgggaggctgaggcaggcagatcacctgaggtcaggggttaaagaccagcctggccaacatggagaaaccctgtctctactaaaaatacaaaattagctgggcatggtggtgcaaacctgtaatcccagctactcgggaggctgaggcaggagaattgcttgaaccctggaggcagaggttgcagtgagccaagattgcaccattgcactccagcctgggcaacaagagtgaaacactgtctcaaaaaaaaaaaaaaaaaaaggtcactctgtgtatattggagtgcttacttgctctagaaaaccttcgtcacctcttgtgtcccaggccaggccatccgtgatctcctttctgctccagcctctcctctgccatgtccgtacaatactgggttattgtctttcctagaacatgtcccgttcc

SEQ ID NO: 110669 - DNA, 1130 bp, Homo sapiens
acaggttacaaaggccaaagagaactcccatctacttgttatgaagaaacctcacatctttttcacttgcacagagggatgtggcaatgtagtaacattgcattatcttgagcatagttcagaagccaagaagatactttcaaacaggtgacataattcatttatggcccagatgtcctgccttccccatcacactgcatttgctaataatcatggctgcatgcttcatattggcacttgctcctatggattcttaattcaaaataactgctgagaaagttttgcagaggcctctccaagactctgccttcctcatgcgttctggctggcttgtgtattctctggggactttccttggctgggatgctctccattccttgctgatggacgtgatcttactgcccagtctgtctcagattttcaagtatttagttttagaataaatgataccttcccgcccccaacttttgaaaggacttagagagaaaaatggcaaaagtgccttctgggatttttgaagactcctgggggctgagcaagaggctgaaacactgaaaatgagccagtggaatcctggtttggatgattgttcaaatagaggaatcttgtcacatgacttagttgagaatttcttagggctaatatagagggtgttatgttcaaatagttggtaagcaaattgtggcaggcaggtttctttctcacacactagtattacaagactggtagatcagagcataaacagatatcaacttatatgcaaatctttggaagagaattgagaactgaggatgagagaggtgcagattggtaactggttgaccaagaggaattaagtttatttttgttgctccagagtcaaggcagaacaaggaaatttataggaaagctgatttctgtttcatttaagggtaaattgttggtaatgagaactatgtgaatataaaattggctgcctatagagggaagtggttttttgtttatggcgatattaaactatcagctgcatggtcaattggagaagatgttttaaggatttaaatattctcagaagcttcagccagtaatttggaatgctggcttttcatcaggattacctagggtgcctttacaagccacaaaaatctcct

SEQ ID NO: 110670 - DNA, 1011 bp, Homo sapiens
cagctataccctgccccagcaatgagtatggtagagccacattcaaaggcggactttggggtcagcattcctgaaaagagctgcttaagtttgcttctacatccaaaaacgatgcagtcacagtcaactaacactgagcttgctgggcatctcctgaacagaaatgtatgtggtggtccatgtagcatgtatgcgatataattggccacccacctttccttttcacattaacatttatcacagaaacacattcatttgctacagggatatttcacaatttggctgaactttgagagaagtgggtgaggaaaaggtagtttcgtaactagtttatatataaacctaaattgtagtgagtactcttgtaagtggagcatcttttctatggtaattataaatggctgttagcccctttgcactaaagctaggtgggtggttttgccacagaggtaaattatctttcgggcggtataaccaaacaaataaaatataaagtgagattcagggcatgttctgaatacagcagttaattaggcagctaagaaaactgtattttagcccctctgactatgtgattggtatttttttaaattaaaaaatggaaaataatatttttaacaggttatgatatgtcagtcatttaatcctcacagtaactctgtggggtaggtaggtactgtttctatctcattttacaggtaaggaatcaaaacagtgggtatacccaggttgtatatctagaaagtgatagagctgggattttaaactttataatctgattccagaatctctacctttaaacactatgttaccacttacttctcttcaaattttattgagcattagatgtttccagtatttagaagtcaaatgcttcgtttttaataggaacttacacagtcttttatgtttttttatagccctcaatgtcactgatgtggattctcccaaactcgatactttgtttgtttttatgtccccataataagtctttaagaaaacagggcaagt

SEQ ID NO: 110671 - DNA, 1045 bp, Homo sapiens
ctcctttaaaaaataatatcccgggcacatgacaggccaattgccctaatgcaaccaaggttaagaactactggtttaatgggagatattttttctgtgcttgattatactgttttattaaactctgaatccatttctttctgcaaatttttaaggcaaaaaagaaatgtgaaaatatacgtctcatttttagcaccttcagagacccggagtcatttgatgtgcttcatgacataaaattttgtaatatgccgtgtgatactaccttatttttaccatatatgtatttttaatgcttaacaagagcatatttgctctttcacatttttttttcacatacaaagttttagacatcaagcactctaaattcttttttacaaatatttttttcttaaaatgttaagaaaaagcctataatatcacttcctttgtttcctgatgtagactcagttgatgtgcacagcagtgtcaagtcaatctccaaaatactccctgtagacagggtggggagaagaccctcacttcctgccgactaatgaactcatgttgatacagacctttgcctcatcagattcatttgttaagctaaccagtgtctgcttctctggacattactggactcttctacctgtgaagccatcttaaaaaaatatattgactgatttcttaacgaaacatctactctttgccaagcataaagttacctcccacttgcatacacccttttctcatttgtcctcacatcagctgtataaatgagaaatattcacattttataagtgagaacattcaggctcagataggttaacaagtttgaaatcatgtgctagtaaaccaaacacctaggttttgaaccttgttcttcttgtcccaaggtcattattctctactgtgttacactcagctgctttcacctggaaaagcagaggaatcaggctgtctcctgcagctgtcttggtccattctgctgcccaagcagtacacttggtttcagatggaaatctaggatcccaagcatgggtacatttgtcggcagcatttggaa

SEQ ID NO: 110672 - DNA, 1083 bp, Homo sapiens
tattgatatctttaactaggatgcaatttttaaaagttactttcatcttggatcaaatttagccttcaaaaataacacttttttgcgtagacagtttgctatgctgataacattcattgcaaatgcaatttgaaaagagcagacaaaggatggcattcctttatttattgggactcctttctgatgtattatacccgatctgaagatcttaaaaatgcaaaatggcaattaaaaaaatccatttagatctctagagatttatttgcctttaagtaagggcatcggggccagtttttgtgcaaaaggaagaacaaagaacattttatttttgtctctgtgaagcctgctctttcattcattcattcactcattctttcaaccagtacgaaccttattgagtgccttccttggccaaacccttcgctattgatcatgataaacaagatccttaccagggagggtttccccaatcatgattgttctcaaactgcctgctgtctactgcattttctttgttatgcaaactcagctaactgcaatttccaggattcatccttggagtgaaagcagctacagatcagccagtctaaacattgtcatcatagggtgagggtggggaggcatcaaaatcaactagggagaattttaaaccatatgcctgagccccaccctaggaaatggtaacctgatctgctaggttgcatgtgagtcctgggaatcctttttaagttccgtgggtgactttgccatacacccctgcttgagaaccacttctggggctcattccccttatcttcaacactctgagaaaccaaggctgtgccggtccaggacttaaacccaagtgtttggcttctgttgcaggcctctttgtgcagcgccttgctgacgcccagggttctgatgtagaagcctacaccagggcctgaggttgtgaaactcatggcagtccacgcctgagaagagaaggcctgaaagagaaggaagagcccatgggacttgccacggttttgacttacatctgcaactccaaggctacaggcaggaagtaagaacagtgctcaagtggcagcagatactgac

SEQ ID NO: 110673 - DNA, 1070 bp, Homo sapiens
ttgattcattcattttttttttcttttttgagacagtgtcttgctctgtctcccaggctggggtacagtggcatgatctcagttcactgcaacctccacctcccgagctcaagtgattctcctgtgtcgtcctcccgagcagctgggatcacaagcacccaccaccatgcccagctgattttttttttgtatttttagtagagacggggtttcaccatgttggccaggctggtttcgaactcctgacctcaagtgatctgcccaccttggcctcccaaagtgctaggattacagacctgagccaccatccctggcccatttattcatttttgatggacatttaggttgtttccatatcttggaataattgtgaataatgctgcaatgaatatgggtgtgcagatatcttttcaagatcctgatttcatttattttggatacatatacagaagtgggattgctgaatataatagttccatttttaattttttaaggaaacccagtactgttttccatagtggctgcaccatttggcattcccaccaacaatgtacagggtttccattggtccacattcttgccaacatttgttatcttttgttttttgataatggccaacaggcatatgaaaaggtgctcaatttcactaatcattgggaaaaagcaaatcaaaaccacaatgagatattaacttacacatattaagatggttattacatgtgtatctttccggccaggctctgagctcacaatcacagggattgtgtcttttttgtctttatctccaaagtctagcataatgctcatatgtcaataattgttctggtaattttatcctaaatttgccctaaatataatttcaaaagagctttaggggtaatagggcatgaaacaaaattaaactatgttttgaatttctttcttcaatactcagagacagagaaaattataacattcaattacatatttacttttatttacattagtaaggctgtaaattatgaatgtaaatgtgcttagctagaacaaatattgctcagaataaaaaagatatacaaatataatgctaa

SEQ ID NO: 110674 - DNA, 1009 bp, Homo sapiens
ggcaggagaatcacttgaagccgggaggtggggcgggggttgcagtgaactgagattgccccatggcactccagcctgggcaaaaagagcggaaactctgtctcaaaaaaaattaaaaaaaaaaaaagcatatttgattgaagtctcctatctccctaaaaagtataaaaccaagctgcaccctgacccccttgggcacatgttctcaggatctctggagagctgtgtcacgggccatggtcactcatatttggctcagaataaatctcttcaaatattttccagaatttgactcttttcggcaataatataataagatttaccattttaaccatttttaggtgtataattcagtggcattaagtacattcacattgctttacagccatttccgctatccatctccaagtttctaatgactccaaactgaaactctgtatccattaaagaataactctccattacctccacctccttcctcagggcccagttaccaccatcctaccttccgtctctatgaatttgcctattctaggtaccttgtattcctggaatcatatatttgtcctccatgtctgacttatttcactcagcataatgttttcaaggttcttgtatattgtatcacgttagaattttattcctttttagagctgtaaactgtttcattgtgtgtgtgtgtataccattctgtttatccattcatctgtcaatggacatataggttatttccgtcttttgtctattgtaaataatgttatgaacatgggtgtacaaatatctgagtctctgctttcaattcttttgggcatagactaaggaatggaatacttctaaagtcactttctacaatatataatactagttaaaaaaattaaccagagtagtgatataaagtgaaaacaggtcaccttaaagaatattattaactaaatgttattattgacaggacatagatatgccacaaatcataaaggtatactcaaatagctgaaatcagggaaatcct

SEQ ID NO: 110675 - DNA, 1039 bp, Homo sapiens
tctcacactctcccaccagaatatgtgctccaggagagcaggggcagtgtctgtttgctccagtttctagaacagtgtattgctcagaaaagaagaaacaggcggcatttctgtctgggggagttaggaagcggttcatggtggaagaaatatttaagaaaagagatgtggtgagaacagccaaagaagaatgataagacgtagtcaaaattgcatagccctcaaacctttgttgaaaactcatttgtctattttagggattcccaatacggtcagtccagctgaataactggcatattaatacaagcgctttgctgaatagatcctggtctgcttgtgcaaaagcactctggcatgaaaagaatgtagtagataattccttactttcacataatgtgacaatacccactgcctcctttatctctcgtacccagtcctgcgaggactgcaggggagctctcaccatcttcatttgctatttaaggaaactgaggtccagaagtgaagaaacttttcttagagatgcccagagtaaaggtggcagactccggatccagggacaaaattctctacctgctgtgagcagtaggctcaaggtggagatttgttaaatccctggagaactgagtagtccacattttctataagcaaagaaatacatttagatgtgaaacattcacatctcctttcatccctcaagaacttctatttcagcattttatgtcttgtcgaatttccactagaattcctgcagatgaagtacttgtacaccctgtggtaggttgttttatgtaaatgtcttcactctttagtttaggagggtaaatcaaagttctgtgtcagcagttaaaatacagtgagagaaaggtgatttcggctgcagctgaaatgaaaagcaagcttgcctagctgtgctccgaaaaatacatacttgtgtggcagggaatgagagtgggctgggagcctcctctggaaaactggcttgcactttacttgaattacttctaaaaccagatctctcccagtgtcctgggtagga

SEQ ID NO: 110676 - DNA, 1050 bp, Homo sapiens
cctgggtccctgtgttagagacagttgttgcaggagagtggtaactttttagcagcttccagggaaatgcagtaactttccagctagtgctggaaaatatcagggctattcccagtttttttcccctcaacctggctacttgacctggtgctttcaattgaggctgctcttttcttatggcagaaggcaggagagtgctagctggatttaaagccaacttcttgccccatgaccttgggcaacaatttctccctccctgaccctaaatttcttcctctgcaaaacagtgatgaaaagattattataagaaagtgagaaaatgtatatgaaatgcatcttgccgattggagaacacttgtgcaattgtaaagggtaaaaaatacaaaaaattaagttttatcgtagatctattttaatgttcattttaatcatagtttgcatatgtctgagtaaatgacatatgctaaacattaagtgggagagatttcttttaattggccagtctcttcttgtgatcactccacctgaatgctacaagcaccgggcctcactacttctcagaatgattcctttcttgttttcaggatcacagtcaatttttagagtgtttttccttttaacataatacacattacatgtcttaagaaaatctgtttgaagagagggccctgatgttaattaataatttttttaaaaaaggagaaaagtcacaaatggggagtgactccactggggaaaagtaaaacatgaccagtgtcacgagatgacccgggtcccccttgtctgaatctttcatcagcataatgcactggctcctcatcattgcattttaggtgttgttccaaacgtgtctccagaacctaactcagtgcctgcctggcacttagacattcaataagtatatttggaataattgaatgagtgattggactgaatcttcacagcaaccttggagagcagatggcgtcatttctattttaaggatttggaatctgccgatcggaaaacttaattaattttctaaaggtacaaaggattccagactagaat

SEQ ID NO: 110677 - DNA, 1048 bp, Homo sapiens
cttcttaacatcttccctacccttctttctaaaacatctgttcatcttcaactctggtgagcactttgctctagcaagtggttcctcagtctgcatctttgcagagattttctctacgggaagaaagaccttggatagggcaaggtagaaaacctgctttttctcctagctcaaaaaccaactccatgtgtgactagtcaaaccatttaacctctctgggctcagtttcctcatctgaaaaaaacaggacgttggacaagagcagggatctgggacctatttgttgagtacagttatatgcactctttctcatcagtatggcttatttattatgggtgcagtacaggtgcactgagctctttgtaagcattttctcatttcacataggtggtagtcagccttcaagatggttccaatgatccttgcctcctggtattcacctttgtgaatcccctctcacattaaatcagaactaacctgccatccatagaaacggatgtggtatgtgattttcgaggcgagatcataaaaggcattgtcaacttcctccttggccccttcaattgccccttctgaggaaagccagacaccatgctgtgaggacactgaagcagcaatgtggagactgctatggagagaagacctcccaccaacagctaccaccaacttgccagtcctttgttaacagccagcttggaagcaaatcttccggccccagttaggccttcatgtgactgcagcctcaccaaagacccagaactagttgaactgccccccaaatttctgatccaaagaaactatgagataataaatgatcattgttgttgtaagcccctaagtctttgagtaatttgcttcacagcaatagataactaataccatgggtatttgtattatctctgacagatgaggaaaatgaggctcagagcaactgaatagcccatctgaggttgtgaactggtgagtgatgggaaagggatgcaaatccaggtctgcctgacttctcacccatcacgttatacgcctcatgctgcagtgaccctctgtc

SEQ ID NO: 110678 - DNA, 1031 bp, Homo sapiens
ggcatttcaggggctccacatcagctgcctcctgcctttctacctcttctcatgccactccactgtaccatcatcacttctctgcaaacagagctatggactcattcctatttgttttgtgatgctccacaggactctgtttgtcttggtcatagttttttttttttttttttttttttgtgctaagacacagtgcctggcatgactggtgctccatatttgctacattgaagtgggaacaaaagccacccttccacaaagccagtgcttgtctccacagctcacagttccacatcagtacctctctgatagccactgcccctttctgctttgaatcgctgctatttgtgcccctgttttttattgtttaataatccatgagctcattgaagggctgctctagtctcttctctctcatgtctcttatggtgcctggcagcgtgcctttgtcatagatttgccacaagtgtgtgtagaaatttggatacctaattttagaggtgtaagggattttggaaaactttgttcccttccttacgtggctaaggaaaccgaagtgtggacagaaaaagtaacttgccagagatcattgaatcatagagctagacttgatagatctgtctctaggctgagaaattaaaaaaaaattaattaaaaaattttgaaaactgtgactctagttgttagtgggtccagcctctttctattttgatttttatatttttcattttataataatttagcagacttttaagaccttcaagtgataaacccttcaagctattgcagcttatcttcctaatatgtgcaggccagttgactagggatgttaatagaatataaagttgaataaatgagctctcaaccctcgaggactttacaatctagtgggagagatgtttgttgttattgctgctattttaaaagctgtgattgattgaagccttctattaaactaaacttgcccaaggctttacatttagtaaaaggtgaggccatgctccgcttggtcattttgtgttgatttcacc

SEQ ID NO: 110679 - DNA, 1161 bp, Homo sapiens
ctcatttatgttgtatggaattgacagcgtattgtcagggcagaaatagtgaagtacccggaagaagaaaatcaacataccacctctactcagagtagaatctgttcagtacagtagtgcaggtattaagtgataaattattacagtttggggaggtgggaagggagaaccattgaatgctatcttgttctttattccctatgaatagggaagttcagatgattattgtacattattggaagttaatatcacgtctacgtcttgatttagaactaaaaaattggtcctctgccaggagacatgaattaagaaattgggaacaaattaaaataacatttcagttacttttaaacatatttgtctttatggttgtgtttattacatgtgcagtgaagtggagaattgaggcagttatttcattattcattccttaccatttttcctgaaatagcttggtaattgaaagagtatttttaaaatttgctttgaattgcccttctttgtctgcttgtgtgtgcagactttgtagagttgaaaacagtaaaggatttgttttaaagtattacttagagatgaatattaagcatattgctaagtgtatcattttagatgttccttgaagtgtgtgttagagggaaggagggaagagttaaaattatcttttggtttaaattattttaaaaacatgaatatgaagtaattttctaaattttttcatcatactcttttttgttagagttgtattcataaccaatagtgagccatttggaaatagggattttggaggaaaggtttagaagttggaaaagatttaaaaatgggttgctcagaatatttctgctttatatgtgaatcctctttaacatttaaatgtcttcttccaaactcacaaactgctgtaaacattcaatgaaaagttttcgctaaatataatggcttatggaaatattaatcaataatgctattttttactttgaaatgatgagttcttttctatgatttaaaatatatgtgaatgatttatttattttgctctaaattattatcagggtttaatttttcattattgatttgtcagtttttcattagacttatgataacctcaagttaatgtcataaaaccagggacaactcagtagctgagttgccattctcttcttg

SEQ ID NO: 110680 - DNA, 1033 bp, Homo sapiens
aggctatcaggaatatgtatccttttttgttagaagtaaaaattaataaagttttgataaatattctataagcatgtgatgaatagggataagaatatggtaggacatttatgaagaaaagataagttatactacagtaaatgtcaggattggaactctagtaattacagcagacctgacataagctaactatgtgtggaaaggctatttatagaaaaatatttgtctatttttgtttaatcgtaatggcatatatttttcctttgctctgaactgataaaatatagtaaacagtaccaagttgctttactcaagaaacatggagaatttgctggaatgatatgaaaggcacagagagtattaaagtgttagaaactaagaccttttgagataggccaaaggtggctaaaaggaccaagataaaaccgacagtgaaaaactaggttggtaaagtatagattatttttattttcttcaggaattatgggagtttttatagtagtaagtaggattgttttgttgttttttaaagtggtagctgtaatcatcatgttaaatctttcatgtgtgtgtttagagaaaatgatcaattcattgaattgcatggagttttaaattatggctttataatttaaaaattattatatttaaaatgttgctacatttgacaaataaagctatttttggaatcacctgctatatcatatttttgcaattattgctgtttatcatttttaagaaaattctgtttatttgaagataacttaagcatgcctcttttaaatcatttaaacccatttttgttatgtaggtcttcctgtgctttcagaaagttgctgctgaaatccttgggatcaaattaaacaaagcagaaatagaacagtcacaggtgattaccttgaactttatatttaaaaaattaatgaatttcttacaaggcattaattttcacccataaattctttcccatttatgccttctgtgtacgtatctctaaaagctttgggaatagattgtatgtatgaatcagtgt

SEQ ID NO: 110681 - DNA, 1354 bp, Homo sapiens
tcaataaatgtttgttgaataagttctttttttttcaattgaacaatggtactactagtctttccatggttatatttgttaggaaaaaaacttttgtttgagtagtaaatgatagatggagatttggaaggaaggagggagaaagagaaataaaaagcaataaaccattagaaaaaacaaatgtacacacacattaagtgacacaacttttatttttatttatttattttttaatggatggtgatttcaatgggtggcgatttcaatggggatttttcctcgtgacaagatttgttcttactcttgttgaattagaaaagttagctccaatattatgataaattggatatataaatgtcagtgctaatagcttagtattttagtcttccacaaattgatgcctgtggtatctggacattccttgcctgttcttgtaaataaggagatagtgatgtttaaggaatagcactctggccagaagagcaaaaaaaacaaaacaaagcaaaacaaaaagaccaggtgctgtggctcacgcccgtaattctagcactttgggaggccgaggtgggtggatcatttgaggtcaggaattcaagaccaacctggccaacgtagtgaaaccccatctctactaaaaatacaaaaaattagccgggcgtggtggcaggcgcctgtaatcccagctacttgggaggctgaggcaggagaattgcttgaacccaggaggcagaggttgcagtgagccgagatcatgccattgcactccagcccgggtgacagtgcaagactctgtctcaaaaaaaaaaaaaaaaaaaaaaattccatattttccaaggtaagcaatataaatggggctcaggaataccccattagattaaaaaaaatctcctagagagagaacccttgagcctacaaactaaagactttcaatataattttaaataaagtcttttatgtagtatgagtgcattttttagttgataatcaattggcactattatgtaggcttactagatttgcaaatttacaagtttttacaagtcatttgggtcccttcctcaggaaatcagtttaagttttttttttcctatattgactcaaagagcctagttgtccttaaatcctgtgaatatatttgccttataatttgacggcattgaatcaacacccttatagggtctgtagtgttgtaaaaagagaaactgttaaataaaggatcacatttggaaaaatacactgtgctggataaaaccagtattggatatgagtactgtgccttgctttaaagcacctacaactatttaaggaaatacatccttgccccttactctcaaaatggatactctagatggaa

SEQ ID NO: 110682 - DNA, 1986 bp, Homo sapiens
cttctaccttcagaagtaactgctatccatagtcttgatctttttcttgcttttctattttcataatatgtgtatgtgtcatcaaataatgttgttttgccatttaatatttttatataaatgcaattatttatgtgtattcctttgcatgttgccctcaccacctttgtgagattcattcttattgtggtgtgaaactctagttcattaattttcagccctgtgtagtattcctgtaaaatgcagccatgcatattattttagacacaattgattatttgtatttattttaagagcctaaaaatatttctcttcactcaacaaatactttgtgagtggttgttttattatgtgctttgttaatttgttggtttttgtttttagctgcatgtaacaaaacaaccaaataagtataggctaaaagtagcaaccttattatctcagaatatttgacttcataaagtcttaatttctatgtctcaaaaccctcatgaaacgtttaaaaggagaatgccaacctaaggtgaatgtttggagtgaatatggcagatatccttaatatacaaagtgcttacacagattgataaggtaaacacttaaaacccagttttgaaagtgggaaataagaggcatcttataaagaaatgtaaaaactagtatacaggaaaatttttaaactgcattgaggtctttaaatttataccagaaacaaaagtactttctctgatgagaacttttttcttcatctgtttgtggaacacgtggattttccaggcagttatatttataagaaggttggtttaagaatctacagagtcaaaatcaagttctgctaattttttattttcttgcattagcaattcttctaatatggcatgatttactatgtcatcatagaaagacagcattagagagtgtacatggcagggtaaaattaaacacatgctcacaatcaaattaatgtatttcatctgtcttcaactaataacaatctgtcatgttatctatctgagtaggggcataaacagtttattttgtgtttggagtaacttcctggaggtagttaatgtgacaagtcgtttgtttgaattgagtataaccagatcaacactcaagatgtttccctgataacctaaaaattactgtgaaatctgtacaagtgctatatttatattttgcttttacttcttttaagttagacagtgacattttttactagtttgcttttacttcttttaagttagacagtgacattttttacagtcatttcactgagaatactctgttcctgccattatgtatggactgaagagcaaaaatagtttataattttaatttttttttccatcgacagcaagtagacattaataatacaattaattgataatatattccctttttaaaatacatggaataacattctggtttgaatgaaaaagtcttgttcattatagaatatgttcttacagcatgttggaaaataaatacttgggaaactaggaacattgtgaagcctcaggccagtgtaatatagatactcttacaaagtgcttcagaattttgaaattgtacttaaaacttcataacatttagtctgatcagtagctctgatctgtgaaatgtacagagctgatacaaatctatcagtagctctgatacatttgatatgtctagtttaaaaatatttattacatttaatactgtatcttttaagactgttcgttctctcccttgttatcagtagtcatataggtggatgcagtggagatcctgagtaaggaatcttgaatgccagtaaacaaatagtacctaaaaagaaaagtaattgtatacttggctgtttgtattagtgtgtgtgtgttttagaagtcaaagtgtatatataattttaaccacatgtgaatcaaatttaataaattattaagggaattttgcttgttatgtttgggctaatcatggatcatttttaaactttatgtaatttca

SEQ ID NO: 110683 - DNA, 1041 bp, Homo sapiens
ttggtacgccggggcactttacaggaagcagtgggcaaggaagattttatagcatacataatactgaaacagaatcttaagcaatatgcaggaatatgccataaagagaagggtgagaaaggacagtctaagaagaaataaaagaacgaataaaactgctgaagttagcaaatagtctggaatataaggggacttggcaacattttgtgacaagtggaacagagtgcaaggcaggaacagttgagaaatagacaaaatcgtttaaggagtttggatttttcacaagagctatagaaagccactaaaggtttttgagccagaggtatagacacaagtcagcaaactatgacccatgacctgtttttctatgacctgctatctaagaatgcttgttacatcttttaatcacaggaaaaatgtaaacaaaacgtgtaatttatgacacctgaaaattatatgaatatcaaaatttaatgtccataaatagttttataggaatagagccacacttatctgtttctgtctttcctaggactgctttttcactaaaaaagcagaattcattagttacttcaaagaatatgtgagccagggtccgggcgcactgactcacacctgtaatcccagcactttggcaggccgaggtgggtggataatcagagctcaggagttcgagatcagccaaggccacatgacaaaacccctttcctacaaaaatatacagaaattatccgggtgcagtggcatgtgcctgtgttcccagctacttgagaggtgaggcgggaggatagcttgagactgggaggcaaaggctgcagtgagccgtgatcacgccattgtacttcagcctgggagacagcgtgagaccctgtttcaaaataataataataaaaaaataataataatatatgaggcagaaagcctaaaatatttactatctggccccttacagaaaatgtttgctaatatctggtctaaatatatcaattaaaatatagaaataatcatattggatagaaaagcaagacccgactactatat

SEQ ID NO: 110684 - DNA, 1011 bp, Homo sapiens
tttcaaagttaaaatgtatcatttagtaatataccccagtaaaagaaagaaggactgctagttttaaatcagatattcttagattgggattttggctatgtttttctcctcccaatttagaaaattttcagctgattttccagcacaaaccatttacttctcaagtatgggtttaaattctcgttaggagacagaggtattctacacaaatatgttggatcttttaaaaataaatacctgaatgtggggtttaaaaatctttaggagtgattattaaattctgttttagaattttctgtaatttgggaataaccaaaaaaaaaaaaaaagtacagagtgacagttccttcttaacaaaaacgaaacaaaatggtgggtaactgaaaaccaacaaaaaaactggttagtattgttaaaagatattaactgaatttgttcattttagtttctgtaaaaaaagtattctttggtttaaaaatggacatcagagttgattggtataattttgtttccttccatattccaacttcctccctaccactgccatttatatatccataagttataatttgatatgctaatatattgagacaatgaactgaattctttgcaatggagatgtttgaagcctagaatatttctaggtttgaaattaagctccttctttcttcaggattttttcctttttatgcagtatagtttactgatcattattctatatttttataaaaatttgtgaaaattgattaaattttgtgtttaattttagattgaggaatggattgttcctctttcaaaagtggttttctgttaggaatatctttacttgtaacttttccttaagtagatccattatttattttattttattttattttctgaaatggagtttcgctcttgttgcccaggctggagtgcaatggtgtgatctcggctcactgcaacctctgcctcccaagttcaagtgattctcctgcctcagcctcccaagtagctgggattataggcatg

SEQ ID NO: 110685 - DNA, 1439 bp, Homo sapiens
tttgcttaaattctgctgatggaggtgatataatttgatatctaatctgaatggtgaaagctcttgtgctattgccatgaatttttatctcaagtttattttgctatgcagacacgtgtgtaataaaaaaaaaagatgctgcataaaccatcatttgagtttgaatgtgcttctgtttttggttgaggtacaaatgttatttctggctgtgtccttcatacttagctcttcttacaacaaatggaaagtccttaattgtacctgagggaatagttaatccacagtggacatatggtggacaaaagctgagtctactaaatgaaataaaattgtaaatggtgaacgtgaatgcctacaaagtcttgcagccatgtaggattgactatttgagattaccctgttttatgtataacatagttcttttttggtgagtttgtgtggtatatgtattataaatttgattttaaaacgtgctctcaagttatgtataaagcatatttatcttttttactgttcattgagttcgtgatgtgactgatgtcaacaatagaggacgatgagctcacatttttggaaagttactgctcttttgattgggggcagttaattagcattaacccagaacagctcttgggctttatggatttgggtgttatgtggttgcactgctccagctaaaggttaagtattaatggaaaatggtcacagcccttttacttaaagaaaacatgttacttgtaagttttcttttgattttacttttacagttacattgaatgtcttcattcatttagccatccataaagcaaatattgttgcacatgcaatggataataagtctttttaggattacttgtgtggtatgtcacagatcattaactgcaagtaaccacctgacttgagggaagcctggaagcatcattatagtgaaataagcttttatttaggtatcactgtagcacattgatttacagaattgtcaccagtggctactttgaaaatatattgtcattatcatttaaggaatggtagagattaattgctgtagactataacaaagttatgttgattacagtggaaaatataagaaatattgtggtctgtatttaattactttttaaaggatttttaggtaattaattaggctaaatcgagtgattctttaggatgctttcaactttgtgtatgattgaatatatgtattaaaggcatgttttcagttttccctactttgaaatgcctttaaattaagaagcatagcaagggcgtagcaaactttatgtaactatttaacacagttaatgcgtattaactttcctttgtgagtacatggcattatgttcatcttacttccacaacaagactttaagtctacaaaagaaagacaacatctaatttagtacttttgtatcacagcgagggaaaaaatcaaggatttt

SEQ ID NO: 110686 - DNA, 3102 bp, Homo sapiens
gatggcctttagggccaagtggcctattgaatgccaccctgatgaataatgtcagagggagttccttgggaaatacatcatagttttatactagatcatgtttgaaataaaatttcatggattttatgttataattttaggttaaataaatatgaaagacttaggaagtttgcttcttaaatcctaacttgtggcttttacatatatgttagaaatctaagcttttgactttttatttacaattttttgtgtttagttaaaaaatcataatctgtactgaattacagttttaatttttcagtgtttcaggcaagggtataattgaaatgaagtggaaattcaggaatattaacttctaaaaaattaatttttaaaaagattaactttttaaaaagattaattttaagttcaatgttttataaccacatggcattttaatttgtcattttgttattttctatctttaatccgttatgcctttatactatctgatccatcagctagtttctctcctgactagctaacattctcagttggatagattataaacagaattaacaggggttacatagaagctgccctcttcctgatttatagcttcttagttagtggaggggtggtggttatcggtaacttgtattgggggtgggaattatcatgctccagtacagagtggatggatgaatgatttctactcttaaagatgttaaccagatccttttgcaaataaagactaataactcagatttttaaacaatcttcatgacagatgagggcatagagaagagtgcatcaacactaattaagaatgttgagtgtatattcttcttaacagtgattgatagttcttggagtactatctctgcccaggaagtgatgttttacattggaaagtttaaaggttacgttttaatgtaccctataagttgtgttccctgaactcagtgaaaatgtattagtaaaataagtaaacttcaagttgaaaattttacttatggtctcaatacaattatcagcaggcttttaaaagagacttttttcctcagtaatagggaggtataagaaatggttatatgtccagtttgaaaaccattggaatttatatgaaattacttgcctatactgtgactcttttgagtcttcaaaaattctttatctgtaaaatagacatgtgaaactattaaattggtaatatttaatttattttgaaggattcatatcaacttgtataaaatttatcacctataatattataccaaagtgaacaagtcattgttaccaatttgtttaagagagcttataatttatgaagcataaacagaaactttttcggggatttgaaaagttcattctctttatacattttaagctaaaacattctgcccttttaaccatttcttttagtactttgcttcttttttgttccagataatactaatcccaaagtatcagaaccaagtgtctttttcagatggagctaatatttctgtctctattgctgctgctgctgctgctgctttttctttttttaacttcttttcacatgtaaatttttcaaatagaagtgtgatcatttacttactggaacatactgagatcattctatatattgaaagagaaagtattttgttatatatacttaaagctgttccctcacatgatacttcacactccttattgtattttaaggacatgttgatagcatttcaagtttaattggctgagtagtatctccaaatcaaatgcataagcttgccttcagactgttgttgttactgacaactgttggggaataaaatagcaaatgagtgctgtttcataatatcaatcaaaaactgtttttcatctgacagttgttgtagtgatgttattttgttatttcatagttacttttttggatagcctgccccaaaccattttgacagtactgtaatttactttgtctaagcaatattatggtttttgtggttatgttttcattggttttggaggagttgtataagcattttgatataacaatttgtttatatgatatctctccatctttttgtcataatagagaagatttattaaatgctaataaaagcataattcatcttatttgttttcttttaggatgaatctttgattttaaattttagaagaaattattaaatgttagtatcaaataaagaacacagagctatagaaacatttctttgtgaaaaaggaatttggaaaattttattaatttaagcccctttaataatgtattttagtctgtatttgcagtggttgtggaaaaaagccaaaataatttaaaggaatactagactgggtatcagaaaactttagatatttttctaggtgctgtaattttatctagttacgtgagcttggacaattcccttaaccacttatggtcatcctcttgtataaaatgagaggatactagtgaataatacctaagcatctttgactcctaaaatttgatgacccaaactatgtttagttttaaggttgcttaattgaacatggttatttccagacagttttaagagcatttaattttaacttcatttgtagtttaaaccttgtcttcttagtttttgcagagatgactttttggctgtattttatcattcaattgttagattattaagatcctgtttgcatgtatggtatatgatggataggtacatatacatcatcataataaatatagctattaataataataaatctggatttattgaattctcactatttgccaggcaaaccctggacatatggccaactttaagggtattttgggggctctaaatcgcttttttaaaaaaaatttaaattgttcctgaagttagaatttaagtattttccactttatgtgacattgttttctgaaatttcacatgaatgtgtagttttgcagtgtaagtaaatcaattcaacaggtatggtctttctctctctctctcttttttttataacagaaatttattatcccaaggttcagaggtacaaaccaggttcagaaatatgaaactaaggcgcaggcagggctctttaagatataaagagggagggatctaggaaaaggacagatcaagaaagactttgtgg

SEQ ID NO: 110687 - DNA, 1780 bp, Homo sapiens
catactggcagttgattagagagtgcccacccagattgagggtgagtctgcctctcccagtccactgactcaaatgttaatctcctttggcaacaccctcactgacacatgcaggaacaatactttgcatccttcacgccaatcaagttgacacttaatatttaccatcacatagagtgtatttacacaaacctatatggtatggccaactacacacctaagctatatggcacagcctattgctcctaggctacaaacttgtatagcatgttcccatactgtaggcagttataacacaatggtgagtatttatctgtctaagcatagaaaaggtacagtaaaaatacggtataaaagctccattataatcttatgggaccaccatcatatatgtagcccgttgttgatagaaacattgttatgcaacacatgaatgtatgtgaaatattatatgattcgttgttttctaacttatttgaggtcagaaaaagagaaaatgatttcagattttaccatggaagatttaggtcaggtattatttcctgacaacaagagttgttaaatcaatacctacatacattaccaagagaattatcttttccaaaggtctttaaaaatgtagtacatttttttttctctgtaattgtttaggaagcagtgcttcctgaaagaccaaaccaagatttttgcattatgtggctttgcacactagatgagtatttaataagttcaagcttaatttaaaaccatgatgacacaggtgtgaatgtcatttctctgaggagttaaaaatacaggcattgtcatactatcatacactctggaaaatggtattacatatcataaaatgttatggcttgggtagaaattgtagtttgcttttttaaaagctttagttaaattttgctcatttgttttgcaaatgattctttttaattgagtgaatcagatgcttttcagttcattgaaaatccccctttgacaaatcatgttttgatgagcttacgttctgtttctgggttcagcttctcattttagttgtcatacaaagcgttggcttatattatggttaagtatgtgctttattggaggttttgcattaccttatgagaaattatagagtgtttgtgggagaggcgttatgatttgttttaatttttttcaggatataatctaactaccactagggataatgtgtagtggtacataattatatacattatgttatatgtatgctatcctgtgaggcatccatcattggtcactgtcaaagacaggctgttagagtagatgggctattggactggactggtggtggcatgcccatgttttaaaaacaaatatttgtacaagttatttgaatttatgcaagaaattaatacagtgttatgttggagatttaatagcataaaagacaagaggtttttttttttcttttttctttttttacttttggcatagctataacccctttgtatgtatttataatacactctttcagtatgagattatatattagtgtatgcagtcacacagaatgttatatatgtaagataaagagattatagataaatattttcctgaatattatttactacataatctgtcactggcccaatttcatgtgatcatgtaatgaaagatccttctgcagttaagcctattagggctttaaccctaagtctcctgaatatattttaatttctatttccaaattaatgttatattggtatggtataatagtatgtacttattttcttttgggagggatataattata

SEQ ID NO: 110688 - DNA, 1035 bp, Homo sapiens
aacgaatgttgcccaagatcaatagatggggtcaggactggaatccaacagcaacctgagttccagcgtagagctcttttcaacaaataatatatcacccatggcagttggaggtggggccagtagcttgaagattaatcttcttcagatatcagttctggggctttattcttaataagaaagtgagatactctttgttttagataattctgtgttgggcattatttcaaagcgtcttggaagacagacagatgttcaagtgaccaaaatgaaccagacgagtgattttgtatattatagaatatttaaagcgaaagggatcttagagaccatctaactcaaatatcgaattttagagataagaaacctgagacctggagaagctaggtaacttggggaccaatatggtttaataaacgagaataataatcctggaaggtcataacagaagtatgctagggctggcttgctctagcttcagagagttaattgttaaatttttagcagtttttgtgagccagttattaaaaacttttacaatgaaaaattatgtataaagtcacacattatattaaaacaaaggtattatatgcctaatctctatcactaattattttactatgtatttctgttatctgtgttctcaaggttgtttacatctgctgtatctatatggtggaaatgttttataatggtgacctccccaactctgttcagtggtatcacattgatagcttaaaaatgaccgcaggctagcatttacaccatgaaaattggcaaagattacggcaaactgtcacccctgctgggccctgaaccccaagccaattgattaatatttaccagtgtctcactagttatgactactgtgttctatacttgtttgtgtgtttagttttgctgcaagactgtgagttccttatggtttggaacttaaatccgtaggaatccagcacaatgcttggagtttagttgacagacaaatgtttttaattatttagtctttggttcaaatactggctccatcacttacct

SEQ ID NO: 110689 - DNA, 1602 bp, Homo sapiens
tttaaggtactttttttcttgggagaaagtgaatgttatagttcttagaacttgtataaagtttctgtcttgaaggtacatatcgacttctttctcttttggtggtgcattttatcgtttacacttaatgattgctatgactcttataaggatgtactgtgtttttattaaacaataatttagtacagtatttctgagaaattcatggatctttctatgaaattgtctgacaaaactgggaattctgagatgatgaaatgaattgtcaaaaatagatgataggtcatggtggcaggcacctgtagtcccggctacttgagagactgatatgggaggatcacgtgagtccaggagtttggggctggagtgagctatgatcatgccactttactccagcctgggcgaaagagtgagactcagtttataaagaagaaaaaaaaaggatgataatataataacttttttctgctttccagagattccaaataaatgctatgttaagtacataaagtacattgaccagtggtctattttgttaaactatttttaaattctatatccaggctagagaagctgtgactcattatttactactataaattggagaaaatgttacttttcaaaaccagtgctttcaaaaacatcctaatagcattttaataagctcaatatctttatataatcatataattattcttcaaagtagatctgtattgcttctggagttatagatgctttatattacctatctcatgaatactttggattttgatatactacaggacagaaatcttcagagatgttgagacaagctttttcaggatatcagtttaatgtgttatttagggttttgttttaggttctctaacttctgtattgtgtatagaaagaattatacatgtctgggtcattaaactagtcaatctgtttctttaaagcatttcttaacatctgcgtagaagcttatatgtaggctgggagttaacttggatccaaataaaactgattattttaccctcttcagtccctttgcccccagcaacattaaatgttagcaatagcctgttgaaagtgttgatgaaaactaaattgaattgacaccccaaaaagaattagtgaggtattttgacaagaactagttctaagaattgaaatatgtcccagttaaattcccagattttaaattaacttaaaaatttctaggagtctttagaaagatgttataggggatttttcatagtggttaggagcaaacacacagtacatagtgtttagtgccctgtaacctgtggctaacagaggctaataacaaacctcagagaaggactggatgtttcatttttgtagctctttctgtcctggaatctaagtggtttgcaaacactgacccactgagcataaactcaatgaagtgtagtcacttgtgaggtagaacataactactattgtgtgccagtggccccacacagatgagcctactttttaagtaccaatgaaaggatttggtgcctacatgacagctatggagagagtgcatctcaaaactggactctccaagaccttctgctctcttttactgtaagttttttagttggatatttg

SEQ ID NO: 110690 - DNA, 1050 bp, Homo sapiens
tttttgtagtttgctattattccatgagttttagaagccatagagtttagaacctacgacagaattcatatgtatgattggatggttgagtatataaagcttcagtttttatttttaaagtatatttcttgctccatggacatgtgcttcattctgttctctaagaaaaacatttttctaaggcttaagtttacaaattaaagcttactttattttcttttgttttgaaggtgattgtaaatatggttccatggaaatggagtaaaaagataaaactagattccccactataatttcttttgacgttgttttcgcaattccaaatatcatgtgagcctgcacataaaggcaaattgggctcagagtttcttattgtgacttagtattctgtgatactgtgtcacttgttgtattgttacttaatttttttggtattcttatttttatattcattttttatattctaggaaacttgaatgttacccttcaaatttgggatataggagggcagacaataggaggcaaaatgttggataaatatatctatggagcacaggtatgatatgaattctgattattccagtattgaaagtataccacttacaagcacacatgcaaatctactcccaaatgcacacacacacacattctttctaactttttatctgatacgtagagagaataattttatatttgtgctagttctttggtttcatgctctcctaattatgtttggagtgatttgggtgagggaacaggaaaactctgaacagctttcgtatgttatttacattactaggtgttattgttagcagttcaataaatgcagtgataaatgatattttgatatgtattagctggttttgttatagtgactgctttcaaataaactgaatgaaaaacacagggatgaaaatttaacttcattttaagttacaaggactgaaagtatatctatatgtctatgtttttgtgcaatgaatattgatagcttttcagatttaatagacatgtctgtattttctatcagataactaaatatgacagtgt

SEQ ID NO: 110691 - DNA, 2148 bp, Homo sapiens
tcctgctgtgttcttgctagttgtttgaacttgggacagtctgtatattggtgggacccgctgttgatgtctttgttttctagatgaaagaactagggcccagagaaggaagtggatttgagcaccatcagcacctagagtgtggtagagctggaaccagagcacaggcttcaaacttctcttccagtgtcctgtgtttgtgtgtgaggttgacagcaaataaccagttagttcaagctcttcgcgaggtagctccttttcatgtataaatgttactgggtttttctcttcttagctgtcaagttcaaaactcttctgttttttaaggaactcccaagttatttgaagcagctgcttttaaacctcaccattgccttgactttgcttaatgcagatcaaagacacagctctccccttctatcaagcgcaagagagaagtcagccctcctggggcccgaacaagaggccagcaaagggtggaggaagcccctgtgaaaaaagcgaagcgataatcctgaccactgctgccctaggcttatggaggaacacggtggagaggaaagagacatgccttggtggccataggcttctctttaaccaggaaaaagatatgcatgtgctgtaagtccctaggtgcaagctttttcttgttatgttttaaacagctttataaactattgttcatagaagatattatgtacatttatttcagataaaggacaataagtttactttgtatctgaactcaaaacaaagtagttgtatattttaacattcaaaattgggatttcccaatgtgacacatcatgaatgcaaacccctccagcccatcagacgccaggctgcctactggtaatctgtgtatagtatataaacatgtaaaaataggttgtattttactctatgtatgatgctaatcaatgaacactttatttattttacagagaaaacttatctgtgaactttactatatatctgtttattttactttattttttttttaaataaaaagggttttaaatgctatgcagtcattagtagaaaattttttaggactctgcctgctctgtaactatcttaatatgatctggcagaaactcgcatgtatccaagtaaagtagtttagctaaagaaaggttcttcattgcttttctgttcacagttgtggctctgttttttaagaatgtaacttgtttttagattatacttgcatctgtgactttactaccagccacgttgacacaaaacaggttctggttcaggtaaagttgcgtcagtcacctgcagcagaaatccctcttcattcctcttctctgtgttcattcctcttctgtgctgttctgaagcttctaccaatactctttccatattgtctttttcagtgaagagaaatgcattcaagattaggtccctcctgtctatccagtttcaggattttatgttgttttatacacagttatttcagtatagaaactggctttattgccaagtgtttttttaaacatgttttaactctcatatgagcaaactgtccaacttcagtttttcataagattaaacttcttacgatcaaatttgtctcttgcaatgatgtgatgagttgccaaataattgagattattttaaaatgttttgttcatattcttgttttataattaaaatttacattcagtgtgtatgggtttttttttttattttgactcttaatgtaaggtggatatttctgtcattttacatggtttcttactgagattttatatataaattataaaatgtttaccaaaatttgagtggtaagaattttatttgtgtgttttaaaatgtgtctgcatgaaaaccatttcttctctctaaataattggtcttagctgtatcattccatgctcacattcaaatttgagtcagtgatggcctttctcagtagaactgaactcggtagaactgaacttggaagaactgaactttagatccagaaaggccattagagatgaggaacatgagagtttctcatttttatgtatatggatgatttttaaccaaaactcaaaaatctaaagtgatttgtcttaaaagtaagaaatgcaaatcaaagccacagtgatgtaccatctcacaccagttagaatggcttttattaaaaagtcaaaa

SEQ ID NO: 110692 - DNA, 1234 bp, Homo sapiens
tgccgcagtggactgccacacaggcttgtccttgacacctgtgagccttatctgccttctcccatccaccaagaccaaaggcaaggcagtgtggtaaagcatttaacagcccagaatcatttctgttttagctagagcattggagaggtgatgaggtgataaagcttcctctttcaggcacggcccctgccagcttacacctttcactgcagccttactggtcttactgcttcccagaggtggtcctgagccttcctttcttgcctttgcttgagccagtgaggagtgtcctcaccaccagcacccctagtaagtcagatcctttccgtcccgcttcagcccattttcatctcttcttgctgcacttctggtcagtactgggcacttgagatgccacatagcattggtttggtatattccttttatttacccctctgagctctaggtttctttcttgagataggaatttgtcatactttctatacattatcatattcaaaaataaaagactcttcactgtacacaaaaactgttttgacctcttaccacattttcatcttcacagcatacttgtatgtatgtgctgttttccgcacattctagaaacgaaagcaaactatagtgccaggcagtttcacatacatgctctcatttaaccctcagtgagtgaattgtaatagttactcttattttatatgtgagggaaagaatctcaggaaggtttccatgcatactactcaaaattgaacatgcagtcaaatcacttgaggctgttggtaaaatgcagatcctgggtctgtaagtctaggctggggcctgagagttggcatttccaacaagctcctcagtgaccaatgcccctcctcacagaccacattctgggtggactagaagggcctggataaactacgaagctcacatggctggggagaagcagcctgactcagagcttctgttggctgccacttggcccccagcacaatactgcgcacggcacctttactgaagaggtgttcattgagtggctggtggctttccatggaaacagtttgaaatggattatcaacaaacacattttcagtcattgtcaacacatgtcaaaaccacatcatctgcaacaatttttgactcagtttatttacttttgctgtcaaacaagaaacggaagacgtgtcttcatatcactaagagtcccatttctccatctcctgcaattttggttttccaactcttt

SEQ ID NO: 110693 - DNA, 1628 bp, Homo sapiens
ataaatcttatttgatttatatggttctgtaatcacctggattatcaaagctcttccttcatgcactttataatataaacttttgatttacaaatgagttgttttctctctagtttagattccttggcattggttgatcagtcccagggctctggtgtcttcataattttacaaattgtctgagttgggtgggctctcagtggtcatgtagtaccaatagccagtcagtgcctgagtcactgcacctgcagctcctctgaaagggtcttcctgcttttgcatggacctcagtggcagggaaagccacatcctccttagcattctctgacttgtgttcagtagaagccggcctccctgtggcttctactcttgattctagttcgactttcagaaccttctgtctaattttgccttacatatttgagggcagcttccaggtcttctctgcttgcttattgagccccttcatcatccctgtttgtgctcatcagttacctttatcctcttttagaagcaaatgtgcagctgggcgcagtggctcatgcctgtaatcccagctactcaggaggctgaggcaggaagattgcttgaggctgggagttcgagaccagcctaagcaacatagcaagaccctcttaaaagaaaaaattaaattaaattaataaaatataaaagaggccacgcacagtggctcacgcctgtaatcccagcactttgggagtccaaggctggtggctcacttaaggccgggtgttcaagaccagccttgccaatatggtgaaacctcatctctactaaaagtacaaaaagtagccgagcattgtggcagactcctgtaatcctagctacttgggcagctgaggcaggagaattgcttgaacccgggaagtggaggttgcagtgagaagagattgtaccactgcactccagcctgggtgacagagcgaggctctttctcaaaagaaagaaagaaagaaagatagatagatagaggctctttctcaaaagaaagaaagaaagaaagaaagatagatagatagatagatagatagatagacagacagacagacagacagacagatagatagaagcaaactctgtataccaagtgtggtctaatgaatccagaagaggactgttctaccttattttctggatattgttcttcagtgtgcatcctcattactgagcctcaaattgaaaaatacaccagctaaacaagttcctttttcagagtttttactggaatcagaattccttatctgattcttgtgcagttgactacttgggccttaacacttagccttgtgaattgtactttcgttaatcttggccctttattctaccctgatgagctcttttgtaatctttattttgtcggccagtatattttctatttttcgcagatacatcttttttctaaatcacaataaaatatcatgcacagtaagaacaaagatagtgtcacacaagcagaggtagttgtagatgacattaagatcgacttatcagcagtggtcaggaaaaccaaccatttttctgattttagttcctattgttctgacttgcccacaaggagcctcatacttcctacagagttccagggactggagtattcagtgctacca

SEQ ID NO: 110694 - DNA, 1112 bp, Homo sapiens
gatggtgaagaaaaaatagtaacaagtgtgcgtcggagaggaagaaaacccaaacgttctctcactgtatcagatgatgctggtatgtttctagcaaattcttaataagtcttattgtttcaaaaccacctttttaaagagtttttctttgaatgaggaaaaatccaatgggtacagctaatattaatattatataaatatgtgtgaaataggtctaatcccgtgtcagaaatggtacatcccagatgcttttctgagtacatgtcaattttttatgaacgctggctgtgaactgcatatgtaaactatccaaaatgtgtttgagattaagttaaacagttgtgaattgcaagtgctgaaacaaaaaggaagtggaaaaccatttctctgcctccaagtccctaatatcctaagttctaaactccatgactctctctcttggaagtatctttgggaattgtaaaatccaggtgttacccttctatttgaacagaatcctcagagccagaaagaaaacgccagaaatcagtttctgatccagtggaggacaagaaagagcaggagtctgatgaggaagaggaagaagaggaagaggacgagccttcaggagccaccacaagatccaccaccagatcagaggctcagaggtaatgggggcagcacagagctgccagagaccttcaccagcttctccatctgaaaattgctctgggttttctgggattctctttgaactgaatcattcatgctgcagtggaagttcttccctttcatttttattgttagcagtgggcacatagttcttggagaacacattttctgtcctaaaccattttgggggattgcctcaaagtctttaccaggttttaaatgcctatttggtggaacccattcaattccttacaaatatattttttgagcatctgccatccttcagatgtcgtattgagcaccattcatgaatatggacatacataaaacatcatccctgctctcagcatacttaattcaacccagaaagcaggaggaaccaggcccacgcaccgtcatcacatgcatctcaccagtgctatgcaataggttgatcataggaaagtgcccaaatttgacca

SEQ ID NO: 110695 - DNA, 2096 bp, Homo sapiens
ttggtcacaactaacttgggccaaatcccaaattaaatggacatacatacttattacagaagtaaaaggttacactttgattacttcattgtctcaaaatcctcatggctccattaatttatgacagttagtgatatttatcaggttgaagaagcaatggtgagatcagtaaataaaacactaagccctacatcacatatttttaaagtgacaaagctaggatttgaggtctcttagacaggaactctaaatctgatttttgagaaaactttatataataaaggataaaattttttttcttattgctgttgttgttttttatttcccccttaggaagatcagccaataattattaaaaggaaaagaggaagacctcgcaaataccctgtagaaacaacgttaaaaatgagtaggtacttggtgtgttttcagttcacacacaagaaattttcgaaccgattttctaagtgaattttttttttttagaagacgactccaaaacagatactggcattgtcactgtaagtaattgcaaaacatgacaatttcaaatacttgctcttaacctgaaaaacggtataatgcaatatctagtattttgaactttattttttttacttgaaaagctttaaaagactgagtaaccattcatatattttgattactagtatctttgtgtaaacagagttacattagttgttcttcattctgattccattctaattcaggagtttgattatttaaaaattatctagggatttaacttcttgtggccacccttggttaaaatatacaaattagctattttataagattttgagatagtggcttctttatagagacttgtgagttgtcttaccatcttactactttctttggaattctttttgacctaaaatattcactgagttcagtgcaggaaactccttagtgatattttatgtttgaacgttctttatctttgaccctgacgtatacccaccaaaatcattgtatcaggattccatcgcatgcatttcaatggattattataaggaggacattacaagaagagcattgtaaggaggacagacgtgtgttcactgacctaacaaaacaacatgggattcaagcctcagctttgtcacttatcccgagacctgtgacttagggccaatcatgggaccctctggtgactcagtttccttgaatgtgaagtggtatgatgcctgcagtacttatctcatagaattattataagacaaaaccagagaagcacatgtgaatgcatttagcaacatgtaaaatggtttgccttgggaaacattaaccacagtggccatgctgcattgcctcacttctcatcctgtagcatcacaaaagggaagttacttattggaaagtctgtatttagaagctcaggcatccatgtttgctaggtatacttaatcaattacagaaaataggtctcaaatacgcctatgtaaataaagatcctataccacctttacatcattgattgcatttctatgtgatgattataaactgctgatttaaaatttttttttgtttgtttatttaaacataggtagaacaatctccatctagcagcaaactgaaagtaatgcaaacaggtatgtacctaccgcattcctctgtgtgttatctgagggaggggcaggagaggctggctgttggagaaggtttggaacttccattctgcctctcattgaagtgggtggcccccttggtaaaaataattgtccttgtatctgggagagactgtatctattggcttacagagcccaggactcaagaattgaaattgttttgactatttttctcctcattccaaggagaagaatatattccaaaatgttgataatgattagctctggagggtggaataatgggagcattccatattatttgtcaatattgcttgcattttccagatattttttgcaatgtatatgtatgcattttgtggtctaaaattttttacataaaacaagaggtgccattagtgagctttgaagtgttgatatcaacaacaaagattaatgtgacagctattttgtatcaaataaatagtatggtcagactgagaaagtaca

SEQ ID NO: 110696 - DNA, 1053 bp, Homo sapiens
ctagcagcaataatagttacacttcaaaaacattttccaaaaactatccttaaaaagagctaggaagtttttttgaaatagaaaggcaaacttgtgtggggaggatgaatggacgaaggcttcagtttgaagaaggttctagtctttttcaacttctctataggaagagaactccagagatttggaagaattacctaaaaccagttctgagacaaatagcactacctcaagggtcatggaagaaaaaggtgagtaaaatatctgcttgggtaaattgactgagccttcaaagcagccagcgtgtctctcaaccgaaacgtctattttgctcatttacttttcctgtgtaataaagtgcctcatgcttaagattaatagggctagggaatcatttttaatttggatcctgctatactcaaagtgtgctgtttactagtcacccaaactcaggcttgttaattttgatggtagaaacatgaaaatggagtgtgtggttatgtgtggctgcagctgtgtaggtcacctgggtaaaggtggggaaggctgaccatggtcactagcattgaacaaagttcttccttttctacagatgaatatagcagcagtgaaactactggtgaaaagccagagcagaacgatgatgacaccataaaatctcaggaggtgagatgtgcttttcgtatttgtttgttcacaattatttaagcactaaccaaattaaattcattaaatactgttatcttgagtttttcttaagtactttgaagaagctgcggtttttttagtgcaatggaacaccatttcatacagtgcattttatcagtgtcattttgattaatttttttctcttcatctttgtttcttcaaaacatttgtatgagacccacttatgtcatagccagataggatcagcttagtgctctacgtcagcggcaatgtcaggttcctggcctggcaatgctgagctgccaggccaggcacatggcagcaaacaggaggctgtctgagccatggagtccagctaggatgaaataggaacagcagcagggtgtg

SEQ ID NO: 110697 - DNA, 1119 bp, Homo sapiens
agtgatgcttcttaatactgtgttgctacacaaactggggggaagggccttgaagtcttctgtgtaaagtccagtgttgttaccccagacatgttactgaccttcttgaaccccattccctcacatctacaagtggaaaaaagagaatttaactgacagagttgtgtggaggatcccatcaaaaatcatttgtgactatctaccacaatgccctgtatataactggtactcaataaagttactaactcagttttctcccagccccctaacacatacctaagtaagtattggaatataaaaatatttaagatttttttttcttttttgtatttattactcagagatatccagtggtagaaaagacaacgcagaagccataagcggtcacagtgttgaagcagatcctaaagaggtgcattttaataaactcaagtgtttgatattttatacataatattttcactgtacacaaagaagggctttagaaaggctttatttctttgtataaattaaatattaaatgggtatactgagagttccacatgtcacttttacctgtatatgccctttcaatgtttaggcaatttggcagttcccaggactgtttggaagtgcccacgttgtacagtcagaatggtttttcatgcacctttcatcaaccataagaagtccatttttaataagccactaagacagtagaaaaatactaattgtgatgtgccatcagttgtaagatatatatagcttgacttcagaaatggtgaaatgataaataatttttttaaatgcgttttagaattattgaaatatagtatgtagctagaaacagcatgtgttgtatgaatttgcattcaaacccagaaaagagactgaagtttacaaaattagtctaatccaaatctaaatatcaagtgttctagatttttttttctttttttttttttttttgaaacagtctccccctgttgcacgggctggagtgcagtggtgtgaacgcttctcactgcaagctccgcctccggggttcacgccattctcctgcctcagcctcacaagcagctgggactacaggcacccgccaccacgcccagctaatttttttctgtatttttagtagag

SEQ ID NO: 110698 - DNA, 1335 bp, Homo sapiens
ttaatggcctcggggtttctactgttacagggctgcaacgaactttcataatgcatatcactacatgtgttttaccaagtattttcataaaattggattgggggagggagggtcaaagaatatacaggttaagtatccctaatccaaaaggcttggggtcagaagtatttcgaatttcagatttcttagggtttgggaatatgtgcattatacctcattgagcatcccgtatctaaaaattcaaagtcaaacttccagtgagcctttcctttgagagtcatgttggtactcagagaatttcagattttggagcatttcagatttctcatttttgaatttgggatgctcaacctgtatacgttttgaatttttataagtacttgttactcatttgaggctaaatattgaataatgagtaggtatgcattaagtgtacaaggcaaagagaagggcagtagatgtggaatgattcagattaagtgaatagtgcatataaatcctcacccatgactatctggggaggtttggggagtgggagcagttgaggaccttcttacacaaaaccatctgaaagggtctcagaagactcgtaagaagtgtcagccagtcctggaagaccacaccaagacttggtaagtcatttatactgacatgttaaaaccctgaagatgactaatctattcaaaacttggaaagatacattaattaaaatgtgcatgggtgttttatactacaaataattaacgtctcatttgttaattgtcaagaagctaacatttttggattctgaagtccgttgttcccacagttatatttcagataactttactgtgtttaggtacagttcagtaagagatctacttacgtaaaaggaagttgtttaaaagaaaaatgtgtgttctgtcattgttgagtagaaacagtagactttgtacttcatgtttccaaagcatataaacagaccattgctgttggaggggataggatctaacttttcatttgacgctattattttaaatgaaccagtgttatactgcagcttaacagctacattaaggtcttttactttttttctaagcttcagatcaccaacatagttaaatcaccatagtgatgtaatataccactgccgttattataaaaaatgcaggcaacattaatttatgttgtctttttctggtagtatattctggtagtacaacatggattgattgtgggaaataactggtcagatttttataatttatgaaagcagctaagccacttggtgacataggataggttccctatcctaaaaatcttcaaatttgtttctctgcatttcagaaacaatat

SEQ ID NO: 110699 - DNA, 1047 bp, Homo sapiens
ggcttgcaaggaggacactggaatagaattttgaaagtagagtggaaatttcccagaaaagaaagaaaagagccttccaagcaaagagaatgttgtgttctagactcagagacaggagggcacgtggtgtgtctcaggcgctgcagtggttcacggtgagctgtgatgagacttgagcctggaagggagtgggagcccatcaggaagagtcttgtgtggtgtgctgagttggggtttttacctttaaagcaatagaatacccattgatggatgaaatacgagattaaattgattttttacttggctttgtttttaaaggttgatgtatttatttttaagttttgtgtactcttgaaaataggcttttatattgtttcaggatgctgggtttttttttgtttaattcacttgaggttagtcttcttgtaaaaaccctggttaacttatttttatggtgctttggattttttaggcttatgtgccttcagaggaagagaaaaatggtgaaattctggcaccaccagaaagtctgtgtgggggaaagccaagtggaataggtgagctctttagaatggttgttcacattgtttttgtttttgccttgcatgtggttttacctttctaaaaatcaatagctgatgcatagtaacatacaggctctattaacttgcctctcactttttaaaatagattagggagaattctttactattttatttttaacatacacttttcctcatgaaatgtcaatcaacattatgtagggtaattgtttaaatctgattacccccaaataataatgcaaaacgaaagttgttttggagcaaactcttgctctatcccagaaatgtttctccatacccctgcctgtccccagatgctattgcagcttacttccaaaaggctagtctgaggataagggcccactttacaccatttgctcttgtctcttgctcaggcttttccccagtggctgcacagatactgctctcagcttgtataacctcatctcagtctctctgtgcaacattcttcactgtggactac

SEQ ID NO: 110700 - DNA, 5882 bp, Homo sapiens
acaatttcctgatgttttaatggcatatttttaagtatttaactttattttgtgataaatctctatgagaaataatctcataaaattgttcatattgtttagaattagtttttttattgtaaaatatggttgttgcaaactcctgttagttctttgaagaatttagcttcttaaaatcaagttaataatacttattttttaaaatcaggtgagtttttgacacctacacaggctgtttgtaagaattaagtgagatgttacatatgtgacagcactcaacatattaaatccacccaaatgttatgttttaatctaaaaattgattttggtatttctcatattttaacctttgttttctttcagcattgtgaaaaggaaaaaatttcttcttcaaaggagctgaagcatgttcatgcaaaaagtgaaccaagtaaacctgcccggagactttcagagtctttgcatgtagttgacgaaaacaaaaatgaatccaaattagaaagagaacataaaagacggacatctacccctgttatcatggagggggtacaggaagagactgacacaagagatgtaaaaaggcaagtagaacgctcagaaatttgcaccgaagagccccagaaacagaaaagcacacttaaaaacgaaaagcatctaaagaaagatgattctgaaacaccacatttgaaaagcctacttaagaaagaggtgaaatcctccaaggagaagcctgaaagagagaaaactccatcggaagacaaattgtctgtgaaacataaatataaaggtgattgtatgcataaaacaggtgatgagactgagcttcactcttctgagaaaggtttaaaagtagaggaaaatattcaaaagcaaagtcaacaaacaaagctttcttcagatgataaaaccgaacgaaaaagtaaacataggaatgaaaggaaattatcagtattaggcaaagatggaaagccagtttctgaatatattataaaaacagatgagaatgttcgtaaagaaaacaacaaaaaagagagacgcttgtcagctgaaaaaactaaggcagagcacaaatcaagaaggtcaagtgattctaaaattcagaaagattctctgggttccaagcaacatggtatcacattacagagaagaagtgaaagttattcggaagataagtgtgatatggactccactaacatggatagtaatttgaaaccagaagaggttgttcacaaggagaaacgacgaacaaagagcttgttagaagagaaacttgtgttgaagtctaaatcaaaaactcaaggcaaacaggtaaaagttgtagaaacagaattacaagaaggtgccacaaaacaggcaaccactccaaaaccagacaaggagaagaacacagaagaaaatgactcagaaaaacagcgtaagtctaaagttgaagacaaaccttttgaagaaactggtgttgaacctgtattagagactgcttcttcttcagcacatagtacacagaaggattctagtcatagagccaagttaccattagcaaaggagaaatataagagtgataaagactccacttccaccaggcttgagagaaagttgtcagatggccacaaaagcagaagcttaaagcatagtagtaaagacataaaaaagaaggacgaaaataaatcagatgacaaggatggtaaagaagttgacagtagtcatgaaaaggccagaggtaatagttcactcatggaaaagaaattaagtagaaggttgtgcgaaaatcggagaggaagcttgtcacaagaaatggccaaaggagaagaaaaattagcagcaaacactttgagcactcccagcggttcctcccttcagagaccaaaaaagagtggtgatatgacattgatccctgaacaagagccaatggaaattgattctgagccaggtgttgaaaatgtgtttgaagtatctaaaacccaagacaaccgcaataataattctcagcaagacattgactctgaaaatatgaaacaaaaaacttctgccactgttcaaaaggatgaattgagaacttgcacagcagattcaaaagcaacagctccagcttataagccaggccgtggaacaggagttaatagtaattctgaaaagcatgccgatcatagaagcaccttgaccaagaaaatgcatatacaaagtgctgtgtccaaaatgaaccctggggagaaagaacccattcatagaggaactactgaagtgaatatagattctgaaactgttcatagaatgttactgagtgccccatcagaaaatgatagggtacagaagaatttgaaaaacacagctgctgaagaacatgttgctcaaggagatgccactcttgaacattccacaaatttagactcctcaccatccttaagttcagtgactgttgtgcctctgagggaatcgtatgatccagatgtaattcctctgtttgacaaaagaactgttttggaaggtagcacagccagcacctcccctgcggatcactctgctctccctaaccaaagtctgactgttagggaatcagaagtccttaagacaagtgacagcaaagaaggtggtgaaggtttcacagtagatacaccagcaaaagcaagcatcactagcaaaagacacattccagaagctcaccaggctactttattggatggtaaacaaggaaaggtaatcatgcctcttggaagtaagttaacgggcgtgattgtggaaaatgagaatattaccaaagaaggtggcttagtggacatggccaagaaagaaaatgacttaaatgcagagcccaatttaaagcagacaattaaagcaacagtagagaatggcaagaaggatggcattgctgttgatcatgttgtaggcctgaatacagaaaaatatgctgaaactgtcaaacttaagcataaaagaagcccaggtaaagtaaaagacatatcaattgatgttgaaagaaggaatgaaaacagtgaggtagacaccagtgctggaagtggctctgcaccctctgttttacaccaaaggaacggacaaactgaggatgtggcaactgggcctaggagagcagaaaagacttctgttgccactagtactgaagggaaggacaaagatgtcaccttaagtccagtgaaggctgggcctgccacaaccacttcttcagaaacaagacaaagtgaggtggctttgccttgcaccagcattgaggcagatgaaggcctcataataggaacacattccagaaataatcctcttcatgttggtgcagaagccagtgaatgcactgtttttgctgcagctgaagaaggtggggctgttgtcacagagggatttgctgaaagtgaaaccttcctcacaagcactaaggaaggggaaagtggggagtgtgctgtggctgaatctgaggacagagcagcagacctactggctgtgcatgcagttaaaatcgaagccaatgtaaatagcgttgtgacagaggaaaaggatgatgctgtaaccagtgcaggctctgaagaaaaatgtgatggttctttaagtagagactcagaaatagttgaaggaactattacttttattagtgaagttgaaagtgatggagcagttacaagtgctggaacagagataagagcaggatctataagcagtgaagaggtggatggctcccagggaaatatgatgagaatgggtcccaaaaaagaaacagagggcactgtgacatgtacaggagcagaaggcagaagtgataactttgtgatctgctcagtaactggagcagggccccgggaggaacgcatggttacaggtgcaggtgttgtcctgggagataatgatgcaccaccaggaacaagtgccagccaagaaggagatggttctgtgaatgatggtacagaaggtgagagtgcagtcaccagcacggggataacagaagatggagaggggccagcaagttgcacaggttcagaagatagcagcgaaggctttgctataagttctgaatcggaagaaaatggagagagtgcaatggacagcacagtggccaaagaaggcactaatgtaccattagttgctgctggtccttgtgatgatgaaggcattgtgactagcacaggcgcaaaagaggaagacgaggaaggggaggatgttgtgactagtactggaagaggaaatgaaattgggcatgcttcaacttgtacagggttaggagaagaaagtgaaggggtcttgatttgtgaaagtgcagaaggggacagtcagattggtactgtggtagagcatgtggaagctgaggctggagctgccatcatgaatgcaaatgaaaataatgttgacagcatgagtggcacagagaaaggaagtaaagacacagatatctgctccagtgcaaaagggattgtagaaagcagtgtgaccagtgcagtctcaggaaaggatgaagtgacaccagttccaggaggttgtgagggtcctatgactagtgctgcatctgatcaaagtgacagtcagctcgaaaaagttgaagataccactatttccactggcctggtcgggggtagttacgatgttcttgtatctggtgaagtcccagaatgtgaagttgctcacacatcaccaagtgaaaaagaagatgaggacatcatcacctctgtagaaaatgaagagtgtgatggtctcatggcaactacagccagtggtgatattaccaaccagaatagcttagcagggggtaaaaatcaaggcaaagttttgattatttccaccagtaccacaaatgattacacccctcaggtaagcgcaattacagatgtggaaggaggtctctcagatgctctgagaactgaagaaaatatggaaggtaccagagtaaccacagaagaatttgaggcccccatgcccagtgcagtctcaggagatgacagccaactcactgccagcagaagtgaagagaaagatgagtgtgccatgatttccacaagcataggggaagaattcgaattgcctatctccagtgcaacaaccatcaagtgtgctgaaagtcttcagccggttgctgcagcagtggaagaaagggctacaggtccagtcttgataagcaccgccgactttgaggggcctatgcccagtgcgcccccagaagctgaaagtcctcttgcctcaaccagcaaggaggagaaggatgaatgtgctctcatttccactagcatagcagaagaatgtgaggcttctgtttccggtgtagttgttgaaagtgaaaatgagcgagctggcacagtcatggaagaaaaagacgggagtggcatcatctctacgagctcggtggaagactgtgagggcccagtgtccagtgctgtccctcaagaggaaggcgacccctcagtcacaccagcggaagagatgggtgacaccgccatgatttccacaagcacctctgaagggtgtgaagcagtcatgattggtgctgtcctccaggatgaagatcggctcaccatcacaagagtagaagacttgagcgatgctgccatcatctccaccagcacagcagaatgtatgccaatttccgccagcattgacagacatgaagagaatcagctgactgcagacaacccagaagggaacggtgacctgtcagccacagaagtgagcaagcacaaggtccccatgcccagcctaattgctgagaataactgtcggtgtcctgggccagtcaggggaggcaaagaaccgggtcccgtgttggcagtgagcaccgaggaggggcacaacgggccatcagtccacaagccctctgcagggcaaggccatccaagtgctgtttgtgcggaaaaagaagagaagcatggcaaggagtgccccgaaataggaccatttgc

SEQ ID NO: 110701 - DNA, 3669 bp, Homo sapiens
ctaatgcttataaaaagcttacattttttctgttaaaaaaagttgtagagaccataggtttattttatacccagaactcagctttttaatgagcatattcctatatgccatgagcagagtaggggtgagataagcatcacctctatactggaccctaggcagtgtactgtgtctagttctaagggtgttttgttttgtctgtttcagtatttccactagtgacacagtggtagaaaagtttacagacttgtatagtatggtatatctaaatgctactgtagcatgaaacttagtttccattgtctatatccaagtaaatggattgggacaatttaaggttggatggatggatagatagatgacagattgtagagtgttattttaaagtaattaatgcaaataatatattattttttcacctttccataaattatcttgtgtttcagatcaggaatgttggagtctggtattgaccgaattatttctcaggttgtggacccaaagatcaaccacacattcagacctcaggtagagaaagctgtgcatgagtttttggccacgctaaatcacaaagaggaaggaagtggcaacacagctcccgatgatgagaaaccagacacttcccttattacacaaggtgctttgcttttactcttggtcagttccattgtttttcttcttgaactgaatatcaagttagggatacttggctctttaacacattttttaatttggctattccaatgaaattgtactttaaatatcacctaaattcctcaattgccataacatttcgttttctagattaataaaaataataagcattgtagtaatgtgatgtgagtgtgagtatgataatagaaggaataactaaaataattagagaatatagtctttttctaggaagtagacaactcctcagatttgcatggtgccctcgctaagataatatattagagaggtagataattcagaatatggtatatactagtactggtacctgaaagtctaaaagaatatacagatggtctgcacagcatatgcatcatataaagatgacaatggcatgtggtattgatttagcagaggtattttccttctgattaaatgtattctaaaacttctgtttttctttaaggtgttcctactcctgggcccagtgctaatgtagccaatgatgccatgtcgatattggaaaccataacttctcttaaccaagaagccagtgctgctagggcttcaacagaaacatcaaatgccaagaccagtgagagagcgtcaaaaaaacttccatctcagccaaccactgatactagtactgacaaagaaagaacttcagaggacatggctgataaagaaaaatctacagctgactctggaggtgaaggactggaaacagccccaaagtctgaagagttcagcgacctcccctgtccagtcgaagaaattaaaaattacacaaaagagcataataatttaattctgctaaataaggatgttcaacaggaaagcagtgagcaaaaaaataaatcaacagacaaaggtgaaaagaagccagacagcaatgagaaaggagaaagaaagaaagaaaagaaggaaaagactgaaaagaaatttgatcactcaaaaaagagtgaagatacacagaaagttaaagatgaaaaacaagcaaaggaaaaagaagtagagagtttaaaacttccttcagaaaagaacagtaataaagctaaaactgttgaagggacaaaagaaggtatataaaaacttgcaaacatctacaaagtttaaagaacagagtgttttgggatcagggaagtatcaaatttgccttcatattttaataagtttatttaatacttttggaaacttatatcccctttgcttaagaaaaaaagcaataaatatttgtatttttgtgtactcatatatctgttcacagagtaaattaacagaagttattaatttataatttgtcttataatttattcacatacattattttaagcaacttagttcatagttggatatcctaatttttattaggtagtaaatacttcagttacttaaaattcattttattattatatcatacattataaattaatagtttagttatttttacagaagtctactttgcctttgtattttctggaaaccactctgccttgtttgatagtttgacacgtatttaaagcagaaaattttaagtgtaatttagtaattgagctctgagtatgttcttataataagatgatttttttttctgtgttttattttccgcttgaagatttctctttgatagattctgatgtggatggacttacagacatcacagttagctctgttcataccagtgacctttcatcttttgaagaagatactgaggaggaagttgtaacgtctgatagcatggaagaaggagagattacgtcagatggtaaagcattttacataataatgcctctgaagcatcctgtcaagcattatttgtatattctgatggctatatcctgagaaacagtgtggtatagtagcaagagcatgggattttgtagttggaagatttgtttctgagtcccagctccaaagttgtctgtctgagcaagcttggtaagttactaaatctcaacaacccttggttcttcattccttaactctatcccctagtattattattaatttaaaatttagaggagataaatatatgaagatgctttttatttgtgtgtgtcacatttggggacagcgtagtccacaacactgccctcaattaatggcaccagttgcaagttccgggttccctaagaccaccgttagatttgataatttgctaaaagggctcatagaacttaccgaaaggtggtatactcacagctatggttgtttacagttaaggtgctcagattaaaatcagccaagggaagaggcacacagggcagagtccaggaaagtttcagacagttacttccaattgttcccccttgaattacttcctctgcattgatgtctgacaacatatgcagaatattgccaaccagggaagttcaccagagccttgggatccaaagttcttaaccgaggctctagcatgtagtcagagttggctgcccatatggctgatctcagtctctaccccctctagaggtcaaactcttactccatgacccaacactccgaccctaaatcacatcgttagactgtttagcttgactcaagagccttcgcactctgaaacactccagtcaggcatagcattccagaggcttagagattacctcccagaagctaatggtaaaggccagacctctctgggcaaggctgaattctttataatacagtttgtttttcagaaaacccctcctgagcacttcctgtcttccaggcactgtgctaaggacattcatgtaataactcctatagtcctcagaaccaccccaggaagtaggtacaggcaaggagacaaagtcacagagagaccatgtcttgtccagtcatgtagctagtgagcaccagtgcagatttcaaacccgagtctgtgcttcttaccaatatcttatgttgctcttaccacatgattaaattctgtttaggactattagtttaggagtaataaaaatattgagttttatttgcaactgcctgtagagagcatcttataaatttgttgcc

SEQ ID NO: 110702 - DNA, 1015 bp, Homo sapiens
acaaccagagggaatggtagttgcaggatggtaggtgcagatatgagaatttctcactggagtgtaaactttgaagctaaaaggaggcaaatggcagaaggtgaggctatacagtgcttgcttaatatcagtcagggacactcaaactcatccacattaaaagctgtatagaagaaaggtagaaagaacatcagtgttgggagacagcctctagaaatggagtgcagtgctgagtgcttggtcacatattccttccaggcaatgccccttcaggtagagatgatgtaatatgtgttcccctccatgttcccctcagggagcacatcaagggttctcagactcagcactgtcgacatttggggctggatagttctttgctgtcgggggattgtcctatgcattgtaggatcttcagtagcatccttgcccttgacccactagatgccaatagcactctcatcagttgtaacaacctaaaatgtctccagacattgccaagcgtcccttgggggatgagagtgaaatccttcttggtagagaaccattgccttacctcagatttaatgcctagttcaagtagttgtccctcaataatttctcttgggtctatgccattagctggtttctgccaccccagtaaagaccttcctcactgtagtttattgcatgctttcctaaagtattttgtgtctctttactcttgcactgtaggatgattaaccatcagaaagcttagctgttctatcactctgcccatatgtgcagtgggctcccattctctaccctgtaattccaaacttgtacaagtaaccaaagctttttagcacctggccccaacctctctgtcttaacctcatttctctgctttttgtattctcttctatagccaaattggaccaccaatttggaggctcactaaatgctcctggcctccagtttgctcatccacttgctctttgtttacattgactgtatgagcaaagccagccattctcattcccagcttccttgtgca

SEQ ID NO: 110703 - DNA, 1035 bp, Homo sapiens
tactacgtgccagtcatggtttcggcacagtgattaccccggtctgatgagcaagactaaggcattgttcttacaggaactggtttggaaacagtggcgctaacagtagccagttttgtattcattctcatatctgatgattttactttgtatcgaagttatgtttgccttctttcttgaaggtttctgggcggtaagggcctttatcctttggagaaatgactaaatggtaattgaatcaagttatgtgtaatatgctttgctggacatcgtgggggtgggagcgcaaagataaggaggcaaacctgagacaggactttagtattgtttctagcagtgattgcctgatttaggtaacttaggccatgtcaccattctaaggtaagaagggacaggaaggtggggtagagagaaccgagtcattcagtggagaaaagatgcaggagaggtgacagcagatactgaagtggagaaaggacaggaaagagagcagattcaggagagtaatgtagagaagggaaaggacagcaacaaggttccctgtccagaaagagaggctggaaaggggaagggattttgtaccaaatgtcagagtgaaagggacattagcaggaacaagtaaacttagctggattggcaaagaattagccaaagacaccaggaaagagcagtcagtgagatggatggaaaaccacagtacagtctagaattctggaagcagaaagcatgttggaaaattaactggtttgtaggggttgtttttgtctgcttgttaaatctggttgggtccattggattggagttttgatgaaatgagggtttccttttttttttttttttttttttttgagacagagtctcgccctgtcgccaggctggaatgcaatggcgtgatctcggctcactgcaacctccgcctcccgggttcaagcgactctcctgtctcagcctcccaagtagctgggattacaagcgcgtgccaccacgccctgctaatttttgtatttttagtagacacaaggtttcaccgtgttg

SEQ ID NO: 110704 - DNA, 1058 bp, Homo sapiens
gcctggagaacagaagggaatggctgtcttttactgaagcagtcctgctttgaagtctactaagtatttaaaaatctttatgttattcttggcagggtgtcagaggatgatcaggcaaacttcatggtcactctgatagcacagctaagaaatccagggcaagaagtgatcctggagatcaattctattcgtcttcctactgtgcagatgtgaagactttcccagagataggcctgcccgaatttattagtttggtagtgctgccataacaaaattaccacagactgagtggcttagacaacagaagtgtatttcttcatagttctagagattagaagtctgaaatcaaggtgttagcagagtaggtttcttctgaggaccctcttcttggcttgcagatggctaccttctccctgtgtcttcacatggtcccccagcttgtgtgtgtctatgtcctaatatccttttcttataaggttaagagtcatatttgaccaaggcccacactaatggccttattttaagttaattacctctttaaataccctgtctccaaatgcagtcacattctgaggtactgggcattagggcttcaacatatcaatgggggagcagggcacaatttaacacatagcccacggtcacatcatgtcagcactgagcccagaagctcatgctttccctgagaagaaggtgctctctcaggtttttactaaaagtgcttccattcagcttcccagatgactgttgttcccaatgcagatgctggttatctagttgcatcccttgccttgtattctgcacgtctccttccttggggatgcttccaatagtcaagaagttagaggaaacccaacagagccccggggtaaaggacggctggtacacaaacagatttgtgagtcactggcacatgtgagggatattatctttaaattagttgggggaaattaatattgctcacttgctatgctcacccttattgtctgctccaagaatcagcaggtctggagcctctgttgatagtattttttaattaaaaggaaaataacttcttg

SEQ ID NO: 110705 - DNA, 1034 bp, Homo sapiens
aatttgactattttagatactattgtaggtattttagatacctcacgtaagtggaatcatgtggtatttgtctttctgaaactggcttatattgctttcagtgcaatgttttaaaggttcatccatgttgtcacatatggcagaatttttttctttttaaaggctaaataatattctactgtatgtatatgccacattttctttatccattcacctgtcaatgaacatttatgttgctttcacatcttggctgttataaatagtgcttcaacaaatgggaatgctagtatctcttagagatcctgatttcacttattttggataaatacccagaagtggaatttctggatcatatggtagttctatttttaattttttgaggaacctccatactgttttccgtagtggctgcaccattttttttattcccactaacagtgtgtaaggttatcaatttctccatattaccagcacttgtcttttgttttttgataatggccttttagattgattcaatcctttctcctttaggacaacactttgaaagaaacataacagttcaaatattttttgggcactcactaagtgtagggcacagagcttggacactgggctataactgcaagcaaaagcagacacaatccttcactttgggaaattttgtgggagagagatgatggcaaatagccaccatgacaaatgtaaaaggggaactctgacagatctatgagggccagggtacatgtctagtagactgtataatggggtaagggttgagaagagtattctgaacagagggaataacgcatgccagagtcggagggcacacttgagaaaaccagcatggctgatgtgcagagcaaaaaaagggagcaaatgtgttactacccccacttacagatggaaatacaacctcagaacaatgcgtggcttacaatatcaccatcagggaataaaggagcagcacctagaagtgtataattaactccaacactaccacaccaacctctccctccatgctaaacttgtggagg

SEQ ID NO: 110706 - DNA, 1055 bp, Homo sapiens
acatgaagacaggtaagtcatcccaagactataacgctggggaatagataaccctggagtacaagggggaaaacttctgtctcaggagactagagttgggactccaggaacacaggggttcattacaggagcttgaacaaagagaggagtcaagaccccatctcatagaaatggaaccagttcaggaggcactgcagttaaggtcaactggatgccttacttccatgctgctggtttctttctgtggcagagcccatgcccataaatgtaattaaccccacagaatgggaaagctttgagtctttagatgggagctaattagctctggtttggagttggaaaaggagaaagtagaaattaagattcattctgaccttgaccaacttcaaggtgctttattgatgtggcactcaagagtagtaccatcctcaattacttctagttctcctacttttctaaaccttccttcataatttcctccttcactttctccttacatattctttacgtgtgagagttccttaggcttatgtttctggtccttttctatatttctacctactttttctagatgaatttattatcatgttttcaaacatcatctaaatgctaatgtcttccaaatccatctctttagcctcatggtcaaaatcatatttccaactgcctgtttaacagtttgacctgggtgtccttcagccacatcaattcaatgtgtctatacctgcattcaacatcttccccaaaatctgcttctcctattttgcttcttgtcttggctgacgtcatcatcacacaaccagtttctcaagctgaaacatgagtcatcctcttccttcatctctctcaccctccaaaaacaattgtcaaccatgctctgtcaattatactgcagaaacgttactcaaatgtaattccttcatgtatctccgcattcccttgcctttcacattcctggaacacaagtgcccaataagtatttgttgattagtaattgcccaatgaatgctgtaagaagaaaagatgaagaaaaggagaaaacaaggtaaggaaag

SEQ ID NO: 110707 - DNA, 1036 bp, Homo sapiens
ctacaagggaatatgtgggccgtgtgtattttaagtaggtaatattgtgaaatgacactgggcagaatttttattttccggatcttttttgattcaagatcttttttgttattccctcaatacaatttttgggtgaccgctagattggtaaattggcattgaaagagtgtcttgttggttttgaatcttgttagcatttgttgcagagttcattctgtttaagtccattttctattttcgtgattaaggattgacagagacgcaaaatatgaccttaaccccataactttttcagttgaccaaagttttcaaggattagtctttttaaagtgaatattatctaaattaacccaagtgaaagttaacagtttatctaagttaaccaaagtgacagtgaacagtttttgttgaatcactgatttctttcttagaaaagagaatgtggcctatgaggattgaaaatagggattttgaaataatgttccactttttcatgatttttataaccctcagcaactgtcttttgtgtctcaggatcttcattttgttatctggaaacttgcccacagaaaattatctgtaggtaattttgtatttacttaaagttgtggtacagagcgttggaagaacatataccatgatccatatttaactgtaatttgcttttggacaaaagatgggtctagccatggagtgtgagaggtcacacagctttcatatggaattttagatcactggaagataactttgagcattaaatcatttaataaggagagtaaggccctcaagaatgaagtggtttgtccatggctctgtaattatgctttggacctctgtggaagaggaaagagtaataatatactcatgattatgttagcatttaaaagtgtttaaaaattggtgctgtagatcaggagtttctcttttaattgtcttacaaaaagcaggttcaattttaagagaaccatatttatttgtagtaactgtatggttcatacttctttagctacatcttaacaccaaagtattaaagtat

SEQ ID NO: 110708 - DNA, 1089 bp, Homo sapiens
actgaatttgaatgtatactaggtaccaggtggtgaggattattataggttatagaaaactcagtccttatatatgcaggttctttcttacagagctcaagtttgaatgagcatagacttaacgttgtgtgtgttatatgaatggagctatgttattctaagtctcttccttggttaatttatcaacatgagatgattttacaagtaaggacataaacagattaataatacgtttgtaagtaacattctaatctagaaggttagcattaattttgataatcaaccactaacaattgttttagccaagtcctgcctgttttccaaagtagtcctgccagggtcttcacctagaaatggtagttacttcatgcaatttgcaacgtattgtcttgttaatataagttagctatttacctctactctcttctctagtctggtccagttaagccttattagtgacgtttttatggtagcatttttgtatttaaattcaatacatgaatgcctaggagatggtatgtttaggagaagaaaattaatgtaattattttgaaggtggcaagagaaatgttttcaaatagaagaggacataattactctgtgcagaaagaagcaataggatggatacatatataggatacatatataggagaaataagtatccatggaaaagaatacaaattagctggcatacatggtccatgaggcagggacagatgttgagaaatcagattattgagttgatttcagttggagggatgctagagaggagataggggtgataatgaaagggaagctttcacaccagcctccggggctgccctcccacttagacttcaatcaaagctattctgcttttacctgtattataacctaagattttagggaaatttattttaggaaaaatgattttggtgcttaaagataaacttatctggtaaactgctgagatattggcattccctttggacttttgagccagaggtgtgatgtgatgaagtaaaacacagtggtgggggaaaaaagagataatggaaagtgaatggaactggaaggaaagaaggcctgaaacttggatcttcttcctct

SEQ ID NO: 110709 - DNA, 1045 bp, Homo sapiens
taaatataagaatataggggttttctataatcttatttttctttggaagagtacctcattttcaagaggagaagtttctaattgaccacttctttaaaaataaaacagggtttttaatgtatcccagcaaaaaaaattaatatctcttcaaaaagttctcttgtgattaagtttgaattccctttgtcatactgcttctaatattgtacactgacctccttagttatttttcagtgtttataatcttttcttaggttatcttttttcaagatttggattactttgttcttttctgtgtttttcagcctttctaagcttttattgatactcctgtaagtgtttgtggcaaatgtctgggtttaagaaaaaccatgaaataaatattataataaaagaggttatgccttttccaacaatgttttctaatcattttattctgttagttattgtgagattctgtaatctgtttctgaaagcccatttagttgattgtttgccagatagtttttatattttagaatagattgcatgcacacttttcctcatagagtcttatatttctgaagtattttggtgctttcaaataaccttatagtaataaatgtaaattacattgctatgattttccatatttattaatgataattagtattgttgcgttcatggtaacttgaaaattgccttagttcttctatttagttttcaaactgatggcagtttgcatgaacacaatttttcctaatgtctgtatttcagaagaatgcatgagtgtttgttttataaccagatttgtttctgttttttcagaagtcatattttaattcctgcaatttatttaatggaattatcaatatcttttgcatgtaagcctataggtttcattaaattcaaaaagcaattttgagatgtcatgtgctctttggttgctcaaggctgttttatgtttgttgctttaaaaatcacatgggatgcagctgatgctttacaaagtacaaccaagctaatcattttaaaatagctttgctgttttctttcctagagtagg

SEQ ID NO: 110710 - DNA, 1040 bp, Homo sapiens
ctgttccgttgaggattctgagaaagttttatagtcctttaccattactatttaaaaagtacagtctttctccttacagaactcgactttttttttacattttttattgagtttttatggtagagataaagaagtattcattcaacagacatgagaactaactatattctgtaattagatagtccctattcttaatcaacttagaagtttagtgggacagacaggaaaatcaacaaattagttatgaacacagtatagtggaagcacagggaagatggaaatatctggatagattcctaaaattaatatgtcatttttgcccatatgggccatcctattctctgtttcagttttattaatatttcatttattttagagtattttgagtctttttcttttctagaatttttaaagagactataggcatcatctagtctgacatgattattttctaggagttagaaccagagcctagagagatttagtgacttcagacgaagaaactaattgcttcttataaagtgtgatatccagaccagcagaatcagtatcacctgggaacttgttagaaatacatactctcaggttccactccagacctactgaatttgatgtgtttcagcagtctgtgtgtttaaccagccttccagatgattctgaagcatgttcaagtttaggaaccactgttacagctcattgattctttgtgcctccatcactaatcaaggtcactgttctagagagcagctgttattgatgcatgtgttttacctcaggggcctttcagtaaaaatcagtaaagagtactgatagagttaattggtgataaagctggaataagagcctccagtctagcattccttccgtcattcagtgttactttttacctttttaaatccctgacagcaacttagtctacagtactgattctgaacccctagctttaaaaaggctacaaccctaatttaaacatcaaagtaaagtaaataaatgaacatattcttagaaaagctttttaggtttttcttcagctttctaaa

SEQ ID NO: 110711 - DNA, 1976 bp, Homo sapiens
gcactcattattaaattcagactactatgtcagataacaaaatgtttgatagatgtttaaagtatggtgcaattatggaactaaaatatttcctcccaaatatttattttctatgtgccactatctgtcttcctaaatatgtgagaaaagttttgaaattaaccaaaaaatgctttctgtgtgtataagatttcaggaaactttatagagaaaagtaactatagaaattattttactgttttgcattagtattgccagtaaaattagattacttttgataaaagctttaagagataaatatactgaaaataatgtcctccaatgcaaggaacattgtagttcatgagatctttagttattggtatttttgtgggatacagattaattagtaataatcagaagtcctattttatgtaagagaatttagatagtgttttataatcgctttttgaaaaaactgcatagattataatgtcttttttcctcttctcttccaggatcgaagtagaatgtatgacagtttgaatatgcactctttggaaaattcccttatcgatattatgagagcagagcatgatcctcttaagggtaggtgactttttaaaaaaatatatgtttatattatacaccaatttgcttatcttactagtttttatatgaaagtgaaacctaagtagcacctatatccaatataaaactctcttacacatttattaatgagaatctttgtttttatgaaatgccatatttttcctttgttgcttaatgtgaactcacctcccttgacttacaatttaaggaaaatttactatttagagacatgcttcagttcaccagagaatgaaggatggatctaaaagtatacactagtcacttttctagaattctttcaagtacaaaaatactaaaaatatttcttggaatacttgtattcacaatttgcagtgattccagcctagaattatccctagttaacctcctttctctatttttcttctactgtcatagggttttgaaaggggggggagtattttatagtagcttctctgaggtgaaaaatagcttttcatagaagttgagacaaattagggaaaagaaccggcccacttaccctatagtagcagtcttcactaattgtttgtagtatttgaagaaatttcattagcatacttgtttttgtctgtacatattctgtgtataaaatgaaaaaaagcaattattatatatttttatacaatatatcacattgtcatttatatcagtggtgaaaatctaccaaattgtctatttgagtcatgacagttactatttatctattgctacataataaattatctcaaaacttagcagcttaaaaacagcaataaatatttattaccttaaacagtttctgtgagtcagaaattcaggagcagcttaactattttattctggctcaaaatctctcattgaatcaaaatcatggattactttgtaaattttcgccatttttaattctataaagccaagttagaattctctttcaagatttggcctaaaaactataaacttccttattggcagggaggtggtgatgtggggctaagttgataatactgaccacatatctaactatttttttctgtttatggatttttcttgtaaaaagaattccttgtctttttaattccttaattttaaggagcttgagaagctgaggggatattagtgattgttgattatgtgtgctaatagtaattcctcatacaaacttatagttgtatgtcaggtttttggggatgtttgtttgagtttcttttttttttttccttttaaccaaagttcagcttagttttttgagtatctttgtatagggtcttggtctttttcactgttatgctggcagtttcagtggtttgtcttagatccaccatttagaatagaagccagcagcttatgattaagaagtttcctgtttatctccttggcttctcaag

SEQ ID NO: 110712 - DNA, 1007 bp, Homo sapiens
ttagggctgcctgatgccgactgggtgtaacagggcacagttaacactgtcgagagtgtgctatcttttgctatggatcgtgaacagtgacacactgttaaatgctttctttagtatgaatggcactgacccgtctgctttatttattgtgtggtagtttctctccattaacatcctattttctggtgactatcttgattcttggcaaataatttgcttttcaaaggaagatcatggattctttaaatggttaaagtaaatcatgctttgccaagtactgttttgtagtttttcagttttagatttgcatacctattttaaataatttgtgattttttaatatatgtgtatatatattccccctttaacaaaagaacaagacagtgattattgttaagctcttttccttccctgcccccaacaatttgtaaaaaggcttactgtgtgagtatttttgccagaaattgcttgtatcatttcccaaagtatagggacaaacagaattacttaattgtagctcataaaagttgatttgaaaactctaggaagaaatgtagtttatgtaacggtttgggggaagatctgtgtcagtaagtcgtaatgcctttaccagtgtttcatgagcagttaaagggaattaaggaaaaagaatttagaatatgattttacaccaagaaatgtctagaagtggatgcctttaaaacttatttactaagtttttgtatatctagtgtcatttttattacctgattgctaaactcctattttttaagactcctgaagtaagaagctctgtttattttagggcatataagccctgagaaaataaggagttattcctgtaaggtgctgactgattatggtagtaccaaattgcttattttcttccacttttccctctctttctcttcagctgaccttaatataagattacaataccaagtcacaaaataacttgtataaatttctaaaagtctccattgtgagaacttatatttagaatttaa

SEQ ID NO: 110713 - DNA, 1258 bp, Homo sapiens
ttcctgccttcattttttaatttattaagctgtaccttcattggacccttttaattcagagatttatatcttcagttcttggaattttgggatattatttctttgataatttttttttttttttttttgagatgggagtcttgcactgttgtccaggctggagtgcagtggcgtgatcttggctcactgcaacctttgcctcccgggttcaagtgattctcctgcctcagcctcccaagtagctgggattacaggtgtccaccaccaggcctggctaatttttgtattttcagtagagacggggtttcactgtgtttggccaagctggtctcgaactcctgactttgtgatctgcccgcttcagccttccaaagtgctgggattacaggcatgagccaccatgcctgcctcccattttttaatattacctctttttggaattcctgttcctcaaatgttaaatgttgtatagtcatcatctgtttttcttttctgttttccattgttttgtctcttgttttgcatttcaagagcttatgtttatttttcaaatcttgagttttttgttttaaaaatttttgctaatttttaaaacctcctttaaaaaaattctcagaactttcaattacatcttattcttgttgtttgatcttatttctctggaggctattatagtgtttgaagattattttcccagttccttatattgtctgtgcttcttcaaagttcttttttatttgtttgtgttctctttttttctcatgttgggggcttcatcttttactgtctattcatatttaaaagtaagacacaaaaaatggggattggaagctcaatgtatatagttgaaattatcaactagtaatgattgtaataagtcaatcaggtgagaccctcaccatgcctgtgtctaggtcttttcttttgttctggcaaatgaacatggatgtgggtcttctagtcttctgcttgtgagctgtaggcctagctgctagacttcttagatgaacccaggagggttcttttaaaaactaacaagcaatcttaaaccttctgtttttagttgtacccgacttttacacacagttataaccagagcttctgatttctgaacctatccaggtgtgtactacagtaaatggagtgttacttgatggcattccccatgtatacacggcttaggtttgtgtttcagtgatttctggtctacaaagttagttaccattcaaccattcacatttacagttcccagaaattt

SEQ ID NO: 110714 - DNA, 1030 bp, Homo sapiens
tatcttctcagtcatctgtgtcttctagcactacttccatgcaggacttggtataatgtagattggatctgaacagctatttattggactatatatgccataccattctttataataagtagaaaaaataagcatttagttcaagttgtttccattcattgggaaaattatttgggatgctatttaccgcaaagtgttgtatatttctgtcttcattagctgaaacaaatacttgtgaattttaacacaaatgataatgaaatgtgtgtttcttgttaatttcagagttttatatgattcagatgatatatatttacctataaataaaagtcctttgtagaatggtaaaacatttaaatcttatatggtgacattgtcattgctcttaaaacaaagtagcactaattttcagatgcccacatagcttttcgtatcagaaatatttgtatatgtgggcttatttttagttctgacattttacaatttgtgctttgtttacatgcagcaaggagttatgggcgaagacgaggtaattcatttctgtttgctatggtataattgtttctaatggggtttactgatcaatgttgtaattaattactctagatttttcatgcaatatctgaaaactcacacaattgtattttgatttgagcacttgtcgaagtttttaattttaaatctcctaacctttgaactgtatttttatactaattgtggttatttaataaattttccccttttaaactgctgagatttaactctagtttttaaagttacttctgtatctcttaaaataaagctgctgtttatggtttgtctgcttaaatatgtttaatattagtgaagttagcatgaagtatgatttttctgctctctaaatgtgtaactgtcatatttatgatgtataatttacagctctagattgttagttttatgttgacccagttgaaaataacacacaccaaatagattatttttaacagtgatttatagaaatcatgttgcttatatttctctgttttctaag

SEQ ID NO: 110715 - DNA, 1463 bp, Homo sapiens
gagacagacactcaagacttaaaaaattgaagctgaacaacttttctaaaaacttagcaagctgagaaggggggagcagtttagaagtttagtacctattttcaaatctatggactagcttatttcactatgcaattttagtaatggagcttcagttctctgaaacacaacccacttaccagtctgtgatttttaggcattttgaaactatagagcaattcagaattcttgccttgttaaacatttttcatcttttacctgttgtgacttacatttagtctaatttcgtatgctctcatgtaaatatcatgacctaagaagttcttaggaacaaggtattaggaagtaatgttattatttgtcttcatctcagttcaataattgtagattatgattatattaagaaaaaacaaaatttttttccctgcttttatataggaaccagctatcattcctatatatctctatcccccgtaagccataaagacttattcggcttcagaactgccttcctgcattggaagaaggaagactctcacatggttttaaggcttctgataaaagcttccattacgacagaactgatggttggcatacatatttggcttagcataagggggagtgaatgcctgaattttcatctcaaattatatggccttagtaaattatgaacactagcagtctacttttaaaattttgattgtgagagtcacgtgaaaggcacactcattagaaataactactgagagattttatctgaattttaaagtacactgaaacggtaagtaatgcaatttttttaaaacctgcataccaaaggaatgactcagaaatggctagtcacctggttttcttcctattttttactgttttttcctattccatgctaggtataataaacctcagactgataaccttttaaccaccaaacacccccttttatatagcctcatgtgttagatttgatccatcaaagaaactgcatttatttagtaattattttgtgaaaaatgagttgcttatcttctgttcatgtcggatgtgtcacactgagttgatataatttttgctaaaaataagtcatggctcttctaccagtgcaataatgggtgaacagttattttcacaggacattctgactttgacttttgtagtcctgttcaggaagaactgtttttcttctttcagcccaggcacgaaactgttttcatttaaaagatttctcacttgactacagtcaaatcaagttactaccaaaatgactttatgtacttgaatttcttaataatgtcaataagaactttaaataaagctagctccagatattaatttatgaaatatactttaggaataatcaaaatgtaattatgctagtagtagttaagaaaagcagagatttctgtccctgctttttagttggaacctactatcactactgtgtatctctatcccctggtagccat

SEQ ID NO: 110716 - DNA, 2495 bp, Homo sapiens
atggaacattgttcttaatagttgagaattgcttttttgaaaattttcatgaaggaattttggtaatgactttgcttgcaggttttttggggtgttttgagaaagtggcatggaaacatgcagtagttaatgagtttctcttggtactgaacactattagaatatcattagtgatattttttctctttagagcatttttaatgcaactagcccctatattttaatgtaagagttactctgcaatctaagcaaagcacccaacaatggtaaatgttttttaaaaatgcagaactaagatttttgactctaaagagagaaaattacaagggtgttgccttatagcaaacccttgggacaatccttcatgtgagcaaagtgttgatcttaatattggttgtctgtggtgtgcttttttgtactgtaaaaatatgtggttcatgtctaactctgctgttttattgtggttgtggttcaagtttttaatgtttaaagttgatgctgttttcagaagagctttttactaatttatttgtcagtgttccctatttgttacttaaccatgatcctccagattttttggagtattcttttctaaccttaaccctgccaaaccttgatccattttgacatttgttatgcactatttttatatctctgtgagagatttttccaacagtcagctattttatggcacactttttttgactgatgacatctcctttgctatacctcaatttttggaatttagagaagaaatcagtagttttgcaatgttaattatttagatatttaatttcgcagatttttaaactttattttcataatttctgcttaatgtttaaaattgaagagccttttcatgtattaaataatgaacacaaattatataattaaaataattggagatgttgaaaatcattttcccttcttaaacagaaataaatatttggaatgaaggggaatgtactagaacaccctttttgccacgggtaaaaataacagaaatgtatggtttgttttaccttcatttctgtacaagtaaagcttattagtctaatgttttgttcctttcccacctcacccctacctcttttgttttgttttgtttttgccctttatgtactacattcttattttctaacttttaaacactgtattggaggtttttttttaatttacagatcatatttattttactatttttgtagaaaattattaattttgattgtatttttgtattttaaaagcttcttcacttgtgttccctaaatattcatattgctgcccaaaagtatgactgtggaggaaaaaaaaatactttaaaaatccacactttttgttaagaaggaaacatttagcatttatatatttgtgtatggaaaacacttgatattttatccctgttgcatctggctgcacagagcctctcctcaaagatgctacaaaacttgaatataacacattttggaaggctgactaacctcgattctgtgttgtgatgtgcaatactgtttctaatgtttgtataaaaaaaaacagtgtaaacctttttaatgcaaatttatttttttcattgcatattttgcagattttatccacagtgtcattttttactgtcagaaaagataccccttttgtcattgcaactattttttaaatccagaaatctttgtactgatgtaaatgattgtagttattttggatagtgttttgctaacaaaaggagagacttttttcatgcatatttctattttgtttttttgggttttattttattttaatagtagtaaaatacttggaataatttttcatattcttgtcattaatattattttgtatttttatgtggaaatatataattttatgacactaattgctaaagtttattttatgttgaattatttttggagctgaaatctttgtaatattaaagcaactagtttctaattcccagtttctgtatagaatcgcacaagtggtttatggagtgtttggattgtaattataaatggttctttgatatgcaaattaatattttcagttgattttattttatattcctaatggggtgttaaagccgttttttatttttttctaaataaaaagagaacccatgcttttatggacactaggtaaacaccttcagcttaaatttttcgttaaatattttagtttattttattgttatcttccaggtgtctaaatctccagtctgtctgttgtactggtaatttaactctgtaatggaatagtttgctgccaactatttatattaagtaatttttaaatatttgtaatattgttgactgactaataaactattaagttattggcatagttgtggaatcttattcttcggttcaaatcaagtaaaatattcaaaaacaccagtaagatcttatttagagagagagcttagtgacataaatatattatgatgcccaggccaaactacatttcagtacaaggatagaggagaagccttggagaccatg

SEQ ID NO: 110717 - DNA, 1046 bp, Homo sapiens
tttgagcacttggtgtatgacagcctctctaccaagctttcaaagcattctttcattcagtccttaccagcttgtgaactaggttctcttcttatttctgtttaacccacgagggaactgactttcagagcggttaagtcagttgtgtgaggtcacgcagcagaaggtggcagagcaggcagtctgatgcgggggcacaatctctcgatgggtacaccttgcagagggctgtaggagttactgggggcgtgtgcagcagggagtctcacacgcagtgggtgtacaagaaatagcctccatcccttttatcactattatttattccttctaaacaaacaaacagcaaccattcaacatggcgatgtgattttgaagggatgattttggtcctgcttgaggacatgtcttgtgtcttgactccacatcactaggacatgggcagtctgcacacagagacctcaggaatgtgacaccccggccccctacttctattgctttcagactgtcttgggttgaccttctttagtagcaggatgaccttcactctccatatctttatttcatggttcaggactcaaatgtgtaggttgtagaaattttacaaattccagacaggcttaccacatttaaaataccactgacaagtgtgtaatgcctacctttttaactccatgtaggtcagctacatagtactctcagggagtaagaactttcctaaagcaactcggaactgggccattttgcttacttgctggcggcctgataataccagggcttctcggtgttgctaagagtttccaaggagagagatttgcttctctcccattttccccttccagggcaccagaatgagctcgctgctggagcctagggcacgttcttcacttggtcaccatcaaaataaaattaccaagcacgcaggtactgacgaagcctgtcactacacaaaattaatcattttaaaaagtaaatgacccagtttcctgtggtgtgtgtttttggggcccagggagtgcccttcccccctcaagtgaattggagatgcc

SEQ ID NO: 110718 - DNA, 1021 bp, Homo sapiens
attagcttgcaactttgggcaagttcctttacctctctggatatttttccttaattgaaaaataggaataataatcattttctcttcctcatagggtcatgatgagtactgaggtgatatatgagtatgacctttttaaaaattataaatttctataaaatattattactgacaagtatcagtggatggctactttgtacagaaatgtgatcctggaggcagatttacaaaacaagggtaaagataagttccagcccatgaggaatttatcgtctatttggttatatgacaaaaatacataatacaattagtgatcaaaacaatatcaacttatgcatttattgaataatccatcaatctgtatcatcatccatccatccattccattaaacacagatatgatgaacactgaattgtgggttaaagttagaaaacagaagagtaattaatatggagggtagggcatgagggagccaatggatctcatctgtctccttttgaaattctaaactaatttagaaatacactggaatcagaaagggatccagatatcccttgcactaagggtaaaaccagacggcagaatgccacttgaacccaagaccagatggtttcctattccatttctcacgaattaggttccccatctagacataagctaagcggctctggtgtatttaccaggtggaatgccaagcagaccatgcaggccagtgaacaacctctccttggagacagctaagacaggacagctaggggccactgcttagctttgcaggtaacctggactaaggaacttgggctccagctgactctccagtcagacatgtccttccttctctcttgggaagcagccagtaggactggaagggtgggtagagaaggacagatggtttcctttcaatacttttgagaagcaaaatcttcctatcatacaagcagaaataggaaagtcaagaaagaagagttctactgacaggggcttgtcataaagcatcacagagcaaaggaagttagagaa

SEQ ID NO: 110719 - DNA, 1018 bp, Homo sapiens
aagtcagtcagcctccgagttcattaaaacgtgggagttaattaggatgtcattataagacttctcacagtcttggtttcaaacttctgctaatgttctaatgattgatttattctaatgattgatttattttaaaattatagctttttgtgcattttcatgtgttccctcaacttcacatattaagatattatacataaactattcccctgcactaagtaagcaattttcaaggcacaagtaccataccctataattttaattttgacatgaatgttcaaaatatgtgatgacacagcatgctttctaaaaggaaaatttgggcttgatttggtaatcttttatgagtggagtctaagtcttcagtgtcttggatacttcttgcaaatttgctgtgaagtgtcctttattaaaaaaatgctgaagtaatttgagctatttcatctagaataagtctaaattatagacatgtaaaaagttaaaactaccaccccctttaattactagagaatttctgtttggaatgatgaagaagctctgaaggtggatagtggtgatggttagacaacatagtaattgtatgtaatgccactgaatcatacacttaaaaatggttaaagtgataaacattacgttatgttatatatattttccacaatggaacaatttttaataaactaccacccctcccccaaaaaaaacctaagcttgtttcaaattttgatgccctaaccttttcctttcctcaattagcttgaattgctattgacttaaccaataactggcattttttggtggatgtctatacacatatgtacaataaaattaaagaccaatgggaggttgtttttttttttaactttctgattcaaattatctttaaaaataaggaatatttattaatactctgcatccattgaacattcacttactgtctgaaaatgttgagaaaaacttggtatcttggaaaaatgaactcgatctaactgctacaatatgctgctgtatttttagaata

SEQ ID NO: 110720 - DNA, 1742 bp, Homo sapiens
agagtgattaaaaacatgagctatatagtcacagtgacctgagtttgaacccctgctctccctcctactactaaggaaccttcagcaaatcataacacctctcgtagcctctaatttcttcatctgaaatacagggtaaatattatatgcgtaaagattagaaatgttatatgtaaggcacccagcactcttctcaatacataggaggtgcttataaatggtagctattttgtgtaaaaccttggagaataaacaggaacaacagctcctggaatcctggaacttccttgggtttccttataggagctgtcagcagcgcctagacaggagctgcagagacctcagcctcagctggcatgtgcctcttgcaaagaggggctccagtcaagaggtcacttagccagctctgatcctcaggaaggaagcagagaaccatgtgcattatagcctgtggccagctctgcaaagctggctttgttctttggctgtttcacacagccattaacatcagcttccagatacagtcacatctttgtttctgtttagtttctgggccagaatttatttggtccatgaacgtttctcctatgattcactgactctgttgctttcatcttacaggaagtgtttcttgcatatcatctccgtgaaaggtagagacatgagagaaggagtctcttgcttctcccctaaccccttcctcctccctatacctcctcctcttcttccaccttaatcactggcatcaacccaatagttaccattttaggacatctactaagtgctagagcagtgtcagggtgctttacacacacttccttattcaatcccttcaacaatccaaagaagtaggtatcattatccacattttacagatgatgaaacagagacttaaagaggtgaaatgatttgcccaagggcaaagagtggagccaggattcacacccagttctaactccagagtgaaagagataacccaggaactgcctaagcagctgtacacacccactgtcatgtgaagggagcaggctaataggagctcaagaggtttggaagagagagtaacccttccagctggagtagctgagtctctgggggaggtggacactggccccaagggatgggtaaaactgcaaccaactaggcagacaaggaagatgcagggaggcattccctctgcaggactggcccaagcaaatgtgaaggatgggagaccataggcatgtttgaggaactggtgggtgagcaaggtagagataaggcaggaaatgtaagggccagagcatggcttctcttccttggataagcagcagctagagtaagttttaacaatccatgcagtaggatctcgcccatttgggagaatttctagactatttccacccaccttcaaaggacaaggagtttttcaggggcgtgtgcaggaccatggggcagagttcgggaagtcgtctcacaattttgcagacctttctttttcttagagtcctgatcctgttctgtaatcattagcattttgggcctaagccttttcaagctggcagaacaaaagcgaccactgcggccaaggagaaaaggtcggaagaaggtgacagcccaaaacctgtctgatggagacataaagctgctggtgaacattgtgcgagcttacgacattccagtgaggaagccggcagtgaggtgagagccctcccaacagcccgagatgcagtgtgcagcatcccagccaagtcaatcgctcc

SEQ ID NO: 110721 - DNA, 1016 bp, Homo sapiens
aaaccaggagaataagttctatttttacagggttatgagaattacagagactcatacaggctcttactgatcttctccatgtgttaggtccataaactagctgcagttcaataggacagaagaggtatatttaagctgagatttatgatgtgcctcaacaacacctataacatgatgttaaactccaatccaaggtgaagtccctgtagaagtacgtattactggtgttccactctggttggttccacagcatgctgatgctaaaggctccttttgagccatgggatttagagatcacatctgtatttggaatctataaacatgaattaaagttaagttgcctaaattgtttcacattcatccaggctgacagtggtttaaagtttggtattatactcctagtgacagattacatgtggatttatggatgttatgttacctgtcttgtagctcagctgcagctgctttgtctgagcgctggtaaattagctcttcaggctatagaagagaaaatagttcagaaagtataaaaatcacctacagttaatttgaacatccttttaaaaatcttaaaaatcaatgaaatctcagacatcgagatatagaaaataatataatgcatgctgatgtacccatgacccaccaaaagtaaaacatcataatatagttctttcccaatttcatttttcttctctcttaccacagaagtaaccatgacctgaatttgttttaacaccccttcattcaacaagtactgattgcctgctgtgtgctaggcactttcataggtgagagggatagggatttggctatgaaaaaaaattcctgtcttcattaacacaatgtgtttatgattttattacagatacatgtacccctaaacaacattttattgtttcacatgttttctaaactttacgtaattgttttatgaacatgcaacttgtgctttctcccttaactttatatttagtggcagcaacaaacatatttttagagggcttactaagattcat

SEQ ID NO: 110722 - DNA, 3294 bp, Homo sapiens
ctgactttaaagaaaacatacaggaagtcctcaaatagtgtcatttcattataatgatgcaaacaaaacaactacctttgttatacgttattttgcttagagtcgcagtttctaagaacctatcgatgttaagtgaggacttaatggtatagacattttgaaatatttgagggagttgcagtttggaaaaattgtatagagtcttcatgtctcttcttatttctttaaaaaaatttagaatggaattttaatctgataaaatgataatcagatccattttggcaaaacccagtgaatctggcatttcatgatggacctaagggtcagagcaggagaatggcagtgaggcagggcttgtgtcttgaggagaggcactaggtgattggtagacaaaacagtgggcagtgtaaggggtgaggaaagacaagctaagaaggggaataatggggattgggtggtgcacagtgggtaaagctggcattatattcaaaggaaaaacttggttaaagattggcagtgggagaagaatttcagatcatagggttgcttctcagggcatttttaataagtattcaatatatactaaaacattttatcttgagtttgtgattaagatgattaacattgtttcttattttaagggaaaataattttaacaaaatgctgctttgtgaattttaaatatttaacatatttaacttctcatttaaagaccagaaaagattgttattttgattaaataaaaattggctttagtaattcaactttatatttaaaataattttaaacttcctgttatggaaaaatttaacatcgaataatacaacgaatcctcatgtaccatcagcttcagcagttataaacctgtgggcagtctcctttcatctataccattgctcattcccatatctactccgccattaagctaatcacaggtgtcatatcaacttaaaaattaatatgactgaaagcataagctgttgtagttccacatatttgcgtaatgtttattagtttctttcctaagactgtatgtcttaagaaatttgccctttgtattttgtatgtgccatttggggaatataaggaaaagttaaatttctggaaattaatgtgttctatgtgtttagttggaagtaattgttatggtagtattagcttacttgcttttttgttgttgttgttgcagccgagtgctgttttagaaaataaaaagtaaatttaaaatgtgtttttgagttaagctagatatcaccccagagtactgtgatttttcagttacaatccatttgatatattctgcagtaaaattatatttcatgtacagttttcattttgtattgttccttatatcacaattgcaagtattttggttgttcttgttgatatgtaaagaacaaattaactactccttatttgttcatggtatagacataatgaaagacttcaatatagttgaaacaatcttttccacatttgcctgcttttatgaaaatatcattcattcagagtacttgacatttgaatatgtgctgtgaaacttcttctttgatattttctaattctcagctatgttccctaatgggtcttgtatctagtgcctgggtagcatagtgtgactgggataaaatgtcagttattccacagatttttttttattctttgtaagtgaatgataatttttactatggctacagtttaattgatcactcattatatatttaattttggaaaataatttcatctaaccctaccatatatagatatttttggctacaaatactaaataaaaatatggcaaatatattaaatctttgtctatatagtttattttgctttaaaatttgaagataatatttattgtaattgctcaatactgacttctttagctgatcgattatagttagggctgttttttgcctttattacatttctagggaggatgttcagattataagaatctttttataagttagcttggcaatcttgcttctgtggattgtctcatttccattttggatttttatattgtaagttgttgctaaaaattatttttttcccttcttccacttaccttttggaccatgaaggatatattaattaaagtcaagctgctattgagttttgtgtctgaataatttcttatacacttatcatgagatttacttctatcatataagtactgctagtaaaaccaatgaatgtttaactccttcataagcaaaattatttttatgtgatctctaagaaattcctcctttcacatttttctgttttcatacaggtcctcatgctgataccgccagtggatgccagaatttgcagtgtggttttcgagcctgctgccgctctggcgaatgacccttgacttctgatctttgtctacttcatttagctgagcaggctttctttcatgcactttactcatagcacatttcttgtgttaaccatccctttttgagcgtgacttgttttggccccatttcttacaacttcagaaatcttaatttaccagtgaattgtaatgttgtttctcttgcaaattatacttttggtttagaaagggattaggtcttttcaaaagggtgagaacagtcttacatttttcttttaaatgaaatgctttaaagaatgttggtaatgccatgtcatttaaagtatttcatagataattttgagttttaaagtccatggaggtgattggttctctttacacattaacactgtaccaagctttgcagatcttttccgacacacatgtctgaagacttattttcaaagacagcacatttttggaaactaatctcttttccgtaatatttcctttatttcaatgattctcagaaggccaattcaaacaaacccacatttaaggttctttaggattatagaataaattggcttctgagtgttagctcagtgagctaggaaagcaccaatcgatatttgtttcctttagggatactttgttctcaccactgtccctatgtcatcaaatttgggagagattttttaaaataccacaatcatttgaagaaatgtataaataaaatctactttgaggactttaccaagtaatactgttgtgttgtgatttttattataaatctcaatccaggtttactttagtatagaataggactacatactttgtctttggacctcccatgaacttattaccctgacaaatagttttagacagatactgaattttattgagctgaattttctttttgaaatgagttattcagtagtcaaaatttgaatccgtaagtatatctactttgctttgtt

SEQ ID NO: 110723 - DNA, 3928 bp, Homo sapiens
ctttctaactgttatgaataatgctactatgaacattcatgtgcaagtttttgtgtaaacatggttttaattctcttgggtatatacctgggacaggaattgctggatcatatgctaggtgtatctataattttttttttagaaactgcccaactgcttattaggttttaagcttcagtaattttcttgataatttttacttactaatacagttgggtaggagaatgaacattacaactccagggttcagtacttcctctaagaattgagttaccatgatgttcttataaagaacagttttatagatttctttattgaatgttgttaggaaaaatgttgaacattttctgagttaaatgtatttctgcctaaggatgaggttagttatcagtgttttacagaaattcttaaattttctcattaccatattgaaaagtatgtaaaatagtggttcagtgaaccataggaatacaaacatttttatagattagtatcttctaattgtcaaattatttttcttacagggttttgactctgggaggagggctgccttatttggagcaccttaatctctctggttgtcttactataactggtgcaggcctgcaggatttggtttcagcatgtccttctctgaatgatgaatacttttactactgtgacaacattaacggtaatgccttttaacagtgcgataattttgaaggaattaatttaaaattttttttagcagttctaataatttttccatttagttttctagatttctaattcccagactatcttactttcagatttagttaaatttgataaaattttaaaattacattttcattaattaacatcttgaaaggtaagtttttcttgcagatgtatattctaaatatccattgtgtcagatttttgagggatgtaatagtgtaatcaaaaatggtaagttaatagaaatactaaaattcttgttaaaagttttaggtattcctctagagttttgtagcactcattaagaatttagaactatttatgttctagatacactgatttcttagggataatagagtcttatttcttgtaagacagctttatcaaatgtagaaaaatgaggactttggtaatgtggacttccagagtttctggatctgatgacaactcttagcaaagattgaggggagaggacagtatgtagtattgagaagagtctgagatgctttagacatgactagaattcctgtagtattttggaaattgattcctgaacctactttcaaaaatcacaagaaatacttcttgattttgttcttttaaacatattctaccctacagtggtcttattgaacatgctttttcaaagtatgttcagtgcctttttgcacatttgatagtcactggtagagactgaatttcccagaagcataaaaagctgctcttctgttattagtaagcaaatcaacctcctgtatttataactggagaaaattttagatggctcagactactatgtacctgtctttttatactgcgccctattgtctttgagtgcccagttcaccttaagatgacaggaaaatcaacaaaatttttctcaggcagaacaattgacaggagtcaggaagaccagagggagtaatgacataccgcaaaatggagaaaactgctatttctcgagattaggttttccttaaaatatataagaggaaactggagatggtagctctcttatttcaggaatcacattgttatgcaggagatgacctcccatgttcttgatatatcagcactaagttggacatttctttgttttctgttgccttctgtgtataatcaaggaatggccaaagtgaatgtcatcatagttggtgaaagtgaatgtcatcgtagttggtgaaagtgaatgtcattgtagttgcaacatgctaagcctatgaaaacaaagtttgattgatgcagtgaagctgttacttttgtggatgctgtggatttgagaacggagttttgttaacataaagttattttattgtaggtttagtgctatacttccacttcctaaggcttataggacatattatcaagagtaattaataagcaattgttttttatcagaaaaaattttatttgtatgttgcatttgaatttttcatattgatttcagcataggttatgctttggaataaatctcactattgaattcattatatttatttttggattcatagatgttattgggtagagggaggggactgggtttcagtttgtttttatgcttacttgttttatgtttgtatgtttttaaactttgaaataatttagatgatgggataaaatgaaataattaaaatcttttgcactttgtccttatgcatttcctctaaacttgttttgaatatatagtttcagaggagctattatattccttttgttgaatgtaaaagtttttttggataaatgattgattttttaaaataaatgaattgtgatgaagatatctgactttgaaagatttgaaaggaaatttcagtgcttgtataatccaatattaactctccttttatagcttattgaagcatgatttgggggaatggaaagcctttaaaatttacagggtgacttgttaaataacttgtgtctgagttccacataggttgttcttaaagcaatgctctctcatagtcttttccttaaaaggatatgtggacaacctagaaagtgttagaaagaagttgtgttgtatccagttttgcaagatgacacttgttccagtatctttcaaaacagctcagcttgtacagtagatatctagtgaatgctcaggggcatccttgttactatttttattatttctgaaagtagtgtgttttaatacgtggtattagagcaatggagaagtgtatttaggtgacaaattatatttcaaatatttgaaagtgacgtttagctaaaaatatattttttaaaagaaaacatatatagttaactatcaggttactaaatgtaaaagaagttaatactgataaacattagtcattaagtaatacatgataagtaaagcagaatgatctattttccaagcattagcagagattttggagataataagttagttatcatatattcaaacagtgcccagtacagtgcaagacactgtacataaagtgtcttgatataaaatgcaagtctagattcttctgaatgattctttatgacttttaaatttatttgataagatttgaaaagtcttcttagccataacattaaaaaatttctttaacatttaagaagtgttaaatggaatagcatagttgtagagctgtgaagaacatttgagcaatgatagcaaataaacttttttactgatttgcatttcaatgtatgtataatttataaattaagatagattagctcatagttttggaggtgacacagtctcagatgatgtgctcttttatgtttctaatttaagttaaagaggaattaaaggtaagtgaaggtaagtgcagatatacagcataagtaatatacttagaactcagtaaaaacaagttattcaataataaaagtctggagaaataatagctaaccttatacttcctatcatctgatacttaaaaatgctttcttataagattattctttaccacgcatttaaatattttaatgattattcaattatatttttctattttctttattattccttaatgtaatttaggctttatatatcttaaccatttgggttctgtgtcctacatcgagatggaagtttgctggtgataagtcaaatatttaaagggaactaccttgtgaattatcttcgtctgttaaagcatagctgtctacctggcaatccatcatatcttagtcatatttctttctagttttccctcaccttttctgttgtccatttattctgttgtccatttattcacttctc

SEQ ID NO: 110724 - DNA, 1725 bp, Homo sapiens
gccaccttcttcccagagtatatctccttgaccaccaattctctgtattattgctcactccctctttcccacccaactatttatatcagcaccttttttcctgctgcagaggaagaggtatactcttctcgggctaaagctaatgctccatcttcctagagcttgtttcttatggatcttcctcattaaccgtcggttattctctttctttcatgtgtttgcagccttacttctgctgactacttttaggataataaacttaagtcttccaatccttacgcctctcaaatcctacccttctgttaggttaggaatactttgacttccttattactctcattgagtttttgtatccctagcatcaagaatagtaccttaacaatagataattcactaaatacttaagtgattatattagatgtcaaatctttcttctggttttcatctacatgcatatagtcaaatgcttttgaaaaatttaacaatattcattaatagtcttgtcttttaattatagttggtcttggcttggttgctgccagagtcttcggcatcttgatctgtctggttgtgagaaaatcacagatgtggccctagagaagatttccagagctcttggaattctgacatctcatcaaagtggctttttgaaaacatctacaagcaaaattacttcaactgcgtggaaaaataaagacattaccatgcagtccaccaagcagtatgcctgtttgcacgatttaactaacaagggcattggagaagaaatagataatgaacacccctggactaagcctgtttcttctgagaatttcacttctccttatgtgtggatgttagatgctgaagatttggctgatattgaagatactgtggaatggagacatagaaatgttgaaagtctttgtgtaatggaaacagcatccaactttagttgttccacctctggttgttttagtaaggacattgttggactaaggactagtgtctgttggcagcagcattgtgcttctccagcctttgcgtattgtggtcactcattttgttgtacaggaacagctttaagaactatgtcatcactcccagaatcttctgcaatgtgtagaaaagcagcaaggactagattgcctaggggaaaagacttaatttactttgggagtgaaaaatctgatcaagagactggacgtgtacttctgtttctcagtttatctggatgttatcagatcacagaccatggtctcaggtgagttatcagttccagaatattaagaaatagacgtgttctcatttccaaatggaatataaaaattttgatctaagtcattcttttcagttgatttacttagcaaaaaggattaaccaagatctgccctacttcagagttttggagcagtgtaacttctgttatcagtatgaagtttcatttctgtcagttcaaatccattgtgatgtatggaagaacataaattctaaagtttaataaatacttagtaaatggctacatcacatattttaaggtactttagtggatgaagaaggtacaatttttactctcaagaacatgtaacaagaaaatatgcatattctgttgctgtgtattatttctgtatgttatagttttatactgagggttttggaaaacgtaggctgtccctggaagtcatttagtctgactacacggctgttaagtgtttacaaaagccaaagctgagctagagtttcata

SEQ ID NO: 110725 - DNA, 1040 bp, Homo sapiens
tgctcatttttagcttcttagaaattctaaagtaccttcctttgcttgattcattatgatcaggctaatttagttgagtttcaaatcttttctagctttgtgccctttttagttatgtggaatcagtgatagtacgttttactatggatcatttttcttttgatatcatattttcttttctcttgaaaacttttgctgttcttttcagttttcacatttttttccaaaaccttttcattgcctaaaaatgggatggtttacataagaaagtataaggatagcacaaagtatgtcatatttaacaatttggtgagcgcttgagtagcttaattattatcagtttatcaagttcttggacttttgaattcattttacagaagagtctgcggaggaatcaattgctatcagcattgcacaaatggaaaaacgtttactccatggcttaattcataacgttctaccatatgttggtacttctgtaaaaaccttagtattagcatacagctctgcagtttccagcaaaatggtatgtttaaattaacactagtttgggtattaagaaaaacagcatgataagagtttggtttgctcattcctgagtttaattaaggggaaacaaacccaaaaatgattattgagtgccttcctatgggtaggcatacactgctaggttacttattatttcattgcagttctcacaacaatctttgtagcataattatcattacctatatgttacagatgaggaaactgactagaagaggttaaacattttattcagtttcacagatgttaagtgataaagcccagttttatgtgattttttaaataatatgtaaggcatggtaagatgggcaaatgagatgaaatcactgttttataaaagtggatattacgacttcctacatcagaatcttgagtgttccttaaaaatgtaaaaatcctggtttagtctcataactgctaaaacagatacttgggcgggtgcggtggctcatgcctgtaatcccagcactttgggagaccgaggtgggtggatc

SEQ ID NO: 110726 - DNA, 1967 bp, Homo sapiens
gcacatatacaccatgtaatactatgcagccataaaaaatgatgagttcatgtcctttgcagggacatggatgaagctggaaaccatcagtcttagcaaactgtcacaaggacagaaaaccaaataccgcatgttctcactcatagttgggaattgaacaaagagaacacttggacacagggtggggaacgtcacacactaggtcctgtggtgggggtaggggactgggggagggatagcattaggagaaatacctgatgtaaatgatgagttgatgggtgcagcaaaccaacatggcacatatatacctatgtaacaaacttgcacgttgtgcacatgtaccgtagaacttaaaagtattaaaaaaaaacagttgcttattgcctagggctcagatgttttctctttgtagagatttttatcgtaaatagcttagtttttcataattgcaggcaatctgatattattttgaaccttttacttgtttattcattgagtaggtgactggtatagtggtcccgcaactgaacttgatactgaacctgatgatgaatgggtgaaaaataggaaagatgaaagtcgtgcttttcatgagtgggatgaagatgctgacattgatgaatctggtaagcttgtttggaattaaaattattacatagtgttttaataattgataattaagtacttataattattaggtattagatttatgtattttgtgttttctaaagaaactggtgtttctaagcctactactttttaaaatttgaaggaataataatgaaattttaaattaattgaagtactttaaagagtgcataggattatttctcgtttttatattaaaatcaaaaatcagaaaatggtaccttttttcttatgaaaataatgtacgtttattatagtgctttgtagtttacaatgtgattttagcaccacttcaagtgatcagttgcacagcatctattgagtcatctatggcttgagggaaataggatgaaactgttgagtcgacttactcgtttgtagatagtcttaatacttgcctaataaggttattgtagaattaagaagtaatatacataaatattgtttgtaaatggtaagggattacaaaaactaatgtagccattcattaaacactgtgggagagttcaaggatggataagacttcatcgctactccaaacaactcacaaatgagagagaatttagaaaacataatttttaatttaaagtatatgatggaaaaatgctgtcatacttgtgcagagagatgctatttggaagtgtgaggaggaaaacaaattctgtcttggatattctagataataattattaaaagatggtaaaatagtaaaaaatgaacagatgagacattcttctagttggtaaaactgaaactataggaaattttatttataaagttacttgcttaaagtaatttggtctggcgaaagaattaaatgtggaaaaaagacacgtggaaagtaacagtgtaagtataaagattgttgtatcagcagctaaagtagtttatttttatgaaacgcagatgtgccacattttgatgtaaagattcaaaatgtcctatataaggaaaaggtctattctagtttgatagatttggtgatgtgcttacctgtggcaggcattgttttaggtatgaaggatctaatggtgaacaaaatggaaaaaagcaaaacaaaactggcgcttgttgagcttaaaatttagagacaggaggcaaacaataaatacaggtaaaatatattccatattagatggtgacaagtgttgtagagaaaaataagacaaggaaaacatgccaagaagaatttaaaattgcagttttaaattgagcgattagttaaggtcctttgggaaatttgagtaaagacctgaaggagatgagatatttgctcagatgtcaacttaaggaagtctcagtttattcattctagaaaa

SEQ ID NO: 110727 - DNA, 1057 bp, Homo sapiens
catattggcatctagtaggtagaggccagggttgttgctaagcaccctataatccacaggacagcacccaaaaacagttacccagcccaaaatgtcagtattgtcaaggttgagaagccttaatttagatgtaatgttaagagttcagtaaattggccaggcacggtggctcacgcctgtaatctcctagcactttgggaggcaaaggcaggcagattgcctgagctcaggagttcgagatcaccccgggcaacaaggtgaaacgctctgtctactaaaatacaaatacaaataaattagccaggtgtggaggtgcattcctgttatcccagctacttggaggctgaggcacaagaatcacttcagtccaggaggcagagtttgcagtgagcggagactgtgccattgcactccagcctgggcggcagagtgagactctgtctccagaaaaatgagttcagtaaattgattccgcataatctctcatttcatgatcatataatttagttgcagtacattctccaggatctataaatttatagtttagctttacattaatctttccctttgcttctgttcccatctacttctgaactgctgactggttgactacagagtagacaatcctgcttccttttagttattagctgttatcataatgaggctattgtgggaaccagtgtgaaatgacagcaggggaaattgtttgctcatcgtgatttctaaaattttatgcaagacttgataatcattaagcttatttctataaaaaagttgaaaaactttttgtatagaaagtagatacatagcaggtacatagcagactctgtacatttttgtagttattattctgtttccatagtttgaaagagaaagatttactttgggaaaatatgaactttggttaattgattattatcgttaatcgaacccacctgtcatagttcttctcagtgtgtctgaaatggaatcctttgcttatttcagtgtaactttttttaaccataattaaatatttctaaaaaattgcccattgcctgggcaaaaactggaagca

SEQ ID NO: 110728 - DNA, 2920 bp, Homo sapiens
tatgttgatcaggttggtctcgaactcccgacctcaggtgacctacccgccttggcttcccaaagttctgggattacaggtgttagccaccgcgcctggccaggatcttcttggtgtactcttctctgcaatttttagataaactaactcagtggtgacagctaaaatttttatctttttgagatatatggtcataatacgacattcgagccattaataatttaaaagggtttagagtaaatcaacacgaatgaagcatctttcctcgtgaatattttgtttaatttaggtttttcagcccatgttaatggaatattttacctatgaagagcttaaggatattaaaaagaaagtgattgcacaacactgctctcagaaggatactgcagaactccttagaggtcttagcctatggaatcatgctgaagagcgacagaagttttttaaatattccgtggatgaaaagtcagataaaggtgagattcatatatataaagaacaatttattagttgtaaggtcattgacatcttactgatatgaactgtagattttggttgaggaataattcaagttaggcctgcactgtggtcagttaaaggcattattttcatgtatcaatttaattgaagacgatggttctcattttagaatttagtgttgtgcatgataatttaacatatacttgggacatattcagtgtagtgtttcttgaataaatttatatatgaatgaatcaaaattattgaaaaccaccagtacagagcactggcctgctcaaaatcgatcagtcaaaattgttgaaaactaccattacacagagcacttttgcgatatcatcctgcttcctgagctttattgaccatagtggctgcttttctctttccttgtgtttttttcattggttttcaaaattagttatgtttatagtttattttcatcctttcctatgtattattttttcagcttgtatccagtaatattcagaggaatgagtactagaggcagagtttttctgtattgttactctgagaatacaaatgagaaatgcaaataaaacgtgctgcctttttttttttttttaaaaaaactagttcctcagtaattatttatgttcagtagctttgcttcttcaagattagtggcagcagtgggatttctgttaaaatagcttggagttttttgaaattggtccttttatttttatttaacaaagtaggtgaaatgcatgttgaaactaaaataattttacaagttaagctataattaatcccgtaaagcttatatgccttactatgaaatgtagcttgtgctttagataccaagctaagacttgttatgtctggtttaattgtaattataacatgggatttaaaagcatcacacttattacattttattttcccactccttcaaagcaaattgtagctgtattatatttaaaatatttggcagtttaaaagtggtagtttaaagaatgtgatcatagcatttctatatttaagttgctttgtgaaacaaatcagatatataaagtactcaaattcttcataggactttagtgatgaatcttttatattttttattgtaacacttcattttcatttttattttggaaattattactgaaataatacattataggtttatacatccataagtacttcctgcaatagttgctgacaaaagtttcattatcaatgtgaaagaacatcagaaatatctacattttgtcgtctcacctgcaacataaataactgaagtagtttaaagcatctctaggttaaggcagtcagatttcgcagacctcttgtatgaaatgtgaaaatcaaagagggaatacaagcaagattattgacaggagtcataatgcataaatggaaaaggtcatgagatttgtgtgtgtcattaaaaatgccttggagatctcataatctggctgactctatacttgttgatttaaagctgtataacctgttttgttcctttttcaagtgatgctgcttaatgctacaaagtgagtattgttttttctgtgatgcctttgtaagaggaagttaattctgtgttcattattgtagctcccactgatgaagtatgatttgggccatgatagtttaaccctactggttcttcacaagtttaacatccccatgttacctctaatacatgttatttcattttcacatcttgcaagcaggaaggaattgacttcaggcactggattttgtttatagaaatgtaattgtaatttcttattgcatatgctctttagcctttactggtaaagtttttcttttttatttcagaagcagaagtgtcagaacactccacaggtataacccatcttcctcctgaggtaatgctgtcaattttcagctatcttaatcctcaagagttatgtcgatgcagtcaagtaagcatgaaatggtctcagctgacaaaaacgggatcgctttggaaacatctttaccctgttcattgggccagaggtaggtaaatgggtttttaaaatattttcatgtatttttctagatgaatattcatttacattaatgagcaaggccagagagagaaactctgagaggtcaatcaaaaagtagattttatagttagatgatgttttggtggtatatatttttggaaaactagcagtgatgaaattcatgggtaaattataatgatgtctgtaattaaaaaaaattaggaaaatatatttgtgggaggggatgcaaaaagattgacaaaattgataattattgaagataagtgatagatacatggggattcattatactagttctgcttttgactgtttttcagaattaaaagttaaaaattcaattagtaagctttcaaaactgctttaaataattatgtttaataataattatatgaatatttttaaaatacagaataaat

SEQ ID NO: 110729 - DNA, 1050 bp, Homo sapiens
tggtgttagtagcttttcccctttcatctacccgtctgttgtatttaacctaatcaagtttccctctttaaaatttctgcctgcctgtatttagcatacatatagagtaatgaaattttaggtttagaaggggcctggtttaatctcttctctttaaagaaaccgtgatttgtgcacatatcatttttctgtgtcaccaggccctccagaatgcaaaccaacatcttcctggcctagtgcactttttattataccattataacttgttaatttatgaatttcttttatttgtactttaaccaagtgtaagggaagtatgctgtgtgcaaaagtgaatagggatgtatttgaatattttttatttgtgcatatttgcacgtatttattacacttttctttttaaatttttattcagctttctaaaaccaatttttccaacaacaacgatttccgtgctcttctgcagtctttgtatgctactttcaaggagttcaaaatgcatgagcagattgaaaatgaatacattattggtttgcttcaacaacgcagccagaccatttataatgtacattctgacaataaactctccgagatgcttagcctctttgaaaagggactgaagaatgttaaggtaagttgcaaaaatggatattcaactgtcaaaacttgtgccatcttctggtatatcattggcaaaacttgtcactgttttatagtaaatgatgtaatgttgaaaaaaattattttgtcacttgttaaagatggcaaggaagactatttaaaaagaactactgcagtggggagtttgcagtagtggagagagatcagtcccgacggtgaatacagtaaggacaagtagggatttatatccaaggggcaaagtgggaagagtggatggaaaactactgaggaaacatcaaggccaaggggattcttgctagactaactataaaattcttgctgaaggcaagaggatagtaacatattgaaggatcagtagtttgattagatgtagatgcagatcagatactaaggctgagagatttttca

SEQ ID NO: 110730 - DNA, 1070 bp, Homo sapiens
tactttttgccattaaaaaaataatatctagaagctggaaaccatcattctcagcaaactgtcgcaaggacaaaaaaaccaaacaccgcatgttctcactcatagtgggaattgaacaatgagaacaacatggacgtgggaaggggaacatcacacaccggggcctgttgtggggtggggggagggggagggatagcattgggagatatacctaatgttagatgacgggttaatgggtgcagcacaccaacatggcacatgtatacatatgtaacaaacctgcacgttgtgcacatgtacctaaaacttaaagtataataataataataataaaaaatatttagcattaatggtttcttttgattttgtaccctgcttctactaaggctatttttaagtttgcctttttttttttttccaaaaaatgatacatgatagtgtttgcagagattagccaccaatagattttattgtaatcttgtggggcatttcttatgatttaaaaaaaaatctataatatgtatttaaccaagtatgtcctgcctgtgttttttgtgtggcttaagagccaagcatcacttttacatttttaaatagttggaaaaaatcaaaagaagaatagtattttgtgacatgtgaaaaattatatgaaatttgaatttcagtgtttataaagttttatggaaatacagctacagtcattcatttacatgttgtctatgactacttttgtgctacaactgctgaggtaaataattgctacagaccacatggcctgcaaaagttaaaatatttattacctgtccttttatagaaaagttgccaattcttgctctagattatttacttatgtattgcagttaactgttcattgtcttatttaccttcactgaaatggaaactccataaaggcaagaaatctttgttttgttcattgatatatcccaggtaccaaagaacagtgcctgcctcatcatagctactcagtaaatatttgtatagagtaaaaaatgtatgaatttataaaaaatgaatatttaattttcaaaatgataatagctaatgtttat

SEQ ID NO: 110731 - DNA, 1059 bp, Homo sapiens
ctggattgcactatatttcatactgaaggtcatggttaacagtatttgaaaaacagttttctagagcaacatttcttaaccaaagcattattgacattttgaggcagatgatttcttttttatgggggctgtcctgtgcgttgtaggatgtttagccacatccctgggttttatccactaggtgtcagtagtacatttccggtggtgacaaccaaaactgcctccagatcttgccttttatctctgggggatgggtagtggggtggcaaaattactgccttggtgagagctgttgctttagagcaagtgttctttctgacaatttactctcttgtatctgaaaagatagctttattaatgggactaacattgtgtatgtagaaaagtcatagatgttagagttttagggacttggtctcggttttgttgttcactagttgtatgatgtggggtaaattttcttcctgagactctgtttgttagtctgtaaaatgaggattttgatatctactttttaggttgttttaagaattaaatatataaaaacactagggtaatttctcacacatcattggcttccttccgtatgtcctagaaccattagtgtccaggttttttttctccataaagtctatatgtgaaggcaaacaattttaaaaactatttatataaacagatttcaaaaaagttaaattgtgtatattctgtttattcttttctttctttctttttttttttttttttttgagacgtagtcttgccctgtctccaggctggagtgcagtggtgtgatcttggctcactgcaacctctgcctcccgggttcaagcaattcttctgcctcagcctcctgagtagctgggtctacaggcgtgtgctaaccacgcccaactaatttttgtagttttagtagaggttagcagagatggggtttcaccatgttggcctagatctcttaaccttgtgatccgcctgcctcggcctcccaaagtgctgggattacaggcgtgaaccactgtgcccggccctggttattcttttaactgctaaatttactaa

SEQ ID NO: 110732 - DNA, 1856 bp, Homo sapiens
gagttatgtaaagacaaggtatttctgttttatagctggggacttagaggcctagattagctaggccaaggttacataagcagctagtggtagattcagatggaaacccaagtcattgttaggattcctagtttaattttctttatattaaatcatagtagtttcttacttttttgggaacaatctgctaagaaatctcctgctaattcactgacctttcagactgggatgatgttagtaaatatttatattgaatgacatcctttttccattttacttcaatttctcagtcttttctccagttctccaaggttaactccattaattctgtcagtgagcattggagtttctaccgtctactctgtagtagcttgtactacagaaagacgttggcaatgtgacatgtggtctctagtctcaaaaagtttacagtccagtatgtaataacatctatgctaggatggaaatccaaatagggtatagtgggagcaaagggagttacacggtcagctccacattaaagtgtcaggagtggtctctttgaattgatttctgagagaagagtaggctgtggttgtcaggatgtggttagttcagagattcccaggcttatatataaaccagttattaaaaactcaagtggtggaggccttaaggtgtgcccaaatttttcaggtaagggtattaaaagtgctgtttacttttatgaaagaatttatttatacatttatttatacagataggacattttatgacccaaaactcttaagtgggaagaagcttagagtaatttgaatatatccttttttaaaaaatgagtgagtatagctttattgtcagttttccttcccccctccgccatttttctgcatacctgtaacaatttattgactggcatttgagaagattggcttagtggagaaaatattgaattgagacctgtggaagaaggaaaagggaatttaatgagttcttactacatgtctacattgtttcttttaatcttcacgaactacttaagccaaatattatccttcatttaaagttgaggaaacagtcttagtggttaagtaacttacccaactcattcaattagtaattagtagagcctgaattttaatcttaggattttttttccccttcggaagcccatgggttttgcattaccttactagttctgctacttattggtagctctatgattttatgcaaaacagtttacctgtgggtcatcattttttccatctgtaaatttgatcagctacttactaaggtttcttcactgagtataagtctcccttgattaaattaaagcattgtctgagtgagtagacaaagtaaaaatgtatttgggggaataatatatgtgtttttgttatgccgttttcttatctatttttgaatgtactgtatcgtctttaagtgacataccacttttgagaatcagtttgaaaccaggctgtaatacttgatttatcactgtagaatgtctgagacagaaagtcagttataggttgggtgcagtggctcatgcctgtatcccagcactttgggaggccgaggcaggtggatcatgaggtcaggagttcaagaccagcctggccaagatggtgaaacctcatctctactaaaaatacaaaaattagctgggcatggtggcggggtcctgtaatcccagctactcaggaggctaaggcagaattgctggaattggcgattgcactccagcctgggcgacagagtgagactctgtctcaaaaaaaaaaaaaaaaaaaaaaaagaaagtcagttataaatccttttaaaatgtggaagatatcatgttactatttgttaattatgtgcgtccttttata

SEQ ID NO: 110733 - DNA, 1053 bp, Homo sapiens
tccactttagactgtggagaggtagcctaggatcacctgaaattatatggaaaattttgtgcgtgtgtccattttcctagggtgtttgtagctttcatcgatttccagatgattgtgacctcccaaaataaagaatcacaatttaatttacttgcagactaaggctaagcagccttattttaaaattttcaagaagttagtcgctctttttctgtctcttcctggtggttgagagtatttgaacaaattttgaaaatgcagttgcttttttacaagatatctgagccaagagtcttttcagtaatgttcccacttgcataactagtttaataaagcattttcaatttgacatggtgtaagtcaaaattattactaattctgaattaattagatatagttaatgagattgttgtatacgtttatcacgaagattaaaagtccaattttctgaactgaaactgaggcgatttagggaaaaaaaaatgcataggaattttacatctggatttcttcttgatactgatagccaatggaaatctctcttaggatgtcctttgggagctagagtggaaaataagtattttgtaatggttcagtaatcttaaaggaattaaaggaagagtaccttgtttgtttttatccatttatcatctcacgttttgccatcctttggttgtatagaccaaggatatccaaccaaacagtttacaataaaactatataaaatgagaactagtttttatgctcagactaaaaaggtacaaaatagttatttcactgtacaaatttgggctctgaatgcccagttattatcaagaagtcagttactattttcaatattgaacttctcaagtagaatgtattttagaagcatccatttatttactagcatcaagtaaaccacttatatgcttaagccagttagtataatgtattccaaagttatgttagtctacttattttttaggtataaaggtgaataggatgagaaaataaattttcaaaagctgacagatgtatgtcttagaccattttaaatattgctgtacaata

SEQ ID NO: 110734 - DNA, 1145 bp, Homo sapiens
gcccgccccgtcggcgcgcgcgcccggtcggcttggccggcggggacgcgggggcgcgcaggccgccgccatgcgatccctgcggcccacgtgaccgggcgcgcgcagaggctcgcggcttctgcctcccgcccccactcttttcgttttttgtcgtcttcataagccgcagaaggaacccaaaccttttccctgtttctttcactacatgaaagcacagtagctgagggtaggggaaagtcgttgcagtggcgctctcggcgcttctcccgttgctgccctgcccaccacggccttgaggagaggcagccaagcacaatggccgcggtcagggccgcgagctctgcttgtgcccacgccccgacgcctgcttggcctgggtgaccaatgcttctggccaggacctccggagctgcccttcgcctccctgcgattggcccgtgccagatttttcctggggccgagcgcagaccaccccggccgccactcaaaggccgggcctggctcccacccagcggttggtgaaccagagctgcgggctctgagagcttcggtcccgggcggcagcccacagcgggcgcggggcctgggtgcgaggggcggggcagagaccgcgagagagagttctcgtgaaattcgggagactcaacgtgggggaaaaacagtatctggggatccaggtgcggaaatgcacctcaagtgcaggaacgcgggtcagggataggcccgacgggccttgggggtggggagaagggtgaataatggaaggttggtgcgggaaagaaccttggtacaaatcccgccattttaagcggaggttcggagagaaaacaaggtcactaacccaggaaaatgtctgcctctttcccataaatcgcctggccctggccacagacctcctggagactctgttctctgctcacgccggtcagtcttagattggttggctggagtactgctggacagatagagaaataggagaaaacagggaagcctgagaaccttgggaggaattgttatttgcttaatggccagaacctccaggagggcaagaaccagatatgctgtgttcacccttgttctctattatctatcacagttgcaagacaacatggggatcagtaaatagtcaacaaataatggag

SEQ ID NO: 110735 - DNA, 1015 bp, Homo sapiens
tggagagcttttctgtaaaatgaaatcgagaaataaagccatagctagaggatgctgggcagtcaggagagaatattttgttctaagttgagattatcacagtatgtttgtaggatgctgggatgacccagtaggcaggcgacaattggcaattgctccagtaatttcccttgacctgctgagctcaagcgatcatcctgcctcagtctcccgagtagctgggactacaggcacgcaccaccatgggcctggttaattttttgcagttatttatttatttatttttgtagaggcagggtttcaccatgttgcccaagctggtcttgaactcctggactcatatattggtgagaggtatccgaagcacaggtgagagtgtgggtaggagctccaccacctcacagaagaaagatggaaaacacagctttgggggttgggaggttcatggatttggtgatgatgatgtggatgtacttttctgctgcttttcagtgaaatgagaagaaaaggtcatcttctgagagttggtggggtgctggtagacctggaaggagaccaggagagcaaatggactgtgggttctcagggtatcatcaagtggtcaggaattttttaaaaggtcggttagtaggttgcgttcttttgcccagccactccccactgtttaaacagaagggtgaaagtgagcagagttggatttgacagggttggggtttgctgtgtgtatttgtgttctagggttgccataacaaagtgccacaatggggtggcttaagcaacagaaatgtattgactcacaggtctggaggctagaagtccaagatcaaggcgtcaccaggctgatttcttctgaggcctctctccttggcttgtaagtggctgtcttctcactctgtctgcacgtggtcttcccggtgaactcctctgtgtccaattttcctgtttttataagaacaccagtcatagtgaatttgagctcactttaattaccccattttaacttaattaccttttt

SEQ ID NO: 110736 - DNA, 1034 bp, Homo sapiens
ccctgagcccagcccctcgccgggctgcagcccaccctcggcgcgctcagcccgcttcaccgcttcagggacggaatagaactcgcagatgcagggtgtcgctgacattttcaactttttctgcggtttccgcccgctgtctctgacccgaaagtgcccccggacggttacagaggacacttaagtggtttgcaaagcctgtggtaggggaggagggtgtagaagggccaaaccacggaacttagttttattcatttatataaagcagcactccgattctttttgcgcggcctgaaatgcatgtgaccagagaagtaattaacaaaacaatgtcaacttctaaaaccgagacattacttagatgataaggcgcagcaactcggtgaatctgtacaaaccttggaaaaaaaacacattagtctatgggaccttccagttttctcatgctcctttccagctactaacctctcctaaagggaacaaccactttttggatttgattcccaggcctcgctttcaccgggaaattatcgttgcttgtaaaacagaagaagccgggaaggcaggcagggggagctgctactttacactctgtgctttgggatagcaaaatcccgcatttaagcaatccgaggaaacgagcaaatagacctccctcgcctctccgagcacactcaacagttccggttgcaaaatgtttgcctcctgggcttcccagcgtcccgttagttgttctatttacacataattagatacttaatggagagagaaactagaagttgaggcgttcctccaggctgtattgtaaagtatgaagtgaaatccaaaatgaaatggtaatgttagaaagcaacctcattaaaaaaaaaaaaagtaacactggtcttgaagatctttcaatgtgagtacataaagatctatctcatttcttttgacagcccatagtatttcataaactagatgtaaccatttcctattgacaggaaattagcttgtttccaatttttcaatcccattcattcatccaacaagta

SEQ ID NO: 110737 - DNA, 1020 bp, Homo sapiens
acagagatgtcccccagggagcacatcaaaggcaaagagaccaccccctctagcctagcagtgacccagaccatggccaccaaagctcccgagtgtgtggaggacccagatatggcaaaccagaggaagactgccctggagttctgtggagagacttggagctctctctgcacattcttcctcagcatagtgcaggacacgtcatgctaatgaggtcaaaagagaacgggttcccttaagagatgtcatgtcgtaagtccctctgtatactttaaagctctctacagtccccccaaaatatgaacttttgtgcttagtgagtgcaacgaaatatttaaacaagttttgtattttttgcttttgtgttttggaatttgccttatttttcttggatgcgatgttcagaggctgtttcctgcagcatgtatttccatggcccacacagctatgtgtttgagcagcgaagagtctttgagctgaatgagccagagtgataatttcagtgcaacgaactttctgctgaattaatggtaataaaactctgggtgtttttcagaaatacattcaaacattgcttggttttctctgtgtctggtcccaaataaactcattaagtagtccccatatatcaatggaaaaacaatctaaacaggaacttccagttccccacccttcgcaagttatctctttctggaatccttctttataattgtatccattggtcagtggtgtttggtgtttattgaagtataataactaggatccctgttttcaggtgggacacctggtatataatgtgattaaatcatttgtcagggactcatagatggtaagagggccggtaggattggaacccaggagctctgacagctgagtctacagggttgaggaacctccgctactgattcatgtcagagctgcccattccctcccccacccgaaagaccccggccttgcaaagctcaattctggagaagaaatgagtttcattccttcattcttcattcttggagaagaaag

SEQ ID NO: 110738 - DNA, 1245 bp, Homo sapiens
ggtttttagaaagatgaaatgaatcctaacaatgtgcgtagcacttcacacagtgcctggtccacatgacattctcaaattgttttaaagaacaaaatgacaactcatttttaaaaattccaaaaaaaaaaaaaaaaaaaaaaaatcccccaaacaactgtttttcccatttcttatcttcaaacatttaattcttctgatttttttttcctagaatttgttttggtttggcataggaaaagctactgtatttttacttccggctctaatttttgcggtaaaactggctaagtactatcgtcgaatggattcggaggacgtgtacgatgagtaagtatgtgggcttccacagacgtgggggtcattttctaggtggtgctgtcttcaaagagttgctaaagatgagttctgatgaggttaaagttgatttctttttttttttttttttagtagtagttgggtcacttctgttcaggtgaatttttttttcttggtactgatttttctatacttgttttaactacttttttcctcttgcttaatcctctcagcttccctaaccagcctttttatttcttgtttgcagttcctctctctcggggacctggcatttcactttatgataactgtttttacactttccattttggctctgtagtctgcccctcattctgtgtctggtgaatgtgtatgccttgtttttcacttcacttatctttcaacatgggtctttcctgagtttgcactgtcagtatccgtgttagagtaaatatttgggggatgtagttgctgagctttcataataattaaaaaaattaattttatctcccttttttgtattttatagtgttgaaactatacccatgaaaaagtaagcctttttaaaaaaactatattcctagatgggatgggggaggttgatattattatgtaatggactttaaaaattaagttattaacatcttaaaattatgtagaaacagcagatctgtacaggcaaaaataaattgcaatggtcttaaaaagagggttggcacatagagggtgctcaagaaatacttgatgaattaatgaaattttatatgttaagtttattaatctataaagtagtcctttggtctttgaagtttaaaaggagcaaaatgtcaattactcatttgtcttttttttagatttaacaaattgttacatacttttcatgaccattacattgtctttgtaatccatgatgtaaatacttcatct

SEQ ID NO: 110739 - DNA, 1003 bp, Homo sapiens
ggttgatcccgccagctatattctcaatcccattcctttccctgatcctgataaaatggatcatcccctttcttttccatgtctttattctcttcctgtctccttgactttcactcaatacttaaccaggctctgttctctcccttcttcagaaataaaagcagaaactctttacccacactgcctcttccctatagctctccttcccccacacaggctctcagaggagtgatctgcgcttgctgcctgtgccctcctctcctgctgactctccggtccactccgatgtggtttcctcccccatgactgcacttgtttcaagttggcagtgacctctctgtgcaatgcagacagcacattggttggtgacagccgaccattccttcctcctgcaaacactccttttgtcccctaggtggcatcacacccacatagttaccttcctacttctctgcctcatcatcttggtctggtttgctggcccctccttccaccacccatctttgtaaatgttgaagtcttccagacccagccctaggctgtttctctctccaagccagccctggggataaatgaccatggctaagctgctggctccctaaggtacatccgaaacccagatatctgagctccaaacatactgactcctacacagtctttccattcagtgtctctggcaacaagaccaacatccagcccatcttctctttccttccagagcatcagcgctccctggcactgcccttggagcccttccttgcctctacctctcgtgttcagcgctttccgagtcctgctgcctcctatattatgcctcctgtgtctcctatattacatctccatcatccaccaactctccaccaatcctgcccccttaggccaccctcatgggccatgataacagcctctgcaatgatgtcccatccacgttggcacctgtccagtctatcctttacactgtgccaagagtgcttgcgttcagagagaagtcgggttgtgctcc

SEQ ID NO: 110740 - DNA, 1046 bp, Homo sapiens
cacagtagtgatattatgttcttggacatcatgtgggaggcatatgatgttcgtcccagtattggtaggagctagagaacttcaaatccatatataatactgtaagtggaaaaacgattccagattactcactaatataaccactgactacattgcttttaaaagtgactttaaaaaggttgtttacaattttattggaccatctttagtatttgaagttgtgaagtcatatatattacatttgtgttacatttctttgcctcttttttttagctggttacagcaagagacctccagacatcaaaaaattagtgcttgtcaaggagggtctgagctgtgtttttccgaaataaaactctattgttcaaaagaaactgcgattgtaccctgtagtatagatgctttgggacttggaatatacaatgacttctttcttcatgaggaattgttttgaaggtaacaaccttgtcttatattttgttttataaattttcagcttccacccgtggatgcagaacttgacaacgttaataacgttcttaggacagatttggatggcctggtccaacaggtatgcttttggaaaaaatacaatcactgattttatatcattttaaagggtggactagtacataagaaaataggaaatagcaaaaaagcagtgaaattctagagaaaggttgccaagaagggtgatagctattaccttccaggcaattgtgttcatccttccagttcccagaatttttgttaagcatctatgatgtgtgaagtggcatgctaagaccatgagagatcaagaagaacatgacctctgctttcctaggcctcagaatttagtgggtgtgatgttgaaccccacactgattctgatacaaaatgctgtccccctctgccagtgagtcagctatactggttttctttttgctcttacccaccttcacgcatttgcacatgctcttccctctgcttggcactctcttcttttcccctctccaagtagctagctacttagttgtttttttgttttgttttgttttgttttt

SEQ ID NO: 110741 - DNA, 1092 bp, Homo sapiens
acacatgcatatgttcacacaggagggtgtgtacacacattcacatgaggacaggaatgggactggatcatgcatgctgccttataacctttttgcacctatttcctccacaatttgttgtgaacattgttccattgacgagagtcattttgaacagaatggaaatttgcctcctctgagaggactgagtcctgttttgtagcccctacgtgggtggtggtttgactgtgggatggcggtgggaaggatgtgggaggagagggcagcgggagaggaaaggccagtccttctgcgggctcctccctgactcctgctctgctgcctggacctggacaaagaaccatggaccacacagtaaatgctctttcttctctctgccttttcctgcagcattggcatcttctatggttttgtggcaaatcaccaggtaagaacccggatcaaaaggagtcggaaactggcagatagcaatttcaaggacttgcgaactctcttgaatgaaactccagaggtaaaaaccatcatctctatgtaccgcgatgctttatatttttggttttttggagttcctgtgtatatttggaatctcaatcaaaccttctagaaacacagtgaatcagcgtagactggtgttatctgttaatgtcctggatgaataaataaagccctggaaagtgattttcaagagtacaaaagccgaatttcagaattggtgtttttattttattgagatataacttaacattacagtacatattatagaaggacttaacacttttaaggttcttatgattttttaaaaaaatgaaagtttttgggccttattatcctttctttttggcagtatagttaactttccatcacttgtacaaagttactcttgtaatgaaaccatccagctttataaacatccatttgctaatgtctgcatagatatatcgaattccttgggaaggacacacaagcagtctctatcacacacacacacatacacacacacacgtacacatactcacggacacacaaattgtctttagagaagggcaatgggatggttgaaggttggggatgggagaggaagtaccctttctt

SEQ ID NO: 110742 - DNA, 1669 bp, Homo sapiens
cctggcagggtctttgtgcttgacttggtattagatttggcactcccataaccttggtttatacccctggctcctgctctctttccttgcctttgcaaatgaataaaaactctgggtgggggtgcagtggagagaagatgcagaactgagcccacatgaatgagctgattcctactctagatgtggaactggaccatgctttctaccattatccaaagaaagaggttaattaaacaaaggcaccaaaggatccaggccacatctagaggagggctttctgactagatttagtctgataaaggctgagtgtgttgggttggttccccctgaagcagaccctacaccaatgactccagggcaagtcgtttatttgggaggctcagggaacacagattcctggtcttacccatatcttctgactcatgtgctgtagcagaggagcccaggagtcaatgtttttctttaacacacactgtgaggtgcttctttgtgtctggtgagcttgggagcttgtgccctggttggtaacaagcctgcgtgccccttccccaagaaagggagaccgggatcatttaaaatgccctgtgtgaccccagaggcaggtatatctgaactgccccccagtcccagtattttggatgcctcatttaaaagtgattcccatcacaaatggtgttccctcagagctgtgaagatctgccagctgaggcaatagtttctacacttttagatttcctggaccagaatatttcaaaaaagtgatctagaaaatgacatagagccacctaattttattttgccacgaaaggacatttaaaatcaaacattgagatgtttggaataaaaatggtgggaatccgttgatcgctttaagcatgggaataacaccatcagatttttattttagaaaagggcacttgggaagatgctgccgttggttctggagttctcagatctgattctctattttatgaagatcacatggttagtgtgttaagcatttgtaacttcccctctaattctcctttgcgtaaccgattagcatacggattaagaaccttttgggaaatccaaatgtaaatgcaaatgtaaatttcagaactcagagcaacttaaaacactgtttcttgaattcacactcaagttttatattcctttctcatgtttatccttctatcacccaatttcctccttgtgggatatgaatgttcttggttatggttgatcactcataactttttctgtctgttttcttgatgcatgctgcctctgccaaaattcctcacctgcgttgacttctacagccagaaactgtaatcttaggtctaaaggtaaagtccttgtctgctatttcaagttgctcttggaaagcctttctgttcttcactgtcatcctcactgtgaagatttttaaatgatccgtttcatttctgtttttaccatcacttttaaccttctctttgaagaaagatatctctgtaatatttacatgttgatcttcaacacaatcaacaaagcactggaagatcttggtgtatcaaaaaacagtttaagtagtgacaggccttcgtctagtcggcctagaagtgaactcttgaaatgccgtatcttgttcctgatactgcctgatatttagtcagtaacattagaaaggctgtgttatcaaatg

SEQ ID NO: 110743 - DNA, 1046 bp, Homo sapiens
cccatctcagcctcccaagtagctgggattacaggcatgcgccaccacgcctggctaatttttgtatttttagtagagacggagtttcaccatgttgagcaggctggtcttgaactcctggcctcgggtgatccacctgcctctgtgtcccaaagtgctgggattacgggtgtgagccacggcatcctgccgggttgagttaattttaagattcctttcatccattcctttgtaaaatattaatatcaggcaaatgtggaattattgaacaataaatttcatttgtgtttccagacaattaagaattagcaatttcagcaaaatttttataaatgattattaataagctgtatgcggtttgctggtaaatattaaggtgtattatgataaattactaacttaaaaatgacaactctctaattctgtcactgacaaaatagtaaatcagaagtatttgtcttctattcttggcttctggctagaggtcattaattatttacctacattaagaaataagaataaaattataagaataatagaaatataggtataataatttttaagcatataaagatctttttctaaatatgcattttataattttactgaaaaaataatattgctattttgtggctttttttccagatactttgagaaaattcttacagaaggcatatgaatccaaaattgattatgacaaggtaatttttcattggtgtatttattattaaaaatacgaagtatgagaaaaattttggctgacttgaaagtaaatctttaaataaccagttattcaatctgcaattttagtaatcttttttgactaagaactttcatggaatattgaaccaccttacaaatcccatttgaaccatagcagaaagttcaaaagcggcatttgaagaaaacctttcaagttgtatgttacttaaaaattaaaaactaaggccgggtgtggtggctcacgcctgtaatcccagcactttggtaggctgaggcgggcagatcaccaggtcaggagtctgagaccagcctggccaatatgg

SEQ ID NO: 110744 - DNA, 1071 bp, Homo sapiens
gatctttctgcagttgggtgatggcattgtttgtgtgatacgagcaatgtaatgtacccttccataaagttgaacaaacagatgattagcctctaagttttattataaatgatggctgcttatacaacatgctatttggttatcatttgctttatcggaaagcatggataatgggcacttttttcagcaccactgtattggtaagtttgtatttattaataattggagaaaagtctttctctaatttaatggatctattttatcacaggcctttccacagaagaaaacctgtctgcctccatcaccaaacaacctattcatcaaaaggaaaatatcataccattacttgtgacaagcaattctgatcagtttttgacaactccagatggtgacgagaaggacataacgcaggacaattctgaattaaaacacagatcctcaaagaaagatttgttagagatagacaggttcacaatttgtggaaaccgaattgactgaatctgtggcttcatgcgctgaagaagctgggtcctggggcaacaagtgctgtgttgccaggacaaatagatgctaaacatggcacttaaatatttatttaaaaacttaaattattattggcaagcaaatcttagtatctttcttccagtaatatggcctggctgagggtcagaccacaggacaggagcgacctccggccttgactgtctgggaagcttgatggattataaaacttcctcctgcctggccaagcagcagcatcatttccaggacccaacaaaggcaacatcaaaatctgttttgctttgtcagtctgggcttccagaatgttgaatttgcctcaaggcctcttcagtataaggaaatacctggaaaactgtgaaacttttaccacgacgtaatctttccagtctcatactattttcacaaacagttttcaaacgttacttcatctgccaaagcattaaaaaaattaaacataagtcaagataaatgttcttaccaccagaataacccttaaagatgtatcttaattaatcagaataaaaggctaccttaaataagacatgatga

SEQ ID NO: 110745 - DNA, 1131 bp, Homo sapiens
atttgtattgaatgccttaaaatattcatattctttgacccagaaattttatttctgtagtcataggtatctaggtatcctaaggaaatacagatttaatgtgttttcttaatcagaaactttttagtagaagcaaaatattgaaaataatctaaatatccagaaataggagttgtttggggctttgttatttgataacccatatagtgatgttataaggccatttaaaataatgtcactgaggaacattaactgatatggaacaaattcatgatacagtgttatataaataacaacaataataacaaaattgcttgccatttctgtgtgccaagcactgctctaagcaccttacctgttgctctcctttccagattagctgattaagtagcttgcccaggtgcacacaggttctaagcagtggactcaggactccacacagacacacttcaccccagagtccatgctctgcctcctgactccactcgcctactgccttgtaaaatagaccatttctatacagcaagaaagtacaaatagaggtgtactcagagaaagcgacggaaagataacatactaaatgtcacagtgattatcataagggtgtggaatcatgtaattttattatgttcttttttgttcaactgcatgtgctaaatgtatttgttgtgtaataaaagaataaatgttataatatttaataccaggaaaaatttctaaatggtataatttcttacaagagaactaaggaggccaggcatggtggctcacacctgtaatcccagcactttgggaggccgaggcaggtggatcacaaggtcaggagtttgagaccatcctggccaacatggtgaaaccctgtctctactaaaaatacaaaaatagccgggggtggtggcggatgcctgtaatcccagctacttgggaggctgaggccaagaattgcatgaacccaggaggcggaggttgcagtgagccaagattgtgccactgcactccagcctgggtgacagagtgagactctgtctcaaaaaaaaaaaaaaaaaaaaagagaactaaggaattccgaagtttttctttgtgacaaggaggcctcagaaaactcaagatttgtgtaagttcctctaaatc

SEQ ID NO: 110746 - DNA, 1067 bp, Homo sapiens
actgtgacacggttgagggcttccattgtcacttttctcatagtgagagtttattgaacatatgacaagccattgccccagctcttcccaattgttcttttattaaaagcatttttaaatgtctttttaaatgtgtaccattatgatgtttatttaagataccctaatagactttggataacttgacattactagataagacgacttctccctaattctctatttctcttttaacatatgggcatagcagcacttgtaacatgtggacattttactttaactgattccaccagatttattcagcagacttccaaggataatgcttttattcctttatttctgtgaaagaagtaagaaaatggatagttaactgtatccaaaagagagaactgtttcaatgtttaattaattttttaatagtgtttagtttttctaaatacaaaacttttaaggttccatttttcctgtgttccctgtgagttactgggggttcataaaagagtcaaagaagaaaggacggagggcaaaaaaagcaggaataaggaaacacccaccaaataattctagctttggtgtggacacgtgtagcaagatgaaatcatttgtactttgcagaataatattttataaaaatcagctgctttgcatccctgtgaggtataagtgtgacattcatgacctaagtatagggccgaacttagagagtccacaggagtcaaactgttgcactagccacaggcatcccagatttgcttgaaccaatccaaatgtaccacagaaggtttcacaagcaggcagattttgatacaaatcaacaaatctgccttcttggatttttagacaaaggccatagatatatgcctaaaatgttaaagtcagcatggagaaatctttttaagtattaactaataactctgtggttgtgtgttctgtttgtgtgtttttgttgttttggtttgtttctggctagctcatcagagttgtaacaagctcaattaaagtgcaaggaatcctgtcttatgcctgtgtcatactcttctattttgggtaagattattcttgaatat

SEQ ID NO: 110747 - DNA, 1098 bp, Homo sapiens
aactattcatttaatttaaaatttcaaaattattttatatacattacactacttaaaatagtcacttttccccaaattctaaactctcaggatcatagtcgttggatatttattcccctttaaagaaaaacctttagaagatctatgaatgttaacagttcggtggaattgaggttacattttacctttactgtaggaaaacaaataagaaattatgcccagatgtcagcttggttattagcacttgttcctggttaattattaaatgtttttattaataaagttgcagtctttccacattatatatttttactgtattacttgatatttcattcttgtttgtttttaggtctacagtgaatatagagccagtcttgcttttgaccttgttagcagccgacagaaaaatgtgagcatttatcaagggcgtagtctgaaattaacaaaggcatagtctgaaattaactgaataatgattaatttagcatgaaatattaactaaaggaaagctacataaactgcctactgatctctattctcaacactaaataaacatttacaaattaagaataatagtaatacttaacattaagtagtatatgctctttgcagcattttaagttattcaactttgtatttaagacttgtgaacatttggatttccacatcattttataagtgccaggttctgttcttgctccatagcctcacctgtttagaacatttgctggtaataagtgaatagtacttttaaaatgctgtttaaatcccataaatctgaatcttttgcttctttctctgttcaggcatacactgattacagtgactctgtagcacggaggatgggctttattcctctcccactagctgttttagtaagtgcatactttttaatgttttttgtaacaaagtagccatcattatagaatattaataaatggattattaatatgattgtttcaaaaggacttgatataaaaattaagggtaaataacttggaagaaaattttgttttaaattatagcagtagcttatatatccaaatatctattggttgagccatccaatagatgagtgacgcttagctgttttatgta

SEQ ID NO: 110748 - DNA, 1523 bp, Homo sapiens
aatccaggtaactcactcttaacaaaacagtgtcttataattttacttctaagccaaaatcattcttttacatggaataaaatgaatattgcagaaaactccaaaagactttggctgttttactgtttgggtattggtgaaacaatcatctgtcacttaatgaccttcagtcaacaatagaccacatatacgatggtggtcccataagattctaatggacctgaaaaattcctgtcacctggtctcctagtgtccttttctgtgtttagacatgtttagatacacttaccattgtgtcacagtttgcctgcagtattcagtatggtaacgtgctgtacaggttttgtagcctaggagcaataggttataccatatagtctgggtgtgtggttataccatctaggtttgtgtaagtaccctctatgatgttaacacagtgacaaaattggctagcaacacatttctcagaatgtatccctgttgctgagcgacacatgactgtacctgtttcagtagaatggattgggtatgttttctgtggtgtagtgggatgctgtcattttccataaactcctcagtgtctctggagctgtacactcagtaggtgagtgcgccctgttatgcctggcagctctgagcctttcggtttttaactgtagtgtactttagttacctaaatccagaaagattgttttcatcttaggggttaaccaggagaacctttgctcttccctaacattatcttttacccattgattagcattttaaatagggataaattaaatataaagtaaggtggaaattttgctacttaggtgcgtctctgaattcaggctgacaggaaattgtcaagactccatgaattttcattatccattcagttagcagacattcactgagcatatgctagtttctaggcacaaggacaggcactgtggcaatgtaaaaaatactacgacatttgtaggacttaacaggctaattaaggggaagtgggtaattataatgctaagtgagctaagtgggaaatgatcaatttctcaggtatctcaagtaatttagagtttttgtttgaatgtctgacgtttttgttggaatctcattcttaaaggatgcaaccatgttttggatttcatttattactcccagtattatatatgttataggcatttattaacttcttaatttattttaattcattggtaattttcaagtaactgtgaaaaatcaaaaacatataaaatgagagatacggtcttggagatacattttcagaagtttttttcatagagaaaccataagattaaatgacatctcacagcagctcgagcaggctacctggcttgtggtggaaaagcctcttcctccacacacacagctagattctttgtgtacccaaatttgttttagtgaatggtggtatatttctttataactaagtcacctaacagggtgtccatgaagggcagagggggtatgtgtcactggttccggtagagtacatgtaagatcagcaattccca

SEQ ID NO: 110749 - DNA, 1050 bp, Homo sapiens
tctcctgcctcagcctcccgagtagctgggactacaggcgcctgccaccacgcccggctaattttttgtatttttagtagagacggcgtttcactgtgttagccaggatggtctcaatctcctgacctcgtgatccgcccacctcggcctcccaaagtgctgggattacaggcatgagccaccgtgcccggccagatgtgcccaccccttttatttttgccactatttaagactttctttgttacaaacatagctaattagtctaactgaaattctatacatattttagccgttactatttgttaaagaataaagaaatgtgagtgaataagtaaacaaagatcctcactcctctttagcttgccttctactaggatttaaaacacagatctccaggatttgagctatatctcaattttagttatatatttaaatggaatattaagaaacatcttacaaataatttttttttttaggtagctgatcgtctgttttcatcttttggacaagacatattagatgctctctattggacagcaacagagcctaaagaaagaaaaagagcccacattggggtgattcctcactttttcatggctgttctctatgtctgtatccttatagacctactggaaatttccgacagttaatgcatagtctaccttattttatttggttagccattttatagatttaaagatatatagataatgtatgtatcctgaagattaatgtgaaatatttgtgttctgttgagaaattgattgtcataataactaactaatttaagagcctcatgtaggcattactctttgagctgctggaaaacagttctgtttgcagtgtaactgattataaggaagacttttataataaaaaggcagtgtatctttatacatacctgatatagatctatataatttttcgtacttatgttagaatttttcttgaagttatctttaaatccaggaattcttttttatgggcttaaaatgcatggaatttatctaaaagtgtaatgtgaaattggttgggaggagttttggtggt

SEQ ID NO: 110750 - DNA, 1048 bp, Homo sapiens
tgtgcctgtgtccaaatttcctcttttataaggactccagtcacactggattagggcccaccctaatgacctaaacttaaattacctctttaaagaccctatgtccaagcacggttacattctaaggtaccaacataggaacttaaattacctctttaaagaccctatgtccaagcacggttacattctgaggttccaacataggaacttgatagagaggacacagttcagcctgtaactatgaattttaatctgtggaggcagggcaatttattgactaaagatacatggatgctgtggtgagggcatatgtatcataccataattgtgtgtcagacatacagaaagttgccactcttaaaatgagtagctgagtttgttagcctagtggtggctacttggccaagtcctcgaaagacttcaccctctttctgtgaaatatagtcctaaacttaacaagtaagagtgtctaatgataccacaaaaagaaagggtatggcaagtactcaagaaaggaggagaaatataaacactaggaggctggtcctggaattaagaataaggccttctgagtgcagcaagtttcagtgcacatgaaattgtgttaaagttagtgatcagtttgcatatttttaacataaacaatattgtaactcaatatatattccagtctttcccatcaatgaagcattctaataaacaggaatagcaaaattatgaggaataaagattttccataatatctagagcttgaggaagtactcagaaagccgcatcagatgatgtgccattaactatggtcaagggcaacttgtttttgagtaatttcttttgtgagtcgtaaaccaaaggctctgaggaagcacagactcactctttgaagagaagaactgttaatttgttattcccagggctaagttttaagaaattaattttttataatgtttagaaattctggttgtttggaattttcatctacaagtatttttaaaatactttttttttttcttctctccttgttaaaattcagctgatggtttttggaatc

SEQ ID NO: 110751 - DNA, 1035 bp, Homo sapiens
ctagagtatagactttctggggcatgaattttttaattcggatgattaaaatgattttattgtagggatgaccttgaatctgcagtaattgctttcaaagtcagtcatttatagttttcttattgatatcctgttccccttaacattctgctgattgttgatccctatatgtgagtttattgagaacatcttcattctcagcagagatttatcaaaatgtacatgtttcaaaataacctaatcatcttcaggtacctctttaaaataaaagagctataagtgaaaacagtcaaaagacaaggataccttggaacctaagaatgaaaatttgagctccttagcaatgaactgaacgtgatttttatgcctcttgcataatgattatatcctaacctcaccactaggaggctactcacattgtacctgtgcatgctctttccttggtttgaaattcggtcctctttactgcctggcaaaatctagtgcctgtcttctctcctctgtgggacatctctgctatctcttgcacctccttccctgtggtgtgcatgccactctcacctgcccccaaatacacacgctttacagacccaggctcttcacctgtgtttccagagcacatcattcatctggcacttagcatgcggtttgtgtcaagctcactgggttgtgaattccctggagaggatgtctttcctcccagtgcagtattaagcaagatatggtctctgcttttacaggagtagacccagagctttagcacaagctttataaaagtgagactaagcctctttactcctactttctaacaccctagaccagcgatcctcgactagcaggtggtatttggtggttgtggtggaggagatggtattcagaatttccagaagatggttagtgtaattcaaggagatatattgcaaaatcattatgcttctttcattttagccataacattttgtttattttgaaatttcaaatggtgctaaaagaagggcaggagatttttgtcataaagggacacgtagatttttt

SEQ ID NO: 110752 - DNA, 1057 bp, Homo sapiens
ttatatattcttgacacctactgattttccttccatgtctgtcagtccaggtactgtatcacctgtaagaaccaagactgagctcttgaaaaatacttttctgactattctagcccttaataattattcctttccatattcctgtggcattttcaggttataccacaaagaagaatacttttctcaaaaatacttgctgatcattgtgtgcagttctaggcatagaattatagataacatttattttggtctctttgttttatatgtatattacctgtggccccagctagcgtggaagttccttgataaatactgttctttttgttttctgtcattttcttttctgtagagctttcattgttgaggttcctcagtgctgaactaacaagagggtacttccttgaacataatgaggccaagtatacagaaagaagagaaagagtatacacttgtttgcgaataccaagagaattggaaaaggtactattttttcttcattaccagacatcattttgaaagttatgtcaaagtattaattatgcaaaaaaatggtcaacagctagagttgagttttttaaataattgaaataatgttattgggggagtagaaatttccttacaggaagaagctttaaagttacattttttagtgtaagacccagtgataggatattaatagatctatcaaaatctgaacttttctgcctatcattatcattgtgtgctacatcaaaataacttttgtaaggaattaatctctacttctgtacccttttagttcccttcagttctcttttactagaaacaggttttttttcccccattcagcatgataaattatttaatttcagcctttttaaaggtttcagtttctcagaaagcccacatgtttataaacatacaggacagtctcttcaaagaaaaagatggtttgtttaatctttatcacaggaagcatcacattacagggtgagtgtagtaacagcagcactacatcttcacgtgtcttattccttggctgtgccttatcctatcaagaccaataaaataggctggg

SEQ ID NO: 110753 - DNA, 1045 bp, Homo sapiens
cagtggccccaaacttaaccaaatggatgattaaagggtgactgattctaaaattatgatctagagccaattaatttgttcacaaagaaaaataaaaataataaaaccgggaaattacttggagtaaccacaaaccagatacaaagtaaaattagctacttctgacaaactattgctttgcttttaaaattctcacttgctttacttaattagtatatatagaccaaacgaacaatgaaaagttacttattttggtttttgatcagttcagtgtcttggcttttgacagtttttaactttaacttagtttacgctctgaaattcaatcctagcagctcatttgtgctccaatttggggactacttgcataaaagaagtctctggaaagcctatatagcattgactgtcaaattaatgatattctattctcatttgtaatcctttgctttataaccttatgaccttggaaaaagtcactcctttgtttatacctgttttccatctatacatgtgtaaatattctactctttactcctctaaatgagactataaacattttttcaaacatcttaaaaacttgaatatactgtgtgaaatggttctttacttaatgtttgacttaggaaggcagaattgctgttgtatgattgagtcccagaaaagctgattactaattggcctggtacaagagtgtgtctctgttcaataagcttatttaatattttagtgtaaccttaataaagtttactaaagttttatgttatttaagactatggagatatgcatgtttcatattttcctaacagttaaccagtattactttccaaatttttaaatgctcaatgctattttaagaaagatatatttagacatattactgaacatataaatatatttatgattactcattacttttaattaatactttttaatctttggttcttatttctaaaataagctttcttagaagataattaaacattgtgttttttcttttaggggtgaagaaaaagcaatttatactatgctttttctgaatttaagt

SEQ ID NO: 110754 - DNA, 1046 bp, Homo sapiens
agttccctttatcatttctcacaaggaatttagggctcctacaggtaagacatttgttgatcagtcccaacagcctagaattccctaaatgaatgtacatattaggtacttatccaaactctttccatctgaataaaataaaacgtggtgtctgaggttcattttttgttttatatctctccttgttgatttatatgtttagaaactagatatgtatatttgtctgtatgaatagctgtatatgctctatattgtattatactaaacatgtgtctccattaagtctaagctttcttttcctcatcacttcgttctcagaactcccgttctgacttatatttagcctggcaataggctgacgcatgtctcagatgcgagtacttacaccttttaacatagttagaattgggaatcccactcatcattcctgtttttatttgctctctcagaatggtcattgtgtatttccttgttgcatatgtggttactggccttgaactctggatgtagtggttatcaagaactgcagattgatctcttctgtattttcttcctgtccttgaaaatactaccaacttctgttgttccttttgacataaaaccaaataatcaatgttatgtttttgtgcttgttccccacttgattcatctgcagaagtcctaggtaggagagtttctgtatagccatatttttatttaggaatctaagtacagcaaatcaactttggactaagcattaggaaatctgtgtttttggcttggttgggttgttgaattgctttgtaaactctgtgcttgcttagactgcttgcctaatcagtttggttctgtttcataatgccactactagatagttcagtatctgaagcatctaggttgcttctagtcaccatggagacttaacagaaggcttggtgtaaataagggtagcacctgtgagggtagcacaggtgaaacagtacctgtgtaatgcaggtgttggagatgcatggggataggtattgcttgtaaaacaagaaagcctgaagtcgggtataggtgaacat

SEQ ID NO: 110755 - DNA, 1034 bp, Homo sapiens
ccagtacagaaatatttaacactccataaaatgttgcatctgaacttttcctgaactgaaacttatgccaaaaaaattactagatgagaaaatgtgtacttatgaatcctacattcaatgaccagttttaaacgtattgttacaatgttacagtttctataagctgtaggtttttattctcattttaaaagaatttttaaaacttgcatttgtattcatattgcagttacagattagttttaaatgaaaaaaggttttgagatggatgtcttcttgaatatagagtgaacccaacgttttaattctcaagctgtaaacagcaactgaaccataactccattaaatttcttccaactaaaaaattacttctgttgtccaaaaggggctgtgttagccgttatttcctgaagttcatgcaaataactaagttgtgaggctgattacatcattgattgtacttgagtactgaaattttaaaactacttaaggggcataaagttgatcagatgcgattctaattgatttgctgattcccagaactggacgtaggttctatttgaagcagtctatatttttggaaaattacagacggtcttgtttggtctttttcaattaaccacttaaaaattctcaaccatactttatttggtttagttctcagttaaacatttgctttcaagagtatttactttcttcattggcaggatctcagtaagacaaaatagcaaatctctcaactgtctgtttacttacttagacttgaatattaaaagcactctgttgtaaatagagatagatgtagccaggcttcactatactttctttaaaacatttctcagttgcaggaaagccaccattttaaaagcctttttttgttgtttgcgtggagaggaaatgaagttgtttgaagcctattgatgagcacagatcttgagcttgcagtatcacttaacacttcttccctggctttttctgggactggatacctggacttccatggacttcattataccacgtatccattcttcaccaac

SEQ ID NO: 110756 - DNA, 1312 bp, Homo sapiens
tgctaattctatgatcttgagaaaataacgacctcactcctccgttttctcatctgaaaaatgggaatgaaagtaatgcttttttagggtggttgtgaggattaataaaataatccctagtacctgggtaagcactccaagaatgctattgtaactggtttatattattttccacaactgcctttacacttgctctgggtatggccgttttaagacaactaaagcctgaatgctttccatggggtccactcagacatgcttgctcattcaaactctgcgagtcctgaacgcttacccctctgctggcccaaatcctcaccagccgtctcaaatagcttcagccagctttgcacccttggaattctccaggctagagaaaggcaccagtctcatggagtgatacatcaaaatccgctctcggtagacgtcttcccttcgagatctgctttgagggctgccctaacttggcataagaggacaaaccctcggctttctctcgcgtgcgcggtgtggtggcagcaggcggagcctcgaaatgcagaacaacgccggcgagttcgtggacctgtaagttccgcggaaatgctccgctagcaaccgcatcatcggtgccaaggaccacgcatccatccagatgaacgtggccgaggctgacaaggtcacgggcaggtttaatggccagtttaaaacttatgctatctgcggggcgataggatgggtgagtcagatgattcgattctccgattggccaaggccgacagcatcgtctcaaagaagttttgactagagagaatcacggatgtggaatatttgtcataaataaatagtgaaaacctaaaaaaaaaaaaaaaaaagacaaaccctcttttcatcccacagagtgaggagtcaagaaatgtcaaaacgctggtacacctataaatcccctttaaggcaccttctcaagccctctcttacatagttgaagggggttgacggagttgatagccacaggttctgtattgtaatttctcagtaagtcctaaaaatgtgtccaatgtcactatttataatgtagagaacttgtacattataatcagctttgagcttcagccacaattccaagaaacaagaaacatcttgatgtggtttggctctgtgtccccacccaaatctcatgttaaattgtaactcccagtgttggaggaggggcctcgtaggaggtgactgaattacaggacagacttccctcttactcttctcataatagagttctcatgagatctggttgtttgaaagtgtgtagcactttctcctttgttctctctctctc

SEQ ID NO: 110757 - DNA, 1049 bp, Homo sapiens
catttacatatttttggattatgtcctttggatggagtcccagaaatagaattactgagtcaaagggcatgaatatttcttaatgcttttaattcacagcatatatttatttaaaacattaaagtgaataaagattctggaaagttcctggtactctatgatgtggttgtaatcagctgggctgtgccagctctgaaccttggtatggctgccctgtgggagttcaagagggagattaatgtgtctccttgatagatttatcttttgtctttggtagtttgtctaacacattttttgtattcatttattcaggcagtcatttttaaccacctattatatgccaggcttcagagcaaagcaggcaataggatcttatattcccaatgaacacaattttttgtatgtaagaagacaaacaaacaaaattgaatgatcaaggaaaaatatagactgatgtgatagcaagtaggcttctgtagattggatgacccaaagatgacaaggatgctgagatttgaatgaggagaaagagaaaaccacaccaaagagaggaaaggcatccactggtggtggacgcagctggttcaaagggccctgtggtgtagtggagtgcagccctgggcccgaaggaaggtccccaaggtaagaacctagatctgcgggctgtgctgagagtgcagtgaaccaacagcaaagaagaagagaaagtcccatccacacaggagagtgagctccctacacagcaatgacgaaccatagaaaagttttagctgggagggtcacaatctaatgggtattgttaaaagatcctccaggcttctttgcagagcacaggttacaggggaacaggagtgggggctgagagatgagttaggaaaaagtcattgttgtccaggctgaagttactggaggcacagagaaggggtggcagtggaaggaaagaaacatgggtggatttccattcatgtgttggaggtaagttcatgggatttgctgacagattggaggtgtggagttagggtaagacaggaatcaagagtatgttctca

SEQ ID NO: 110758 - DNA, 1039 bp, Homo sapiens
gtgtctaaaaaccaaaggacggtggtctgccctccctcaaatggacatcccaaagtggcgaatggtagtgtcttacattctacgtgttgagcagtacttttattcctaaatttgcctgcctctgtggaatttgagtatagtatcactttgcagtgccgcacagtaacttgtgttgtgatgtggtgtttataaatagatgtaaatagttaacacttctttgaaaacgaatcaaatcctcacttatagcctttatcaaccagctggttcttgtaagcatcttcccggtctgtgtgcaaacattacttttaagtgatcagctggcataattaggtaagattgtacactagaagcacaattcagttttctcttcatcttggctggaagaagaaacaaacatcaggggtgatgatatgatggtaagttagatgtgggagatttttcctgcagctgcagtaccttgctaatcatcagagctagttatttatttatttctttttctgtttcagttcaaaggtatggctttgtggaacctcaggcagagaggtaattacgaagcctggtactatgggtgcaggcatcatcactggcacagaaagcagcttggctgtggttaagctttgtgttttattttctatctggatgttttcgcatttagtgctttctccttttaaaaaaaaatgtacttaaaactctcattgaagacttaaatcaggttcagggaaattgaatttaagacctggccagggatgggattggatgctgtgacttcagagacaagatgttgttaaatgggtaagaagatgttgagcaagaaaaccaacaaaacaaacttgatgaagtcaaaagaaagtgacttcttatctcgggataagaagaccaacattcaaacgttggctttggccattgggcaggtcactaaacctcctcacttgacttcatactctgatctgtaaaatgaggctttgtaaatcatccccagatgtattgactgcctgttgtgaatcaaattctatggtgacagtactgatgtgattcttac

SEQ ID NO: 110759 - DNA, 1788 bp, Homo sapiens
atgtaaatagcaccctcagtgccagaggctctaggttgtcctgctgtatgtttgcgttttcctggccaagggggactgggcacctgttgttagaaaggagcgacatgaatgacgtgcttatctgtgtccattgcagggttaccctggataccccgatgaacaggaaatcaatgcctgaggctgacttcagctcctggacacccttagaattcctagttgagtgagtattacagacatgtccatgactgagcagcttccagcccctattctctgcctgctgtggtccagaggacaagtctgtgttccctgagatcgtcaatccgggtggtcttgggaggtctctgggactctgaggatgcattgcacatcagacggaatctcagagtagctggacttggagacaggcagcacagtggcagaatgggtagtgccgacatgaatcctggctcgctccctcaccaccggccatgctgagcacattattgacctgctgaggcctcagtttccccacctgtatcatgaggtccatcatgcttgttaggattaaacgtgatagtgtgcggcaagcactcaacacagtgtctggccataacaagtgctcagtgatccccagctgcagtttgtgtccttactgctgtgatgaggagactccatgggggagggggacaccacgtagatggcctgggggcacatatctgaatctgtgtcaagccacagacccacagaaagtgccctttaatttccgaaatcctttttgcccatttgtgaatatgggtggcatttgaacgctcatgggacagagagctgaattcctcttttgtgtttgtttaggtatcagttcctcaagcccctctagttagtaagcatgtgttcatcgagcacccactatgggccaggtgctgccctcggctctggggtcacggtgaggacaaagatgggatccctgcccacagggagcaggggtgccgagagggtcaaggtgacagcctgacccagtagtgcctctgtgtaaactgctttgacgactgtttataagagatgtttgtgaagttagcagtgtgcttctggcctgatgtcacaatctcatttaaattaaatcgggagaaatttgggacttgcgttttatgtttgaaatgtgtacttacagaacactttttatgtcccagtcaccattctaagcacttcataactcttatttaatgctcatagcaaactctgagggaggagctgtcatttttatttaaggcttagagacttggagggatggcaggggctaagtcactcgcctaaggtcacacagcacagccgggatctgacacaagtggtgtggctgcagaacctatggtcttaactggtgtgctgacagttatttctgtctatgccaggaatcatgcttcatgcttgatttgcaggaaaaaaattgaagttgtagaggaaatcaagctttgaattgtgtttgtgtttgaatttctttttaaaggccgacactcccaccacacttgagatactgatctaagacctactctagatggaacatctgggatcttgtgtctgaactcgtgctgagccacagacccacagaggacgggctgtcacaggcccccttttgttctagagatcacatccacccatttgtggtatttgaaaactctcagaaaagctggcataaagtttgctttgagatgtctgtgagcacatccttcctctaccatccctggttagaatggcgttctcactcacctatccacgctgcagatgagggtgaagaagtaaaaccatttaaaacat

SEQ ID NO: 110760 - DNA, 1005 bp, Homo sapiens
tcccgggagttgcccagcgctccgcccacgcccgcttgcagaactcgccccgcctccgccccacccatcgtgtgacgtcaccatatcggtcccgcccctctacttcgcgttgctcccgggactgtcaaccgcgtccggaagccccgccttttcgcccccgcccgcatgcgcgggcgcacacgaatgcgggcgcacacgaatgcgggcgcacacgaatgcgggcgcacccttgagtcccctccacaaccgcggtttgatcccagcggtccagtcggccggtgctgcccatccgtcccgccccctagacgcacgtccgctcgcccggcgcccgagccagtccgcgcgcacgccgtctgcgccccgaaagccccgccccaaggcgcgcccgcccaccgctctccacgtgctcgctggagggcggtgcgaggggccgagccgacaagatgttcttgctgcctcttccggctgcggggcgagtagtcgtccgacgtctggccgtgagacgtttcgggagccggagtctctccaccgcagacatgacgaaggtgagaggcggcggctcgctcatggtccgccgctggggccctgcccgtgggctactggggctgcggggctggtcgaagccgcggtgtcctgggcgcccaagccaagttgcaaaaatcagtttaaaagaaaaattctctccttgcggggatcggcctaggccgctgaggaccccagcggtcgtattgagggcgcgattcccctgctcggggctagggggtgatggttgtagccgccctttacccggctccactcggccgcgcacttgctccagtcgtcacccgcggtcctggcagtaacccggggaaagacgcggcggtggggctcccatccgagcttggaggaagcccgagtttgccaaggtgaaagggtttctgaggtcccagagtcacagggctccttcccccgcggaagtgaaaggtcagggagttaagtagcttggaagggtttctagaggaaaag

SEQ ID NO: 110761 - DNA, 1301 bp, Homo sapiens
cgatttgctgtcaaaaactactgcctatcttatattcctcaatctgaaggctttctttatccggttgtggctctggcttacacagaattatttgcaagagtatcctcacttactctgcctctcaaacctataagttatacaattttgccaggacacaaaggttttaagaaaaaaaagccacaaccaaatttcaccgtgcgtttagccctgttgctgcagttaaagtaattgtgtgggagctcagtgagtctccacatgtagaattccttgctggaaatgaatgcttgaaagaaataaagtggttgatttggtgtatctgtgggacaggacttccccagcgtggtgctagttggcctcggcaaaaaggcagctggaatcgacgaacaggaaaactggcatgaaggcaaagaaaacatcagagctgctgttgcaggttatttcactttttaagtttaaagaatcctgaggatccactctttttgatgacctctctttcccctttttgtccttttaccagttgccaccccttaccacgttcacacagaaataattcatcttaacaaaaattcagttcctcttgctgaatatggttggccttatgataaatacagaaggttagctaatggaattttatttttaatatatctatatctcatttgggtgttttactaccatttgttcgctcttgtcatattagagctgtgttttcccagaacctgtagtgtatagattttttgtaatgccaccctgatgcctcccgacttttaaataacacagagtcatcagattttacaaataaagagactaaggaagcaaagcgtggcgtgcttgtttatcactagccaaaggtgtgtgcctgtcccagtatgtcccaggcaggggccattgagtcacttagcattaagcagcaggacgggcctaataccgtcaagagccatgattaaagatgctttgtaaaacatttctgaaacagtgataattggcttgattactatttaggcctgtgtatattataaatgctcattaactttacttcaaatatcattgaagtggttatttaataacttttgagagtttttgctgacctgatcttaataaaatgctgtgttaataatggactttgctcagttctttggatataatttcagcgtcatcatttccctgtcatttttaatcagagaagctcttggcaattgggaagcttcatcaggaaatcatagtgtttcagaaataatcctaggaataattgccacttcctgagagcctgtacggctctgggaggagctattcattctctccat

SEQ ID NO: 110762 - DNA, 1037 bp, Homo sapiens
tgattcctctgtcttttcaagcggggtgcaggcagattcaagacctggagctctcgtctgtggaggtggatccctgtggagacgctcaggctgctgcggagggagcggtgcttggtctctatgaatacgatgacctaaagcaaaaaaagaagatggctgtgtcggcaaagctctatggaaggtgatggaagcaaattaggaggagggtggtgctccctggcgttctgacagcctggcttttgggatatgagctgcctgcttttcagcgccacccacagctgcgtggcttggctgtgacctccccattgcctcagccattttaataatgtggtcaaaattaagcccaagctctgctcctggctctcggcatatgtctgattcccccatgactccctgacccctccctgctctgattacaaggaagccataaccaggtagctcttacctgagagggaggaatgacatgacagacatatcccacaggtttcaacccagataatgttcattcatttacctggcacctgctggccttgtgctaaatgcaagcaccacacagatgaagagatcctctggatgcttggtccttgcccttgtgggctagtggggtccctgccatcaggaataaataagatgagaccttcagcagatggtgccaagcacagtgggggccctggcactggccaagggttggcagctgtggggagtgggggagagtgcgggctctgcagccagtcagcatgggcttaagtcctggcttcaccacttactcgttgggggaccttgctggttacgtggctgaaatctctgtgcttcattttctgcatttgtttactagagttgtaataccgatttcatggggtttgtatcatcatccaaaagagcacatcaagtagggggcatgtggcaggccttctaggccatctactgttactcacccacctctgtgctgccataggaagagccagggttgtgaaacacgtgcctgtatcctttctcttctaaagctggtcctgcttacgaatgggttggaatttgga

SEQ ID NO: 110763 - DNA, 1166 bp, Homo sapiens
gtagagacggggtttctacatgttggccaggctggtctcgaactcctgacctcaggtgatcccacccgtgatgggattacaggcgtgagccagcatgcccggcccaaaaagaaatttttaattagctgggtgtggcagcatgtacctgtaattccagctactcaggaggctgaggcggaaggatcacttgagcccaggagtttgaggctgcatacagtgagctctgatcataccactacactgcagcctgggtgagtgagacctttctcaaaaaaaaaaaaaaaaaaaaaaggtttagatgtctggaaggaaatttcaaaaataggttaacagttatccctaaaatgaaattattggtcaaattcagtaggttccttttttgcatttcctaataatttaagtgaattctggcctgaaaaacataaaaatatgttaagtatgtacaggaaagatttcctaagcttatctatttttgaaaatgaggaagccattaaatagggtacatgctaaggtttccatctgggtggcggaggagcccattttgcctggagagactgcacgtgacctgagggcttgtgtcttacaggtgccatggatgtagctttgggatcaggtgccactggggtctttaccaattcatcctggctctggaacaaactcttcgaggtaggaataatatttgtatatctaaattgtagagatggtgaataaattattctagccttagaaggatagacttcttcaaccctgtgttaaagtgatttttatgccgcaggtttgcctttgaattgaaaatgaaccacagcaatagattgagttcagtggcattgggttttccacaaatgctcctaaaggaggggatgatgccccctgctcccctccggtagcctcagcgtcctgtgaaaatatctcacgaacactgtggtcatagttttagaatccctgaggtagaaatggttttgaagatggctttgtggagcagcgtttgtgactgcgtgtcgtgagtcatataagggagttcaccctgcatcgatgaggatgtcttcagaccgctgtgctctgtgcctccctccatgcccttcacagccagcctcttcccagcagtcaccctcacttccacacacacacacacacacacacacacacaccctcacttactgccattg

SEQ ID NO: 110764 - DNA, 1669 bp, Homo sapiens
cctgtaattgtagtttgatgattttagcaaaatgccctacagatttgtgaaattgcttcacagcattcccggtttctttttattttttatttatttatttatttttgagacggagcctcgctctgtcgccaggctggagtgccgtggcactccgttggctccctgcaacctccccgtcctgggttcaagcaattctcctgcctcagcctccggagtagctgggactacaggcgcgcaccaccacgcccagctaattttttgcatttttagtagagacagcgtttcaccatgttggccaggatggtctcgatttcttgacctcgtgatccacccgcctcggcctcccaaagtgctgggattataggcgtgagccactgtccccagcctcctggtttcttttatagttctaaaataaatcttttaatgagtggacacaattctgaaacctattttctagtttcatgttttagagtaacaggttagaacaactcttccttcatgcattgagcatgttaatgccatgaatttcccacaacctgcctcatccactcttccacctgtcatacctgttctctaggccagcattgaaacaggggaccgtgtctggaggatgcctctcttcgaacattatacaagacaggttgtagattgccagcttgctgatgttaacaacattggaaaatacaggtatgtaagctaagctaaatgtacatttatacaatcatccttgattgccaaaatagctattttcaattttatccccttatataaaaggtttaactatttaatttccttttggtgtagtgcttgtaagatttttaatgtcttgaattttcaagtatttcttcaaccagatttcaaaatttgcatatttctaatctaatggtaattttcaataaatggtaagggaaagagatggaaaatatgggaattcattaccatagcaaaaaggaatatagaatttatcctttactgcttaaagcaatatctgaaaataaatattctgaaactgatatgtgggttagcatcttaataggtcttacaagcttgactcttgttctttggttatagaatgtacttagcaaaaatgtgggatctcagtgcacatttacatggggttgtaaagtgctttttgtctttctcttcagatctgcaggagcatgtacagctgcagcattcctgaaagaattcgtaactcatcctaagtgggcacatttagacatagcaggcgtgatgaccaacaaagatgaagttccctatctacggaaaggcatgactgggaggcccacaaggactctcattgagttcttacttcgtttcagtcaagacaatgcttagttcagatactcaaaaatgtcttcactctgtcttaaattggacagttgaacttaaaaggtttttgaataaatggatgaaaatcttttaacggagacaaaggatggtatttaaaaatgtagaacacaatgaaatttgtatgccttgatttttttttcatttcacacaaagatttataaaggtaaagttaatatcttacttgataaggatttttaagatactctataaatgattaaaatttttagaacttcctaatcacttttcagagtatatgtttttcattgagaagcaaaattgtaactcagatttgtgatgctaggaacatgagcaaact

SEQ ID NO: 110765 - DNA, 1974 bp, Homo sapiens
ttgaaatcctgacctcaagtgatccacccacctcggcctcccaaagtgctgggattacaggtgtgagccattgcacccagccaaaaatactattttttaagagcctttaggattttgtgatagtagataattgaatgtgaatatgctcattgtgaaaaattccaaaaatatgtacagaaatagttaagaagtggaagattcttactcttctccctcccatcacctagatagagctattcttaatactgacacacatttattctagaaaatttggaaaatacaaaatcccataaaaaataaaaatcacacataatccgcccagccatagatataaacaagtgggttttttttttccaatgaatatttttctgagcgtacaccagcccttaaataacctgtggttacctttaagaaaaacgaaaccaatggaattgtataatgcattaaaaccattagaaccaatttaccttcatggaaggggtcaaatatcccgggtgaggattgaaagagaaagaccgattccggtgggacatggcactggggaatgctgcgtagtgaaatcttctctcttcctagaaaaccaatacaactgagtctaaatgagcctaaccacacagcactgggtttgacttgaaggaagatggctgtgagggcagaatagagaaggaaagtccaggggaggaaggggaagtcagtgggaataaagctgccaggcactgaagcttttgaggaagcacctttgctttttttatgtccccagcccctcttgtaaagaaaagggcaagctgatgccttaggaaattgaaaattcaactgttcttagcatgtgaaggtaacctaatgcagaaagttagtaattaaggcaaagaaagaaaacccccaggtatgcaaaggattttgccgcctttcttcctctgtcttgtttgacatttgtgttgcctaacatatacaaacatagggagagtaatgaaatccatccccactttacctataataactatatggccgatcttgtttgtgtgtatcattttccacttttttctctcctgctgtattattactaaattccagttattacataatttttctctgtaaaaacatcagtatgtatttcttagaaataaggattactttaaaaaaaaaaaaacccatgatacctttgttcacacgtagcaaatgagcaataattccatatcaatgtcacctaattttcaaagcacagagagatacagaagtgaggcaggtgagcaggagcagaaatgaccagcaggccttggttggatactgaatcagagggagctgggttctttccaaggggcttagggagtggctttgctaagtagaaaacaggtggtcatttttacaaaaagaagatcaacaataaaaacactaattctactacaattcaaacctaagccattatagattttctcaaattctgtaagttaaaaaaccaatattaacatggggcaaatgctgttggacttgggagtaaagtgatttttttttgcctcctattttcctgtattaattttttagtgagtatgtcttctttaataatagaaaagaaaggagtttttctttgagacagtcttgctctgtcgcccagactggagtgcagtggcgctatgctggctcactgcaacctctgtctctcgggttcaagtgattctcctgcctcagccttcctagaagctggaattacagatgcccacaaccacacccagctaatttttgtatttttagtagagacagggtttcaacatggctaggctggtcccgaactcctgacctcaagtgatccacccgcctccgcctcccaaagtgctgggattacaggcttgagccaccgcgcacggcaagaaaggattctttgtaagatattagggcacctagagaaatgctgggtgcaagtgaacgcccctcccgggggagcccgcagtgcccggccaggtgcgtgggtgaggcgccccc

SEQ ID NO: 110766 - DNA, 1323 bp, Homo sapiens
gatgaggaagaggaagatggtggccttttaaattatttgtttacttttctcttaaaggtactatgaaaatgatagctttggggagggattttagaaaattttgccactttaaaagagtcgtgggagtttgtatgtttttgacaatgaaatatctagtgattgaaaaaacctgaatgagtctacctttcataggaaatattagaattatcattatgattaaaaagtggactttaactccagcattaaatttttaatgacctctttaaaccagttctcctttgtttattttaaatgagttctgtattttagaagcctctacaaagaggactatgtaacttagcaaagacttctttcagactgttcattttgagactgtataaaatatatatatttgctatacatatggaccaaggtagcattataggttctcttcaggaaatgaattgttgttgtaacttcttgcattccgaatgtatagagttcagataatattgattatttgggagtggtatgtgactatgaataaattttgatttgtttctgttttagtctcatgaagcaaacagcaatgcagtgagatttagagtgtgcctgctcataaacaagcttttgggaagtatgccagaaaatgctcagattgatgatgatgtgtttgataaaattaataaagccatgcttattagattgaaagataagattccaaatgtgagaatacaggcagttctggcgctttcacgacttcaggatcccaaggatgatgaatgcccagtggttaatggtgtgtgtagtttcctaaatcttttttcagatttgttgattttgttaaattctcagtatttgaaattttttattatggtctatacatttgaagagtataggtaattaatatatgattccgattaaacaaaaaaaacctaagtagcaaccacccagcttaaaaaaaaaagtcagtacttgcatcctatcccagttgcatccctgtccctcagaagtaactattaaatcctcagtttggggttaattagtctcttgcttaaattaaaaaaaatttttttgcataaatcacatatgtctatcttaatgttttcctgtcattttgtgtaaatcatgctgtatgtatatatttagcagccaattatatttctatataatacctgttactgtgttttgcccattttttcattgggtttttaatttaaaatactattttaaaaaattcatttgcattctttatatattttgaaaagaaatccttgggttatatgaattgtagatctcttcctgttttaggtggctcattggggtatcattgtttcactccct

SEQ ID NO: 110767 - DNA, 1246 bp, Homo sapiens
gtccgttgactaattcccccttgtgtctttagaagggaagttggtggcctgcgcagcagtgactcaggcctgtaatctcagcactttggctccaacctgggcaacatagtgagaccttgtctccaaaaaaaagaaaaagaaggaagttggtgggaaaaaaacttcaactaaaatatgtgagactaaaaaaatgacattactttctattacagatgggttctcactcgggctggattgcagaggtgtggcctcaaactcctgggcttaagtgatccttccacctcagcctcctaagtaactggaagcgccactaccatgcctagctaattttttattttaaaattattttgtagagacaggggtctttctatattgctcaggctggtcttgaactcttggcttcaagctctccacctaccttggcctcccaaagtgctggttataggcagtagccatcatgcccagcctatctttatcacattaaaggcattttaaaatatcaaaatgtgtgttattttatgactgtagttaaataaataatttcatcagtactaaaatgtattgctttatttttagcatatgctactttgattgaaaatgattcaaatccagaagttagacgggcagtgttatcatgtattgcaccatcagcaaagactttgccaaaaattgtagggcgcaccaaggatgtgaaagaggctgtcagaaagctggcttatcaggtaaataagttcaatgtcttgtgttggcatattcttaaaggacaaggagccattttcttaaagtgcctttgaaaaatacttggcatgtaataatttcttcagttgaggttttatggagaacacaggtaatttaggtagaatcttactgtattaagtatgttaccaggtattaatttcttttggagattctgggtaattttctaagatggtgatattcttatgaaatctataaattgtgttgaggttaatgaccatctttataaattatttttaaggttttagctgaaaaggttcatatgagagctatgtccattgctcagagagtaatgctccttcaacaaggtcttaatgacagatcaggtaagataaacaactttatatatacaaaactttagtagattttgaggtcagacttaacaaggtttaagaaacgagtgtcaaatcaggtcaagtaagcctgccagtcccatgaacctggtgaaatttatcttgatgtattatatagaaaacacagggctaaagat

SEQ ID NO: 110768 - DNA, 1404 bp, Homo sapiens
cagtgacttttgcagtatcatggtacttctttttttttacctttaatatgcttagttggctgggcgctatggctcacacctgtaatctcagcacttttggaggccgaggcaggcggatcacgaggtcaagagattgagaccatcctggccaacatggtgaaacaaaaattagctgggcgtggtggcgcatgcctgtagtcccagctactcgggaggctgaggcaggagaatcgcttgaatctggtaggtggaggttgcagtgaaccaagatcgtgccactgcactccagcctggtgacagagcgagactctgtctcaaaaaatatatatatacatgcttagttgtgcctcttaacctctactatttctattgtaaatactgactttgttaattaaaacagacaaaatacaagagatggaagctagagggagcctttgttcacctatgtttcaaatgactcaatagatgctgtgaaacaagctatgcagaagcatcttcttcaaggctggttacggttctctgaaggaaatatcttagagttgctccatcggttggatgtagaaaattcttctgaagtggcagtctctgttctcaatgccttgttttcaataactcctctcagtgaactggtgggactctgtaaaaacaatgatggcaggtacataaaggattcattctttgaaatgtagtactgattaacttgtgcaattaatttgttttttttcctccccatagcttaagattatattaatacctttaatcttaactctcttttgttttcttttagtctgatgaatatccttttatccttcctttttcccctcctggtgtaagaactcataactttatcatagactatctactttagctatgcttttccccccttcagtttcttactttgatttttgaattagcctaccatgagaaaatccagcaacatgcacccctagtatatgtttgcttatttggttcttttttgttctaagtttcttcattcctttttgtgtggatacattaatgactctaattaaaaggatagtgtagtggttttaaagcaaatcttattattctcatttttgtactcttcaattcttaatgataaaaagatcatgctttctctcacactctttcttttaaatgaaggaaattgattccagtggaaacattaactcctgaaattgctttgtattggtgtgccctttgtgaatatttgaaatcaaaaggagatgaaggtgaagaatttttagagcagattttgccagagcctgtagtatatgcagactatttattgaggtaaattttttttcttttagtttggagagtgattgtgttgctgcatgtgtcaatctcccagtccccttcctcaaagtcatgtttgattgtgaatatgttaaaaatcctttt

SEQ ID NO: 110769 - DNA, 1003 bp, Homo sapiens
attgttactgttggtgttaataacgatccagctgatgtaagaaagaaagaactcaaggtaagtctcttttaaatgaaagaagtgcttgagtgtaatgtagctgggcaagtctattctttcctcttgctgtgcagttctgaaatgtttctcacataatcaaattattgtttaattgttaaactataagaatatttaaaatgttaccacatatgtcagtctcagagatatgcagatctctgtgtcaggaaaactacaagtttgcatatgcctgactcattaaattctgggcagttgagatattaaataatactcctgagttgctacagatattcatattaacagtttttgttcagtgttgaaacaatttatatcttcccttagatggctgaaataaaagttaagcttatcgaagccaaagaagctttggaaaattgcattaccttacaggattttaatcgggcatcagaattaaaagaagaaataaaagcattagaagatgccagaataaaccttttgaaagagacagagcaacttgaaattaaagaagtccacatagagaaggtacaggtaacttttttcatactaaatctcaggtgttattaatcatctcaactaaatcttattttctctaacttctagaattgccaaaatatatttactttgagcactttgtaatagtgacatgaattaaaatgaaaaaagtttttccctgtttctatttttggactttgaaaggccttaattaactttaattattggaggtaggactttatttgcttccttgtcatgctaatctctagaatccgaagtctttcttaccagggaagctagctttccagtggttcacatctgagttttctgttttttgtcttgaatggtttaaaaaaggaaaatacatccattttcctcttatttgtggaggatcaatgacctttcttttttattgctagcaaaataatttctatggtaacgtgcatttttttaaagctaaattacttttgtg

SEQ ID NO: 110770 - DNA, 1160 bp, Homo sapiens
cgttttttaaaaaattagtttgttaaagtactctcttaaatggagtatgtctttccttctgaaagaaattttttgttaatggtatcgataccattctgtcttacaacaaatgataaatatgtaaacataagataggtatcaattaatatttgatattaactttaatttcttttgggatcttgccttttgtaatgaacatcatttattgttgtacttttgggatgtgctgattattctcataaaaagaatgctaaataggagactcttttatataggagagtttcatgagttatgtttctgatctctttagccatagacatcccaactccaacacccaccttcccagagtgtatgcctgaattttattttgatagctggtggcttcttttatttgacgaagtctgtgggccattataggctattaaatttggaaagcaaatttaaagcaaaaactgaaaatatcatctgaaaaatgacaaactttaggtcaaaattataaaattagcaaaagtagtctatcatggttaatatcgtctgtttaacttgacttgctttgaccatttatgtgtctatttgtcctgttcgagggctacaaatctgttaaaatgcaactacaacagagcataataaatgctatggtcagggaagtatagaggttttatggagaggtttctagtgctggtagagtattgttggcttccccagaggaagacatgttttatcctgagattagaataaaaataacaatataatctaacagtcagaggatactttttctgtggtagtcacagcattaattacttcacaaatgtgaattcattcttttcttcctataggcctatgaggttggtactattattatcttcattttacaaagggcaagtaacttgcccaaaatcacacagatagtaaatggtggaggcaggatttaaacccaagaagtggctctagacttgtgcttttaactcactctgtgctgtctctcctcaatgaattatggaaggaatgttgtagacagatggagcaacatctgtgatggtccagaagttaaagaatgcctattatgttttaaaacttcaggtccatgtgactagagaattgatggggagaagcaggagaaaaatctggggaaaaattaagggctaggtcatgtaaggctt

SEQ ID NO: 110771 - DNA, 1063 bp, Homo sapiens
tttttgaggtgataattaggcaagatgaagattagacttttttttttttttttttgagacaacgtctccctctgttgcccaggctggagtgcagtggcatgatctcagctcactgcaacctccacctcccgtgttcaagccattctcgtgcctcggcctcccaagtagctgggaccacaggtgtgcaccaccacactaatttttgtgtttttagtagagatgaagttttgccatgttgaccaggctggtcctaaattcctgaccttaagtgatttacctgccttggccccccaaagtgctaggattacaggcgtgagtcgttgcgcctggctgaagttgccaattttaaaatcctgcctctaccatttactatctgtgtgatagctgtaagatcacctacagagtctatatagagtgacagtatgccctacacaaagccctgagaaagcaaacatttaaaggatggggagaagatattactaatgctgaatattttgtcttcattttagaatgatgctgaaacattgcagaaatgtcttattttatgctatgaactgttgaagcagatgtccatttcaacaggcttaagtgcaaccatgaatggaatcatcgaatctttggtatgttgatggcctcttgggctttattttagtccactcctttcttattttgtaagtgatatgttctttagaaatcaaaataatgaaaagattactgtcttaaatatctgataagtataaatgataaaatatatatatatagcagctacttcatattgtgaggattaaataagatgtctgtaaaggacctgatatgtaaattacagtcttttacatattttaaaaaatgattttatactggaaagagatacagaatatcttcattttttgaatagtaagagaggagatactgaaacataccaagaatatttaagtactggaattgtgctacgtaatgagactgagacaatcacattttatgccctgggaaaggaatttatttattatatttaaagggcttttaaaataaccctttgtaggtaattcccatagggacacaagta

SEQ ID NO: 110772 - DNA, 1073 bp, Homo sapiens
atttcttattaaaatgtctttgtagaaaaagatgaaacgccaattatgtaagatattcttttaattattcacatagcaaatacttattgagtgcgtattatgtgccagcaactgttctagacttagaagaaataaagtaggtaggtagtgaataaaacaagataaaatgtgttgtcttaatggagcttacattctagaaggggaaacacacagtgaaaaataagtatacaatgtatcagatagagaaaaataaagcagagaaggggattaagcagtgggaaggaggagagggaactgtttggttgagaaagacctcactaataagttgacatttgagcaaataccagaaggaagtacaagagcgaaccacgtggttatttgggtttccaaggagaggcaagaataagggaataggcactggggtgtaggactttgggtgtgttcaaggaataagagaacacatggctaggaaagattgagcaaagggaagaataataggaaaaagggtttgctggcagcaggatgtccatgtcttctaggaccttatagactgtaaagatgtcagttttcactataaatgagatggaaaggaattcgagggctttgagtagaagattgttatgatctgactgggcataaagtggtgtagaccagggagggtttggcaaaccttttgtgtacagggccagagagtaaatatttttagatttttgtgggccatatgatctgtctgaactcctcagctttgcttttgtagtgtgaagacagctgtagataatacataaatgaattagtatggctgtagtccagtaaaactttatggacactgaaatttgaatttcatgtaattttcacatgtaatacatttttttaaaccatttgaaaatgcaaaacttcctaacttgcaggctatgcaaaaacaggtggttgaatggatttgagctgtttgcagatccctagtattaagtaggggtacaagtatggaagcagggatactaataaggagggtatttgataatctaggaaagcgatggcgatggtttggacgagggttgtggttactgaggttgtga

SEQ ID NO: 110773 - DNA, 1377 bp, Homo sapiens
tctggatcttaaaaaaataaaatcatagttgaaggcattgttgattcttttttaaataaaaggaacaaataatataattcagcctgactccaactccagaaatttttattgactgtgaagattaactttgtcttaaagtatatagctctattatatgttatggttcaaataaataaaaataacatttttttaaattgaaattttaactgtatttttgaaaagtgatgttttctttagactagacactgtcattaaaatttgactaagaaaaaaacaagatacatattaattttatgtaaacagaaacaaaacagtttactgaatttactttttttggtggggaatatcttgatttaggttttgcaaattgatgatgtcacaataaaaataagtgctttaaaggcaatctttgaccaactgatgacgttcgggattgaaccatttaaaactaaaaaaatcaaaacacttcattgtgaaggtacagaaataaacagtgatgatgagcaagaatcaaaagaagttgaagagactgctacagctaagaatgttctgaaactcctttctgatttcttagatagtgaggtaagaaataatccagtcctgtgattatgaaatgtcattttcagcatgtatttgtttattattattattttttaaatttattatagtttaagtcctgtgatacatgtgcagaacatacaggtttgttacataggtatacatgtgccatggtggtttgctgcacccatcaacccatctacattaggtatttctcctaacgctatccctcccctacccccctatcccctgataggtcccagtgtgtgatgttcctctcccctatgctctttatatcttatttttcctactggattttaaatttggatagacattttttattttactttttaaatatcttaattaaatcctaactttcactatcatacctaatttctcactatcaaattgtatatgcaaagaaatgaagtataaacaaaaatgaagtgattaaagtgggttgttattttttatttctttatgttgtatttgtgatatagagactctaagatttatccccaagacttttaagaaatagtttagaataattttatattgggtgggtagaagatgtaagatagggtatgggattggatctcttttaagtactcttgaactactatttttgtagcacacatgtaaaccaactgattaaaaattttttatactgattgtagtttttcattgagttagaagtgatataacaaaacttaattttatttttttgagatagggtcttgctctgtcatcaggctggagtgcagtggcgtgatcatagtccactgacccctcacctgctgggttcaagcaatcctcctg

SEQ ID NO: 110774 - DNA, 4213 bp, Homo sapiens
ataaatttcttctaatgaatgtcatctttgttaggtatctgaacttaggactggagctgcagaaggactagccaagctgatgttctctgggcttttggtcagcagcaggattctttctcgtcttattttgttatggtacaatcctgtgactgaagaggatgttcaacttcgacattgcctaggcgtgttcttccccgtgtttgcttatgcaagcaggtattgagtcatactgataaatcaaaaatctgacttgacatcaaattcaagtcccccatgaattatatctataatgatattttgttgttgatactttttctgtctttagtagataaatgatgaaatgacaagaacgatacagattttatctatctgaatttttggctctttcctagatgaaaatgcacttaatgagtgaatttcctacatagtagttttgaatttcatactttttctctcatcaaataatgttctgccaacatactttgaatttgtttctcaataggactaatcaggaatgctttgaagaagcttttcttccaaccctgcaaacactggccaatgcccctgcatcttctcctttagctgaaattgatatcacaaatgttgctgagttacttgtagatttgacaagaccaagtggattaaatcctcaggccaagacttcccaagattatcaggtgagtgactgtggtaactgcatgcagatcactgttttggtaaaataatctctctcaaagatcccttgaaatactgaggaactgcattttggtctttagacttctgtctcaagcatataccacaaagcacgaaagaaacatgaccttgggaaatgtggagaaatcatatgaaaacagaagtaatcaatgctaacatttttgctactgaaaagaaattactaaaaatccaccacccacaccatgcccacctagtactgactgttaatctgaagtaataacctatgttatctaggactcacagagtcttcaaatgttggcttacctgctatgcttctggcacaagaaaggagaattcaaagactagaactcacctcaagcttttttggcttttaattcaaagaagataaatcaattgcacactgactcacagactgaacttaagctgggttgttttaatcctttaatggcatttggtcaaacttgttaccatttttgaaatttaatgtattagtgatttcagatgctaacagattaagttgaaagtattactctattttatttgatatttagtgataagctactctgttcaattcatatgttgtatattattggaaagataagattacaaaggatattaggcaaaattaggtaagggtcagtaatagagctattaagcacttcatgacttgagacaagggcaagagtcatgtggtaggaatgatgagtacagcattagttttaaaactcattgaccaaaattcagttaggccttgttggtatttggggagtggtttgggtagaggaaggatgttttagtaaaggtgatatatgtagatggttatgcaaatattggggaactgtagaaagatgactttggctaaggatcctgaataggactgttagggcacaacactgggggtagattatagattgctttaaaggccaatgtagggaatttggagttggccttatgtgcaatggataattatgcagggcttatgatgaaagggttaatgtcatgaaaaccacttattggaaagattaatttggtggtcagtggtggttatatgagatgaattggtgagcagaaagaaaagaatattaataaagaaagcagctgaaaatctgtataattcgcttgtagaaaaagtactagaaagtaatagtagaaagaatagaaattgacctaataaagaattatgggtacaagaatctaaaagaaagagcttgagaggcaagggagatggaggagtccaggaaaactctaagtatgtgtaacagcagacttcaaaggagctgttgacatagtttaattggggagtactctcatgatcagtgtcttggaagagtaagggaaaagtagattggggcatagccctaagttcaactactgctatgcaaacaaaggccccagccaatcccatagggagttccggaactgggatgttcctttgagttgtccagaatggagacaagctgaaacactgtacttgtgcacgggccagtcattggatttggacaaatctttgggagaagaggtatgatcttggacaaggtccaccaaagtccaccattgtcagcctggatcagtactgcagctgggaacttttaccctccaaaacatgcagcaactgggggatgagtgcatctttcctaaagggagtggaactgggccctatatcacaacatccacaacaagaagtcaagaaggggagcttattttgggggtagggaggatgttaaatttggttttagacattttatatttgggattatggcaagaaaattagttggaaatatttgttagatgtgtaagactatataataatcataatcatcttcaatttacagagaattttctcttaattttttaggccttaacagtacatgacaatttggctatgaaaatttgcaatgagatcttaacaagtccgtgctcgccagaaattcgagtctatacaaaagccttgagttctttagaactcagtagccatcttgcaaaagatcttctggttctattgaatgagattctggaggtaaagtagtttctcattactctaaattagtttgtgtttatatttatacatgtagaatttacatggttgtattagattatacatatgttagcatattgtgacttatttgaagtattttcttcataaatttcatataatttagtgtttttaaacaacttgatatgtattggtactattttcaaagattagggaatgcggtgtttacaaaatgttaataatgttttcttttatagcaagtaaaagataggacatgtctgagagctttggagaaaatcaagattcagttagaaaaaggaaataaagaatttggtgaccaagctgaagcagcacaggatgccaccttgactacaactactttccaaaatgaagatggtaatcacatactgaacagaatatttataaggttctgtttttttttttccatctttactgagacatatttttttctactctaacatgtttggttggacatcagaaatgaatgaaattttttttctaattaatcctcttgggaaagagcattactgataaatgtttattctgcttttcaagtgttttttggcatgcatttctcaacatatgaccatctttttaagagttttgcttctttttccaatattcaaattttcgaaagggtgatttataacttttcactagctgctagaaggactttgtcatttcagttttataaaaactggtcttaaaaagacaatttaaaatatttcatgaggttatcttatttatattgttgtattattccctttaatagaaaagaataaagaagtatatatgactccactcaggggtgtaaaagcaacccaagcatcaaagtctactcagctaaagactaacagaggtagtgtgtggattgaccatctttatgataaaagttttaaattttatcttccaatgaaaaatacttgttttgcaagttttcttatctttgtttccttagggataaagattttttttaaaatgtctttggtatcctttctttttaattctttctgtggatgtcagtttttgccttgtgtctaaagattataaaatcagtgttgctcttggtgctttagattgaaagaagtatgatgcaaaagatattacaaaagacaatttgggttaaattaagatttggttaaatgatggttttatattagttatttgtgttctatccttcctgtaactaagcatttttaaaaaatccctgtagtatttttctgggctttgttttccttctattcccatcttatttcatattttcccaacttatttcccaagggctatccaacaataggggatctgttggcaaagtaaatgctgactattagggggtcacttggaaaaaaatctgaaattcaagatctttttattgttttattatttcctcattacaaaagcaatgcatgcttattacagaagaatcagaaagtacatccagacaaactactataaggaacactaataatcccacccatgagccaaccatgattttgattttag

SEQ ID NO: 110775 - DNA, 1057 bp, Homo sapiens
atataaaggttctagtttttacattgaaatatattttagaacacatttgaattggtcatgtatgttattttacaagaagccattattaccttactatgttttatcaccttccaagaaaaaaaaaagttgtttctttagcacctgtttatgcacctaacctacctttctaacccttaattttcatgagtctccacagactttgtgctatagcaataatagaggtacttcattataacacatttttcatatactgtcctcaaatacattgaactaaaatttgccttcttttaacttgcttgaaatttccttattttcccttactcattattagtgcttacaaaataaattaagttttaatcttgcttgggttcctttttctgtggcagtgataactggtaccaagatggctagaacaagtaggagatacatgtgttgaaaggattgttgtgttgaagacaaaggatttagttagcctagaaactagattaaaaacaaaaagcaactgataataaatcctgataatgaattatactatcttcaaggacagagaaaagtgacagtttcagctaggacgaacaggaggtgtcagactgctgaagccgactctgaaaggtatgtcatgcatgtctagaatatatggaggcctatcttcactttttatttctacaagtagaaaaaaactaattttcttgcgaatgagagagaatatataacaagatagtgaaaactataaatagctgtcttaggtatatagtctaaaattccatcatcaagagcatttgacttcttacggcgtgtttgcttttgcctattagctggcatggtctttagtactatctttaatatgttgtttcaatttttaattacatgatgtgactcctctttgatcttcagttagcaaactcttgattttgataatatttgggttctctacacttacatactgatagaataattctgtctataatttgggtatattgtgtggtagagtgttttatttttggcttctgtcagtcaagccactgttagagctgaaagttggtagctgtcttgtatt

SEQ ID NO: 110776 - DNA, 1019 bp, Homo sapiens
attgtgtgtattttcagtacatagttttacactgttgattaaatttgtcttttttggggggaaacttgttttttactatgtttttggaatttattgcttaaatcaagagagagaacttaatttttttgtcacttcttgagtttcaaagaaatctcttttggacagttatggtcctcgtttaattacaagcttcattacaagtttgtggctttttttcctgtataacaccaggttctgttatagtatataaaatcattagctagattttccctgattcactttgctagatagccaagtcagtgtttttttgacattgagattttagttttaagctaagtcaatggaatcaggctatcaattaaacactgatagaatgtgagtcagaaacaaaaaagttttatttataaataaactggttttaaagcttgtatctaaattcgtgtattttcaacatctatttagtgatcatgaagttccagaaccagaatcagaaatgaagatgagactaccaagacgagccaaaaccgcagcactagaaaaaagtaaacttaaccttgcccaatttctcaatgaagatctaagttaggaaagacgatggaggtggaatcctttaagattatgtccagttatttgctttaataaagaagaagttacccttgtcaaaatcagaacaaacctgatgtctttctgaagattttctgctgtgcgcttccacgttactttggcctgtattaaagcagtagagcagcatcagttattatagtccagaaaaagtgtgcatcagtcagtcacacagatttatcacaatctgaggtgggcctaggaatctcatttttaaatagtctctccaagtgattcttatgaactctttatgtttaaaatcatgtcattatggaaaacttacaagtgtaactagctagtagcttgcatttgagaagcttatgacttagatgggcagaatcaacaaagatgaaaccgcctgaggacacatttaacaagtaacatttctagggaaaatg

SEQ ID NO: 110777 - DNA, 2306 bp, Homo sapiens
aaacttgtactatatgaaattggtcctcttttctgcaatacccaacgaaacaccttttctctttattattcagaaatgtcctaacatggatctgtttgttttaataattgtgctttttttaggcttatcatctactagaggccatttacttaaggtgaaattttaagatggagctaaagtaagatcactggtttttagaaccaaattgctatacatatgtgcctcatagaacttataaaaggagtcaaagtttcaaagcaagatagttattaagcaaaaggaaaaatggtaatgatagaaagtcagttaaaaatagatgattgttcttcattctgtttgttggctctgtgttctcctgtgcttcagattccttatgtgttgttgttttaaagacaatttgcagggggttgggagaaggactgaaaaggtacattaagtgtgctgtaaggaaaagtcttagaaacataataagctaaaatcccattcacacatggccaggctatccaaaaagaaaggagccatgttctcatgtggtttaccataccaaagcttgctttctctggcatgggaaaaataaatttaagcaccaaacctttagtattctgagtattcagtttttagacatagtcatgtagccattgctgaaactgtgctttgcactattaaaggtagggaatgtcctgcttttaaaagtcatccctttaactttaaaataaaaggctaaggtacaataaaacagatgtaaatccatttaccatttttcattcaaaactggtaacttacagaaaccacatagtatttttctctatcaagaggcacagatttgctgaacagtaaacatgcaattgtgccattgctcttaaagcccacagacttagatttaaaatacagagaaagaactgataagctcacattttcctgtgaatgggaaacatgctacttgacaaaaagctatgatcaactttttttcttctgtacatatataacgttgaaggagatttacttctaagagatacctttgccttttctttcaccaatttgcttcgaggtagttggtatccacctgttttacaactgctcatgggtcaggttatcatcacaaatctttacaatactagctttataaatcacaatgtgttatatattaaaactttgtgcacagaaataaaactagggacaattacgtatttaaacttagggcataaaaaattcacataataccactaaaagagaaacatcaaaatccgtttacaaaattccacaatgatctgatgtaaaacatgtaaaaaaaacatataaagaatataatcaaaatgattaatgctaatgatttaatataaagacaaatcacaggactagaaatacttcaagatcaattgataaatgcttattgttcagaaggaatactgacatacaaaataaagatagtgcaagaagaactgcaatctatttctcttcgcttttgagattttggttatgaactgtacagctcgttagagatgctgttgtcaaattcagattccattcaatgggacgattaaggcacatcttaatggggctcaaagggcaacttgctgtattctcatcagacacattcagtttctcatcagttttcacttgtagcatgctggaagaaaaagtgtaaggcattttagttttactttaatttcaaagtaattatcaaccttgtaaaagaacatttagttgtagtagtgtttggacctctaaattttagcatacataaagcatttatcctgaaaatacaacagttttctctcccgcctacttactgaactaaatacaatgaataatgccatgtaacctgtgtaacttgagaagttacatatgactgaaaaagtaacattgcatatatggattacatcagtatacatcagaaattatttaaccttgtgagcctggtaggattcaacccttttaacttgcccttttgtggatcagaatgagagccactttgagaaaaaaaagggatcaacatttgttgaatgcctattacgttctagccaccttcacatgtattgtctcatctgaattttgcaaaagccaagtaaggttggtatgcttatcctcatagtaaacaataaaatcaagactctgagagttaagtacaaatatgcctgaggtcatacagtcacctgcctggaactggaatacagccctttctcttttccttatgcttgtctactaagctctctgatgaggctggaaaaacatcaggaattaaacttatggccagctcatcagaggagcatgcggcatccacaggatactctggttgttttttctgt

SEQ ID NO: 110778 - DNA, 1004 bp, Homo sapiens
acaacaggctttttataaatgtttattgaatttttgagtaattactgtgtatttagcactgtgcttatcttcacagagaaaagaatgttaccatcctttccttctgatctagagggggttatcagactattagacatgaaacaatagtggagaaccccaaatagttcacaatccaatgcaatgttttactgagagcaagttcagagatgtgagattggattaggcatgggtaaaggtttggttaagcagagtggtgagcaaggttccctatgtgggaacatttaggaacagacaggactgtgctcatgaacttgtggaataagacaccagtccagaacagagggtgtatattaaagaataatgttgaagagatctgaccaacctaatgtaaagccaaataagccaactttcccatcaatgtaaaaaattcttggaaatttttttcaacagaaaaaacaaccagagtatcctgtggatgccgcatgctcctctgatgagctggccataagtttaattcctgatgtttttccagcctcatcagagagcttagtagacaagcataaggaaaagagaaagggctgtattccagttccaggcaggtgactgtatgacctcaggcatatttgtacttaactctcagagtcttgattttattgtttactatgaggataagcataccaaccttacttggcttttgcaaaattcagatgagacaatacatgtgaaggtggctagaacgtaataggcattcaacaaatgttgatcccttttttttctcaaagtggctctcattctgatccacaaaagggcaagttaaaagggttgaatcctaccaggctcacaaggttaaataatttctgatgtatactgatgtaatccatatatgcaatgttactttttcagtcatatgtaacttctcaagttacacaggttacatggcattattcattgtatttagttcagtaagtaggcgggagagaaaactgttgtattttcaggataaa

SEQ ID NO: 110779 - DNA, 1679 bp, Homo sapiens
ctctatacaaatacaaagccttagttttgccgcatgttttggtgaaaagagaaagaagtgggaggagaagtgcttatcataagtaaggcctcttctctatcaaactaggaaactaatgcaggtgagggttgaacaagggcaagaggaatctgaaatggttacgtaggcatctaagcctattttcaatactttggtaatcccatggaccccaagatagagtccatctccaccatctgaatggaagtttacagagtatgtgcatttgcaaagtgtgaaagatggaaatcttttgggagtcatagaaatccaaataattatttgtgatttaaattaatgattattgataagtctaatcttcacaaaagtaaaattgtatctagctctaataatttaaacttgcattactggagatatgcaatgttcatttctgtcatagggacaataaacttgaatgttacctagccgactcttacaggaatcaaattttggtgcaaccaagacaggtctgaaaatatcacttacagaacagtagctacgtaccaggcagtgtgctaaaagcttgatttttttttttttttttttttttaacaatacaacattcagtcctaacaactattcactgaagctcacagaagtaaaatgacttacccaagccacataactagtaaatggaagtctccagggcctatgatctatcaccttgtactgcatactaactcttggattgttctaattctgtcatgattctccatgttaatacccatttttctattcttcagaaggcttaacatgtgagattagtggacaagtgtatggtttataggtttcaaacagaaagatatgcctaaggctatagttgtaaccccatccaggagagttaaatatttaatgcatgaagtttcctcatggcattaactaaataagtagcagctactcatatccttcaattcctgaaagaggagaataatgttcgggcatagactgacatgtttttgagagctaacagagtattctttaggtcaagagtttcagggaacaccaagttcatcttttcaaagggagaagtcagctgtatcacagataaactgggctctggtacaggatttggacttggaatagttaatgtacttgacactgtcaaatctgaactcatctatttaactccaaattctggatgacagcttactttcttctggaatggtgtcttctaaatattactagagtaaaaatttactgactagctattacagctcagctctgtcctgcaaattgatgtctccacaaatctatccaaatatcacgataggtttgttaagtgcacgaacctagatgagagaaccttcatgaaggtcacttatcctttcttctaaccctcaagcagtacttacttaacatattaggagtatttaaaaaaagtgatggtatctatctttcaggggtttgcggcttggtaaggaggcagagtgagaaagtattcataaattaccagaataaaacagcagcatgcaataaatataaaggagtaactaaggactaagggattacagagaagggaaagattaatcccagcagagcagggagacaaggggaagaaatatttgataacggtctttagggataaggatgttggtaagctggggcagaaggaagatttgtagagctcgagttctgatcctgag

SEQ ID NO: 110780 - DNA, 1414 bp, Homo sapiens
gttcaatgcagaaacaaatcatacacatatttgccatattttatccccagtgaaaacacggatatctttgattgtcttatgttttgctaatagtactaacattaactcacatttattgtgtccttattatgtgtccagtcaaaatgccaggcattttatgtgcattctattctctgtgccaagtgctttacataaattcttttaacaatcccattacccataaaaggtagtgactttcattatcttcactgaagcttagaaagattaagaaatgtgcatttagctggccagtgattggactcaggatcagaactcgagctctacaaatcttccttctgccccagcttaccaacatccttatccctaaagaccgttatcaaatatttcttccccttgtctccctgctctgctgggattaatctttcccttctctgtaatcccttagtccttagttactcctttatatttattgcatgctgctgttttattctggtaatttatgaatactttctcactctgcctccttaccaagccgcaaacccctgaaagatagataccatcactttttttaaatactcctaatatgttaagtaagtactgcttgagggttagaagaaaggataagtgaccttcatgaaggttctctcatctaggttcgtgcacttaacaaacctatcgtgatatttggatagatttgtggagacatcaatttgcaggacagagctgagctgtaatagctagtcagtaaatttttactctagtaatatttagaagacaccattccagaagaaagtaagctgtcatccagaatttggagttaaatagatgagttcagatttgacagtgtcaagtacattaactattccaagtccaaatcctgtaccagagcccagtttatctgtgatacagctgacttctccctttgaaaagatgaacttggtgttccctgaaactcttgacctaaagaatactctgttagctctcaaaaacatgtcagtctatgcccgaacattattctcctctttcaggaattgaaggatatgagtagctgctacttatttagttaatgccatgaggaaacttcatgcattaaatatttaactctcctggatggggttacaactatagccttaggcatatctttctgtttgaaacctataaaccatacacttgtccactaatctcacatgttaagccttctgaagaatagaaaaatgggtattaacatggagaatcatgacagaattagaacaatccaagagttagtatgcagtacaaggtgatagatcataggccctggagacttccatttactagttatgtggcttgggtaagtcattttacttctgtgagcttcagtgaatagttgttaggactgaatgttgtattgttaaaaaaaaaaaaaaaaaaaaaa

SEQ ID NO: 110781 - DNA, 2777 bp, Homo sapiens
ttttttcctctccttattttaattctgcatattactatttctgtgtttttaagttcactaatcatttctttggcattgtttaatctgctattaataccatctaggatattttttatttcgtaagtggtatgtcaactctggaagttcaaattcagtattctttatatctaccatatttgtccacgtcgtgctcatgctttcttcaacttcttgaacttatgaagtgtatttaaaatatctccattaacatcctcatgtaccaatttcacaatctgtgttatttatttatctatttctttaatgacttttccccttattatggatcatatatgttttttgcatgcatgcatgcatggtaattttcagtgggatgccagacattgtgaattttatattattgtgagctgggatttttgcaatgttaaatgttcttgggctctgttctgggacactgttaacttattgagaaatatcttgattctttcatgtcttaagcattgttggccagagccagaacaccctttaatctcagacagtagtttacaaccagggatgattttgtctcagaggatatttgggcatatacagagacattttgtgctcttacatttagaaggtgctattggcatctagtggataaagtctagggattctactaaaaattctacaatgtctagcacagccccccaaaacaaagaattatctggtcccaaatgtagggatgctactaaaaattctacagtgtctagcacagccccccaaaacaattatctggtcccaaatgttagtgaagctgatgttaagaagccctgtggtagggctaagttgacctcactatagaggcaatccagtacccacctgcggactttaccaaatgctccatgtgtcagaaggtcaattatatccagctatatatagcctccagaaaattattacctggttcttttcattgattcttttcacagacttgggaaatacttatccactgatcagtatttatctttaacccaaggaaaatcctctgcagatctgtctgtctccttctctctcctttctccccccacccccatgtctctcctatactctaacccacagattctagtcacctgggacttcgtgaactccagtcactgtctccccaactcaggaatatttccaagctctgttggggttctctccgtatcatgcagcctgaaaactctccaggcagtaagccacgtatctggtccctgctaccctgttacttcatcatggccagaagcagaaatcatattttttctttcagcaaatatttgtccagtttctatgtgccgagtactgcagataaaatgctgaacaagaacaacgaggatctctattctcaccagtctgtattttagtaagagagaaaaacaaacatagaaaacaaagcagtgataaattgtgttaatgaaattggatgatagaaaggagtttctagggggagctactttaggttgagttgtctgggaaatcctttctgaataagtaatgcataacctatgaatggagttgagacatctaggctatcattgatgactgaaactgtgagtagggatgaggacccccaaagagactgtgtagaataaaggagaaaagaaagactaggactcatccttgagaaattcgaacttttattatccaagtaaagtaggatgacttgggatggaagaggcaaaaggaaagtgtgttttgtctcaaaagccaaaagaaattagtttcatgaaagagggtgctttagtctccttgggctaccacaacaaaataacatagatggcatggcttaaaccacagaaaattattttctcaaagttttggaggctggaaggtccaagatcaaggtccagcaggtttggtttgcaagctgatagatagcttgcagatagccaccttcttgctgtgtcctcacatggcagagaggaccctctggtaccccttcctcctcttacaggaacaccagcgtcatcagattagagcttcactcttacgaccttaattacctcctaaaggtcctatccccaaatacagtcaccttcagggttagagcttcgacatatgaatttaggagaaactcaagtccatagcagaagaaatggtcagcaatattgaatgctgccaagggggcaaaaactaaaattcattggaattatcaatgtgtcattcatggctttactaagtgctattttaatggagtaaaagcactagaagccatactggaatcgtttaaggaatgaggagctaaggaaatcgtgatagcaagtataagataactgcttaaagtaatctagttataaaactgttatcttgaggaaaacgaaagattgagtaaagtcttattttttaaagaatgagagaccttgtacttttttaagcatcatggtgaggatccaattgagaagaggtggtttatttattgccacaataatgctatattacaaactaccccaacatttattagcttaaataaatgagcagtttttatttcattcatgagtctgtggttggcagataggctaggatgttcttctgatcttggctgggctccctcatatgtcctggtgttagctgactgacaggtgggacatttatctctgctccatgtgtccctcacactaactcagcaggtttgcccaagcaatttttctcaagcttcagcttccatcatatttgctaagatcctgttggccagagcaaatcacgtgggtaaggcagaatgggaagacactgcaaaattatagggcaaagaaagtaaatttaag

SEQ ID NO: 110782 - DNA, 1034 bp, Homo sapiens
gagacaaaacacactttccttttgcctcttccatcccaagtcatcctactttacttggataataaaagttcgaatttctcaaggatgagtcctagtctttcttttctcctttattctacacagtctctttgggggtcctcatccctactcacagtttcagtcatcaatgatagcctagatgtctcaactccattcataggttatgcattacttattcagaaaggatttcccagacaactcaacctaaagtagctccccctagaaactcctttctatcatccaatttcattaacacaatttatcactgctttgttttctatgtttgtttttctctcttactaaaatacagactggtgagaatagagatcctcgttgttcttgttcagcattttatctgcagtactcggcacatagaaactggacaaatatttgctgaaagaaaaaatatgatttctgcttctggccatgatgaagtaacagggtagcagggaccagatacgtggcttactgcctggagagttttcaggctgcatgatacggagagaaccccaacagagcttggaaatattcctgagttggggagacagtgactggagttcacgaagtcccaggtgactagaatctgtgggttagagtataggagagacatgggggtggggggagaaaggagagagaaggagacagacagatctgcagaggattttccttgggttaaagataaatactgatcagtggataagtatttcccaagtctgtgaaaagaatcaatgaaaagaaccaggtaataattttctggaggctatatatagctggatataattgaccttctgacacatggagcatttggtaaagtccgcaggtgggtactggattgcctctatagtgaggtcaacttagccctaccacagggcttcttaacatcagcttcactaacatttgggaccagataattgttttggggggctgtgctagacactgtagaatttttagtagcatccctacatttgggaccagataattctttgttttggggg

SEQ ID NO: 110783 - DNA, 1437 bp, Homo sapiens
ttcacaatgtctggcatcccactgaaaattaccatgcatgcatgcatgcaaaaaacatatatgatccataataaggggaaaagtcattaaagaaatagataaataaataacacagattgtgaaattggtacatgaggatgttaatggagatattttaaatacacttcataagttcaagaagttgaagaaagcatgagcacgacgtggacaaatatggtagatataaagaatactgaatttgaacttccagagttgacataccacttacgaaataaaaaatatcctagatggtattaatagcagattaaacaatgccaaagaaatgattagtgaacttaaaaacacagaaatagtaatatgcagaattaaaataaggagaggaaaaaaaaaaactaaacaaaagtgaatcgcgtatcagtgacctgtgggataaatacatgtgatttatattccagaaggagaggagagaggagagggacagaaatacatttaaagaaattggccaggtgcagtggcttatgcctgtaatcccagctctttgagaggccgaggcaggtggatcacctgaggtcaggagttcgagaccagcctaacgtggagaaaccctgtctttactaaaaaaaaaaaaatacaaaattagccaggcatggtggggcatgcctgtaatcccagctacttgggaggctgaggcaggagaattgcttgaaccagggaggtggaggttgcggtgagccaagatcgcgccattgccctccagcctaggcaacaagagtgaaactccatctcaaataataataataataataataataatagctaaaaaatgtctaaatgtgattaaaaatataaactgacatattcaaagagttcaacaaactccaagcagagaaaacataaaggcaaccatgccaagccctttcataatcaaactgttgataaccagtgataaagagaaaatcttaaaagcatctggtggaaaaaagaacatacagaggagcaaatataagaatgccatacccatcttctgaaacaatacaagcaagaagcaagtagaacaatatctgtaaagtacagtctctggcttaggatgatttaacttagagtttttcaactttacagtggtgtgaaagtgataggcatttagcagaaaccatgctttgagtacccatacaaccattttgtttttcaatgtcagtattccgtaagttacatgagatagtcaacattttattgtaaaataggctttgtgtttaacggttttgcctagctgtagggtaatgtaaatgttctgagaatatttagggtaggtgaggctaggctacgatgttagataggttaagtgtattaaatgaacttttgacttacagtattttcaacttacaagggtttattgggaagcagccccatcataagttgaggagcatcagtactaagaga

SEQ ID NO: 110784 - DNA, 1044 bp, Homo sapiens
gcccaggctggtcttgaattcctgggctcaagtaatcttcctgcctcagcctcccaaagtgttggaattacaggcgtgagtactgcgcccagccaacatgtctctaaataatccatgggctaaagaaaaaatcacaagagaaattagaaaatattttgaatttaattaaaatgaaaacacagcagagcaaaatttgtgatatagctgaagaagtgtttaaagggaaacttataacattatgttcatattagtaaataatcttccttctaccactataacacttacactctattaccagtggttctcaaagtgtacttccaggtccagaagcataagcataagtatcacttgggccccaccccatactcaatcaaactctgtaggtggatccgcacaatcattttaacaagacttgctggtgattctgatgcacactaaagtttgtgaatcacaatggtctaagtgtggttaggtgtcttgccctacacccttccttcttcacaatgcaaccagggagatcttctagaaagcaaaatctgattatgtcatatcttccctgtccacttccaatttaaatctccgccctaagtgcaatggggagccactgaaagtagacaaacttcttggcatggctcataagaacttgtatagtctgttcctttgcttccttctcaatcctccctacatctgacatcatctccttctttcttgactagacacactggccatgacttacacctctaacctgccaagaatcccacacctcagcattttttccacatccaaatccttcttcctaccctactggttctccaccacttggcctagttaattcctcctcacccttcacagcttagcttaatggccatttgctcagggaactcttccttcacttggtaaaacctcccaaaattaaattcctatagcaccacatactgagaatgtaacagatttgtgtatttactcaatgtctgcctctccaaataaacttgaaccgtgagggtaggaaccatatctggttttgcccccactattttgcatgtg

SEQ ID NO: 110785 - DNA, 1115 bp, Homo sapiens
tacctggcactttgcagaaaagtttgccgactctgttcgtatcactacaattttgatatggtgtggcttgaaaaaaataaaaaataagttgttggcttttaaaaaatatattaaggtcatcctatcttgttcgtccccaacaccccatccacttcttcctcaacactcgctccctcaacacaatacaatgtatttgacatgttagctgttctgttttgtttgatctttacgggtcaatatctgtctttatccagcagagtggtgctgggggagccatgaacaccagttgtattctgttttgtaaatctttattctctccctgcagcctccagacctgctttctctatctgaggtaagttcaagggtcacccttttcttctttaaccagctgctaccacctgctagaaggagattggtttcaatgcctcacaccatgataaattcctgcctcaaggtctaaatgttctctttctccttttttcttccttctttatttcttaagaattcaaaattcttagttcagctctcctaactaccattttttcttctcgtttttcctgggcagtaacagttttcttgtcatggagctgagcattctgtgattatcgtaacgttaagcctagtgaattcacctatagtttaattacaaacaaaaaaggcaagggtaggtgtctgaatgatttcatcttgccacttttttttttcttgtttgtgtttgttttatttaaaccagaccttggcttctttttccttctcccagttccaggcaacctggaaaatgcatttatttgctactttttttctgtgttatgcaaacatagaaagctagattttaaaagcctgtacctataaactctttttatttattcaaaagtgtttgtcttctgcgtgctaggcagtatgttagacacatgcaaaatagtgggggcaaaaccagatatggttcctaccctcacggttcaagtttatttggagaggcagacattgagtaaatacacaaatctgttacattctcagtatgtggtgctataggaatttaattttgggaggttttaccaagtgaaggaagagttccctgagcaaatggccattaagctaagctgtgaagggtgagg

SEQ ID NO: 110786 - DNA, 1041 bp, Homo sapiens
agaagacaaacacttttgaataaataaaaagagtttataggtacaggcttttaaaatctagctttctatgtttgcataacacagaaaaaaagtagcaaataaatgcattttccaggttgcctggaactgggagaaggaaaaagaagccaaggtctggtttaaataaaacaaacacaaacaagaaaaaaaaaagtggcaagatgaaatcattcagacacctacccttgccttttttgtttgtaattaaactataggtgaattcactaggcttaacgttacgataatcacagaatgctcagctccatgacaagaaaactgttactgcccaggaaaaacgagaagaaaaaatggtagttaggagagctgaactaagaattttgaattcttaagaaataaagaaggaagaaaaaaggagaaagagaacatttagaccttgaggcaggaatttatcatggtgtgaggcattgaaaccaatctccttctagcaggtggtagcagctggttaaagaagaaaagggtgacccttgaacttacctcagatagagaaagcaggtctggaggctgcagggagagaataaagatttacaaaacagaatacaactggtgttcatggctcccccagcaccactctgctggataaagacagatattgacccgtaaagatcaaacaaaacagaacagctaacatgtcaaatacattgtattgtgttgagggagcgagtgttgaggaagaagtggatggggtgttggggacgaacaagataggatgaccttaatatattttttaaaagccaacaacttattttttatttttttcaagccacaccatatcaaaattgtagtgatacgaacagagtcggcaaacttttctgcaaagtgccaggtagtaaatattttagactctgtaggctttatggtgtcttgttgcaactattcagcttctgcagcacaaaaatagcaataggcaatatacgagtgaatgaacatggcagtgttccaataaaactttatttacaaaataggccatgggccagacttccc

SEQ ID NO: 110787 - DNA, 1837 bp, Homo sapiens
aaaacaatgaagctactgagggaagcatagcccatattgtgaggtcagcatcaaataatgaaacaaaaaatgttttaagccctaatagtagcagtaattgaaaagaatagatttgagatctataaagtaaaatcaatgtcttaaagattagaagaaaaaagggagaacatccaggtttttgccttgaacatctgggtagaggatagtaagatctactaagatagaatgctctttagatgtgagaaatttgaggtgttcagtgggatatccaagaaaggatgttaggaagcagttatggatatgcttcctaaacatacggatctgtttcccaagaaaaaggcctgagctgaaataaggatttgtgaatcaacaaataactgaaaccatgagagtggaagagattacaatgagattactcattgtaagattgaaagagcctagggagtcggagcctcaaagatttaggaaaaaggaaggatgtatacaaaaggagacagatgacagtagttgagaggtaagaggaaagcctggagaatgtggtgaatggaaatgtgttgtaagaagggagaaggcaatgtaaactgttgataagaagtcaactaagatgagccctgaaacggttccattgaatatagcaacaagagtttatcttagttgttgggaaagagtagctttggtggactaacagagccacaagtcatattcaaggctagatgagttaaatgaaggaagagaaagaaaattagcacagaaaactataattgaccatgaatggagagaatatacaaaggttagctagattaagctggggttgaagacaggtttaaaagatatatatttacatgctaatggaaaaaagccaatagggaataaacaattgaagataaagaaatgagatggcaaccaatggaaatggagtgaagcccctgtgtagattattgggtataggatctaggacatggttagagagattggtcttagccaaaagggtcacttttctctaaaaaaaaaaaaaaaaaaaggtagtgggaacaatatgtgggaaggcaaatcggtaatttgtgggcagaatcctgagatattagagtccattttctgtgaatcaagaggtaatcaagagtagtatgtgggattgggtaattggggaatatggacaaggtttgaaatagctgtctcaagaaatataggatagaacaactggttttatctcagctgccagaatgtaagcctggagaaaggtgggcccttagatttagtaatagtcaagttcaccacgtggggatgacaggacaaagagatcgagccaagaatatatctgttctgtgaatagtgagaagctatatgatcaaagcagagttctagagaatcttttctaatagtagcacaaatatagatccagggggtggaggatgggaaatgtgatgtgtgaaaggtcagttgcaggagatgatttttgagatggtaatggcctaaaaatggagtgcgactgttggaaataatatagacctttttaatgtcagtatcttttgagttcccaaagcaggtgtatatcttttcctaattgataaacatctcgatataaataagctgactctggacacctctgagtaaacttttaagaatcaaataacctaatgtggtcttgaagctcctgtaataatagtagccatcctaaaacattaaattttcccataaaaattttgaattcagttgacactttgaatcgaattctgagatgactgaaaaaaaaaagtttgtcagcttcttctattttgccatctgtcgtcaaaaataactgaatttacatttttcccattcagaattctggttttcacac

SEQ ID NO: 110788 - DNA, 1116 bp, Homo sapiens
aaaatcatctcctgcaactgacctttcacacatcacatttcccatcctccaccccctggatctatatttgtgctactattagaaaagattctctagaactctgctttgatcatatagcttctcactattcacagaacagatatattcttggctcgatctctttgtcctgtcatccccacgtggtgaacttgactattactaaatctaagggcccacctttctccaggcttacattctggcagctgagataaaaccagttgttctatcctatatttcttgagacagctatttcaaaccttgtccatattccccaattacccaatcccacatactactcttgattacctcttgattcacagaaaatggactctaatatctcaggattctgcccacaaattaccgatttgccttcccacatattgttcccactacctttttttttttttttttttagagaaaagtgacccttttggctaagaccaatctctctaaccatgtcctagatcctatacccaataatctacacaggggcttcactccatttccattggttgccatctcatttctttatcttcaattgtttattccctattggcttttttccattagcatgtaaatatatatcttttaaacctgtcttcaaccccagcttaatctagctaacctttgtatattctctccattcatggtcaattatagttttctgtgctaattttctttctcttccttcatttaactcatctagccttgaatatgacttgtggctctgttagtccaccaaagctactctttcccaacaactaagataaactcttgttgctatattcaatggaaccgtttcagggctcatcttagttgacttcttatcaacagtttacattgccttctcccttcttacaacacatttccattcaccacattctccaggctttcctcttacctctcaactactgtcatctgtctccttttgtatacatccttcctttttcctaaatctttgaggctccgactccctaggctctttcaatcttacaatgagtaatctcattgtaatctcttccactctcatggtttcagttatttgttgattcacaaatccttatttcagctcaggcc

SEQ ID NO: 110789 - DNA, 1085 bp, Homo sapiens
tgttagtgttagtgtattttatgtgtggcccaagacaattcttccagtgtggccgagggaagccaaaatattagacacccctgctaaaacctagtaaaaataatataggaacactatagttgccagtgtagccatttccagctcttcttattgataagtactggacaatgagggatattgaggagtatggaagtacttattgattacttgcttaacatgaaagaaattttacatttggaaatttaaagatattatatagttgcatcattatatattttaggggtgtttttgggggggttggggaagtattggctttatttttactactctttttaaaacttgtttaaaagctaaaataggtagtatcaggtcttatattaaaatagtaaaagcagtaaattcttgatttttaataagttaatgattttatgacccccaagattcagttattcaactatataactttaaaacctatttcagaaagtagtgattaaaatttcaaatatctaacatgcaatgattaaaattttaaaggttggccaaagtagattctccattataaacgatgaatcaaaactttaaaaagtgccctgtttcttgttcttaggataactaaaaatatcaaatgccatgtcaggaaaaagagaggcaaaaaaacctgatagtggttttttttttattataattcatctgaaaatatacacacataattcttaaagactgtcatgaatggagaataaaatgtaaagcttcatttttaattctttatatcatcctcatatcatgctgttacagttaaccagaagtaaatgcattaattcattttacaacagaaccgtattttgtccttttagcttcttaatcattgtatcttcctaagaaataaatatcaagcttattttaatgtgattatttacccccactaaatatgaaatcatcctagaaaaaataagatggaagatgcctagtgactactttttcaaattaatttcaaaatccttttgggcagttttaaaatttttagtatcatttgaagagctgtttttgatctttctcatttttaaaattactaatactatttcctg

SEQ ID NO: 110790 - DNA, 2354 bp, Homo sapiens
tccatcttttaaaagaaaaccaggtagaccaaaaaaaataggtccccaagttgtgaaacagattaagcgaccaattggaagaccaccaaagcctaaaattgatcaaacaaacatcactgtttgccagaatgagccctttagtgctggaaggaaaagcccagaatgtctcatatcagaagtaaaagaaggtatttataaaaagagtattacagtaactgttatttacggaaggtcaagaagaactaaaaggcatgtttctgaaggaagggtaaacataagcaaccttatgtctttaaacaataatgctggtgattttccaactgaatataatagtcccagaaatattagtgaagacaaaattgacttgggtgaaagaataagtgctgtagcaagcttgactactgaaagtgagatcttggggtctggctttgaatatgtgagacccatcaagaacaaatctgtgatacctcagccttccaagaacattattcgaccaaatcagaagcctttggcaataagtaggaagcctggtagaccggcaaaagtgaaaatctctggcatatctgtgactattaatagaacttcacctcaggaaagagaagtaagtattagcagctgcttgcctcctttagaacaggataatacgtcaggaaaaaatctgcctgaagaaaagtatgaccaacagtgcactcaaatggataaaataaggcacactgaagctgatatatttaaaaatggatcaaaacgtatgattgctactgtacctttgagacattctattagggatagaaaaccatctctgcatttcttacattcattagcatcttctagctcacttatttatagaaacgctctgctccataaatcatataaactgcatttgcagaaaaataaaagtcagaaggaaaaacataggcactcaaagatgaaaatagcttacaaagataccccaagaaacagactttcgcggaatgcaaaaaagtgtttggaagataataaattagtacctatttctgaagtatccttggatcctataatttcatcaaaccctttgctcaggtggtgggctacttctgcttcaaatgattccttattagaggaattaaacaatagatttgagcaaataacaaatgcttgggtgcaagtaagtggagatgaagctgaaaattgtattcataaaaaaagagaacacattgaaaatgatcatttcaaagtagcaagccctttggaaacttgtcttttagaacttgaagtttcacctgtaaaaatgctttttcagaaaaagtatgatttgaatgaactctgtacttggtttatgcaaacaacagaaacacagtctctttcactagttagaaaagcaaatgcccgaaaccctttggaagtaataaataccaggggaatcaaattagggaccaaatattctgactttaatgccagccccttcagaaagcactttaaaaaatttgcactctcttctccttcaaaatcagcagagaaattgcatatactgcataaagtggctaactctccactcttaaatgtgaaaagtaatttagcaatagctagattaaaaaggactgagtttaagaggttgcatcatgaaaggtggaaaagagagggaaagctgcacaaccatggaacagttgactggaactctaaaaggagaaacttaagatttttctgccagaaccaatttttaaataagactgagggagaaacaaatgctgacatcccactccaaggaaaaagcatagtagataatcagtgtgttttgccacctgagatcaggggtgacttgcagcagagggtagtaatgcctgacttcaaaatacatgctagttttgagaataaatttaagtcagaagcaaaagagaatggaacaaattgcagccaaaaagactttcaaaagggaccaagactagaaaatgtatgtcctaatagttggaggtcaaaaaccttaaaagactgtagaatatttttgaggaagctcaactgtcttgaacacagaaatacttttaagctaaatacaatcatttactctcctgaatctactgacagtggaaatactcatcagactcatatggaagaatcaaagcgctttactttaagatctcattctgctaggcaaaattcttttaaaaagcaatctaaagaaatagaaaatgctaacacaaataatccttcagctgatgaatttgctgaccatcttggcaatagtaaattaagcaaatgtgttaactttgacaagaatcctgatagttttgaagttcttagcaatttgaacaaaagaaaaagaccaccatggaagatcacagaaatgtcaacaaaaagacataaacgacagtcttgcaaca

SEQ ID NO: 110791 - DNA, 2207 bp, Homo sapiens
aactccttctgaagcactttccattaaatattcttaatacattaaaaacagacaatatataaatgtaatcatatgtataatcatcagcttttatattgcaaaaatagggctttgctttgacttatactttgtcataggaaattaattatcagtgcttcattatatttttgctaaacaataatcaaaatgccattattgcagctctctaggagtcaggagtccagcaataccaaaatatcttttttcaaacactgttaaaattataactccttatagtggtatttttgctgcaattcattttttgtttgatttttatttttagttcaactgttgatgcaaaatcagaggaagctactaaaatggaaaaaagaaaatcagcattaaacaaagttttggaatctttgtgcatacatcaccagcaacaagttttggctatgttgaaatttctagtccaagagcagaatgctgcttctctttgctgttgtaatacatcatgtgttgtgtcttcagaatctcaaaagcccttaatcgaagatgatttatgtggtctgttctgtagttgtgaatataggctggcagaaagaggttgtttacaaaacgaaaaacaaagccctggtttagaacctctgccagtctgtattaaagatttacattgtttatcttgccaaactgtaactgttgaacacgttaagccagtagtgaatagaggaattgcagacagttataattctcacaggtgctgttctggactgttaccaaacattcactctacaaaatcagcctttcgtagtcctcttttgtcaaaggaagtatgtgatctttcagtcactcttaaagatgcctgtagatctcgaagtccctcacccccaccattatcacctatagaaactgaaggatttgaaaaattgaaagacgtcatctcagagatttcagccttagaaaataacaaacttgaagcaaacattaaccagcctccatctctcacaccagcagaaatcagcagcaataagagtgatcatcaagataaaatacttaaaactaaaaaatccagtaactcttattctttactctcaaatgacagcaataattctactacaaatcatgaaaaaggtgaaactgctgtaatttttcaagatttaatggatcgcattaatgaaaaactaaaatcaatagaaaccacggatatgacaagccttgtaaaattatctagcagtgattataatacatataatgatttaaaattgggagatttcataacatctctcttgcataatgcaaaagccagtgattatagttttatggaattattgagtcaacatgataaaaaggtagaaaataaaattattcagacaagatttcgaaagcgtcaagaaactttatttgcaatgcgcaactcctctgattcacccatgtttagaaggcagtctttacagataaaaagagaacttgctagtcttgatgaaaattttacaagaaaaaaatacaccgaaaaaagttcaaggaaattgacacaaaacaatgagatatcttcatcagacaaaggagaattctatcatgaccaagggccttctttacaaaattctaaaagacttcaaggtaaaaatcatgctgaaacatcattttcaccaaattatgcattacagtcactgcaactacctcttcatagttcagaaactaacttgtcttttaatgaattttcagaaagctttaaaacaacttcccctgagaaaatgagcataagaaagccacaggagaaatctgcagatggaaaacaatttttgcaaaatgataggaaaaatccaaagttaggtaatactcaaactcttttgagaaatgatgtttctggacttttgagcagaactaaacgaaatattgtgcctccagggtggtattctgtatatgtaacaaataattatgtttttaaaaaatcccctaaagccaaaaaagtatccgaatccacaacaaaaaacgatccagtgaaaaatattcacattgaaagctcacacaatatagacctaaacaaaattgcaatgaattctaatttacaagtggttgtgaagcgtttggaagatacaataagtatagccaaaaaatcctggaataatcagccattatcagaaggatataaagcatccaagaaattgatagaaattgatggtaaagaccaacatgctgacagaaatatgactcttactctaaatagaatg

SEQ ID NO: 110792 - DNA, 1165 bp, Homo sapiens
ttttctgaaaaatcccgtttcagcagacttaatgaaggtgaaagcaacccttatgtgctttctacttatttgaatgttcctcaagtattttatattaaaaaaaaaaagaaggaaaagagaaaacagtgcctctgtttttagaaaactactgctcagtaaagttgtttaaaccatttctggtagctaatgacaattttatattaaattgtatactaactttagtgagactgatttttttagttgtttacagtacaaatacttgtatttgttttttaattgcagtatttccaatgtcgcagtaatttagtaaaactctgtggctgccttgattttgacagattttgttaatataaactgattgttaggcaattagttatatttatgcataaatcaattgcactataattcatgaattatttattacaatattttctaatgaattcatgtatctgtcttgtgttgtaaatgtactgtaattctgttcctactttgtgttgttatatatctaaatctgattgtatgaattttaattgttcagttaacgtgtttctaggttgtaatttgtagtaaagcacttcaatgcttttgcacttaaatttacaacactgttggtgtgtgattgatttactcattcagtaaaagaaaaaaagaaaagaaaagaaaaaaactgactacactgacttgtttgatttactttaggaagcagttttattaaatatagtattctaatttactttttctgaagaaatattccaacaagtttctagtgggcaaaatggatagtaacatactaaaaataggcagtatgtttggtttataaatcaaacaggaaaaggttagaaaactttaaaagcaaaggatctacaaaaaaaatacaattttagaaccttatataatcacctgagaataaattctagactggatatttatatgtgtgttcaactattatttactcattactaggtttttctttaagatcctaacatgcaagaaatatgggggagaatgtttgaagccaaataagcatattgtgaagttctgtaatttgagatcttagtttctgatatctgatacataagatagaatctaatatctgaatatctaatttataccttttttaagctgttcttatagcattagatgggaattactggctaccatagta

SEQ ID NO: 110793 - DNA, 1364 bp, Homo sapiens
aagttggaatgcaacttagagcatgtttataatgtgcacagaaaaagcttgagaatgataattttggtttaaatgtgctggttagttgatgttatgactactttaaattttaaggattgtgacacactcctactattgaaaaacctcagtgtaactttaatatatttgctgctgtgacatttcaaaacattttcagtttatcaaaatgaattgcagatttcattttggtgggcgatacattatcattttgctaataaccaaatttgcagtttgttcagggtcttgaatagatttacaaatatttaacactgaagctgttttgaactttcagtaatgtaaactctctactaattgggtagttagaagctgggcagtgcattttaacttttactagactcataagagagactggtcatttttacctagcagttttaaaatatgggtcaaagtatccttgttggatttatggagtatgcaactgtagtggtaaaatgttataaagcatatgccttcatataaagaatagggatttgctttatgtattcaaaattctctgagtgccccctttctctgttaaaattcaggttctgatcatttttctaagccagttttcctaagtccaaaaggaatacttttagctgaatttaaaaaataagtgcaccttgtcaaatgcttgtgtttttacacttgtgtttgtgtgtatttaataatcatatatacgtgtaatactaaagagattttcagctattaaattttaaaactgcttacatgtttaaagaaactgaagagtgagaaactacacaaccaagcagttatttggtctctgagatctatacttaaccctcttcagctattaatgttacctgcacactagggtatgaatcctcttttttttttttttcaccccaagaaaatatacataatagattacagaacagcagatgtcagggtcatctttctttttaaagaattaagccatattttgtgagggccagaacttgcattatttagtatatttcccccttcccccaatggaaagcaaagttaaaggtaaagtacatatttcaaaacaattttattgacctctttatacagaattttacttggaaaactttgggggctttgaatgcattacataatatttatattgtattgagcttttttattcctcacactatatttacattaataaattgattgagaagtttatagtaaagggaaacttacagaacacttttgtatcatttaaaagatgacctgaccaaaaactttacaggattcataaatcagggatcattttgctattgacttcacagtaatcagtagttttataggtaatattatagttaatttgcagcatttta

SEQ ID NO: 110794 - DNA, 1561 bp, Homo sapiens
tccatgatagttattcatataaggacagtaaagaaacttgtgcagtgctgcaaaaagtagccttgtgggcaagagctcaagcagagcgcacagaaaaaagtaaactcaatctacttgaaacctcagaaataaaattcccaacagcttccacttacctccatcagctaactctacagaaaatggtcactcagtttaaagaaaaaaatgaaagcctccaatatgaaacttcaaatcctactgtacagttaaaaattcctcagctacgagtaagttctgtctcaaaatcacaacctgatggttctggtctgttggatgttatgtatcaagtttccaaaacctcttcagtcctagaaggatcagctctccaaaaactgaaaaatatactccctaaacagaacaaaatagaatgttctgggcctgtaactcactcaagtgttgactcttactttctacatggggacctctctcctttgtgtcttaattctaaaaatggaacagttgatggaacctctgaaaatactgaagatggattagatcgaaaagacagtaagcagcccaggaaaaaacgtggccgctatcggcaatatgatcatgaaataatggaagaagctattgcaatggtaatgagcggaaaaatgagtgtttccaaagcacaaggaatttatggggtacctcacagcactttagaatacaaggtaaaagaaagatctggaacactgaagactcctccgaagaagaaactacgattaccagacactgggttatataatatgacagattcagggactggcagctgcaaaaacagcagcaagcctgtgtagattacttgttaggaaaatgtttgtgagtgtgtgtgtgtgtgtgtgtttgcgtgtgtgtgtatgtgcacaggtgtgtatttgtgtgtctatatacacacgtgggaattacaaatgctcactctgacaggagacatgaaattttacagttcaaaaaccacttacatgccttttgaaaaaaagttttattcagggttttcactgtggacagaattatatagttgcttacttaattctgatagtttgtatttaatccttgtataaataggtgaaaaagattcaggttttctttagtagtcaatagcataaagcgttgtgggaaaacgagtaattgtcaagtgaaacatttttattggtgaaagaccattccagccattcagttgaaccatcttataatggaaatatgatattcatagtttataaacattctatacaacagacttaacacttgttgtatgtatgtcaagcaaccaatcaaagtttaaatagctatctccatactaagaaaaattaatatatacagtattagtacacgacagtgcattctatgaaatacaaaatgcactcaagtgcatccaccaggaatagaaaagaaaaccttaaaggatatgtataatgaaatttaatatttatcatttaatagttgatttagcaagaagttggggtttataaggtatatactttaaaaaaactgacacatagttaaccccagcagctatagaaccctttaatataataagatg

SEQ ID NO: 110795 - DNA, 2155 bp, Homo sapiens
ataacatttctgatctcagctcactcttggcctggcttccttcatttcagataccctggcctttgctattcctctgacattccagacatggttccatatcacagcccctatacagactgttcttttggaaacgttctcccatgtatctgattagttggtgatcctcaccttattcagggccctgttcaaatcaaagaagcctgcactgataacactgtgtaaaacagcagcattctcagccccaccctcattactctatcagcttactctgtgttattttccagggtggcactatcataattgctggtggtagtggtgctggttgtggtgttgtatgaattatctcattagatcctaagcactatgactatgacaataggtactttgtatgacttttttttttgatgctcttctagtgcctaaaatagtgctttgcatatagtgagcgctcaataaattattgtcgaagtctatataggaggctatagataggatgttttgttttatttttcatctttgtatctgcccaggaacatacatatttcatggattgattatggttacagtaaaacccagttgaattttttaagcccagttgaattagtatatttttaaacatgtatttttcaataataatttttcttagagctaaaactttcagttttttagctaacaataaaaacattcacggaattctttgctgggttttaaattcatggtttatttttatcctttttgatcctgaagcatgccagattaacaagtctgaatcattgagtttttatttatgtaaatgttataattacattttaataacatgcgtaggcagttattttataacattatttttctaaagttgcattatcgtaaattatgtctttagtcgtagatataagcacaatttattatgtaggcaatgatttaactattgtatagttcaataatttaaaagagtaaaattttacactatgagttctagaaaatacatgtttatacgtacagccacagtttaccttttgctagtcctagtaaatgctaattattcaattctcttactcatcatcacattttctattctctccattttgtacaatttacatcactcccaccttcccaaagcattatctgggcagctttgaatggaaaacagtcatgaatgagcaatcaatggctattcactacaaaatggtggagaggtgactaaaagtttatcttagacaaattttatatcatatatttagttagtttcttcctatcacctggcaatgccagctcctcctctgttctttttttcctatatagtgccttcccagtcatatcctgttcctaaacccgtttaagatgaataggtaatggccacatatcaaatactagtgttatgaattagatcaacaaaatatgaaatattaaaatgtaaggattgcctatctgttgcaaatataaagttttttctcttgcaaaaattataggggatggagtgttagatctctctacaaagaaaaccagcataaaatctgaagagtcatccatatgtgatccttcttctgaaaattcagtggctgggtaagcaatatctaggaaatataatttaatattaatataaaattatctctgcagagaactcttaatactattctgagtagtattgacgtatatagttttcctccagaatttttgtcactcataagtgtctctctctcatacctttcatttgtcctttctctttcttttttattctttctgttaaagaaaagttatcagaacaatcaccaaactttagttcatgttactaaaatgaactaccaacttatagaatacaaactaagaagcaggacgagtaagagaatattaaattaaatactcaggacgcaattttaagggaaatatgtaatttattaattttttaaaacaatgaacaaattccaaaagcactgtacttactaattaatgctagtttatagtgtttagatttttttattgcactttagatgtggtggcaaactacttaaatatatctagtaatcaccacaaaaagtcctctcatgttttgaaaagtgtcattaatcattaaataaataattagtagtgaaatgctgttctgttggatttttggatttttttttacaacttttttgcatcttcccattaactaact

SEQ ID NO: 110796 - DNA, 1217 bp, Homo sapiens
tgaaatatttagaagtaaattgtaattattctacagtttcagtggttctacaaataaaaataaagtaaaaagaaagctaatttggcagactagtgacagttcttgaatattagtggaagctatgtcattgtactattctttcattttttatttataatcaaaatttttctatataaaaaatcaaaagaaaatccttgatgatgaaattcaggttatatatgaaatgcacattttatagaattgaatttaatggatacagaattataagaatttagacgttttcctagttaatgcatgcacattgtatattaggataaaaattggttacttatacaatttatattcacatactgagtgttttaatgtctagtaaaatatatctgaatgaatattaaaactcttgagaataagttgttccgcttctatgtctaattctttatttgtattttagtttgggaccagagaatgtttaattgtaagaagtaattaaatatgccacatttttggttgatatattattataaagctgattaaatctacaaagcttttattgctaattcccagaaaacattgggagttatggactgatgctaaaagacttctgaagtcattaatttgtaataaaaataaatttaaatgttggtgatttgcctttctctttttaaaatgattattatatttatttcttccctagatcttcctcagaactgtgatcctaacattcccctagttgctcaggaattaatgaaaaagatgatacgtcaatttgcgattgagtacatttcaaaaagtggtaaaactcaagagaatagaaatggttcaattggaccaagtatagtatgtaaaagtatccaaatgaatcaagcagaaaactcccttcaggaagagcaggaaggccccttagacctcactgtgaatcgaatgcaagaacaaaatactcagcaaggtaagattttttgtgtgcatttaatatataatttgatgttttatatcgttaaatgtatatttataactttttatattcatagggaaatttattttggatgtaatatgacttttaatttgcttatgtaatatgtgctggagagaagtacctatttacagcttttgtacttgcatctttgtttataaaagagaaaatctgagttgctctcaactccttttgcaataaagtgtatcctaataaacagcttaaaaataaagcatataaacaaagg

SEQ ID NO: 110797 - DNA, 1103 bp, Homo sapiens
attttggcattaagaaatggggacaagaaacaaagacccacctaagctggggatgaatacctgtgaattgttcagaaggattatgggggtatctcatatatgtgattttataaattttttagccctatatgtaaattacatagattataaaatgtatgtaatgcattatgaaactattgcaggataataaaaaatgacccatgactattgagcatattgacttacatatttgttcaactttattgtacatgttactgctggtggtgattaggaacttcctgcaatattctgtgtgaagagacatttggagttgggggaaactgaaatgatcttttctaattaaactaagttattgtgccacccctactgcaaaaaataggaaggggagggaaggatagaattagaaacacatacatgaaaaggaaagtgatgcatcaaaatattctccgttaacctctcataaaatatctaaactcaggaattaaataagttcacataaattttcaaataaattccttgctattgaaaattcaagaaccaaacagattcagattctgcaatatccattgctatctgaactttttcttcaaactatgtgaactcaagaactaaatagatttgaataagaagtgatacacattttattgtttttgttggtgagaccacatgatctggtggaaaaaaaatactgatctggaagatgggaaaaccagtgttctacgccctgccactatgccactatgccactatcactgatttgatctttctggatttttgtttctttttttttttttttttcattatgagactggattagattttatctaaaatctggtagttccaaaattctagtggtcctgaaaagtggataaaagtttaggagctatttttaacatttcaaaaagccttaagaagtcatataattatctgcactaagactgtaggtcaaacaaatttcttttatatttggatcaaattgatattactctttataaaaattgccacaccaagctacttgtgtcttattgaaaatgtctttgaattaaaagtagggaattacattatacaagattggaaatcattagctatatgttttctaatgt

SEQ ID NO: 110798 - DNA, 1002 bp, Homo sapiens
aattatggcagtctatggttatggtggttatcaatgatttttttttttttgagacagagtctcactctgttgcccagactgaaatgcaatggtgcaatctcggctcaccgtaagcttcgccttccgagttcacaccattctcctgcctcagcctcctgagtagcatataaaaatgtataagtgcatatatagtatatatgcatatagtgtatatgtgcatatatagtgcctcagcctcccgagtaggtgggactataggtgcccaccaccatgcccagctcattttttgtatttttagtagaaatggggtttcaccgtgttagccgggatagtcttgatctcctgacctcgtgatctgcccgtctcggcctcccaaagtgctggcattacaggcgtgagccacagcgcccggccctgatggggatgcatttttaaacatttgttttctttttctgataatattcagaaacctctgaatcttttctactttattttgcttggcaggttgttctctgacctctctttttctacctcacagttacaagaagtgaaacagtggatataacatttcgtaattgcaacttaaaatcagcatatactactttgctgctgtaattttcatgatactatttatcagatttttatatatctttaattttactttctagctcagagattcttaacctgggatccacatagtttgcccaaaagttcatagataggatttcatgggtccatgaacttgaatggttgaaaaaattacatttttattttcattgacccttggttgaaatgtaacatttacttcaactgtaagcatagacaacaaacaacagtggtattagtagtacctgttccgataatagaaatcataaatatttttatatcatatctttaattattttttacattctcaactactttgaaattatggtagacattggacttactactagattttatattttaatgcattaaaagaggcatatatattacatctgt

SEQ ID NO: 110799 - DNA, 1059 bp, Homo sapiens
tctcctatgagtatctaatgctactgctgaactgacaggaggcaaactcaggcggtaatgctcacttgctggctgctcacctcctgctatgcagcccagttccttacaggccatggactggtaccagtctgtggcctaggggtcggggacgtctccaagaaatatataatctttatattgtattcttccatactaggttgttaactcctagagagcagaaaatacatagattttctcagtatcttttattaccctgagcaagtatcatagttatattagagttttgataattgatttttagtaacttataaaaatgaaagatgatctctagttgaaacccagctctgtgcctctgtaattatcctattacagtattttctaggtaaatgcttttcttaatactaatagtaatttgtttgcattttgcttacagtcttatgctatttgaaaattaaagatgattaaaaagcaacatttgggagggtcttttatggctcattcagtagataaaatagagcaatagtatgagtcttggtagttgattattaagcctaattcctcagtttacctttctgcttgctttgtagcatttagatattttgcatggtcttgtcatgaccagagaataatgcatttaaatcctatagtagtccatagtggtccttacaaaacttaactgacttagaattgactttttacccttatttgggtttcactctattgtcaaaatatttgcttttctttggaaacaaatctgctttttaacacttttactttgttttacatttgttcataagaatgccccagctatagtagatctaaaagcttatataaaggttttgacatttcttgagtaccatactggttagactggttatgttctaacaagtcagatatttgtggcacccctaactataattctccacaatagcctctagacaataactttaaagctgtgttgaaagtggctgtgataggaataaggcattatctaaatgactctgatggttcagagatttatgatacttaatagcaagtgtcatcactgctgaggaggca

SEQ ID NO: 110800 - DNA, 1038 bp, Homo sapiens
atgttaggtcctgagttagtatttcttgggtgaataaatgaatactaagataaactctacctagatagatatctttcagtttctcagaatattcggtagtattagtacttcctttgttcgttttgaagaagtaaattattttgtacgtacatatagttaacctttctctgctttgtacttaaagtattactgtgtatagtttgaatatcagccagtttgtttggaatgttgataaacataggcatatagatataaaatgccttgtttacagatatccttatgaaatgtaaactaagttattttggcctttagctgcagattctctaatcacctgaaatgtttaagtcactggcttatgattcaggaagatgtctcatcttttatttttaaattgaaggctgctggactggactaaattgaacagataatatgtacatagtagctgaacgaatcatactgctatctatataacaaagtcatccttcatcaaaatgtaatatgtttttcctgcttttttttttaatacccacacatgcttagcattcacgtacccacaattctgtttttttcctgaaggaccttcttgatggatttgatgccgttagttgaaagctcctattaacaaactcttttcccttaagttaattgatagccaggttttatattaaaaacctttttattttcccgtgccttttgggaacactgacccttttccttttaaactgttaatgttttgttttgtactctagcatgatataaatactagtatggttcattaaccagttgggttatgactgatgataaagtaattgatttcttaaaaacaggtagtgttaatcttttagagtgcttttctctaaatgcagacatccttgattgactatgtaaatttaacatgattcattcaggccttaagtgtttcttagtaagtgttcctttgtgatgtcatcgtggtcatactttgaatttctcttatataggttgcccttttggaactctcagggaattgtaattgccataaaataactgatataccat

SEQ ID NO: 110801 - DNA, 1168 bp, Homo sapiens
ccatctcttgattcttcacagtcaacaccaacagaggagctatcatctcagggccagtccaacactgataagattgaatgccaagcagaaaattacctaaatgcactctttcgaaagaaaggtaatattggtatgctttgtcatttaaaatttgcaatagagatgtaaaatgttggaatttttttacacaaaagttttttatatgtcagtctctctacttcactctttattgtttctttattcttaatttttctttatatttttagggacagtaggagtctcaatcattctagtactagtcttgtattaggcattcctgttcagcattctattttcaagtatctctctgactttatcacacattttcctcatctattataggaacctttaaaaatttttcttatgcttctggtcttccttattgtattgctgtcttgaacacttcaaaatttgtttgatgttcaataagttacagatatataatattatattgcaaagctatgcctgataatgtaatagtgaaatcacttatcagcttggttggagtatatttgctgacttgctatttcaatatttatttggtaactttaatttgcttagtagacattaaaaaaatcaatgttcttttttatttcttgtctctccaaactactcaaaccaaatagcttttgttttacttgttcccttactttacactcatgtatcaagcagtagtagtttttatattttagttacttgggagaattagagaaatgtaggacctttcatgttttgttcttggctgttcccacagtaatagagtgtcttatttttaccacctggacctttggattaagttatggtgcatgtttaggttgggggattattctctctctcaactttgagattaagaaaacattaccatattgtcatcatctacttgttgaccctattttactcctctttggaatgagatatcactagatatttttctactaaattgataactttcatgtttaaatcaataatgtttaaaatagtacttgactgtgatacaagagtcttttgtttagtcttaagtgttctaagttcttttatatgttggaatatggaaatcctcttattagaagagtcttaatataatttaaaggcctaaaattaagaactataatttttaagagcaagagac

SEQ ID NO: 110802 - DNA, 1050 bp, Homo sapiens
ataaaaatctgttctgacttttgagctatagacttttacttgttttcttgggcatcattccattttctgaaatctgtgggcttttctagtgctttcttctatttctctattttatgttgtctttcatggtgtgcaaagtttatttcctccagatatctccccctttgttctgattcctttcatagcaaaaataaaattaaagcacaatgataagttgaatctttcagaaagttagatgatatttaaaaccctattgttggaaaattgttaatttataaccagctcattgttcttgctattttgtcccataatagtgcagattactctccttacagccttctctgtttatttctagatgttgtgagtttaattttaaagttagttcttctcccattactgttagttttttaaaaattattattatgtgagccattgctgtggagagtggtaattttatttgttttaataaagttagtatatttaatgaattttttccctcttttaaagactgtgaaccagaagagctgactgactggtctatggatgaaaaatgttcattttgtaacctacagagagaagcagtcagtgtaagttttagtgctatgaaattatctttaaactaatgcacaattgtaacacagttttttttttatcttaatttgttttgaaaatttgtgactcacagtggaagtttaagtatttgattttggtaaacgaaaataatattttaaagtcatattagaaatctaacatttagcttaacttgcaggtgaaaatcctagaaaactcatctttttttttacttatttatttcacatttctttcttactcttacttaccctgactcattaagtttagttcaggtctattttgtatttaggtatagagggatgagcttgaaggcctactttggtctgagaccaccctacaatctgatttcttagaaattaatagtaggggaataatgtgctgttttagcctttcacttactcttgaagtcttttggatatcataattatctcctgtgtaaatgatgaaatatgtaagtgt

SEQ ID NO: 110803 - DNA, 2181 bp, Homo sapiens
ttgtgcagttttttgggttttgccaaatgcatggtgtcattgatccatcattatagtatcagacacagtgcatatcactgccaaaaaccgtcttctaaactctacctagtcataccttccacttccccaaacctgtggcaaacactaatttttttatggtctctaaagttttgttttttttagaatgtcatatagttggaatcatacagtatgtagcttctaaagatttgcttctttcacttagaaatgtgcatttaagggtcctctattacttttcatgtctgtttcttgatgaataatattgcgttgtatagatgtacccacagtttgcttattcattcacctattgaaacacatcttgctcactttcaaaatgtggctatttagaataagactgctataaacacaggcaaatttttttgtggacaaattttttcaactcatttgggtaaatatttaggagcatcattgatagactatgtttagttttgtaagaaactgtaagggtatcttcaatggtagctgtaccatttcgcattcccaccagcaatggatgaaagttcctgttgctgcacatcctcaccaatatttgatgtcagtgttttggattttaaccattctaacaggtatatagtggtatttcattgccttaatttgtagttccctaatgacatgacattcagcatcttttcatatgcttggttgccactatgtatcttcttgggtgatgtatctattcagacagagtttgatatttggacaatgatggattcgtagagtaagtgaagacatatttcccctgctgctgtttttagagacagattgtatggaaatcatctgggttggtgctttctgtttcagaaggtttttaattattaatttctttaatagatacagggctgttgaggttatctatcttaccttgtgtgagatttggtagtttgtgtcttctgaggaattggtccattttatttaaagttatcaaatttgtgagcatgatgttcataatattcctttattatccttataatgcccataggatcagtagtgatggccagtctttcatttctagtattaaaaatttgtgctttctctttttttcttcattggctagccagatttgtctggaggtttattttactgatttttttccccaatgaaccagctgatcctagttttttaagcggcataaaatataaactagaagaatctataacaaaatgttaatcattgtctacggatgatgggattatgaatttttcttttctcctttgtacttttcaatatagttaatatgtaattccataatgaaaaatcagtttttagttgtattgcctaaggattagtatctttccctcagaccaatacagttataaccagtgtttcatgatcttcatgaaaaatctagctcaatattcttctttttcatttttcactgaactttgtctttggaaacgctaaatttacagcctatggattaaagggaccaaaaagcattaaaacactcaaaaattatttattaataatgaggttatttagaagaaaataaaaattacatctgttgaggtgtttcacacatgctttaatttttactacagctttaacatgtaattattattctctttttcaaacaaagaatctgaaactcaagttaacttgcctgactgaggccacatgagtatgtggaaaagccacaaaaagttcagtactagggttctcctatttcaaaatctggattagataaaatgattcaagccagattttaactataagagtatatatccatggtggaaaggttgatgtttgtcattcattgactattagttttaattatgacgttaccttttactaatgaagctatttctataagatatataatttaacctcttttgagtttatgcattacagtttcaaaaagagagataacatcttttagagatgagtatcttattcgttgtttgagagattaaaatgaatgttttatttcagcatttatttagtttttaatgacatgaaagataacctggggagagtgaaaatctggcctagagttgatttttcaaaagctatttttccatgtagaaaaatgtatcccaccaaacatcatttgtttggtttaaaataaaaagttaatatagaaagagtgattaaatatttgtaagtaaagctataaagctatac

SEQ ID NO: 110804 - DNA, 1777 bp, Homo sapiens
ttagcaagtgttttggatataaattggccacatccatggaaaccaaaaagaaagtttttttaaattttgttttgtattcatttatttttgagatggagtctcactctgtcccccaggctggagtgcagtggcgtgatctcggctcaccgcaatctctgcctcccaagttcaaacgattctcctgccttgcctcctgagaagctgggattacaggcgcacaccaccatgcccagctgatttttgtgtttttcgtagagatagggtttcgccatgtgggccaggctggtctcgaactcctgacctcaagtgatccacctgccttgatcccaaagtgctgggattacaggcgtgagctgccacgcccggccagaaacaagattatttttaagttaacatctttgatgattataaaaactataagcaagaataaatccagtaaacaatgtgctagacctttattaaagaaatgataaaatgttactaagaatatttttaaaatcataaaatagtgatgtttaacatactgtggtattagcttaggagtagatgagcagatgaatggaaagtctaaaaagaaagtcaaagaaacatgcaaaacatagcgaaacctagtctctactaaaataaaataaaaaaataagccaggcatggtgcatgcctgtggtcctggctactcaggaggctggatcaggaggatcacccgagcccaggaagtgctgcagtgagctatgatagtgccactggacttcagcctgaattccagaatgagaccctgtgtattagtttcacactgctgataaagacatacccgagactgggcaatttacaaaagaaaagaggcttactggacttacagttccacatggctggggaggcctcacaatcacggcggaaggcaaggaggagcaagtcacatcttacgtggatggcaacaggcagagagaggtagtgcagagaaactcccatttttaaaagcatcaaatatcagagactatcaccagaacagcattggaaagacccgcccctataaatcagtcatcttccaccaggtccctcccacatggaaattatgggagctacaagatgagatttgggtggggacacagagccaaaccatatcatcctgtatcaagaaaaagacaatccacaggcttgaagaaaatatttgcagatgggtgaatatctcataagggatttatgttcaaaataacgcttacaactcaataatgaaaagacaaataactcaattgaaaaatgggcaaaaaatttgaatagacatttcaccaaggaacttacatgaattgccaatgaacacatgaaaaaatgttcaacatcattagtcactagggaaatgagactgcactttgcatccactagaatggctataatcaaagtgtttgtaaggatgtggagaaattgttataggaatggtgaagccactttgggaagcagtttgtcagttttttttaatgttaaatataaacttaccatatgacccagcaattatattcctatagtcttacctagtagaaatgaaaatctgtttcatgtaaatttcatagtagtgttattcacaatagcaaaaagtggaaacaacccaaagtttcattagctagcaaatcaataaacaaatgtagtatatccaaacagtggactgctattcagcaataaaaagaattggagtactgatgtatgctacaacatgatgaatctcagacacattatgctcagtgaaagaagccagacacaaaagtgcatatgtgatattctctttata

SEQ ID NO: 110805 - DNA, 1590 bp, Homo sapiens
ctccatctcaaatatatatatatacacacatacatacatatatacatacatacatatatatatacacacacacacacagacacacacacatatatatatgtacccatacacacatttatgtatattttagtgtttggaacaactgtattttttaaactctcaaaataaaattagtagggttttttcttctttttaaattaactagattttccacaggcctatgtaagatacttaagtaaaatgcatgtttggttagaaggaaacccagtgctctcttctgtattataattttcaattaactttttaaacttagaaggaattagtgtaaaagaatagagcactgtttacatggaaaaaaagcaggtactctgacaaatagattgttgttttaattagctctgattataggtgcttacacagtttattcactggtgtctctttttttaaaatataattaattgttcttcaatgtcttcttcctcctccctttctgaacagctcagtactaaaacatcaagtgggagaaaacaagggtaggtatccacactgggtggggtgcgtgggaggcagagccacatcgtcatgtaagaggagtgggatctcagaaccttatagggtgaggagggtgtccatgggggttgatggaatgaagggtaaggagcacctctccattggaaggcatgctaaggcagggtattggagcccaagcagggtgatatggtatctgtgaaggagagtggcctggtatgggggaaggtcagctggtcccagcaaggaggacatctacttggggtgggatgtcatcctgcatgagctctcagggccccagtagataccagggggtagggagtgacccatgtaggattgcagcctggtgtaggtatattaaggctcaagtgagatgaggagggagtccatacatagaggtatctgagtccaaggtattagagcctgagggtaaagggaggaaggcctctcagtggagctcggtacaatatgggatttcatagcctgagcagggtagggaggatattcttgtaggagggatgccaggcatgaggaatagggacctgaacagggtaaggagattatatacatggggtagggattttggggccaagagaggtgaggagggtgtccgtgtagggaaagagacagctacagtgggagattggttacgtacatgaagattgatcagtattaagaataatgggagccaggcttctcattgtctgagaagggatttactaatatgaaagtagggaaaattagaatgctgtctgtagtgttggataggaaatgaagtacttgtgcgaactcatggttttcatcatatatagatatagaaatgtatgtgtatgtatacatacacatgccctatactggtcattgagaaggggcttaggagcagtggcagtacggtagcagtgagcatagtgtattaccgttaatttcctgattttaatggttgtttttgtgagagaattgggaaatactaggaattcaagagtggtgggtcattatgtagacatttactctcaaatggttgggaagataaaggtcttccttactatacttaaaacttttaag

SEQ ID NO: 110806 - DNA, 1913 bp, Homo sapiens
aactagaaatagactttggaataaaaaatcaaaatattagctttttaaaatggtaaggttgcattgaggaacttggcttggaactgaggccaaaattagacattagattgccctactgcctgactccctgaattgaacttatcagcctatcaaagacagtacagctggagctgcaggcgtcttaaaatacaaggaagctgtaccctagtgagtttaccatgcttgttggtaggagtgagcaggaggcttggccgtgaatgaaaaatgacttttaaaacattaatccatcccactagggaccaactgtaaggatgttgccaatattagttattcttccttcttttgggagaactgaataagtagtagagaaaagagccaagtttcttccaaagtacttcccccaagaatgtgaaaagtgtttgtgggagttctattttatggaaaagacaggaactgtggtgtggttcaaaaagcttactgtttacacaggagtaggatttaccttgcttttaaagagttcacagtgatcagggatgttaaatattagacttggtgtaatgtaatggaaagacagaagtgggaacaattaattttgacttgaaggattcaaaatgactaggcttcaaaacattgagggaaagcaaggattggcaaactttttctctaaagggccagacagtaaatgttttaggctttgtgggccatctggtctctattgcagctactcacctccactgttgtagtccaaaagaaagacataaattaataagcatggctgcgtttcagtaacatttatttataaaaataggtggatttggcctataaaccatagtttgctgatctctgggataaaggatacagcaggaaagtagagtggagggaatgggcagagatagtataagcaaatatatttaagtataaataatgatatattctgaaaatatttagcattacagtgccattggtttataggttagcagcagaaagtaggactggaagtataaattatagcttctacaaggaggaaattgtaagcctttgaagttgttttttttttttttttaaaatgggtaataagcatgatcagataagtcagcttattttcatttggaacatctgttgttggtgcaggtttgagggctttttgtttgcaatagttttaagaagctcaaattaaagcagcccttttaaatcaaaactgggaaaatgagcagtcttcattcacttgaatgtattaagacattctgcttgggctctgaacaacttgagaaataaaacaaggagaaagatggaagccaaaataatctttctattaccgatacaggccaggttagaggaatagcttgatgggggagtcaggtggtctggcataggctgacttatccatccagtcctaggctcagtagagaagcagagctgaatatgagtctttggaggtttgttctcctttgaaagctcaaccccaggggcaagaggaatagaactgagctcttcctcaaatccagaatcaccaatcggataattcactttactagctaagggtaaaaagaggctcaggttgtgcttttgatgcatccttcctcatagaaaccaggagcaagggaaaggtattgtaacaatcatggctgttaatttttgcagggttgtatctgggggtaagtatactggaaacaatacaactgttaatattctgaaaacaagtcaaatttacttgttctggatattttaaaaaatatgttatggccgggcccggtggctcacgtttgtaatcccagcgctttgggaagctgagacaggcagatcatatgaggtcaggagctcaagaccagcctggccaacatgtacagaaaccctgtctgtactaaaaatacaaaaattagccaggcgtggtggcaggtgcctgtaatctcagc

SEQ ID NO: 110807 - DNA, 1060 bp, Homo sapiens
ttaaattataaactgtttagtgacagtaactaataagtcctcacaagtggtagaaaggacttaatggaaataacccagtttcttcttagcccctatcattgtaacattaggcacaaatcattccactttttacagatggaaacctatgaaactgggataatatctgtcctcaaatgtttgccatttttattcctatgaaagatgctataatatttatgtagtagtagtatctgggctgaaggtataaattagaaaattaccagcataaagatgatatttaaatccacagaaatagatgagattacttaggaataggggacagtatatctagagtataacttgagtatatcagagatagtttagatagtataactagtaggtgactcagtaccacaccttaaggaatcttagccttccttgggcagaagaagagaaacctcaaagtaaggtcactggctgaagagtaaaaccaggagggagtggtattaccaaatccaagaggagagagaaaaatattacaataaggagggattgttacgtgttgatgagatgtcaagtaccatgaaacagggaagtgtacattgtttttggctctaggtgaccttgactagataaatttcagtagtgagggagatggcagccatattataataggttagaaagtaattaagatatgtgcaagtggagataacatttgtcgtaaactaatttaagagctatattttgaggaagaactgataaatacagcagtaattggagacatctggggtctagggatatttgttttttagatgggcgttaccatttaccatacttagtaagatggggaatacttttctgtatcagtgataaccatgattcttttatatgttaatttcattaagctgagagctgatagtaacaaaatactgaggcaaatatattagataaagaaatgggatagagttggttttaatctcttagtatggattctacatgtatttttttttccccttcaaaaaagtttcctaatcaagttactgagatgtggtatgtgtaacattggtgcattacacatttt

SEQ ID NO: 110808 - DNA, 1081 bp, Homo sapiens
aaattatttttagctcatttaaaaaatttatatcatactagatcatcttgaagttgctttttgtcggtatctactctctattttacttttcctgttaatcaacttgttgctactttctggatgcttcttgtctcctgctcctttatcttaccactaacttctccctcatcttgtcactgttgccatgtaaaccccataagagtagatttacttagaaatctggattgatgggactggtatggatgggtctgctatccaaaagactttgtttatacagctgtttttttcaagcactatcaaatgttttctattttaaaagatgtaaattgtggcaccttctaatagtgtgcattggacaaatggaatctgtgatgctgatgagtagttggatggttaagacatgtatcaagtctttctgtaaaataggcatattgatgaattttgcatgcaaattttgaagttctctgtactcttggatctttttatatttgaaagagtaaaattctgccatttttggaaccaagcagtgtgtaattttatattttgtaaatgttagatatgggctacagactggtcttaaccagtcttttttgtgtgatgccctctttgtgcacatactacatcccttgtttggctacatgggtgcgctgcttcctgattggctgtgcgcatgataaattgctgttatgtgtcctctacattcctctcatttgtctgactttcaaccctggtctttaattcttctgtcatagtgcagtcttgggaggagcaacaaagatatatagatttttggttatgttatgtaactttttattcctcattagtaaatctcatctttcaattgtaataacctacatttttggtgggaagtttctatcttttctttttagtagtattccttccttttggtatatataactagcattcatggctgatagataacagagcaccaaggacataggtccaaaattttaaggacctgcctaactgtatagagttcatacttaagagctgaatctgtaatcaagtaatctttgcaagagtttttattcacaatgcaatctagataagagaatgtgaa

SEQ ID NO: 110809 - DNA, 2789 bp, Homo sapiens
cgagtgaatcttggcatttggagttggggagtaaccctagtgtcttaagaaaacaactctcttaccttgtttccatctgctctggcaccacctcgcacccccgaccccgcctcccatgtatttggttaacgtcttaagatctttttttgactagtagagaagagatcgtattaggttaaacttaatacaatttcagttcagaaatgtgtaccgcagaacgcgatgaatataggaaaatgtatgagaaaggaaggttactttagggggcatttaagtgatgtttaagtaatttactgcttttgttttgcccttacgaaaaatgtattttggtcttctctaaggaaagatgatgagaaatagctttagtcaagtattcgtaagtgattttagtttatgaagtgtaaaaaaaaacctctaggtattctttatataaattgtttaaaaaactaaatattgttgtttgtgcttcttgaatacaaaatgggctgtttttgataattgcttatgtaaagatctcttctggaaaccaatttagaaattactgagctcatttaggtagaattaggtaggatgacagcattgcaacactggcttatgatattactgttaagttttgtcaaggcacaaagtgatttgaggatgtctttttatgttttggaatattttggttggtttttttttctggtcttcttgcttatttagatacattaagtatagctttgcatcataaaaatagatagacttgaaaaatagtcaaactttaaatgaaacacaattcattggatttgatggaaaaggggactagaatatctttttgccttacctacttgtatattcaagtaaaattggaagacattgaaagttactactgtattacacttttattgcaatatgtgattacattgtatcgtatgtgaaaagaaattttgtccctggcttctaactatatttgagaattgtttcccacagtctccatcctaattaagccctattaaaacctgtctcatattctttgttatttatttatttattgagatggagtcttactgtcgcccaggctggagtgtagcggtgctatctcagctcactgcaacctccgcctcctggattcaagcgattctcctgcctgagcctcccgaatagttgggattacaggcgtccgccaccacgcccagataattttagtatttttagtagagactaggtttcaccatgttggccaggctggtctcgaatcccattgttattttaaaataaacaataacatccatttaaacagagtatacacttgtcgattgggctttttttagcatcttaggtgttaagcacttatttatagtgtgaattgggattaaatggagtttggataattaccttttgctattaatgtgccttacattcattactttataaacatatttataaaaaagccatattattttccctttgcatgtgtatacatgtgtgaatatatatgcgtacacatatgtgtatattcagtatatatataatattcggtgctctcattgcttacaatcatttttataaaataatatccttcttgtcttttggtaaaggaaatgatccaaacatcttaattttaagtgagatatggaattgtaggcagcgtctcagggttgtacagcaaattagtattgagcccctaatgagattttgaatctcagttcttagcctaactctaatctgattcattttataactcatataatattctaattttatagggtagaaagttgttttagttgtcatgactgcttgtagttagccacaaaggtaaacgtttaactcttaatatggaatgagatatttaccttcctctaattgtggcattcatctctttatgttagatttttaactactgttctggttcattccacatagttttcttttcattgaagagttgtcctacaaccttttgtcccaattaatatctctacttacattgtggtactttctataatttgactgtttttctataattatcctatactgtactgtgttatagttttcagtagctcatgtcacaaatgttcgagtgcttattggatgtagtaaatagtatcctagtactaactatgatattgagaaatagcaaatatagtcctggatcttatgaaatgtataatataattagcatttgataagtcatacaatttaaaacaggtctagaataaaataaatacacctgtatatttttaaacatcatcaggacttgtatagtccattaggatatctgatctgggagactggccaatatttaaaaattttgtattttgatgtaatttcaatcttaaaagttggaagaatagaactcctatgtacctacatttgttgttttacattttgctgtgtttatcattcttgctttatactgatctctctatattttttcagaacagtttgagagtaattcagagacatcaacctctttacccctaaattcttcagtgtatatttttaaaaaacaaggatactgtcttacctaattacagtgaggttattaaaaccagaagatttaatgctgatacactgttacccaatttatggtccatattcagattatatctgtttatctattttttctgttagctttttttcctcttattctgggatccacttcaggatcatgcattacatttggtaattatgtctccttagtcactttcaattgggaacacttcgtcaaccttactatttcttgaccttgacatttttaaaagtacagggcagctattttgtagaatgtccctcaatttgaatttatctgt

SEQ ID NO: 110810 - DNA, 1009 bp, Homo sapiens
cttggcctcttggagttcctcgccggagtgctgactagtggatatttctgcccggctgcggcggcccgactgcccttttgtcttttctgcgtgacctcggggcaggtcctggtgcagagcgtcgccaaggacgccgagcgggaggcgggattgcccagacatccttcagcgaagtgcatgtgtgtttgtaaaccatcgttggctgtcgggagaccgcgaggaccggtccaggctgcggcggagtcgagggcgagggagaggccgcgtgagtgagcagagtccagagccgtgcgcccccagaactgcgcgtccgccccgtgcacccccgcgcgccatgcccagttgccccgcgcgctctgctacgggcccgctgggcttccgcgccttctagcttccggagcccactttgatcggggccataatacctattgagatcccctcttctgtcttgtaccttcgccactggcatcggatttgcagaagcgtgcgtgggatcagaggaccgccctccccacaacaaccggcccctgcatcttagcagccgttggaagccccagctcttttaccgccaagttcatccttgggagacagaagacgcgtgatctcctctccgctgctcttggggtctccttgcagccctggccaggcggattcatcctcaggacctaaagttgcccaaggagctcctgctctgccagaggagggtggagagggcggtgggaggcgtgtgcctgagtgggctctactgccttgttccatattatttggtgcacattttccctggcactctgggttgctagccccgccgggcactgggcctcagacactgcgcggttccctcggagcagcaagctaaagaaagcccccagtgccggcgaggaaggaggcggcggggaaagatgcgcggcgttggctggcagatgctgtccctgtcgctggggttagtgctggcgatcctgaacaaggtggcaccgcaggcgtgcccggcgcagtgctcttgctcgggcag

SEQ ID NO: 110811 - DNA, 1039 bp, Homo sapiens
actggccagggaagggcctctgtccaaggaggggcgggtccgctggcagctgcgctagttctccctcccctgctctcgtcccgccactcgcagctccttgctggctagttctctggggctggggagcgggtagataggggacaagtactggaggatgcccggggcaagtgagacgccactttgttctccagagtccataaacggagtcaccttgcgattgccagcatccaggtcggtttcagagcccagtcctcgctcttgtcgcaggctggcgcggaggggatagcagggagactcaaaagagagaaacttgccttccccgattttttgtcaccctcctgggggcgaaggttaggaagaaggggtcatggagtgcctgggggtgcttctcacaggtcgcggggagaagggtgccccaggacggcgacacctcgcatagtagcctcgcgcagccccccgccccccacttctccggggaggggaagacggcgtcaggcccctagggacttgtctcagcgggcgactgcgagggaggaccgtgtcccatccgttaagcgaagttagcactggttctccagcgcaaaccagcccaaccaggtcttaccactgcggcgacccggcggtgcccggctgccccctccggcccttcctgctgaacccctgcgtccccatccacctttctggcagtttctgcgccccttcacgtggcagcagttcccctgccttcccctcttcgcgctccgttgctcgcagacgtccccgcctccctgtctttgcgagtctctaatgaagaagtaaatgcagacccggtgttgacggcccacgcgctcctgatgaggcgcttccagagttcagcgaagtggagcatggaggccgttctctttgtgaacgccgaggccgccgccccgcgccagtccggccgccctaggcacgttccgctctcgcggttgcgtgtgggccgggagtaagcgaagggcgcggggctaggccggcaggggccagcgcgtctggattcgtcccgcggcctctttgcccccgg

SEQ ID NO: 110812 - DNA, 1065 bp, Homo sapiens
cagttttattttatttggccctagctttaaaaatatttattctggaaaaataatctaaacattatgaaagtaagaactgtgttatcaaattgtggtcattcaaagttggttttcttcccaagaagattaaatgtagacttcagattttaagatacgttttttacatattacttgaggactttaaaaatgtttacagtatatatctgcaaaagacaaaacctctgtctgaaataattaagataaattacagaccttgtaattgaagtacgaattgtatgtcttacatgccttgattattcaggtttgatatgtttgcattttgaaggcaaagaaaagctctagtaaaagaaacaacaattattttaataagttttcatgcctgccttaatagtcactttaagtaaaaataatttttttcaaaaaataataaaatctaatgttcattttaagcttaacacatattcaggttcactgggcaaaagggcagaagttaattccctgtaattgtccataagtagaaaaatggtttgtccccttccaagatatttataaatatatagactatatttttatcacctcaagtaaaacacagaaatgtctactttattttactattggtctttctctatgttaaatattacaatacaaggactataattgtggaattcaaaataaatttaaaatcactactttcaactaattttagagggaaattaaaattggtaaacatttggttgcattcataacaaagcttataagttcatagcctatctctaaatatataaaaaatactctgaaagtatttattctttgatctccttgatagactatgtgattagctaattcctagtaagtaacttgcaaagatattttaatctttaagaaagcatcaatataattcaaatgtttggtaaaatgaatagataatttaaattatcatttaaactttatgttttcaagaataacttttagtcaccacaggaaagtatcttgagtttagttgttaacttccaaaccattgaaggagttttgatggctttttatgcagtctctattttggttata

SEQ ID NO: 110813 - DNA, 1020 bp, Homo sapiens
aggcatgtggagtgttcatcttttcccaccaatacttggtaaatgtgtgcttttaagacaaatattgctttaacttctcctagtgttagtataattgggtttgaaatgacatttttcccactagctttgtcatttgatactcatttatgcttgaaaatgagctctgaaaatattattatgataaagccatgtaaggaatcttgaacagtcaagctgttaacttagacatttaaagtttccagcaagttgatataaagaacatattctttttaaattagaaaagtctaagtccctttacagtggagcctacatttgactaaacactacattctaatgagatggtatgtaaaagacaaatttattttttttaaggtgatgctgaattagttctccctgcatacacatatcactcctaagcatgggacagacagtgtgagtgaggctgaggaagtatgatgttggtagggtttttgttgtaggtctttacacatgagttcaagtagagaatatgttgtggaacaggtctgaaagaaagcatcatttatcctgtgttcatcaaggatctggatatattctctgtttatcaaggattagtctcttctgactaatccgacaagtttataggcaacacataacacataccttttcttaacagaatgacagtctaacggtgctaatcttcttggaaaagaattcaagcccatctcaaaagaattgttttctggtatctttccacacaagtttaaaatcatggcagtcattttcttggaaagtctctttaaaggacacatcaaactctaacagaggctgagtatgcacatagcataaaatataagtgttccaaaagatataatagccattatatgccaatgatgttcacctattcgtaagcaatgtggtcaattttaaattaggtttactgacgctggtcatagaaagctttaatccctgtgcgctgttacaagtttagcagaacattgaatccatctgagagaatttctcatgcaacagtttttatgg

SEQ ID NO: 110814 - DNA, 1043 bp, Homo sapiens
ctgtgtatggattattttagacaccattcactgtggtatttctgctggatattgaagtcacctaccttaggcgcctaagactgaatcacaaaaatcctttatcattgtgtgtattctggttgactgatgttgcacaggatttcagtttaaagtttagaccccagtaatcatcatcttagtaagcacaatggaaaactgctgtaaagagtcatgtaacaaaaggtgtaaccaacttttgatttgcaatgcttgaattctcctgaatgtcatttcattcttttctgaaatacaggatgaggcatgacactaccaaatcacagtctcattgttgggtattttctatgtaacataagctttgtttttgttttctcaaaaggcgtttaaacagaaatcaccttcagctgtttcctgagttgctgtttcttgggactgcgaagctatacaggctgtaagtagacacaaatagttattgttgctttgggtagtaccttgtgttttattaaatgtattttggatctgtttgtgtgtgctttcctggaatctgttcatcaatagattaatggattaaaagtttgtgttttttctttaggaaatttatgatttgttttctagtggttccagttgttttatttggttaggatttagcggtttatgtatgtgttatggaaattggattattattatttttttggtaacgtgatgatggcgagatttacctaccttttaatggaaatgtttgattaagttctgaagggagaaaattgctactgtttcctcttaagaggaagttggcagtgtgttcttataaagttgagatttttaatgtcagcttttttggtattgtttctgggctcaagtagtcgtgtttattagtccgaaatattattataaggtatttaaagagggctgtaaatttcctcttaaatgtttcctttaaagccacaatttcagcctctgcaatatgaatgactgtatggcaaggttttcatatcaaatacgtcatagactattaaaggaagtaattccttaaaggagcataatgt

SEQ ID NO: 110815 - DNA, 1054 bp, Homo sapiens
ttatgtttcaggagttatataacttgatggcctagcactcaatattgacaaagtgtatccctttacatgagatttgacatcagatttaggcactggatgtacatagaaaactagaggtggaatttttatttgcatcctcacgtcaggaatcttaatttgagttaaggaactgttgcttcatctgaattagacttaggtgaattgttgagtgctttttctctcgagagaataagttataagctgcatgtgaccacttgtttatgatggtgataattaattaaattaaacaactgccattggaagtctttaataaacaaaggaacacgtgcttgtgaagctcactactggctagtgtaattatgaaaagcaagggtacaagttcacattttctcacatgatacagatgccaagtagctcacctgaaacaaatattctagcagatgggaaaatgtgcacaaacctatatgcacaacatcctttataatgctcatttaaaaacatatttttttcacaagaagaacaagtgacagaacaaaggatatggaatttttgacaaataatggggaaaaatgataggacaaggaaagtatttgatagttgatatatatatgatcgttttataaatatgtgtaaaacaatatataagtattctataaatatatatttatagaatatatgttttgacatttatataatatataattattatacatagtatatatttatatgtaatataatatataattaatttatatataatatttatatataatttatatttatatattatatatatatatatagcaagccatagttgcccctactgtctaatgcagtagaggcatactatatgcagaactcataaaaaaacaaatttaggatttacttcctctgtataggttgttccgagatacgaattaatgtttcaatttcttttcttagttattgtatactttattcatacttaacactatgttttcccaggtatatcactaataaaaaagtttactggtttaatacatagtttatacactgaagtttgatttttcgcatt

SEQ ID NO: 110816 - DNA, 1011 bp, Homo sapiens
tttttcacctaagcaaaatataccttaatttaataaaatgttttataaaacgaactccctagttcttggatgtcagtttagtctcataggtttcttggagtcaaccatgaaagcaggatacaacagaggagcccatgtacaaatttctcttgaattaatttctgccagctctgattaaagtgtggactactagagatgtcaggtgccatcgtttcctgcttcattttactcttggcctgtttggcccctgccacaataaatccgactgtgattgtgcaggaattgcaggttacagttgctacggttactgttgttcagccagaccgacatcattactcatctagcgcgctgccatgatagctaccgctgatttctgttgctgagactgccaaagagcttcatgtgctaagggtgaaagttccgtcgaaggtggcgtctgtgttctaatttggtgtaaggaaacactatctgaattatatactgatactttgctaaggggaacagattgactctgtatcgagagagaaaacttagaaaagtgttcactttcagtgattaaaacaccaagtccttcattactaaggtaactttttaattacttattgggcccaagggactatgtttttgccacttaaaaaatagaggcatacaaggagtattgcatttaaaaaaattaccactatttaaccaaaactttattttcaaatagataggcaacagacttgatatatggacatctgaacacaactcaaaatagccattaccacttgtcatgaaagaaagaaaagtgcaaagccctgagcaggacctacttctacttttattttttaaatcaacgtgtaatcctgtgatttaaacgtcctaaatccaatgaagattaagatcatatttgagattttgccagatctagtgttgatggtttttacttcaaaggaattactaatagacttgttgctaaagaaagctaacagttgtccggtttctgctgttaccaacacacagagtggacct

SEQ ID NO: 110817 - DNA, 1049 bp, Homo sapiens
aggtacattagggccaggatattcttaatgagatctcttcatgctctcccagttgatgattcatatagttttaaaattcatctataaaataaattacagatagaaacaaaaagactgtgactcaggaactatttgttagtgcatatatttagattgctgttttaatgatgtgtttttctgaatgacaaatgaaggaaaaatacaaatgttagaaaatgctgagtaaactccttaaactataggtaaagtattctgaaagttgttcagaagatttacatatgttgctaaggaacactttcactactaataaaaattttattttttaaaataatataagattactctgttagctttgtaatatgtacatatgatttgatctatggaacattgtcatctttatataaattgcataggtgattttaagtgtatttttagactactaattatgtcaaaatccagtaaaaattgcaaatcttttagcactttaaatctaaataatgttacattatgagacaagtttgaaccagaagtcgttttgttttgttcttttttccacaattccagtacttctcaaagtagcatagatctatatggtgtatatccactcattacatgttacctataactgagttgattataatcactgaattttttctggagggttaaccttaaaatattttataaattttgatataagaaacctttggatggaagttttaaaagaaactaaatcttagagaaggaagcagtgaagagtaaaaagaccagtccttgacaacacctatggcctagggtacagcatagaggtgtgaaatgttattaagagaacatctgtgtctcttgaaacatcccccaaatgaaagtttatagcaaagtatggcaacttgatttaagtgttaaaaacaaaacaaacaaacaaacaaaaacttaaaagagaaataagtaaatctggaaacagaattggaaaaaatagctttgccccatcatgataggtttcttctgctagtgaaagattaaagctcgaagtatgtgaatagctgagaacagca

SEQ ID NO: 110818 - DNA, 1868 bp, Homo sapiens
gcttcccctccgacagttccaattgattgaaaaaagcctaatttaaagttctgtttgttctatgtcttaaaccatcagaattctcttttgggacctgaggaatgctctggaggaaaaagaatccaaggataaaaagtcattgcaagccaacaattgttcctaatcctcacaaaatgctggagaaattaaatttattctttattgctcaaagtgttacctaggtcactgggcgatgggaaaattggactggaagtcgagtaggcgcaagctttgttttgtgtctagatgcttaaccttagacacgacaaggcatcttagagtgttgtgggaacttggttcagagcattaacaccaagacttttattaccccggatttataataggctgtgctgtcaggagatgaaaatgttgtgtttacatttcagtgttaaatgatcatttaattaacacctaaggggaaaaaaaacttgtgaaattcttagcagcttttattgttggtttcctgggaggttttaatatccaagtttcattgagaatttttttgtaagtaaagacacaaaagacattataaactttttaaggaagacaaacagtttaaccttgaccctttaaaaaaatattaatttaaattaaattttaaatctggtgttcttctcataagtttctagactaatatattaaaatacattttgattggacactacttttgtgtaaacagtatataaatatgattgaatttacattatacattttctagggtaaaacatttgaaattactgattagtttatcttaagaagtttaaaatgtttagaacactgacttaaacattttgcatctgttaaactaccactgtagttacattgtttagaatctgcctcaatgtaggtattcatatgcaagcatattctattggtaagttatgtcattattctattatttttaatcattaatttggatatagctacatcatgatgaaagattttcatcatgatgtagctatatccaaattaatatatatatatatacacacacaaacacaatagggaagaataatgccattaatatgaaaactcagattcacttaattagaaataactaaaagattagacgtcataaaatgcttttatttactcttgctcttttatgagacagttaaccaaaaaggaatggtcttgaggcagagtgataacatttggaagatgtaatgtgtactgtcaagagtagctgcatagttagtaacactttaagggtacctctctaaaactatctttaaagtttacatcttttttattcccattttatctgaatatgaagctttatgttcaaatatatgaaacttaaaaaaaatttaccagtttacatgctgttaaagtaaaatctttcttaatttttccagaaatgaacatgtcattatgatgtagtctttttctaaatacactgtttatgttcacactgaaacagaaatgcttatctgtttttttttttgttgttgttgtttaaattcaaatgcctcaggataaaacccactctctgtcttattcatgataaagaagtgcatggaaaatggaatgttgttaaaatctctcaataaaaagccctgcttttaactaaggattataccctcacttacaaaacactactgagcaattatgtaggcactttttatgatgttatatgctctacttacttctatcaagtttcaacctttctgcaaactttcctcattttttttaacacactttgatctttttcttcccaaagcgacttttctacccagcctcttgtcacaaaaacccagaaataggaatatcgctttaaacattttatcttctttacgtaaggaccaaccttctggttgagttagttg

SEQ ID NO: 110819 - DNA, 1816 bp, Homo sapiens
gcccggctgatttttgtgtttttagtagagatggggtttctccatgttggtcaggctggcgtcaaacttcacacctcaggtgatccgcccgcctcggcctcccaaagtgctgggattacaggcgtgagccactgcacccagctggttaaaaaaatgattaaaggagatttgatgcttatgccttattaagtggtgatcttgatacttgataatctctcaatatgaggtaagtggtgtacaactgaggtagttttaataatcacctgtctctcaaacatcgctagtggtagcatgaagaaataagttaaaaattaaacagggcaaatcaagataatataatggatttggttaataaaggtttatatgttcatatttgcgttataattttttttgtaataggttggaagcagggaccatcattttctgtaattctccctaggaaatgcattgtgcacccgggacaattcattttcctgactttttgaggagaacagaatgtgtggaacctgaataccctgaaggcaaaggaatctggagtctgtttctaagaggagagcttctctctgacttggtgtgggttttctttccctctgttgaaggggaatgaattccacacctaatgaatagtttcaaggaaagttgttaatcaggtactccaagtgaccaccctggattcttcttttattacacaggaacgtgagggaatgagaaagcagcatagttacatttgataaaaggaaatactctttctcctctcccctcccaccacaccatcccttggaatttagttgatgtgggaaattactgcagcaaataatgtgtttgaaaaagcaaagttgtatgaatgagaataacgcttgtagctacaataattatgttaaaaattcacaaggtatatccatcatcatatttcagagcaagagttttcgtctaacgaggttggaaaagaatttttccttagttcttgtcaatctcccagggaagcatggcatgcaggaataactgttgttaccaacattatattttgtgcttttctgattcatcagaacctttctgttgccgtaaaatgggaaacttcatcaaaatcagatgaagaacttcaagtaaatgtgacagaggggtaataatgaactataaatataattgatttttattcagatggacaaatgttattctttaatcctttcccatttagaagccatactctaatttaaaaagagaaaagtggtctctaatttaaaaagagaaaagtggtttaaaacaacaacattacagtccagatatttctctgtcttctaaattaagccacctgggttgaagaacactattcaagtgtgggtaaacatgttttgataaaaagttttgttatttccaaataactattatacccccaatcataagtgtgatatctattaccagatactcatttgggttgttttttaaaaataatatgattcagttttaggtttttaaaagtatagttcttatcttcaattctcaagaatatgtaataccttttatttattactatactaattttatattatatttcaaagaagtgatacctccagtgtgcactccagtggttcaagagaaaagtgttctgtggtcaaatgtgttgggaaataatgaaagtcatatcacctgtggtggctacagtgtacacttgtgtgttaatcttaaaggcatactacaataaataaatctgtttaaccttttaaaatttgtttttcaaagttatttaactatagaggcctctcttctttcttaactattcctgtttgttcttgttaatccagagagcaaaaccagtttt

SEQ ID NO: 110820 - DNA, 1076 bp, Homo sapiens
agggctaataagcacataggagaggctggataaatacttgctaaataaattcaataaggtcttttcttaaaaacaattttctttaaaaaaaaagctatgtattgatgtttaagttttataaagacttctcattcttttcctccaagtcaaatttcttttattgaaacagaaaacttgcttttgaaatgaaacaaaatttcagtaacatggtatctgatttttaaacagcctatatagttgcacataacagagtgtgtttatgtgtgcaaattagtaagtcgatagaatttccaggtaaacaatcatggctgttattgtatgccatcacgtttattatggaaacatattattgtaatttatctgggaatttaaaaaaacagtgtgtgagtcagcacgctgtggtacagagccaagtttttgtgggcaaacagggtgggattccgatcttggcttcagcagtgtggtgtgtaggcctgggttcctcacctgtggatggacgctccttacctcattggcttgttgtgaagatcgaatgagtctgtgaggtcagtgaagcacttacacttagtaaattctcaataaatattcactgtgatgttttttattagaaacactgacacattactgagtgcatgtgctctgcacgtgtgcatgacaatgaggaaatttccctttaattcctgaagtgctgggtgatgatctatacccaggataatttttctagtaaatcagcttattggggatgcctatggataaagcccttcacttttaaggtattccctttaatttaacaataagacataaaacattgaagtatacaaaatgaacggctatggttaatggattacctgcaaataaatgacacctgtccaaatctggcttcaataataagggaattcatcactttacaaaaacaagaagttcagaggtaggtcaagccatagcttttagttactttctccctcttcatttctccagcctcactgtcagtgtccaaaggctttgctcctggtgtcaaaacagccatcagtgtgccttgtgcttcctggttcatagtcagtgagagagagaaggga

SEQ ID NO: 110821 - DNA, 1424 bp, Homo sapiens
gaagccttacctaatcccccaggttaaaccatgttccctttataaatccccacagcatcaggattctttcctcaactgtttttaaatacagtcagcccttcgtgtctgtgggttccccatctgtggattcaaccaacagcagatcaaaaatatttgaaaaaatgaaaaagaaatgaaaaataaccattaaaaaatacaaaccaaaaactatacagtataacaacaatttgcatagcatttacattacattagttactgtaagtagtttagagataatttaaagtctatgagaggatgtgttaggttctattcaaatactaggccatgtaagggacttttgcattcttagagtttggaatccctattagcctagagcacggggtcctggaaccagtgtcccatggataccaagggacgactatatgtgtgtatttgtgtgattacttatgaataccctttcttcactagagcttgaaaacaggggtgggttttcactcatcattgttttgccagtgtctggcatatggtggttgcttggtaaatatgcgttgaataaatgctaaaaaatactgttttgtcagcctgttttcatggttttttttttttttctgattacactcatgatttacagaagaaaggttagcatttgtattaatatcttatttttttctgtatcatttttcgtaataacctatatatcagaaaatcataaagtctgcagggacagcttctgtgtccctagcttaaattattatgcccatttccttcttttagggctaagcttaaaatttatcttcactggcctttactcagtcaaggctggattgggtgtccctcccaatccaggggtggcccagcatcctgttaatgtggtcagcacccaactatttttttttcatctggctctccactgaacttaaaagtagagactgaatttagttcgatatgtttgcccattgcccagcacaatgcctggcatattagacaccagagatacttttccaaatgaatgaattaataaatgcatgtcttgcacttgtgtgatgttcctcagatatctaagtcgttcctggaaaagcattcagtaaatagttgtaattcagtgcgttcagtgtggtatgcacattcttcaaggattgtccaagttaatctactttttagtgatcttatcactggattgcagattgcacactacatacgagtatttggctgaggaggaggagaatggggcctgaaatccagcatgcactctgaccattatggtatgtctgctcctaagaaacctcatatatatatatatatatatatatatatatatatatatatatatatttttttttttttttttttttttttttttttacagcaatgctatgtgtaattgcatggtcctaaatgtaggaacaaaaatgttaaaaattttc

SEQ ID NO: 110822 - DNA, 1018 bp, Homo sapiens
aaatttaaaattgatgctctgccgaaaaggcataattgtaagggaatctataattgcagccttcatttctcttgagtactaggaaaaaaaaataagaaaggaaaaatggaaggacagatattattaaataaagtgttactagcatcacatgctcaaattaacatgttctttgccacagtgctctaaaggagatatttgcactttatctgtatgatggccagtgccatatatgaagtatattcaatccaagaaaatgtctgggagtcagaagtatgttcagacaagttttctatcatgtgttgtctaccagccttttacatactgtagatattctagaaagactaacaagctagacaaattaatttctccttttgttatgcttatgagaataaactgattaaacagttcctattctatctgtgtaaacagagacatattagttaacttactgcttattttattttcccacatacttacagtaatttcaaatgttgaaaaatgaggagagcagaatatggcattaagcaaagagaatgaaataaaaaataaagcaatgatctgaactagaaaaaaaagttttaaaaatgtaatttttcagttacacaaaagttaccatggcattacctttccttttgtgtctgttggtgatttaatttagtagttttagaaaatgtgtctattgctgtatttaaaaattctaattacagcaattggtaaagaagtttccaagtacaaggggtatttgtagagaacctgtaggactgacaagtgattgacaggtaaacaaccccactgtggccttatattccattctgtgatgttggactatagatactacataagcctcaggaagtaaccaccttccaatttttattaaatgcttggcgtcatggatgtaaacagtattgtgccttagttgactaaatgtggcactttcttttacactgccgcaccaccctgactcagtgtgatggaatatctgtgaaaagaacaaatgggaacttttctttaatgcgtt

SEQ ID NO: 110823 - DNA, 1025 bp, Homo sapiens
tttttataattcaaaatgctggctatttgggatacatctttatttttatcttaaagagataagcatgttactggctatttgaaactttctgtatgagaatgtctcttttttgcaatgctgcagtgaatcatgcttgtaagaatggccaaatagacctatgtttgctaacgttagattcttgttatacccaattacccttttgttcttcatgccattctgaatgtcattttgcaccaatggccaggcattaacggggcatactaactctattgtacctgccacttatgcagtattagtttcagactccctacttttaattgaagagctatgtagttaaattatcatgtcatgaattccaattcactagaagagctaaggaagaaaatgctattgaaagctttcccaagtaacatttcttttaaattgacaagtctttagactaatgagatattagtagaggaggatgtattttcatttgtaaataaaattgagattaaaaaatgttaaagagaaccattttagaataatcctctctctcctgagaaaagttgtcttgacaacagtaccatttataattagaaatgatgaatattttatttctcgaaggaaaattctccctaactatgctagacagtgatcgggctaaatgttcatcaggctcaatcattttttggtgcaaaaatatactgtcgattttttggctcagtaataatcaagccttgccttgtagtttataaggactgggttttcctatgcatttcttaatagtaatctgtgaaattaagaaaaagagatcttattgacctaattttacagaaagagtatgtatctaataagtgacaaaaatagaactagagaaacgaagattaatttttttgcttttcatcattttgccaaaggggcagaaacacatgacacatttcagagttgtgctttcactcatgttcgaatctattcttttatatcatggaatttgtatttctttcaatttaaaatattttattttctttgcctattataagtga

SEQ ID NO: 110824 - DNA, 1060 bp, Homo sapiens
attccatgcctccatccctccacccgctctatttctttccctccctccctcccttcccttccctcccttcctccctccctccctccctccctccctccttccttccttccttccttccttccttccttctttccctgactccctctctccaccccctctatttcttttccttccttccttccttccttccttccttccttccttccttccttccttaaactaagggtctccttgtcacccaggcaggagtgcagtggcgccatcatagctcactgctgccttgaattcctggactcaagccatcctcctgcctcagcctcccacgtggctgacactgcaggagcacaccaccacactcggataaattcttaattttttttcatagaggcaggatctcactttgcagtccaggcttgtctcaaactcctgacttcaagtccctccttggcctgctaaagtattgggattataggcatgagccactgggttcagccagtttcttattcttgttagacatttgattaatacttgttcaatctatatatgcagttactctttttgaatcttacctatgctgcattaagacattcaagacaatggggtgaaaggacaggaaactagtatttagtaagtgcttaagtgtataccagggactctaattctttgcatctgttcttttaaaatcctattagcaactgtttaaaataggtaatattatgtccatgcatttaaggacatgaatctcacaggcagtaacttgcccaagctcacatggatagtgtgaggcagaactgggatttgagacccactgcctgtcccctgaccacctccaaagcccatgtcgttttcacaacacagcagctattatctatttggtgctacacattgctttaggaactgctgattctacattgaataaaatactctactgtctttgaaagactcacatgccagcaaggaggagattaattattatgatttttagtgataagtgctttaaaaatgtcctatggctaccaggccagggaccattacctgtgcctggcaagagacacgcttc

SEQ ID NO: 110825 - DNA, 1050 bp, Homo sapiens
gccctttctctggcagccaaaaatttagtgcttggttttgtgttaaatggcagtggcttttcttagttaagtgtttctagtatattcttgttcaccccgatttactattttaatgctcttttatgattttactctgtctgtgcccttaaaaaatctgttttggaagatgctggagtataaatagcatagaaagtgaactgcatattctgacatttacagttctaaggataattctattttaaggatgattctgtctgcaagtaaagttattagctatctatatactatatgttttagacaaattttgattgtcatataccttttctcagactctatctactgtgtcttgtttattgttgttgttgtttttcttcccataaaaccatgtctcttttacacaagaatgtgtaatgactcagtctgacttagtttattattaaactgatgtttcaaagggcatttgattcttctgaacccttccataggccctaaattttcttaattgtaccaaatcccatatggatttctataccccagaaagtatggctacccgtcttgctcatttccaactttgtgcttttattttttctggttcttgttgcatgtgcttgcattttttccttgggttttcaactactccacttctgccttgtctttcaaagcctggcttaagactaacctcttttagtaagacttacttaatgaactctaagtgactcttattctgagtcttcttggaattatctactcagtttttgttctattaatttgcccttatttgtttgacatgttgaaagcattctgaaacctttttttttttttttttttttttaagtacatgaatgagttctggctccagttagaaaatttgataattgtttcttagaatgtgtcttcttttcctttttttattttccccaaaccacagagtttaatgtgctcattaaataatattggctccctaattcttagaaagcatagaatattgattatgtttgtcatagcaaacattttattaggaaataacaagataattatttttgtaaaatt

SEQ ID NO: 110826 - DNA, 1497 bp, Homo sapiens
attactaatcccctccatctataatctgaatacctttcccatcaatcttgccttctccaaaactttcttttctcctttattctctttctctttttaaaatttttaaatttgctttctgttttaaatttatgtgggaacgtagtaggtgtatatttttatggggaacatgagatgttttgatacaggcatgaaatgtgaaataaggacatgttggagaatggggtatccatcccctcaaggattcattctttgagttactaccctttctttctcttaatctaagtgtttcccttctgtactaccttctttatttaatattcttctaacccttgggaagagaaggagaaataataaccacaaaaacaaaatcaaaaatccctggacatattaatttatgtgtgaccattcttcatttatgtattataatccttttaaaccaagggagtatctgtatcttgttcattcattaaatatttattaaaaaccttgtagtgctacttctcttctggatgtttaggacatattaataaacaaaatgatccatgatacctgccctcatagagtttaatttatggccagaagagatagacaaaaacagtaacataataaatattttttataataaatatatattttttgagatggagtctcgctctgtcccccgggctggagtgcagcggcgagatctcagtccactgcgagctccgccttccaggttcatgccattctcctgcctcagcctcctgagtagctgggactacaggtgcccgccactagacccggctaattttttgtattttttggtagagatggggtttcattctattagccaggatggtcttgatctcctgacctcgtgatcggcctgcctcggcctcccagagtgctgggattacaggcgtgagccaccgtgcccggccaataaattttgtaatatattagaacacgttaagttctatgggaagaaaaaagaaagacggaatgaggagggtagggatggttggtttcaatttcaaatagatagctagataagccttactaagaaggtaagatgaacaaatacagagagatacagatgcctggggatggactaaaaagacagccagtgtagggccttcaaaacaagttgccactagtaccccaaatgctgaggaccttgcactttgtaggagtatttgaaagtatattgaaataaagagcaaggggtcactggccttctgctcagacgcatagactttagcaaaggagagctgaaggaattgtgttccccttcagtacccatggagaatgtgtcctctgttgtgtaagaaagaattggatgagatattatactgagtcaatgtttgtaccataacaccttatttttccttagacagacagtaaagcaaccactaagggtgcttaggcagccccacttactgttttgtttactgtaacttttagtgttcaccaaacacatcttcaagggcattttaaatagacttgttttcaaataga

SEQ ID NO: 110827 - DNA, 1055 bp, Homo sapiens
tcccaaagtgtgggattacaggcgtgagccaccgcgcccggccacaaagtatccttttaaatatagttgaaaccacaaagggaaatgtggtgtttttgctaccgtggcttacaatccaggagagtagacagacacctgatgagacagatacccctctgataaagttgacaatgatgtaagtgctataaagagaaaatgagtttctctgggattggggaagtgagaattcattttgattagagcaatttgggaagaattcttggagaaatttttttaggtattatacacgatttcatggtcttctccaagattttgatatttctctcggtctctctctttcattctctctgtctttctgcctgcattgaaacactgctagcaaaaattttgatgttgccagggcatataaggctttaaatgaaaggaatagccatctgttgtgactgactgaggcagggagagtggatatgtagtcaatattttctctttcctttccttttacttccaaagtcttcacacatgatttgtatcctttttctgtctccctcattgatatcctggaatcttttgctctgtccattctagtgaactgctttgtgaatggtcactgttgaacttgacttagtcaaatataagaacttctaatcatactaatcccctttaacctctgtgggttaagagatactactgataaccctagcttctgaaaatcattttctcatgagagtttctttctgttattttttctgcacttttcttttgtttaaatatgaaagatatttttctcctctaatgcatttttggaagagaacatgcttaattttaaattctgtagtgcttaccttgccacgtgtatgtatgtaatagaagctctataaagatactgagattaattttgggagtgattatattggtcatacccaccattaattattgatagtaaaatacataagttatgtggatagaattaaactaatatttttgtgaaataatacaaatatctatgttttaaatcaaattaaatttgattttaagtttgcatcctatgaggcagg

SEQ ID NO: 110828 - DNA, 1067 bp, Homo sapiens
ttattactcacatttccattagtagaattctttccaagagaatattctccttattgttttccatttcaaggtgtgtattcaggacagatgagatttttttaaaaaagacattttcttaaggaaagcttacattttaaatgctacttttcctagcaaatgcaggtggtcattgtatgaagcacatatgaaatgaaacctttgatttaataccaaactatagcctactgtcaactctaagaaaactgtatgatccataattttaagtaaaccaaaactttactttgtttctaatattccaggtggtcttttcagactgatatctatgtagaagtacgcaagaaagtgacgtgattatctgattatcagattatgtttatatgtctctgattgttatcaagctcaaaattttccttaaatagctatggaaagagatagcagtttactactactactattattattaggtcatctaatgtaattcaatttataaatctgatgcatacatttgactgataggatacagacttttaaggacctagcattataaaaaatataatttaaatacatagatcaaatagagccatatataatattgttaaatagggaacaagataaatgattatgaagatgtatagatcttttaatcattcagtgtttgtttttagtggacattttattttgggatgccattcagtaacttgaagttattaaatgaagcataatcaatattagaacaaaagccagcataagaagatttatttaaatttgatgtatttagaatttggagtctggtcactagaattttgaggctaggtgattctatgaaaggctgtatgtaaccaccttctactctattccttcctctccacccaggtcaaatatcccagaatatggtattatttaagtatcatcaacttttaattttagtgtgtttccattttcaaactaagacaggtgcaaagttgaggttaccagcggtacaagatcagatcacctagttagatattgatgcatagtaaaatgtagcctaacacactctattcataatgtggattgacaactaagaa

SEQ ID NO: 110829 - DNA, 1110 bp, Homo sapiens
acctcctcattatctctccaggaagcaggttgattctggccggcaaagctccctgaggtgggatccattcagtccattcttacaggggtaatagggcttggggctcatttcagtcagccttcgttggaagagagaggtccctttcctttccttttgaagattgattagtttccaaagaaagacagataacaccactctcattctcactttctctcttttttctgttcttgaaaactcaatagttgtgtacaataagaagtcttgctagacaaattgtgcctatgctttatgttctgtaaacatgattcttgaagctgagaaacttttaatggaaccctttagctaagctgaaattacttacataatccaactctgtattagttttcctggtttttgaaatagtgtcacaaaatagcaaaaaaaaaaaaaaagaaaaaaaagaaagaaaaaagagaaagaatgggaagtagagaatttctaacacagtcatctaacagactgactcagatgtaacaagaaagtataataataataaaatttaaaaaaaaagattaacagaaaacaaaacaaaacaaaaaaaagagaaagttctcagtagccctctggaaagagaaatttctaagcacaacttttttttgttaaagataattgaaaataattatatgtgtgtttggtaaaccacaacgatctttctatattgttaacacctaaagtaggtgaagaggttaatgaggaggtttcccagcaacaaatttaattgtagtcatgtaaaaattacataaactcaacataaaatttgaacacctgtgcaggaatctgaaaaaatttcattctaagtaattcttataatttggactctcagtctagtggtgagaatttgaaaaagtaaagaatgctcatgataaagtttgacaggtgctctgaaagcagtaaatatgaggaattaaggcaacctctacttttgacatcgtttgctctgaggaagtattgtatatcctgactttaattttttcaggaccctgtgcacttacaggatgacagaaatgatatttcttctctcctgaaaccctggggttgatatttacatatcacactcagacatacaaaaaa

SEQ ID NO: 110830 - DNA, 2158 bp, Homo sapiens
aaatctttaaagcacatggaggtgtcctggggccgctctgctctccactcccatcttttcttcaacagttgctaggatgattctatctgaagcccccactttttcaggcttcctgtgcctaagttcccattgcagctcatgcagactgcattttggccctctcacacagtgcatggttatgccacccgagagggaaaaatgcactgtgatcatcactgataaccaccattatacctggtcaaaaggagatgtgtaagaatgtaagaagttattttgcctactgcatgaataattaatgctagtggcctgttttccatatgtatggaaatatagagagattcagccaaaaatactgtactcttgtacttttttttttaatttggtgattatccatttacctattttaattacaaggaagagctccaaagaaataggaatgttttaggaagaacttgatggaaagtgcctaactgctttttaggactattctgtgcaatatgtttttaacaaaaagagagattccatttatccagcactattttcatcattctgttgcttcaagtggatgagagggttctcttgtctttcttattcttcacccacttttagagtttaacatcttacatttactgagtactctttataggtacgacacattatgccagttgtttttgaagccttgatttcatttaattcttcagaccagtcttagaggtgggttgattctatttccatttcacaggtgaggaagcaattattttgagaggaatttacctgacattaagtggtgcagaaagggcagaacatggcttcaaaactagttttgtctgctttgtgagcctgtgatctctagaggcgtgattattggactttttttttttacctccttaaattttacaaaaaactaaagtgaggaaaagaaacccaaagagaaaaggtaaaatactgttgaataaaacctgttttctgactttttattaaaaagaaatgattttatattatctattgttaattttctaatttccaaaattaactttgtcctgtttgtaaattgtctttataatttatatctttaactgtgttctatagcatggatcctgctaaattctgactttcatgctgggaaggaccctattttccatttttatgatctttgttggtttctttgctctgttcttacaattttgcatatgaattctagaaataaccagataagagaaagcaaagcatagactaggagacttttaagcccactcacagcttcaagcatcatgataacaaaattgaaagcaagtgtattgatttgggtggtattatatttgtctctagggcttgaaaagacctttaatttctctctttttacacaccattttttgttgtaagtatgtttacaaatgaataaatgtcatatttaataaacctaatggagagaagttgcctttaaagaaaccaacagatatgagcatcatgttgtgagcatgtttacatttacgaacatattattttctcattacctactcagttatttagaaatcataggagttagatgctaaatgtcattatatttatatgtgaagcagcatttctaatctccagtcacttctttcaacttacacatctgactttgacctctcacttcccatggcatttcagagttgttacagaatttataatcaaaattagtttggcagcttagaacttattggaagaaaaacatcaccttattctgccgctattatcatactcaagaaaactgctttttcactttgtttaaactgtatttttgacttatagtagatcaatttctccgcatttcaatttacaattatatgtaacatgaatctcaatttttgaaatacctaactcaataatgtatgaaatcatttataaaataatttctcctatttgctttgaaggaaattttaaagagataaaagtgcttccactttcacacacaagtttaactcataagtttaatggtgaccaatattatattcttggtgtaaatcctactaaaattttatctatcctgtaatattaaatatatataaattacacacagtatgtgtgtgttattaatatgcacatgtatatgtgttggtgtttaataaagttggtttctacaaaatttcttagagctacccttagcattaattta

SEQ ID NO: 110831 - DNA, 1051 bp, Homo sapiens
agggcagcatctttattgggatagccagcagtgctgaatcaatcacgtcctgttgtggttggatctgtatgcagattgtctttgcacagcatgacttaataaaagctggccatggtggtattttattataattatgatgacttagttgcattagcatcagcctcaatcacacagtaaaagaatatttggtggctgaactaggaagtgtgagaacctccatcatttgactacttcagatggtgtattcatgatccttgaattaaaatcaggcaggtaaaagggttttcaatgaaaaaaaaacatgaaaaaggagtttgaaaatatataactactaaggaaaggaaaataaagccttgaaaattggtatcgcataagcttacgtggtatcattttgtcgtttaaaaaaatgtgtctctcagtctttacttagaaatatgtatggaactttatttaaaagtttcccttaaatgtgaacttatgtaaaatccttgtttagagtctttgttaggctaccatttcagaataataagattttacccccatgcatgtgatccaaagcattacacctctccaagccacctactaatcttgtctattcaaatgggattttttttttctaaataggagacaactctgcactgtatcctgctattcttccaactgcaggacctcatggagcgagagatccaaacctttctgaagtactttaccttctacctttttcatgctactcaggattgaatcaattggaagccaacaaagccattctgtgttactgtgcctcctgactgtcagcacgctgcactgtgcatttagataattctgccagaaggcatttttataaaaacagctttcaaaatctattcttgaaaagacatttgtatactcattatgccattctatcatttatccatagggagttctgtaaataaaacactgaggtctaatactatagtagctgatggcagtaatcttgaacagagtaatttctttttctttatttatctcgatagtgcacagctggttatgaaaaaataatcacaaggctttg

SEQ ID NO: 110832 - DNA, 1011 bp, Homo sapiens
ggtcagagtatgatatggggaagattaattgaatggtaaaagtgggtgtggagaaatgaggaggcaatttagtaatatagaagagggatttttagcatcctggcatagaaggatggccatagaaatgaagaaaagaagatagattttagaatccctagaagatgtaattggtaaaatgtggtgataggtaggtagaaaaagagatgagtatactatgttttcaaggtttctggtttacacaaatgagataggaaatataggatgagatatagccttagctataggggagttcataagttgagcatgagacttttttttttcaaattagttcttgattactctagaacttagagcaaactatggactgtctacataaatctaggagtcataaaatagagatggaaattgaaaacatagaactggattgagttatggagaaggaaagaatatggaataacaaagaaaagcgcttaagagcacctactgccctaaggaatgcgggcatttaatgatcagttaaagaaggaggaactaataaaggaagctaaagaggaatccatgggaatgtggtgacttagatgtctaagaaagagatcagaagtttgagaagaattgagaatttcagataaacatgtggattgccatgtgttagtatatcctgctcaagggtggtatccataaattttatacagatataactgaactctgagatttttccatagtacttagaagctaagatgatttgtatctgtttagggttggagctacttagggcacatgtaacaaaagcttgaaaatataaacaagtttaggttaatggtagagatacagctgctttgatgaaccactgaatctaagttgattggtctttcatcattattctcatccatcatcttctgactaaggatagaattgaagtcagaaagcctgatagaaatgaataaagtctaagttgttggtaaaaggtgaatgattttcccatctcatcatgtctcaatcaccacaaggaca

SEQ ID NO: 110833 - DNA, 1031 bp, Homo sapiens
gagacagtgttacaagaggccattgaatttcacttttttgaacctccgttgctggggcattggttgctggattgttattctgttagcatgatgaactaattgacctagcagggctccctgtagaataacagcttctgcttagttcatcaggagtacaatttgttgtttcatttcctcttctagtcccattggggaaattgaattgagaaaagactacctactgggagcgttcagtgctcatgactgaataagtaactttatttatgtatttatgtatttatttatttggtactgtcttaattagcaaagaaggaatgactctattaggcaagagtcgactgtgtttttgatacaaatgaataagctccgttagcaaaacatttgattcacagagacttgtcatagtcagggccccttgcaggtgcagatcttacataaaattttaatttgctatggtagagcagttttctgttttataattgttattcattcaatgaagacattgaagacaagttaatggctgttaactggacttaaaaaaaaaacaaaaacaaaagcaaacacccataagttggaagtttggaagatagattcattgggccgcatacaaacatgaaatgtcaactttgcctcaataaagatgaattatttatctacagcagtgtccaaatgtggacttgaacagtttgtcattaaattttgaagcctttacaatttttcagttgcatcattgtttcattagtgtgtgcattcttagtcaacaacagagaacatactatctgaatgtaatgaagaatgaagtctgatgatacattttacattttttaagaagctattactagtttctattgtgtcttagcaaattcttaagtgtattaagcagatgttctaggctatgatttaaacgtcccctatattacaatctcacatattttctagaacactgttcaatttgttgcttagcctgagagtaggggaagagtagcatagtcattataaactcttgctctgaaataagatatccctgattc

SEQ ID NO: 110834 - DNA, 1006 bp, Homo sapiens
tcagcatgttctactgtgagtaggagtgtttggaacttgattattgtaagacattccaactgatacaaatgataactaaatctctctctctctctttctctttctctgtgtgtgtttgtgtgtgtgtgtgtaaatctctcactctctgtgtgtgtgtgtgcttgtgtgtgtgagagagagagagacagacagacacacaaaatgtgaatgaatgaaggaaggaaggaaggaaggaatacaggagagaaatttttctgtatgttaggtggctgcgattttggctggccaaaactgccttttgccttcggtgaactggctagagctgctcactacaacccctccccatcccctaggacaaaaccactggacctttctctctttttgtctctctctttaaaaagacagaaaggaaaataaggtttgcaatcagtattcagacattcttatgactaataggattaggggcgttacgaagggatttgaacaagataattagtttactgcttagtccacagtgaagcaagaaaaatacttctgagaaaaggcagacaaaataggtcagaaaatgtgtgggaaatgaggtaagacctctcaacaaggaccacgatcaactggaatattatgaaaggactcctgagccttcattcatagctgcagactgtctgcctttttttttttttttttaatacttggccaccagaggtgtgaagcaaagtgacttacttaattttagagttaataggtgttgttcctggaccctgagtatcctgttccaagtgcataaatgctgccttcaaagtatttctcacaacgtgatgtaaggggaatgttttggaaaatctgaagagctcttatcgggcattttacaagctggaaaaaattatacaattaggagaactctttaaaaactaaaattttcttgaatagattcattactttaattgcaaaaataaatcttgaaaacataaatgtgaggggtgtgttctttgcttaattaaagtactta

SEQ ID NO: 110835 - DNA, 1126 bp, Homo sapiens
tccggaatttcctagatttgaggatgctctaaattttaagaccactgtaatatgaaatctgtaagcatcaaaacttattacccagagtggcttgcttactggaaaatgttgcactttttagggtatttgtcttcgattttatcaacataaaacatcaaattaattcaaatcacgtatttagattgaggtctacaaactgtaacctaaagtgaaatccagcctttttcctggatttgtaaataaagttaaattggaacacagcaacagtaatttcttcatgagtagttgatgactgctttcaaggtacaaccatgaagcggagaaattgctacaaaaatatggcctgcaaagcctagcatatttactgtctggcccttttcagaaaaactttgctgacctttgatttaggggcaagataattttgttgcactcttttggtcatgatcaataatacttaaattgatgagtaacagcctcctttgtaaaactaggcaaagtccaaaaattagagggaatggaaaatgcaaactattcaatcaccacagagttagttacaaggattaatgagataacatatgtaaaacatttagaaaattgcttggaatgcagtaagcacttaataaatgtaagcattttgtctcattcacttagtgatctcatataatttcttgatttttaattctgtaatgactcccaaatttatctttagtcaggacctgctctctaaaatccagactcatataccattgcctcccccgcatctccatttggatgtctgctcggcagaatctccatcttaacatgtgcaaaactgaatttctggtgccatctcccaagctggcttctcctgcaaatttccttctcatgaatgtcatcctctccttgttgaaggcaaaaaactaggagtcaggtcagatgcagtggctcacacctgtattcttaacactttaggaggccaaggcctgaggatcacttgagcccaggagtttgagaccagcctgggcaacatagggagaccctgtctctacaaaaaaattaaaaattatctgtgtgtcgatgtgtgcctctggggtcccagcacccagagaagctggggtgggaggatcacctaagccaggaaggtaga

SEQ ID NO: 110836 - DNA, 1059 bp, Homo sapiens
tgaagcttagagaagtttaaaagagaaagaaaaactggctcaaggtcataacactaataaatgacacaactgggatgaaattcttatataattaaagcaaaggcccagtcctcaagttatccccaaagtagagggagcaaacagaaatatgcagtattgcacacaggcttggcaagtctagcatctgtcaggcacttattctatgctgagcacttcaccaagcattgtacaagctctagtcgaacatgaggtaggcagttttattatgcccgttttacacatgaagaggtataggtacggagaggttgaatggcttggccagaaagtggcagagccagatgtggattcaggcactctggtttgagtggcatggatcttaaacccacactgtactctctttgttcacaggaaggcatacgatcttaagtcacattgaattaacattgaaatgtactaatttccacccttcataactgtgcttcccctttagttttttagaaatagcttccctgtagggaattctaaaggatagaaagcattgatggtgaacacttctcccaaggcttcaaacctctccccagtcttccctgagtttcatgctgcataacctgtgtggtacctgattattctatgcaagactgtactacgtataactagtctttctcttgaatgaatacaaatatctctcttttatgtgaaactcatttttttctaacacatactgttattaggatcttcaaatacatgaaaataattcttttccctgatatatattatttacctggatataggaacaaaaagagtttcattaagtaaatatacttttaatcaaattaggaatttaatctgtaatgacatttacaagttggcatactcatttaccgtccacatttacatttctttgcttttctaaagttaaaatctggcaaatactcatttatcattactcagtagtttccaaagtactccatggaagtacagatttatgatatttctcagtcagactctaagagaggttaaaccatgaaggaaaataaaattaccagtaattaaatttac

SEQ ID NO: 110837 - DNA, 1034 bp, Homo sapiens
ccaattcacatacttacaaaatatgaattggcataatcatgccatggctgctgtgtcttcttatgatacagaatggacctttgattttttgcatctttaacactgaacagtacactttctcacctctgaactcttaaaatagcctgctaattgaattttgacctctagtttatattctcattagataattttaacaaggttgccagattttttcccataaaacattgtttattatctattactacagggtttaaaagtattcagtttatttaaaaagttgttttaaagtacctttgttatagacactatggcaaagccctgggaatagagcagaatgttgccagttctatagtgtctatagtatactagatacagaaactctaggactaggcagaatgttgcctagttctacagtatctgtaggaattacagactctttcctgaaagagcagagatgattattaaatgctgtaacatccagtctctttaggcattctgactactcctagcattctgactttgatccaggctcctagctccttcttcccttcaatctgtacagaagctctttgctcaagccagaatggcctctctgttgcagatattcactgtgaacattgtagtgcctctgctcacaactcttctttgatagacccattacctccataggaaatacccactttattttctgtctaattagattctatccattttttgaggatctgaggttttggtttttttttttttttcctttctttcatgactacatcagcctagagtaatctctgtcttttctgacattctatagtgcttttcatctgctggtctcttccatagtaatcattgatttagctgaaacctccatttggagaacaaaaagttcctgagtctttttcctgagtcactatgtattgagagggagttatggcaatacatacatctacattccaatgaaaacttcacagactatttgctacataccatgtataacttattgaacttctgtgagactcatagtctcaaaatccggatga

SEQ ID NO: 110838 - DNA, 1046 bp, Homo sapiens
ttttatattgaattattattctgtcttgttcagcaaaaaatgcaagtgtcctgctgcaaaggttttataagcggtttctatagagactcataatggcaggaattattgatatttcaaactgggagccacaacttttactaacttgcccctcgcccagtctccccattctcccaccccacccccattggctctcaggatgttggaactgtggagcaatttgcattggacttatttttttctctttcctcttttaaatgaacgtaagtgaaatatgttcgtttaaaacataattttatggacatattcaagcttctataaattgctcagttcagactaaatgaagagagacttgattctgtgattgtacatcagtttaatttttaggaaaaataattatattggaatctgcttagctttatctacttctatgttaagaaatacaggtatatattaatgaaataacgactttctgttttcttgctttacacttctttttttctcatttagtcgactgcattcaaacaacctgtattgtgactgccacctggcctggctctccgactggcttcgccaaaggcctcgggttggtctgtacactcagtgtatgggcccctcccacctgagaggccataatgtagccgaggttcaaaaacgagaatttgtctgcagtggtaagggagaaggaagagtgatgttattgtgtttattgtatcctgttatgtaacagaatgtgagggctgcatgcgtcaaaggtttcagtattgttcactaatgttcaattgtgcactaatcactctacagagatcctctttttcagtgaaaatatgttctgagacctcactatatcggttggcaagtactggttacttgtatctaaattatgataaaacacttttcagttttcactccaggggaaaatatggaaaatcgctaaatgatgattctacttttgattttttattttcccattaagtaacaatttatagctacttttatgttaacaattgaaaaaaaatgattagctaatcctggatccctgctatgaa

SEQ ID NO: 110839 - DNA, 1002 bp, Homo sapiens
tcgtagactgtcgtgggaaaggtctcactgagatccccacaaatcttccagagaccatcacagaaatgtatgtgcctgaaattctttcttatctccccaccttcccggtgaaccaaactttgattttctttgggaaattctgagtttatcgaaggcacatctgatcaattggcttagacaaatgttctcttcagaaatgtattgattcttactctgattgtttaaaaacataccatgttaaagtggctgtgatgttttttcttccacagatagaattaaaaggaatacattttttaggaaaaacaaggcaaacaggattgtttatacctggttccaccctttgggcctgtacatctgtggttgtccatttctcagtttggagcagtaggaatataaaaagggaccaagctggggttagtaaaccacagaaacaatacagttaggtgatgctctgcctcctcgagagctcatgttttaaaaggcagtttcactgttttgtttgaattgatagttcaatgcaaagtgaagaaaggataacataaagtcaaatgtaaagattttttatatagtgcatgttttagcctatttgaagcagtgtctacctccattaaaagttaaattcttatgacaaactattgcacacgtattttgtatgcagctgctgaatgcatttctatgtcctcaccaaatataagtcatgtggataaaacaaggtcacataagatgtaaaatggaatgcttttaccatcttgaaaagtaagcactagggaaaattgttacctcaatattcattgacaaaaccccttttaaccacccagcccattatattattatgttataggccaattctaaattgtaactaaataaattatcttggatttttggttgaaataataggaacaacttcttagaataggcctacatagtatgcgaaaaagttgtttttaaagcgctcatttttaaccaatttatttaattatgataataaagtaacttatctaa

SEQ ID NO: 110840 - DNA, 1050 bp, Homo sapiens
atatatgtaattttaaaaattatagaggtcatgagaccatgcaaagaaacttaagtatgagtatataagtgtttgacagcttaaatattaagtgatgtgactgtctgattactagctctgtaataatattttaatcttaatatctaaactatgtaatttttaaaggtctgtaatttagcatattgattcatacaaatgtgaatgtttatggtcaatatattttgcatatgaacatatgttcaggtgttctattgtcaaaaataagacatagcatcttatatgggaaagtagacaatggttattttaaaaagtatgatttcttttttaaatttctgatccttcagatgttcaatgttgcacgttttggacatgtcttgataagtacaaaaccaacatttaaaagccatacatagctttttccgcagtaaatctcactgacatttgattgaatgtaacctaaccctatttctaatcttagtgacctgagcaataatcagatctctgaacttgcaccagatgctttccaaggactacgctctctgaattcactgtaagtattcactgtgtcactgaaggaaaagagaagccacaacaaagagtggctaccttttttaaattggggtttaaaaaatgctctcaggtttttattatgaataatgaattattaataatgttaattattattaaccacttctgggtcccattatttttatggaggactgctacccatcactaaaattagccaatttttaggggtgtatattttatagtttgatcattttgctgttaggagagcaagagttagatcccctttttgaccatttttttatttctttttttttttttttttttgagacggagtcttgctctgtcgcccagactggagtgcagtggcgccatctcggctcactgcaagcttcacctcctgggttcatgccattctcctgcctcagcctcccggtagctgggactacaggcgcctgccaccacatccagctaattttttttttttttttatttttggtagagatggaatttcacaatgttagc

SEQ ID NO: 110841 - DNA, 1035 bp, Homo sapiens
cttctgggaataaacccatattcaaatacattcctgatgctatatataaaacactaacacattttagcccatctatctccacctagttgccttcttttagtcattaacatttgacaattttaatcagggactttttttgaaaagtttcttgttaggttttatagatggcataaaggtttgtgtaacccaatacctgacctcaagaattttatactcctggagacccttggagagtatgacatgagtcacgctggcattttttaccacagacattccctgttagtattattgtccctttgtcttgatggtgtaaggaagtggaatcttttcagagccctggcagtgctgggcagtgaaaagttggaaaacttggatcattagaagaaaattatcaactatgtttcaattcccaccttgttagaaattatttaaaacctttgttccaacaatttttatttagaaactttagcaacaataagatcacagatattgaggagggagcatttgaaggagcatctggtgtaaatgaaatacttcttacgagtaatcgtttggaaaatgtgcagcataagatgttcaagggattggaaagcctcaaaactttgtaagtatttgtacttgcattgcagttcttctaccaaaggattgcagctcattgttcattataatcctgggagagagaaacacctacttttacccaccccactccctctatctctttcacattctctgttacacacacatacacaccgctacacacacacacatgtattgtgaattcagatggtcccttaccccaatattcctgccttcgatgtgtgttacacacacacacacacacacacgtattgtgaatgcaaatggtcctttaccccaatattcctgccttcgatgtgttcatagcagatgatcaggagcgtcccccatggcttctgtctcttctacaaaatagatcatccttgttccagtgcttatatggatctgactaccctgtcctgcctcaaaatggtcattttatttctttgtcttcaaaca

SEQ ID NO: 110842 - DNA, 1062 bp, Homo sapiens
ccacaaacatgagtagtgtgttgggctatggcattatgatggccatgacatctcgaggcaataggaaattttcagcttccttgcaatcttattggacaacttttgtatagctctgcttgaccaaaatattgttctatggtgcatgactgtacagtcacatttgggggttagggcttcaaaatacgaatttgagggggacacagttgaacccgaaacaccacctcaaggaacttatatcaaagtatttcttcttgttttgtttttcattcacaggactctccctgtgaaaagttatctaaattccactttctcctttcattgtatttctgtggatgtttttgaagtgcttacattttagcacctgagacagatattcacggactccctccttaatctagttaggtttcaacaagcgtcatagagcattttagaaccaaactcagggtagttaatcctagaatagttttatctgaacatacctattcttggtgtcttttgtcttggagctatgaagattttgagagcacatttccattccccctaggcttcttaaccctaataggccacttactaattcatatacatatttcagccagtcattgaattccttgacattgcaggtgaaatttgtgcatatgtgtgcttatggatttttctagcaacagagatcaaacttttctcttttttaaaatttttatctatttatttatttatttgagacggagtctcgctctgtcgcccaggctggagtgctgtgatgctatctcagctcactgcaagctccacctcccgggttcacgccagtctcctgcctcagcctcctgagtagctgggactacaggtgcccgccaccacgctaggctaatttttttgtatttttagtagagaccaggtttcactgtgttagccaggatggtcttgatctcctgacctcgtgatccgcccgcctcggcctcccaaagtcctgggattacaggcatgagccactggacctggcgctcaaacttgtcttcaacttcccccaggggcatgtgactccagcaagattaagacccagtgctc

SEQ ID NO: 110843 - DNA, 1083 bp, Homo sapiens
ctaaagcaacatgagtgttgacaccagtgacaactcactaaatcccagtgcacatcattcaggaaaatggggaatccccagtgtctctatttttttgctaaattgttatcctcaataaatctatggggattttctgctgagcatcactttgaattcttttgcccttaggaaataacaatacttccatacttgtgtgtgtgtgtgtgtgtgtatgtgtgtgtgtgtatgtgtgtgtgcttctgtggtgttgtttttccagagcaattggagccaaccctctttactgtgattgtaacatgcagtggttatccgactgggtgaagtcggaatataaggagcctggaattgctcgttgtgctggtcctggagaaatggcagataaacttttactcacaactccctccaaaaaatttacctgtcaaggtatggtttttaatcatttgtatttcttttaagaattactatattaagtaaaaaagaaaaagacaaccaattgtcaatccaaaggtatggttgaaatgcccagtaaatgattattttttcagcccatgcttggacaagacagagcagttacctgaggtgcccaagtaaagaattaggcttttcaaataaatctcagaaatagtccattggtaatgaccaagttttcttgaaagtgtatcaaaaaacgtagagttcacaatttctggaaattcctttcatagcctctaacaagtcaaatgttttgcttttgccctgtctgaacatgtgccctgctcctagggctgccagggccctgtggcttcctcataccaggtaaggagaaacaggccctccccagtgttcagcccaaaccttctgactcgccttatgtgctgcagccttcctgtgttgatgttcttgtttcttgcttgtttgtatccctttcttttccctttgtttgatgtatttgtgaatctaaatattgtcagaataacaaatattattttcctttttattacaagaataatacatgcccctaaatagaaaaatatgaataataagaaacaatttattttctgcaagaagaaataaaattaaccattagtcagcatacctggagat

SEQ ID NO: 110844 - DNA, 1049 bp, Homo sapiens
ccaagcctggtaatccaaaaggtgtagtaatttagcctttgtgtttttagctaacgatttttacaatgcaaatttacaggattttaacctctgtcatctggagatcatctccacccctccactgaaactagaacaccagtatcttctatcttgccaatttagtggcttctttttacttatctttatttgctgtctttacatcttcgacattggtggccacttctccttcctctacaatctcttggcttcctcattccttttattttttcacccactttttcatgtagacatgtagcattctatctttagccctatcaaattctcagtagatttcaatccatgcctttaaatttctagccatggcttttcttaagaacttcacattcatatttccattcacttagtggattcttctcccttgatggcttgcagaaacttgaaacacatattctaagacatgcattctcattccccacatccactctctaattgatacatgtatgtctctcctgctaaactgtaagttttttcagaaattcaggcatttcacttgtctttggtctctgaaaatctggcctagtccctggcacaatgtagatgctcagtaaatatttgataaattaatgatggaatgttgttaacaaatatgcatttggtattattaataaaacttgagaaatgccataatgtaattgcaagtggagcgtaaaagcattggttttaaataaaaaccttcttttagttaattatacccaacatcaaatatccccaggatgttttcctgagttgcctttgatgtacctctggcttgatagaagggcagtgctagaggattttgttatttgacccatgtttccaagggatgccagaatgaaggcagattctagaatatagctagaagtttttgtctggagcttttggtaataaatcaaaatgagatacagtactcactgggtagcaatagtggtgtcaggtgcgtaactagtgattttagtcaagtaagctagtctgcctacaggctttaatggaatcgaggtccaacagttctt

SEQ ID NO: 110845 - DNA, 1040 bp, Homo sapiens
ttatatatgtttagtaaatctttttttatttgataaatggtaggtgtcttgaaaatcagatgtaatgtaaataacataaggacttaaagatagtttcagctaaccaaataaaagacccaggaatctctgttcaaacatacgcatctattataaagccatgctatccagtaataaaagaagctattttgctaaagcttttagtcccacaattaaatggcatttttgtgcaaaccattttccctgtgcaaaccaatccccagtacctgtgtgtaaagaggacatttatttaatagccaaaacataattaagcttttgagatcatttgtcttcatacttgtgtcttcgctagtgagtatttgcctctagtaacccatgtccctcaaaataaaagtcaggaagatattgagcactttggatagtcttataagactatcaccttttttctaacacttttgtttctttggatgacacatctcattagagtattaattgctaaacttcctccctattcaaaccaatttgctctaaagtcaacatcaagtttatgacttgtctgttttgtcagaattgattttttatttttattttttgtggctccgaattagaaacttcatagatatgctctttttcctttaataaattacttaacattgacaaaggaaaaacaagaaagttgtacattttatttgtaagaaaaaaaatggagaagtaattttgatcactctactcaaagttgccgttttcattttctgggtgcatttcatttactatgtctgttttcatataatttaatacatagcgagaaaatcaaaggatgaaattacaatgcaggtgactggagttaacatctcataacatgaaagatgaacatacatctgtataattaaattttcccagggatttgttggaaaattattaaaacggaagcttttatggaatacccaaactgaactttactaggtacctttcttgatgggaaaatgctaggtagaataatgaggctcggttttggcaacccagatctgtttgagtgactctga

SEQ ID NO: 110846 - DNA, 1017 bp, Homo sapiens
aatttgagtttggaatctgattaatgagcatgagatctgggagcagaagccctgctatgctcagggaatataatagtgttgtcagtgtttaaaaatcatcctagtaacaagttgatttttcctttgaaaattttttattctatatcccgaaagcatacaatgagaagtgaactctgtttaataagaacaaataatgacttacagaaaaaaagcttgtaaattattatggtgacagtttttgtatttgacacctatgtcaagagtcagaacggacattatgtcaatggaaacaaattcagagatctgagagcaatctgacagagaagttatgatgtgatgaacagactacaaaacgtgactagaaatatttaaaataaaatgagccaccaatggggaatttattaaacattgtttaagccctatgtgaccaaaatatcacagtaagtagttactgatttgttagaggagaaaattctctgctctttcctgctccagggattgacagcatgaattgtaaggacaagtactgtttttctgttatttaaatattgctgtaacttcaccaccctagtcaccaaaaccattctccatatactccagttatcatctgtgcttccagttgtgtaatgcatgactgccgattactagtatattttaggtaagattaacttttgaaaagttgaattcactatgaatctaaattaacatccctatactattaagaaagtaggacttcagaattgttaaacaaataattttaaaattaaatttaaggttttaattgtagcttgagagaattttgttgattttgattttttgtttggttatttttttaaaatcatgatcatcttctttctaaagacaagacatttcttggagctaaatttccaaggaattcctgaaataacataaacctaacacctatgcaaataaaaactataaatgtggcacccctgtttttttaaaaaatggacactttttttaggctgtagtgttaacttaggtgtttaattcaaa

SEQ ID NO: 110847 - DNA, 1053 bp, Homo sapiens
ctagattaaagataataaatatagtgtacatggggcaaattatgtctacatatttgttttatctgataagcaaaatcatttaatatatttttaattcaaatgactttagccagtttcatgtagacaccaccccttttttggtttaccctgatactctagtgagggacaggggatccttttgaagtcaggaagaagagaatcctggaaggcatgattctctaccttccagtgtttgccccaccaaattgttatgagaaccacacagtgatgttggggcttaagtcttaacttagctaattaatcctttaaaagccaaaatgggccaaagagcaggataaaaacaaagatttccccctacacatggcataactgtgaagaatttgttgtttttaaatatgagatataaaaatccatctttgacaatgtagtcatttttcacagatgctataaataaagcttataacgggagcaaaaggagcagtttagcgaaaatctgcagcaaagaaagttctaagcacatccaacatgtttacttgaggatttcttattgttctttttaagtttcttcatggatttatttgcaacaaagcaatttaagaacaagtcacctttcaaggaataatttcagcatcgttttctcatagccatcaggaaaacataaaccatagtaaaacctgttcacctcacttagcagtctctttctgatcaaatacgtttggttgcgtacacatcctagtaatgccagggttactttctactagattgccacagatgaagacagcggaatcctcctgtataagggtgacaaagaccatatcgcggtagaactctatcgggggcgtgttcgtgccagctatgacaccggctctcatccagcttctgccatttacaggtgaagatctctcagttacgggtaaaggtgaaaaaaattgcttaatgaagaactgcttctcctctatcattttattatggagaggagagagactaagttggccccagcaggttttaggatgagggtattagtgaaaaacctggcaggaacagagggcatac

SEQ ID NO: 110848 - DNA, 1712 bp, Homo sapiens
ttaatggaatgttacttgtattaagtaacagattggataatattaaactccaggtctaataaataaaatggcatactctctgaaactgctccctgtggtaaacaaaaccagctgttagtagtgtaaaaacagaagatgtgtactttttttccttttttgcaatgaaagaaaatatttaggaatccaattttcttgtcactgcaatagcattgtatttatactctacataatagcattcactttgctgaaaatagagactaaaaagaagtatttttcaaagaataggaggccgtgccaccagctaataatatgtaaagcaagttacaaaggggaagcaaaggcttctgaattaagttgtggattcacagtcactctgcatgacttacagtgactgttcttaaaatgcttgtgctttttgttcttttctagaaatctcttgtcgaggggaaaggataagagattattaccaaaagcagcagggctatgctgcttgccaaacaaccaagaaggtgtcccgattagagtgcagaggtgggtgtgcaggagggcagtgctgtggaccgctgaggagcaagcggcggaaatactctttcgaatgcactgacggctcctcctttgtggacgaggttgagaaagtggtgaagtgcggctgtacgaggtgtgtgtcctaaacacactcccggcagctctgtctttggaaaaggttgtatacttcttgaccgtgtgggactaatgaatgcttcatagtggaaatatttgaaatatattgtaaaatacagaacagacttatttttattatgagaataaagactttttttctgcatttggaaaaaaaaaaaaagaaatgcttgaactaaagcttcccctatgctggagaagtatgaagaaagatatacctggagacattagaacagcgatgggaaccattgcaactcgggtccatctttgtaacatgctgaagacaagcagaagcacatgcacgagggacagaggagctactgtgcactgctgtgaaattgcccagagcataaaacctgtgtaccctccttcacatcaaccaagttcactaggacataccaagcacatgcgtgtgaatgaggatgcaaggcaagagaatggaactccagaattcacagatagaacaaatggatgagaaatatttcatgcaaaatataaagtgtcctgaggatctgggttccatttacgagaggaaatgaaagtgctaaaataaattttatcttccttttaaatgtcagcatgtcagcagaagcagcacacaaaagtctttaccattttccagtattaatttttttgtaatataaatgataaaggagatgataaagaaccaatagattattgataaataaattagtaataatatgattttttgtttctatgagttctaaacagccctatacagtattcagtttccatgagaaatatttattgtatcaaagtacattgtacttaacattttaggccatccttttactgttccttgatgctttaatatatattaatttataattatcctgatatttttgtacatttttcaaacttaaaaatcaggatttttttttttttttttttggcaatagtactaacatagggttttatcttgggatacatatgtattggtctgtttgttgaccttgacatctgatcactgatgtcaatgacctactggcctcattcaggacacctgcagagag

SEQ ID NO: 110849 - DNA, 1043 bp, Homo sapiens
aacttaaagtcagagtgggggaggaatggaactccaaagaaaattagaggttttgctataagaattacagaaactggattctgaatagtccaaaatgtcaatgttcatcccacagaatgatgacaataatgcctacagttttgagggtctactttgtgttagtccccgcatgagaaagttcacctacgttattttattcactcttacagcattcttacaggataactcttagcatccatattttactgttgaaacagagactcatgaaaatattagagcattaatctcaaggcaatcatcattaggaaaaaagaaagaaaagaagacctccttcaatcaagattctcactgaactctgggatacttgaaaatggaactgactttttaaaagatagaataaatgacaaaggtgcagggagtgtctgagtcatctgagggaatgtaaagtaacatgcaacatttcaattccatttgtctgtctcctctatgcctccactcttcagagagtctaatcattaatcacccagagactttttgtctatgctcaggctgtctttactgggggggaagtaatatatcttgaatttttaaagtcacagtaatggtcccgaaacaaggccagggtaccaatttttaccattatccatacagtcaacgtttctagacttacacaacggtagcagttttctctcctgggtgatgactttatataaatatgcatgcaaacaaaatcagagtttatttggaggaagtttctgcaggatcacttcacagactctgtatttttattaaggagatatcctggggcatgaagccagttctcaactttgtgaattccctgatattcagaactaaggatatgttttttccagaaaaaaaaaaatgtacaccacgtgggtagattcccagctaatcctgctctctctccagacaccattaaccatcctcagctccaactcccctttctctaatcctcttcttcctggccttgaaccagcccagggacaaatggaacagctgccaaaggaagtgatcactccaga

SEQ ID NO: 110850 - DNA, 1001 bp, Homo sapiens
ttaaaacacaggaatgcagttcagggaagcaaatcctcattgtcaaccagttctccagagtctgcaagaaaacttcatcctagaccaagtgataaactgaaccctaaaacaattaatccggtaggtccaaaactattcctaactcagtagattttttaaaggcatttcgcacagtattgaacaatgctggatgctgtgttgagttttgtccctttgctagttttgagctaataatgagagaagggcatgtggttattatgatgaagaactgagataatcagtcacatgtgggagtgagtatggaggtaaggagacatagaagttaacctgtttgggatatcgcattgtagtgcatagaaaattgcactttagctttagattttatttgcagtgttgttttacttccccatatcaatgaataaactgtattcagttgccacagaatgcttttcgtgcttctatagttgcataaaggtctctgacctttcctgtgttctgtaaattagttccaccagaaatcctagttgtagtactaacctcctttgccctctcctaacaatttaatgagatttaataaacatgggatttatgcagtaaaaatattcagaagtgaacacacctgtgcaacaacaccaggtgttatttgccccatgcccaactttggtagggtgagatgttagtgatttcagccttcgaaggggattgtgagggtggctgaagctcctgactgactgtggtggtaggtaggggtatggcagttacttaaggaagcaaaggtatagtgagctctccaagacagaaggagtgtccgactggataaaagcaaagtgacaaatagtttgagcggctatgttcctttgcttttttctgtaatctacagtgtcaaggaaattgaatacctgaagaaggccctaataatcttgttgctctcacttcctttgcttatgtttagttgagggagtttacggtgacgcttcaattttcttcctctctttaaagaa

SEQ ID NO: 110851 - DNA, 1397 bp, Homo sapiens
gtaaataaagtttagaaacggcacattaagatttggaaggggaacacagagctgtagttgagtaatccaggatcccagaaatatcaaattctttttttactactccatcttactagctttgaatgttgctaatacagaattttaaaaaagattttgtagctacaagggctgttattatttattttcttctgactcctcttgtttcctccttcttatatcctacataatattttaataatgattgatgtaattggaatagaaaatttcctattgcaattacataccaaagactttctcttggcttattattgtgctaatttctgttacttcgtaatccttcatgaaactaatgaatgttcttctttctcttctaagaccttaaaagcttatatatctctttctttcttaaaatattagaaattaagtctttaaaaatgagtgttctcagttgtggtttctcatttcttgggacttgtgtatatcaatgatggaactattcaacttttggatacaggaaaatatctgttacagatagtcacagtgttactttcttagaactgatctgccttaaattgaaatcagttcattcttagcctgatttgattttttttctaagtgaaatgcacatttattttggaaaaggcacaatgcaaatcctgatctttattgattgtgtgggaacttattacatggcaggtactctgctgagtactttttagacatgaaacccatttactcttcctagtcatcagagggagattttgttgttatctccctctaaagatcacggaacttaggcacagaaaagtaattagtccaggtttgacgaataagtgactagtagatgctgaattcagatactggtagtctggcttctaactacttctctagttagatacttcaaaaaaagagaaagaaacagcctatattttatttaactcagcaaaaagtccttcttatttcatcattttgttcttacccctttttgtttgagttttagatactttctaggcatattcctgcaaatataatacctattaggggaactctgcatgatactaatgatgctcaatttttttctgttgacaggggagccttagcatcatcaaatctaaaattccaacatactgctccatatgctgttgaagaagggagccaacaaaaattgttttttctacctgttgacgtgtcaagcactaactgtgggtactcatttattttattcttttgtaaatcacagccaccattcattatttactaggttaagatgaatagacactgaatcaaagttattcatcaacaaaaaagaacagttactaatggaaagttattaaaataagttctataagagtacaattttgaggtttattttttgtatttttattatttgtgcgaag

SEQ ID NO: 110852 - DNA, 1068 bp, Homo sapiens
ccattctattctatccattttccacatagatgactatgaaggacccattttatattttgtggagtctattgaccaggcattaaaccactttatttaaatctttacttggtattaatagaggatatttctcaaatcataatgccaaaatggaaactacagaggtgcagaggtgtgtcaaagcaaatgagaattttggcattctatgtagatcacaggccaaatcacacagacttttatacaggtacaaggaaaatttgtgtgtatgagccagcagttcatgaagattggaggctggcgcataggaggcagggtggtggattaagaggtaacatgtttgcagtaatcatctctctttctgtctgctagttatggctaaagctgcatggcctgaaggagcctttaaaaatgaatggtctctcaattacagagaaagaattggggagcagaaaccactgctcagtggctgtgttcagtttagcatattctttagaaatgagttaggggacagactttgggcattattggagcacttgtcagttgcatgtgaatagcacttactgagctgtttatggtagtggtaaatggtggctgaaccaataatggcttccactgctagaaaccaagtaacatcaccgtcaagcagcttaatgtcaccaaattaattctctcaaagaccactgcatggaaatccaagttgagagacaagcagacatccagaaaagtaagaacaacaatttaaaaataaagagaaaaactaaagaaacaacggatttctttgttttcaggattatttgaaaaattctttttttctttttttagttttgaggcagagtctatttctgttgcccatcattctggagtgcagtggcacaatcatggctcaacagggatcaagtgatcttcctgcctcagcctcccaagtagctgagacttcagccacgtgccaccgtgcccagctaacttaatttttttttgtagagatagatagggtcttgctatgttgcccacattggactcaaaatcctggccttaagttatcttcccgcctcagcctcccatagtgctggg

SEQ ID NO: 110853 - DNA, 1050 bp, Homo sapiens
tgagttcatgtcctttgtagggacatggatgaagctggaaaccatcactctcagcaaactatcgcaaggacagaaaaccaaacaccgcatgttctcactcataggtgggaattgaaaaatgagaacacttggacataggatggagaacatcacacacgggggcctgatgaggggtcagggggatgggggagggatagcattaggagaaataaataatgtaaatgacgtgttaatgggtgcagcacaccaacatggcacatgtatacatatgtaacaaacctgcacattttgcacatgtaccctagaacttaaagaataataataataaaaatataaaataaaaataaagatagcacgtttaagtcaagtgtggacttgtgttgtttgcctccctagccctagtaggtcccaaatttccatttggtgctccatgatgttctgtggaagttcacttcatctctgagtctagtgatagagccatgacctgggcgaagtcaggaagcacattttatccctttggccggacaactggatttgtggttgccatttgactaaacctagtccaggtctaagaatgactccccagactcagactcttgctaggaatggtaggacagagatgtgcttctttccttgctcaacaggagcaatgaatcatggagccaaggagctttggcctcttcttgcagccctacagggtcccacccttaggttgtagccagccccatctctggcctttttgttgctgtgaaccaatgaaattaccatttttttttgtcacttggtgtatccttttctagtatttgtgaacaaaagtatcctgattcacatggtgacatctaattcacatcttcttgaatactgtatatcctgaaacaatttacattaaaagatagctatggtcttagagcacctctctctttttatcctgtgggatgatatcagtaaagagttactcaaaacaggaatgatatcttttcgtgcaaaagaaaaatgagaaacttaatgtggcttataagacttttgctccgtgcttttctgagttgtaat

SEQ ID NO: 110854 - DNA, 1048 bp, Homo sapiens
aaattggtggtatatttctgacacataagtaatttcaagtaatggagtcactaatagtttttgccttactcatcctctggaagccagctataaaagtttatattaggtgaactatattaggtaaaacctttggcttctatattatagataaattaagactgtgctggaattaaacttgtttctaaagtgaagcaaacacaaacacaacattatcatgaaatgaccaaagttactatcatggagtgacctaagctgccattagcaaaagaaacattgtggagactggtacccaggatagtcttcccccaaccatctcctctccctccactaactgcttctacacccaggataaacctgcctgccccatcttgacttagttcattccctcaccttagttcattccttctccactctcagcttttatttttctcttctcagtgctatttctcacttaagttatgggagatgaccttttgggattcctggcccagaatcttcgcagttgtggtacccagtctgcatgagcatggagtatgtgtgaggaggctcttgcctgccctgttcatcctgcccctgtggtgactggctggatgacattgcagaaagctgcaccctatttttttcatcttgactccacaaagccatttcacccagatagctgcctacgcccatatgaacttttcttttaaacatgacagttctgttggaatacaattctaccaattttgttttaatttcttttgaatttgtttcatgcttcacctccaatacctttactggagttcaggcttttatcagaccctgtctgcactcttgcaatacttagctgctaattacactccatgtttccaggaatatagctctgataaattcacatccctgccaaaaattctacaaaggctcctcatctcctacaagatagtccaatctcctgcctaagacatgtcaacttctggcctctatctccttccccaaccttcgctcttggctctccaattgtgtattctatcttcttgatgatttacacgtttcccttggttcccaggcc

SEQ ID NO: 110855 - DNA, 1056 bp, Homo sapiens
agttgcactgagcaggcttccctgctacagccccttttgtgccagtaccatttccttgctggcctcattcatcatctgcttccctttatcagagctctcatcaaaatttctgctcatatttaagatgcatccttcctcacttccaaaaataaatgcaccttccaaattttatatatatatatatatatatatatatatatatatatatatatattccataagtaaatataaatgtatatatggaaaagagaaactggaatcacaaagcaaaatatgtataatgctacttctgagaccaagcacaacccaatcagaatgtaacaaataaatgaggtatacatttctcacatattttccctaacaaaaataaaagccttcacagctgatcagagttcatgttgggtttattctcctaatgtttaaatcaatatactacaatttatgatctgctatttaccatttgaatcatatgaattacgtgtgtgtgtgtatgtgtgtgtgtgtatatatatatatatatatatatgaaatacatatataagctatgtaaatatctaggacattttattttactaggtgtttatacacagtagttcatgaaggaaattaaatactttctagctgggcgtggtggcacgggcctgtaatcccagctactcaggaggctgagacaggagaatcacttgaacctgggaggcagaggttgcagtgagctgagattgtgccactgcactccagcctttatgacagagcgagactctttcaaaaaaaaaaaaaaaaatacgttctctacagatcacttaaagtttgtaatttaaaaagagatttcctcgtagaattgtcaggctggtgaatgtagtctttttctacatttaatttcttgcctgtgtgccccacttactgagacttccataacaggacttttgactttatcatctttgtatttccaaggtctaccacagcaactggcccataaggaggtgtcagtaactgttagttaactcatttgccttccaggacttttcacatgtaattgaagaagtggactctccttgt

SEQ ID NO: 110856 - DNA, 2087 bp, Homo sapiens
gaagtagggagcccctactctgtctgggtcctgggtgggattcaaggatctgggtaatgatggacaggtatgtcttctgaagtctaacaggtgttcttagtttgcttctattgggtattcttcccctctcatttttccttccttcctttcctgtttctccgttgtctccttaatctctgggctttctgccatttcatttaaaagtctgtattttttccttattgttttctgttctgagtgcctagctttcattccttagggtttctttgcttgacccttgataaaatttacattattattttcagtgttgcatctcatgggctttagccttttatcttaaccttttttgtcttttcaaaataaaatggtaaccttttagctcattggctctagccttttatcttctgttttaaatctcatctatttctattttataacttttaacctttattgggttttaacttatcattgatttaatttttactttatgaattgctttttataggctgtcaagaagctaagtcatagtaacaggagtacagaattgccctctgaggaggccatctaaatttctctcctggctctcagggctcacggcctccttacaggttgtttttcccgaatgcttcagtgtagtaattaacactactgaaggctatacatttcatgaggtagactgtacactcaatttctcaaaatgacagtggcatcttcgctcatctctcacctttttaatatgctatgaagaactacttatctttgaacacaggaattaccagcaccgttttcagtgaactaaccaagaaccaaaattgggtctaaataacatgtaacactgtgacatctagagtggatatccatccagtattgatacattgcaggaagaaattcttttgcatatggagccaggagtttaattaccataaacttagttctgttgttgggaagctccattatagagttatcaagaattggcagcctatttcaacttgcaaagttgttttactctcagcagtactttttcatgtacttcttgaactatatagtgccctctggagatgtgaattgatcgatggtgtgttgaactgattttcagaggaggaaaaaaaaaagagattttgcatattttataatgagcttcattaagcaagtctctagttaccctgttttcacaatcagagtaaatgcctttaccttagcaagcagtactcaccataaataatggctcaaaacaacgatgtttgctatttttttaatcaaaaagaaaaaagataacatgggtatatgataattactattcttctcaaatggagtttttctagcttaaagcttgatatgtgggaattatgctttcaaggtttacactaatgtggtacagaggacatcctgttcttctaaatgtgcctctgcagttcttttagaagttacagcggcttcccagtctagacaatctatgcacagaggttttgataatagcatagtggagtcagactgcctgaatttcaatctcagcttcaccagagattaactgcatgacctcaagcaagttgttttacctttgtgtggctcagtttcctcatctacaaaatgataacaatatcagtatgtacttcatagagttttttttttttttttttttgagacaaagtactgctcttgtcccccaggctggagtgcaatggcacgatctcgggtcactgcagcctccacctcctgggttcaagcgattctcctgcctcagcctcctgagtagctgggattacaggcacctgccaccatgcccggcgaatttttgtatgtttagtagagacagggtttcatcacgttggccagactggtctcgaactcctgacagcaggtgatcagcctgcctcagcctcccaaagtgctgggattacaggtgtgagccaccatgcccagccttcatagagatcttactaagtttaaatgagacactatttgcaaagtgtttagaaataatcctatatacttattaaaatttcagtaaatattagctattattatttcctaggcaagccacttttatttcaactaccttaaacacatgtgatcaaatcttttacaaa

SEQ ID NO: 110857 - DNA, 1045 bp, Homo sapiens
agctcatttgttcattcattcattcattcattcattcattcaacaactgtttattatatgcctagtgtagacaacataagtgcattcctacaacatgagcaggaatagcccaggaaactatgatttttatgggctttaaaaatgtttagtgaactaaaagcttacacactaaagcttctgttgtatgtggagtttaagaagtttttgtgtaaccatataggcaatagcaccaacaaaccgtttcctctctgcttgccttacagtaggcatactttatcccctgccaacaagaggcttttgttcaatccagttttttctgacatccagctcaccaaacaagttgggtttgataaactgtttcacaaagcaatagagaaagctaacagcctgacacaatacaaattgcagagagttctgtagataagacaaagcactttcctggaggaaatggtgagatgttgtgatttatggacccatcaatgttactgttcataatgagaaaaactgttgcattcagaccatcatcctgaataaaggatgactccgtggaagtgtaaggatggccatcacatgaattcgcctgccatcagagatcacattcttccttaggacatttttccttttctggccttatgtaagaaacaatttgtatgtatgatattaatttttaaaaatgcaaagcaaatcataattctttaaaatatttcatttccttcagcgatgcctcatgtggtcagatttctgcattcaattaacatgaataatgaaataattgttaagagtgtaacagtaattttttctcaaatccctaatccctttggattttgtgataggaatcctttgcaaaatagatgtgctctgtttaagaagatgttctctaatgcagaaatgttatttttcaaataaagatataattttaatgtggagctctatccaagttttagtatgtaataacttgatttgaaatgattgaaaaataacttaaagattttcatctgcattggtgctttgatattaatgcctattaagatgttggtaggcactc

SEQ ID NO: 110858 - DNA, 1050 bp, Homo sapiens
cacagtaaagaattactgaaagaaagaggaacagcagaaaatatacaaggggaggctgcagaaaatctaggttataacccagatctgccactgagtcaatatgtggccctgagcaaaccatttaccttctccaatccccagatttcatatctataaattgaggataattacatttttcctaattttcagagttgggagaatcaagtgagacctacaatgcatgtgaatgagctttgtggcatttttgagcaccctcataatagtcagaaaacattgtgcatttgagagccacagtactgggcacacagtaatagttgtattaaactaaagagcagcctcttggatatttgataatttctaagtcgctggcttttatggtacattaaaaattatatacacttgcatgctgtgcattaattcttttacataacgattaaaaatgtagcatcatgctatgaaaaattaaactcaacactgcaagcataattgtaactctgatagtatgttaacaagtccacatttgtacttacctccctgtggaaagaactgcgagtaaatctctttgaaggtttcttcattaacaacaccactggggcattcctagggaaagtggcagagaagcaatatgagcaaagtgttcataaaactgaattttttttgcacattttgaaacagaactgtctaccatgcaaagctgcaccaagaaaattaaccattcatccattattacaaagggaataaaagcacactataaacttatgtttgttccagttctcacaagaaaaaaaaacgtagatgtaaatatctttgcatattgagtatcaaagtaggtgtaatgtattcagaaacacagtgctgcttttaagaacacatatgtttattataaagtaaaaggaaattgcattatttttcacacagcaagcatgttgcaagatgtttataatatagtctttggtgaatcttggttttgtcctttcaaggttttctgaactcacataatcttcgattcaatggcagaattactctattggcatctctagtggctcaaga

SEQ ID NO: 110859 - DNA, 1051 bp, Homo sapiens
ggtcaagcattattctggatagttctgtaagggtgtttttgagatttattacattgatgcaaaattgcggcttttgctattactttcaatacatttaagctggtagactttaagtaaagcagattgccctccacaatgtgagggggcctcattgaatcagtttaaggcctgaacagaacaaagacggaccttcccagagaaagagtgttcttcagacatcatctgtaatattggcttcccttgttcaccagcaccctgcctttggacttgaactgtaactgttttctgaggctccagcttgccagaccccttcattagatatcaagctggccaaggctccacaaagtgtgaaccaatatcttaataagtctctttatactcacacatcctattagttccatttctctgaaggaccctaatacataaatgaattaacaaccaatagctacaactccaaaggtggtatgtatacagctaatctctcaaacattttgactatctatctagctgacaccaatggacccattttaagactaaacactttgcagttagaccctctcacacatggaaattgtgatttattggctatttaatgctaagccagttgcttgggatagtaaggagagagtaaatacctggctctctgccatcaggtggcaagcttgtgcaaagttagagctggaaagttgcctgggagttaaaagttgatgctgataaaggaagaggacttcaagcaaagggacctctgcatcaacaaatttgttagctgccttcagtctctagatatatttgatagatataatgtgaaatgaatttgtaaactgactatctgatatgcatgtgttttatgtttaatcacatatctgtgtcagaggaaaccttttctctgccaaatgaaaactactggccaagtttcagggtggaaagtctcaccagataaatttgtttttatccaccttatattcattacattagtttacatctctacaaacacatactgtatgcctattattccaggagtcttctaggaactgggactgctacaataaac

SEQ ID NO: 110860 - DNA, 1037 bp, Homo sapiens
agaagattttggggaaggctgcaaaaagataagtgacattttacatctcaagagttgagagatccaaaactttgacaggtagagactagaaactaaaagcagaaaattgaactatatttttaaaagacaggcagtttcctgaaatcatttttgtaatcagattggcactgaaaatttcattaattatttaaaataccaagtttctgcttggacctggcaatgtgcttgatactgattagtctggggactattattttccagttctaattatttttacttactttggtaacttgtgcctcacccaggctggaagaggagagctataattttaagtgggcagtgaggggagtggaaggggaatgccctccagccaaatatcatcaggaaacacacctgtggttgaataattttcatttattattcattgcagagagagagaatacatgctgcagagaaacggggaatgtctcagagagtgttaggacttattacagggtttgagctcattttggtgcctttggagaaggtttaagtgagcaagacattgacctggacaggaagctgtcaagaagccagagtcatgctgtgattgggtaacttgtgtctgcaagtagtgaagactagacagagacaaaagctgtaataggtaaagaagcagctgttactcatattagctgggataggaggtatttgattattttgtggtttaaagttcatgtttggccaggcgcagtggctcacacctataatcccagcaccttgggagaccgaggtgtgtggatcacctgaggtcaggagtttgagaccagcctgaccaacatggagaaacttcatctctactaaaaatacaaaattagccaggcgtggtggtgcatgcctgtaatcccagctactcgggaggctgaggtgggagaatcgcttgaacccaggaggtggaggatacagtgatccaagatcacaccactgcactccagcctgggcaacaagagcaaaactccatctcaaaaaaaagagaaaaagttcatctttttgcttct

SEQ ID NO: 110861 - DNA, 1035 bp, Homo sapiens
ttttgtcttgggctgaaaatttattttgacttacatttgccaaaggctttgccaccgtaagctttgtcagttcctccagccagtggacagctaaatccaaaaacctgacaccctcatttgctccccttaaatccctggccggttctataatcttctgcctttaaacaagctctaccttaaaaaatcacccaaacgagaattctgagctacttaaaaaatctagacactcaatttttcttcttaacattagacatcgttttgctccagtaagtctgtggaaatgacagttgtcagcaggcatccttcctcctttggccctagttcatctcccactgaaaaggtagtttcaaattccaatctgctcttttcctccatcctttcactccatatatgattttccaggtcataacaaaaggaaaaatgaacaaagatgactcaatttctctttttctcttttctaccaatcatttaagaaccaagtgctttctgatcagaaaacagttgcttaattgagaaaggagaatttctaaacacttttctcagtgtgtctgactaaagcatattactttctttcgtaatcaatagttaattaaaactgtgagtcatcttgttgaaatgacagatgccctgaagttttagagcatcttcaaaactgattgtcaaagttactttttcctaaaataaacagaacaattctcaatgtatttttaaccagcgggacaatttttaaacagtagtaggttacctcacagacccatagctatgtatctttaaatacatttataaaagaatatggtgggaagaagagtgaaaccattatggattttaaaatacttagaggagttttactaaataagataatactgaataagcaaaatacaataaaatcaggtctattcaatctgaagatgatccccagggaagcctgcagtttcaatactattataacattgagttccctcctttagtgaggcagacagtgcagataaagggcactgactttgcaacccatcaactttggttctgatatggact

SEQ ID NO: 110862 - DNA, 1050 bp, Homo sapiens
ggcaagtctgcagttcaaagtgaaggcaagtttattaagaaagtaaaggaataaaagaatgttactccatagacagagcagtcctgaggggggctggttgcctgtttttatggttattttctgacaataaactgaacaaagggtggattattcatgcctcccctttttagaccatatagggtaacttcctgacattgccatggcatttgtaaactgtcagggctctggtgggattgtagcagtgaggacaaccggagatcactctcgtgaccattttggttttggtggattttggctggctcctttactgcaaactgttttatcagcaaggtctttttgacctgtattttgtgctgacctcccgtctcatcctgtgacttagaatgccttaaccatctgggaatgcagcccagtaggtttcagcctcattttacccagctcctctttaagatggagttgctctggtttatacgccccgacaacggtaccaagttaggttgaagactatgttgaggaacagattcagcaggaaaactgtgagcttcactactaaataggatattttgttaccgacatccactcctttatacaactgaataaagatgttaatttagtggtcaaccatgattgacaatttttattgctatagaaaaaactttcatgttgagtctgggtaaactactattttttaaaaaatgcagtatttctgaagcttaacacaaaagtttctcactgaataatcatctggcatgtatgttactaagctggcagctctcctcaggggctctcctcacgcaggcgtctgccattatgtggctctgtcctctaggtcgttactcagacaatagaggttagcacatgggagggttttatggatcatgcctggagatggcttttgtcatttgtatccacagtccattgcccagaatgcagttgtggccatgcctaattgcaaaggaagttaggaaatatagtctagctatgtgtataggaaggaaagggagatagttcagtccataaataaacactgccacaggatagattcccagt

SEQ ID NO: 110863 - DNA, 2088 bp, Homo sapiens
cactgtaacctcgagctcttggggtcaagccatcctcccacctcagcctcctgagtagctggaactacaagaacaagccagtagcccggctgtttttctttttatttttgtagagatgggtctcactgtgttgccctgactggtctcaaactcctggcctcaagtgatcctccaacccttgcttcccaaactgttgagattatagatacgagccattgagcccagccaaaagttgttttcttaatgtaaacattatatctacagattacatatataatgttatatactaacctgctttttaggtaacagttagaaattagatttgtgtatgactatttttgtgactagatttatatactaacgtacatgtatattaatatttcaggtcattaataggtggcaactgatttttaaatctcaggatattttggataaatgtaacaatgtaactatatgtatgttcaatatatttatattagtaatatatacagatggcaacttaggtttagttgctgattggaatctatacataggtctcattatagagaagcaacaatgttagaacagacttacatgtttcaagtattgagttcagaatgcccaaactgaagttggttgagaacatacaaaattaggaagtaaaaacattaactgaaaacatctgatgcaggaattaaactaaatcatcaaggtaagtgaggcatacaacagcaatccaaaatttaaaacaaatcttaattctgtttttctttttggattccagtaatcatttagttattttaatattgactccagtgcttttatctgagaggtgatttgattgttcataatcacttaatgatgttttccaaatttgagtcattctgtcacttttgctaattttgttatatttttcttaacacttgtattaatgctgtccatggattattgcttatattgaaatataagcaataataaattatatttattatatatataatatattattgaatatattgaatatataatatattattgaataatatataatatattattcaatatattatattgaaatataagcaataataaattcaaaataaaatcaatagatttatttgtataaacaaggcaatttctcctgaaggagaaatttttcattgtttgtaatctgccagtgctaaaaatgtgactgcatgttgctaggtcttagacaaaggtgagattgtaaccaatgaaattctgctttttgtttgtttgtttagttttggtatgaactctcttgaatccttctgacctactcagatcatttcacagccatgtcttttattggccatgagaagctcctaagcagtggtcataactgggctacgggggatactgattgatgaacatgtacagtgtgtgttaacttagttgttgttggctgataaacgtggtctttccaccttttttgtagacccgacccagctttgtattatgtgaggccccaggcagcctttggataaagctttttcttcagcctcctttcactggggatgccagaggcttagaagtagatactgaatgtgaatttacaggaccatagtattaagaagcttacatttatagagtcattgatggaggtggaccactacgttctctgataaagttcaatgcttagaattacttcctggcccaaatctcactagtcttctgttcaacaaacttgtttgatgctgcttaaaacacatattaacctaattgcatcatatttacaaaatggtaggagaaaagagactgtgtgtgtgtatgtatatgtaatccattatttactgctgccatctggtttaagaagacctttatcaggtattttcaaaaagttcaaaatgttttcagaagactcttcagatgcattccaaagaatccagctaatcacatcttcaattttgtaatcattgtgttcaccctgttttggcatataatactgatgaaggtttgcttttatggataaattttgatgttctaatcaggacctatatttgcaagacatggttgcttgcaaagctggatttggtcatgagtactgtgaatggaaattgatctcaggacccccaaatcactaagcca

SEQ ID NO: 110864 - DNA, 2591 bp, Homo sapiens
agggcctctgcactctgtgaagctgctgggatccagataccttccttaccttaatctcagtggactggcgatgagatacacagcagtgggcagtcctgggacatgcaggttgagctgaacattagtcagtaattaatatgtcattacatttcttgtgtgaactaaggcacttttcagttcaccggctgaatctaaaagaagccagttcctgctacaaaaaaaaaaaaaagtaagagtaagtaagctgaaatcctaccagcaggctcagagtgttactttgcctgtccacaaggtggcagaagccgatcagctttcctctactcagaaacttactagaccttgtgctttaaaacaagaaatctaaaaaacaaaataaaaacacattactgctaataaatcagcctcccaacttaactctcagcttattattggaataaagataataattaatcttcagggaatgacttttgaagtactgagacattatgagagatacatgttaagaaatggaatgatgagtggtttttcctgtgattcctccttctagattttacctgattggtggtggtatccccatcattgtttgcggcataactgcagcagcgaacattaagaattacggcagtcggccaaacgcaccctagtgagtattttatattctctgtgtacttgacccagttgtttctcttttaagtattttctaggcattacaggtgattgcaatttcgtagataatttgttgaaacatgtagcatcgatctggtttaccattttcttttccagttgctggatggcatgggaaccctccttgggagccttctatgggccagccagcttcatcacttttgtaaactgcatgtactttctgagcatatttattcagttgaaaagacaccctgagcgcaaatatgagcttaaggagcccacggaggagcaacagagattggcagccaatgaaaatggcgaaataaatcatcaggattcaatgtctttgtctctgatttctacatcagccttggaaaatgagcacacttttcattctcagctcttgggggccagccttactttgctcttatatgttgcactgtggatgtttggggctttggctgtttctttgtattaccctttggacttggtttttagcttcgtttttggagccacaagtttaagcttcagtgcgttcttcgtggtccaccattgtgttaatagggaggatgttagacttgcgtggatcatgacttgctgcccaggacggagctcgtattcagtgcaagtcaacgtccagccccccaactctaatgggacgaatggagaggcacccaaatgccccaatagcagtgcggagtcttcatgcacaaacaaaagtgcttcaagcttcaaaaattcctcccagggctgcaaattaacaaacttgcaggcggctgcagctcagtgccatgccaattctttacctttgaactccacccctcagcttgataatagtctgacagaacattcaatggacaatgatattaaaatgcacgtggcgcctttagaagttcagtttcgaacaaatgtgcactcaagccgccaccataaaaacagaagtaaaggacaccgggcaagccgactcacagtcctgagagaatatgcctacgatgtcccaacgagcgtggaaggaagcgtgcagaacggcttacctaaaagccggctgggcaataacgaaggacactcgaggagccgaagagcttatttagcctacagagagagacagtacaacccaccccagcaagacagcagcgatgcttgtagcacacttcccaaaagtagcagaaattttgaaaagccagtttcaaccactagtaaaaaagatgcgttaaggaagccagctgtggttgaacttgaaaatcagcaaaaatcttatggcctcaacttggccattcagaatggaccaattaaaagcaatgggcaggagggacccttgctcggtaccgatagcactggcaatgttaggactggattatggaaacacgaaactactgtgtaacattgctgggcttcctaggcagaaattcatataaactgtgatactcacattccttgaagctatgagcatttaaaaactgtttacagccaccatagggattcaaaagaatttggaataaactttgaagttttggattttacttatttttatccccaaattgttgctattttttaggatctgaaacaaaatctttctaaaacattgttttagttgtcaaagcaccaacaggacattttgggatgtgaaatgtaatttcttggaatctgtaatttgtacttaatatttcaggcttgtatttaatataataaataggtgtttgttattgtgtcgatctgttatttttatattttacaatataagcatttagttctattttaatgaaattagtggtttggggtattttaattagagttacacataagtcagttatatatatatattgcatggttaagtgtattgattttggcacataaatcaaagtgatttttgggttgctgtattttataagtctagttttaaatattaccaggttttaaaaggatctctcaggatgttttttgaaaat

SEQ ID NO: 110865 - DNA, 1345 bp, Homo sapiens
aggtctcactttattgttactgtttcggagattctgttcctgtatcccccagtgttattctgtggacctgtattattctgttttcatgctgctaataaagacatacccgagactgggtaatttataaaggaaagaggtttaattgacccacagttccacatggctggggagacctcacaatcatggtggaaggcaaaggaagagcaaagtcatgtctttcgtggcagcaggcaagagagcgcatgtgcaggggaaatcccctttataaaaccatcagatctcatgaaagttattcactttcgcaagaacagctcaggaaagacccaccctcatgattcagttacctcccactgggtccctcccatgacagataggaattatgggagctacaattcaagatttgggtggggacacaactaaatcatatcaggtccttactaaaattccatactgcctatgaaactttatgatttactgtttaactatctctgaactctaagctctccctggactccaagctctacaagcataagaattatagtagttgaactttgggaggctgaggcaggcggatcacgaggtcaagagatcgagaccattctggccaacatggtgaaaccccatctccgctaaaagtacaaaaattagctgagcgtagtagcgctcgcctgtagtcccaggtaatcaggaggctgaggcaggagaattgtttgaatctgggaggcagaggttgcagtgagccgagattgcaccactgcactcctgcctgatgacagagcgagactccatctcaaaaaaaaaaaaaaaaaaaaaaaaagaattacagtagttgattcactggtgcttatccagggatcagtacaaggcctgacccataatagatgctgggcaaatgtttactgggtgaatgaacaaaaagaagcctctgtctgcacattagaaggcattcaaacctggagccattttgactctattaggagagtactcagcacacagtggcaataaaggtcttcattgtgtctaaaagtattcattgatttcttgaagcagacacataaatttatttcactaaggaaatgaatggaaagacgctgttgtaaagatgactgcctttcattgtcctgagtggaattttctaccatttctaaatggaaaaagagaggaattgcaatgagtttttagggcttcaagaacaaatgccattaaaggtttacaaaagggaaaggcaagtctagacgtttcattgtcgttctcttctatgtttataatgtgtttccctttgatgaaagacatagcatcattcttatatttctgactcagacattctttgcttcactttgtcact

SEQ ID NO: 110866 - DNA, 1270 bp, Homo sapiens
tcattaactataaaaagaaaaaatcattctttaataccttttctttaactgattaaagttaaatttattgtctgtcacttaaacaatctgccagtttacttcctgttttaaattaccattttgcaactgaatatataacttaaacagctcatccctttatcattgggaatttagtgttacacgttatggctattattacaatgcctgttacttatttttaaaatgtatgaaattctgactttggctgaaagagaagtgacattttctgatagtagaattttaaaaattattttatgtgttgatgaaaacaaaaattagaaaaagagttaatcataaagatataaaaatgacactaggttagataaatatgaagaatttaaaaatatcttactctttgtttccaataaattattacatatgtaggcttagtgaatagtcttcttgcagcataaatataaaaatggaaattcttcaatctatgaatagaaaatacgtaacattttatttctttgtttgtatatttttttcacatgcatgatagcaagaagtataacgtagtaattgaaagttcaggctgcctggatttggatttcactttaccatttatcggctgtgtttctatgggcaatctgtttaaccttttttttttcttttgtttgcttttaaaactgtaattaaaaaaatatataacatgtgatctctgtaaacaaattgttcactgtacagtacagtattgttacctgtaagcacaacattgtacagcagatacctagaacttttcatcttgtataattgaaactcggtatgcattgaacaacgaccccttttttcttctcctccaatcttatggcagtcaccattttcttcttggcttctatgagttgtgactacttcagatacctcatataagtggaatcatgcagtatttgtccttcattgacttacttatttcatttagcataatgtttcaacgttcatctatgttggtgaatatgattttcctcttttttatggctgaataatattccattgtatgtagagaccacattttctttatctatttgttgttgatggacatacaagttgtttctatctcttggctactgtgagtaatgcttcagggaacacaagagtgcaggtatctctttgagattttgattttaatgtctaacccttctgtgtctcagttttctcacctataaattgggaatgataatcgagttgttggatgatatgattatgtacacaagttattagaattaataggaac

SEQ ID NO: 110867 - DNA, 1005 bp, Homo sapiens
gagatactgctctcattgtgtctgatcagctagtgattatgcagagtgataactgggcttaaagggcattgaaaaggatgaattctggttatgctttctgaattgcctaaatgtagggggctgatttctcttttaccctcatagcagagtcaatatttcaatttataaaatagatggtccagtgtaaaatgagggtatgccgtaagcagttaacaccatagaagttaggaaagcaaagtaacatgttaggaaaatagcgtgaaacattagtctgaataaaataaagagacataagggccagagtttttgtttattgatgtgttttcgtcactcaaaaaaatctcagtagttaaatgtggagagaagtactgctagaatggatctttctttttgccctcaggatttgacgggatctgaactatacacccaggcggccagcctcctgcatcctgtggtttatactaccgctatcattctcctcttatgtctcttagccgtcattgtcagttacatataccatcacaggtaagaaatacatctcgacaaaatagatctgcggactttgatttgaaggactttatttcacatttaattaggataaaattgagtttgttatcatcctgtatttccaaagtaaggatgatgactttagaatatatacatgccttcatttcatgccattagaaacataaataattagtatttgagatgataaattctgtttttacagcatccagtcagtttgctgggtttgtatctagaaaagaatatgggcaataggtattggacactgtggggcgggtcacaggcgcaataggaggtaaagtgaggcggaagtttcttacctgcagaggtacctaaaggggtgtctctaagtatcagactgtactattactcttattttatgactttttgcctattatgatattctttattttatagatgacatttttaagaaaatttgtggcatttaagcgtgggatatgttgtttgttaatcggaggc

SEQ ID NO: 110868 - DNA, 1571 bp, Homo sapiens
atctgcctgcctcaagctcggaaagtgctgggattataggcatgagccactgccaccttttaaattaaagcatgaagcgttaaagtatgtggcattttctcttccattttgaaagtgttttctcattcagttttgaatataaaataaactgtgatgtactgatgagaaataatattcaacattgtcagaaatttataagttaacaagaaaaaattgagcaaaataaatgaaacacaaaacatacacaaaaatgcattttataagccttcgctgtgatattgcaccatgtgaaacttttatttttatttagtctaataccagtttaaagcatctatttgtgaacttcctagctgttcttcaaaactattaaattagtataatccttttctggaaggaataagctattcttttatctttcagacttttaatctcttaaaaaaatgtaatacacaattctttaaagttaaaatactgtagtactaagattttttttctatttattttcaaagactttttccttttcttaaatgtaattgtgccatctagaggcagcaaagagaaatgtatttgaaattgttgacaaaattaaagttactgcatgggagttagttgctaattaaacataaagaaaaagttaatgaaattatacccacttttaggtaaagttatgtttaggattgaaaaaattgtttttaaaaaattagaaagcaaattagaaagcagtgtcttttttccttatattaagcttttaaaaattgataaaatcctatgtctcttgaataccatcttaatatatccttttatatagtaagtctaaattcctatcttgggatatagtccataaaactttcctttatctgattttaagagttttgaatttttaaaaaatgcgacataaagaatatacttgttcataaatctgagtatacatcctgctataccagttatttactaaggtctcattgggagccagaaaaaaaaattaagcagaaattaggtttgcttgaatgatatgatctggaatagccaggtggggcaggaagattcacaggagctggtgtctgtaggaaaaaacaaagaaagaaaactgaatagaaagtagggttatgattaggttcaaactatgtagtgcttaatactttaatcactagtggtgaagataagctaatttatatacattgattcctcttttgttgtgttcacctaaaaatatgaaactagagagcattcattaattttctttttctagtgattcttttacatttgtttatataaaacatgctgaataccatcttaatatgtcattttatagattaaaatggtattcaaagcaactttgatatcatttactctataattgaacataaatgctagtgatgtttttgtttaaataattttaaaataagtactatactcacatggatgtaatgttttatttatttctacacattaacatacagtgaaagctggaagtcctacctatctctcgtatcacactgataagtaactactgtttgtttctcgcgtattgttgaggagaccctcgtgtttatggaaacaaaaatgagtat

SEQ ID NO: 110869 - DNA, 1653 bp, Homo sapiens
aattgataactcagtgtagctgtgttttaggttgtgctataggagcattcaggggatacatctgagcaatagattttcatcaaattatatggtgaacttaggatttgggcttagtattaaacattgcaaaaccaaggtgttatttaaactggaataacatgattcgatttgtttcttaaggggaaattccggtgaatatggaattagaagaagagaggttagaagccaagaaaaagattgtacaataaattcttcaactatggaatgtttttagatggttaattgttcacttctttggtatatatatattttttactgaatgctgaataatttgttatttaaaaatcctcaataaagaaatctgaaaaaattcagtgatcagtcagcattttcagttgttcctatgtgttattattttttttttctaaatgtgtttcctagtctcaaggaaatttctgctaagtgtactgaatctaaacctctattatgtttgtataatttcattcttttgttgtgtggaggtttgaattcatcataaatcaccttaaagttccataagcccaaattaattatactcatatttatgatatgctacatttgtgcttctttatcatattttatcattgtaaaattgatacagcctgatcattgagatccttgatctgtttaatgctatctacttcaacatataatatcatgggaaaattaactttgttaatttgaaacacttttcttgtttacttatttaactctttaaagtttgcatttctgttttatacttcttttaatctatgttatgtggtgttgacatttcgcttgactgatgatttttttaactgttaaattttgtatatccaatttaaaaaatgaagtcaacctaattataccacttttgtaactatctgacatatttttttctggtttctatgtactaatgtagtgagctttttttatgtatatatattttttcagaatactattgtggaggcttctattcagcttcctccttcccttttctcaccaaagcaaaaaagagaactcagaccaactgatgactctctttacaagcttcaactcattgcattccgcaatggaaagctttttccagccactggaaattcaacaaatttggctgatgatggaaaacgacgtactgtggttacccctgtgattctcaccaaaataggtttgtatgtggcatatgttatcctgtagtcagtggacaataaggccttgtagttgactgttcctaaaaatgcttattttagtgttttctcgttttaatgagtcactagtgaagaaagatcttgcagagtacccattactgtagaagttgacatttataattggttatgaagtttgtttcagaaatatttttatttcccattttctccagatggtgtgaatgtagatacccaccacatccctgttaatgtgacactgcgtcgaattgcacatggagcagatgctgttgcagcccggtgggatttcgatttgctgaacggacaaggaggctggaagtcagatgggtgccatatactctattcagatgaaaatatcactacgattcagtgctactcccttagtaactatgcagttttaatggtatggcagttgttaactttatgcataaacactattctacatttttgc

SEQ ID NO: 110870 - DNA, 1055 bp, Homo sapiens
taatcaagcaagctgtatatcaaaatttttggcagaaaacacaaatatgtcatatatctttttttaaaaaaagtatttcattgaagcaagcaaaatgaaagcatttttactgatttttaaaattggtgctttagatatatttgactacactgtattgaagcaaatagaggaggcacaactccagcaccctaatggaaccacatttttttcacttagctttctgtgggcatgtgtaattgtattctctgcggtttttaatctcacagtactttatttctgtcttgtccctcaataatatcacaaacaatattccagtcattttaatggctgcataataactgatccaacaggtgttaggtgttctggtttagtgtgagcactcaataaatattgaatgaatgaacgaattagtgtatttttgtatactttttcttggtgaccaccattaaagagagccaattggctaaatttagaaaatcccaactgcccaagaaaatctcaactaggtcaaaatgtctgataataatatatttacttgataccctatactcagaggaaaattggcaagatttgcctgttaatattggcgctaagagagtatttgatgcactgtgccacactcctttggacctgctcaactttccttattgtgtcttatattggggaaaaaaacaaaacaaaacaaaaaaaccacaaacatactataaaagactagaaacagcaacacagagaaacccatgagagaaaggtgtgttttttgaggaatacttaaaattgatgaacacttctgtcttagatgatcacagttggtagaaagggattaaaaatgacgaaaccctacatttcatcaatttcacaacctacccctctgggtaaggagagtttctacttgctaaagtagaaggctttagatggacactcagatttgtcaatttcatgccattctatccttttaagatcatcctgtggccagagagcaaggacacattacactattattcatgcttcataggtggacacgattaaactgaatgaaaaaggaacatatccctcgt

SEQ ID NO: 110871 - DNA, 1048 bp, Homo sapiens
ctggcggtgtgtatttcttaataataatagtttgatttaagctaatgcatgcacaaaaaggaagtgtttataaatggttttctagatgaacagtcaagatctttttattctggtattgtgtgacatcctttccttctctttaattaatctaattgcctttcttttcctccatttgagataacacctggcagtcttttcaccagtgatgtggtggccacttacatatgctcttttgagctaaataccaccaaatggctatacttgaaataactgttcatatctgaagatgttttcatgagaaacaagtaaagtgcctgttgggttctcatgtggaatttgagactgaaggccaatctcactgtccattaggattttgattctacgaaatagtttatggtggttttaaagatctttcttttttctcctgaacccctgctagctaggtgacgtgatggttgacattgcaagtaacatcatgttggctgatgaacgtgtcctgtggctggcgcagagggaagctaaagcctgcagtaggattgtgcagtgtcttcagcgcattgctacctaccggctagccggtggagctcacgtttattcaacagtaagtgtaacattatcatagactcctgagaaaaaaagtgcatttcacacagctctcacccgaaagagataggtgtcttctccattatggggtggatatcttctcttactgctgattattacagaatttcttcttaacattttataagttataacattttataagttattacagaatttcttcttaacattttataagttataacattttataagttattacagaatttcttctaacattttataagttaattttgcttttgagtaatgttttcttgggaactggaaaatactttcttaatctttaatttgaatgtttatcaccatctaatccaccgaaagtgtttctgcaatggaaaataagaacactattgtattgccccactggcacatacccatagtccatctgagcctaatactctgttctgggccctgaaggatattttga

SEQ ID NO: 110872 - DNA, 1013 bp, Homo sapiens
agaggtagagggaacctcaagcaagttgtaaactgaagcccacgcttaggttagggcacgcctggaaagagaacccaagatccctgactcatccataagagttttctgtagcatcacattcaccttcccatacaatgtggccctgacttggaactctaaaagtgctctgtacacaactgtgaggaaaacactgggctaaacaaaacctgcgtatttctttatgtagaacttctcagatccattaatattgctaaaatgtaaataataagccttattttcctgaatcattctaatatatttttatatatcaattatatatacacacacttatatatcacatatatattctaatatattatataatatatatttagatatatctaatgtatattacatatttatgtatctaatatagatatattgttatatataatatatatataagaattagtacttgcaatgtggtaataagtttttgaaactgtggccctagtgcattaggcactttacttgataggatgtagttattaaaggaaggaaaatagatacatgtatataaacgggacttaggcaaataggccacctcacttgtcagcgggataacatttcatttgttttctgaacttcaggggccatgattttttctaataactgctcctgatacttgattgtgtctccagggcacagcccactttcctgcagtgaattttccttgcactgggagaggccgtttgggttctggctctgtgattatattgtgctccattgttgcttaagatgacagggttggtgcccacaggattagcagtcatttccgggagtgggatgtttctagttactagaataattgtaatgacatttggaatgtggacatggaagaacattcgccatcgaagaatacatgtttatgatgtgaacctgttttgctcacctcccaacttgagcaacgtggtgtccagaggtgtatgttgaactgtttgccagcctgtggaagagtggtcggctgcgttgac

SEQ ID NO: 110873 - DNA, 1794 bp, Homo sapiens
gtcttcatctctagatggcccagaacattggcaggcattactgcatatctgcagtgtacgcggaacacccatggcagtgggatatatcccggaaacccacaggatgagagaaaagcttggcgcagatgtgatagaggtggcttttgggcagatgatgattattctcgctgtcagtatgcaaatgatgtcactagagttctttatatgtttaatcaggtaactagaaagtcttcatgtttacttgggttgtggagaaaacatggtattcaaaccaaatacataagttttttttttttttttaatactaggcaaaacataaggattttgtgtttttactttagttgacttaactgtcttcaggatcaggtccatcttaatcactagtcaaggccctctatagaatccttcctttgcagtcaccatctccctttgtgcctttgtttgaatatcttttttttaatctgtatccaccagacagaatcctaaccatccttcgagttcacattgaaagccacctcttggattcattttataatcactttgttgaaagcgattgcttagaatacttgaactactcatgtgctttttgttatctttgcttctatgcatctttttaaaacttaccagactataagcaagtggaagatggcttttgtgtaatgtattttcttttgccccttagcacctggtaaaaatccttttgcaatgttaggtgctaagtccgtgttagagtcagtagataaacacatgtaaaacattactggcagtgcatggcaataaagataagtgccaaataagtagttcgtactcttgtgcagtaggagctccaagggaggtattgatcattcccagcaggaatactcaggaaaggctttattaagcaattggagttgaggtatgtgtagaatttggataggcagagaagagatagatggtgcaacatgttaacctcatgtatttttatgtattattgtatttcactccaagcttgaaaaaatttccctccagtgagtttccattaaaattccagttttcttgggtttgtaaagcattttaagaaggccatgatgagtaaataataaagtttttaattcgttgctgttttgaaatgcaaagttaaaatgtcaggattgtgttgatcattttgctaatgactgttttgttgatcatttttgcctttgaaatgtagatgcccctcaatcttaccaatgccgtggcaacagctcgacagttactggcttacactgtggaagcagccaacttttctgacaaaatggatgttatatttgtggcagaaatgattgaaaaatttggaagatttaccaaggaggaaaaatcaaaagaggtacttctctaaattcagatttgtagcatacagtgtcaacaaatggtagtgtgacagagttcaatctatgtattttaaggcctgtttatgtttatcatatttgagctaaaagcatgcttttaaatttccagaattttattgagatacttctgcctcttctcttatgacctgtttgctgctgggaccgggagaggtgaactctcagttcttggacgttaaggtccagagatacagcagaggtcgctggtgagaaagcagtaaaagcagtgttctgcctccacgttgtggcttaggcagagctgcttagctcagcctgctggatttctcttctccacatatcctcgtgctcatcttttgtaacgggagttttagtcacccagatcttgtagtaaattccttttaattgtccttgtaatgtcctagagaaatgagaggctgtttaggcactt

SEQ ID NO: 110874 - DNA, 1073 bp, Homo sapiens
agcagctgggattacaagtgtctgccacaacacccggctaacttttaaaaatatttttagtgtagacagggtttcgccaggctgatcttgaaggctgggctggtcttgaactcctgccacccgcctctgtctcccagagtgctgggattacttgccattcctgttctgtaaagtgttctgctctccctatttctgcaaggagaattctcatgcgtcgtatagcattgcatttgattcatatgtctcttattgccctgattgtgtattttaaagatctctttccttttttgccttgagattgaaggatttaaaggaaggaatcattttttaaattcatttttatatagcaagtgcttaccccacaatatgcattcaaaaatatttgctaaattaatgattgagacccattattgtctccttttttgcctaattatattttctctctttttaaaatctttctttatgcagtgccctaaccatttctaatattcaggctggatctactggaaattggggctgtcatgtccagaccaaacgtgggaataatacgaggactgtggatattgtggtattagagagttctgcacagtactgtcctccagagagggtggtaaacaacaaaggtgacttcaggtcagtgttgtggaaaatacggggaaaagtttaatttgtcccagatccttctgttgtctaagacacattattggtttcctgtcctgagtaacaaaatttgagaactgcacatgtctgaggactaccctttagaataatgatttcagaatcacatatggagatgaacaaaaggggtgcttgaactttatctcagacctgttgattgaagaatctctgaaagtagagtcatttttaacaaatggttttgttgtgtaagagccattgccttagggaaacattggagatattctggtaaaagagtacaaaattcaaacaggttaagtaaggtattttctgttttttttccccccagtggctcttttatagatgaaccttggaaggttttatattgctaaggtacttttcactactggcagttcagtaggcatcagaattagaag

SEQ ID NO: 110875 - DNA, 1027 bp, Homo sapiens
tatttatatttttaaatggttacatttcagatggttacataattccctgcataatattcttaatattgcttcgtagccagcaaagcctaaaatatgtactgtctggccattgaagaaaaagtctgccgacctctgactctggattctgttatattctcctaaagtgagctaacttttgtttggtcaggcagttagcttggctgaactaactcctagctctgtcccctctggtaggcagaagctaaagtcttggtttctgctctctacctgcaagtgtagttcaggatcagtaagagatcttggtgcattttatacatagaagtttgggcttccagcctgacttctttctacctctgtcttctgattttttaagccaataagattgtgagtttctatttgagtgaggcctacccttgggcaaaagccattaaaaaaaaatctagttacttcccagtgccaaaaacccttgtttctcatatcaactcctgttcagttattgcctgcttttgatcaatcttcatatgttcaaatgattgtcattttataatttgtcaggggcatataattgttagctgtgggaagggtgatttaatatgagctactcagtgattgctagaagcagaattcccttattaggagatacgattaatcgttcgaaatgatatattcattgttacactagttttactgtagcgataatttcacatgcctatacatatgtcagaattcatcacattgtacactaagcagtttattgtataaacagacaataattgatgtataattcaatagtaaagttttaaaagtagaaccattttctatgtagaagagctttgattaatttagaactctaaattatttgactataaaataagtagatttactgtataaatctatttctgcaagtcatgcttaaatttaaattatgtttagcaatgcaaaaaaagttaattctaaggataacaagttaacctaacattttttttggtagggacatgtgactaaagtgaaaatctttcatgtgaag

SEQ ID NO: 110876 - DNA, 1054 bp, Homo sapiens
atattgatcaggacatgcaagtgttgtggtatcaggatgggagaatagttgaaaccgatgaatcgcaaggtatttttgttgaaaagaacatgattcacaactgctccttgattgcaaggtaaactttttttttttttttgaatgaagaattgtgcctgtgtattttatttatccttttggaggtgtaatgtttagtggaatttgaattaatatttcatcttcttgtatttaaaaatgcaaacatctggcatttccttttcctggttcttattcatcttctaaaattaaatagccatcttttcatccagtttttaaagaaaagacttaatttcaaagaaactttagaaattgaagacttttttaaagtttttggaggaaaaatgtaaacttttagtgctaaacctaatttccaactatttcctgctgctaagcttacattttctcttttagtaatcacctgatattgactctagtcaaaatattgactgatacaatattttaaggtacttatcttctccacctactagtataaaagaatataacatctgaactatcaacctcataattggtgtgaataccaaaataattaaaagtaaaaatactttataaagtataatagactaagaatatatatgatattatcacttaccagatattttactttggtaaaatttttacctttagacattgagttttccactccctttcttctttctttccacctacctagaacttggcttatatttttatttcagtagagctgcagttttcagactctctgccaggtcctcctagggtaacatcacagcaaactcacaggggtgctatgaaagattactgaaaaactaaaggttctgagttgacattcaaatctcaggggttctctgagttgagattcaagacttatgcagttggctattttataatttttcttgagatttcatgtctactagaagcatattttcatttatatcttccaacatttagagtagatgctttaaatcctttcctgctaattccaacatgtgggcaatcttgtggttattgctactgg

SEQ ID NO: 110877 - DNA, 1352 bp, Homo sapiens
cataaaacaatctgtattgctttaggttgctgtttgattgccagaatcagcagagttggtaggcatttaggccaagaatgtggcaatgatggtggaaaattggggatggcttcaagattcaatattaatgccacacactgcatgataaatgggtagaagttcgatagacaaaaaggaatgggatttggtattccagaactctggtgttcagtggcttgttgcatagaagagggatatctgccaaagagtctttgtttgcctacaaaatttcatccaaagcagaaacccgggatcagcaagaacagtgttggggtccaacactctgcaattcagctccttggagagaaactgtagctagttgatgaaatgtactttaggcatggtatgggtgaacagtattgtgcttgccaccagaaatgtaacccaatataaaacaaaagtgctatttaattttattcactataatctctaagttgtatttgcatgttacagggaattccagactgagtatcttttgtgtgactgtaacatactgtggatgcatcgctgggtaaaggagaagaacatcacggtacgggataccaggtgtgtttatcctaagtcactgcaggcccaaccagtcacaggcgtgaagcaggagctgttgacatgcggtaagggagaaatccaaactgagaaagcatttaccatattttgacttgctaccatgtttttcttgacaaattgtaagattctctttatacttggacagaactagtatgcagccagtaatcattatggatttgataatatttagtttatgccaacgattaagccagctagattaaatgaccttttttttttcagttgtctttaaggtagctgtttttaggttcacatcagctttctttatgcaaaccaatttcaaagaatagattttcagattttccatcagttggcaactcgtgaatttgtctgtagtaacacaatctcaggatgcccacatcctgtgtgtgggtgggaatgtgaacgatacagcctttttgaagcaacatgtttcagtgttcttaaaagactgatacaggcagggcgcggtggctcacacctgtaatcccagtggatcacttgaggtcaggagtttgagactagcctggctaacatggtgaaaccctgtctctactaaaaatacaaaaattagctgagcatggtggcaggtgactgtaatttcagctactcgagaggctgaggcaggagaattgcttaaacccaggaggtggaggtttcagtgagccgagatcgtgccattgcactacagcctgggtgacaaaagtgaaactccatctcaaaaaaaaaataactgatacagttagatc

SEQ ID NO: 110878 - DNA, 1125 bp, Homo sapiens
aggaaatagaaatgaggagtgattgcaaaaataattgggccatatcatagatattgttaaagtaatttggctaggagtctgaatgatagatctgtaaactaaaagctaacacagttttttttttcattatagttgaaacttctgagtatttaaggaatgaagtcagaaagtggtattttcagatgtttccgaggaaatgaaagttccatcattgtaatattttgcccttttatccattatctgtcatttactggctgagtttgggctcagttctccaactgccccagcataattaactgtgtaggtcatctaaggaattgtattgcaggcagcaaaatagtttgagtctcatttttactactccagttttatcttgagtaattttgcaagagtaagtgcttgaaatatagagggcactataattgagcagcattgagtctgtgcgtgccagcagtaagtgaaagcaaggatcattttcagcctcactgctatccttatctcatttgcgtacagtaaatatctcaaagttgctagaataaaggtcttgtgcgatacctgggtgctgttcttgaatactgaatgcatgagaccttctttaaccaagagaactaattgaagacacttttccacccttctccttagggatctgacaaacaatcgaataggatgtctgaatgcagacatatttcgaggactcaccaatctggttcggctgtaagtatatcttttctttcccattaaaagataaggaagcatttgagccagtacctaaatatgtatgaaacttatgtatttaattataagtagcaactgtaggggttatagaagccataggggacaaggagctcacaatttaatcatggggatgtaatctcctcagaatataatgctaccttaccacaccacacacggacacatgtgcatgtacaccacacacacacaccaaataacacagtgtagtacatgcaacagagagcacgttcatgctgagcagtatgatcaaaagctttgctagtctgggaaaatttctaggaaatagtaaaatgtgagctgatggcccagaagatttgcagagatctggatagtgagaaaggaaaagaagccaaactaatgatacatgaaggt

SEQ ID NO: 110879 - DNA, 1030 bp, Homo sapiens
actcaggaggctgaggcacgagaattgcttgagcctgggaggtggaggttgcagtgagtcaggatcacgccactgcactccagcctgggtgacagagcaagactccgtctcaaatgacaacaacaacaacaacaacaaaaaaccccaaaaacctaaatatagaaggccagggaagggaaaatatatgaacaaccaaaagacatgaattttagagtgtatatttttgaagatggttttttaaaattcaactgaatgatgtttgtcacaattgtaattagatttactttgatattcaaagtatggcatactaaagaagaaattatagaaataatgtatatgattgtagttcagtgataattgtgaagttgaataatattaggtcacatatttcttttatgacgtatatttttattattttattgaccaaaccaaaaggctttggagccagatttgtcaaatttgcattctgactctcccttttactactgggttgatcttggcttaacccttttggcttcagtttcctcctcttattattatacttttgttttttttgtatagcaggtaagtgtattgtgcctgaatacttgttgcagtgttgatatgtgaataacttttattttatttttaacagggacctccgaaacaatcttattagtagtatagatccaggtgccttctggggactgtcatctctaaaaagattgtaagtgtttgaattgcttgcttacgagtttgaattgttgcttatataaatagctgtcaacttactttaacatgatgaaaaatggacatttaataattttttgagctttacctggccaggtccctgatacagaaagaggctgggcacagtggctcacgcctgtattcccagcactttgggaggctgaggcgggtggatcacctgaggtcaggaattcaagaccagcctggccaaggtggtgaaaccccgtctctactaaaaatacgaaaatgagctggcatggtggtgtgtgcctgtagtcccagctacctgggaggctgaggc

SEQ ID NO: 110880 - DNA, 1050 bp, Homo sapiens
acaaatggacagtagatttgtatattgttaaattacaaatagtattcagtcttattgaaatgatgtctagaagataccttatttctttataaagtcagtattttacaagatcataggttatgcatttttctgctaagtttccattttaaaaatgtgtattcaacttgcataatatgattaattatataaatgtacatgctatggtattgtttatgcttatgttgaacttagagctattacatattgacttttctctcttaaagttttgattatgtgtgatagaaataatttagatgtgacaagatgcatgagtaaactactttaaatagttggtttctcagagaaaggggaagacactcactttttttcagccatctcaaacattctggctaataaatgatgtcttagaatttctcataggtttaaacataataagctaaattactttgatattggtagtgtatattaggcaacttattatttttttggtattttttaggattctgagtaacaataagatatccgagctgaagaatggctcattttctgggttaagtctccttgaaagattgtgagtattctttaattatcatctcattattattttgtttaatgcattttcattgtaaatcttcattgtaaatctgtgactaaattcccagctattcaaaataaaaattgagtttttctaacattttttaatgaaaaattttaagaactttattttaaaaaagaagtaactaaattctgtaaagggccagatagtaagtaaattgcgttttcacagctggccacaagtgactcacctctgccgttgaagtgtgaatgcagccttagataataagccaatgagtattgcataagacaatacttaggaatgataaatgaatcgacgtggatgtcttccagtaaatctttacttataccagaggtcatggaccatactttgttgactttaagtatgctagtttaaagcattgatgctgtgttgaaattctatatcctgaaatatgtatgccatgttaggccattcttgcattgctatagaga

SEQ ID NO: 110881 - DNA, 1051 bp, Homo sapiens
gacatttgagaagaaatcaacagaatgagaggccaccaaaccagtcccatggaaccactggggaaaagttaacacaggaaaattctaattcatagtctcagatccaagagcagagcaactgattaaagaaaaaaaaaagcatctaatgggaaaggttgagcaaaggaggagttcttacaagttaagtgtgggattataatgttaaaaagctctggtgtgggccgggtatggtggctcacacctgtaatcctagcactttgggaggccaaggcgggtggatcacttgaggccaggagttcgagaccagcctggccaacataacaaaactgtcaagtatggtggcccatgtctatgatcctagctattcaggaggctgaagcaggagaattgcttgaacccaggaggtggaggtttcagtgagccgagatggcaccacttcacgccggcgtgggtgacagagcgagaccctgtctcaaaaaaaaaagtgctggtgtggggtcagtaggtgggctgaagggagaaatggaaacaaccaaggacttaagaaaattagtcttctggaaaattaagcagaggatttattccacaattcaaagcagaacgttattaagatgagaattttgaagcagaattaagaaatgtgaaggttggaactaagagatggaatatctggctaaggagcagatggagaaaaaaaaaaggcagcctaaacaattctttgattcaaggatgccatcaacagtcagatgcttatttccaaacaacttttcagcgagggagccagagatctaattattcttaagagctggtttctctaaacgtgtacatatttttttcccacccagtgaaatgccacttccttagcacctctgtcacccccagccttctcatgctgaatcacttaaccatttgtattctgcatggtatcattttagtacaaagctgcttacgcttttttttttttttttggaaacagggtctcactctatcgcctaggctagagtgcagtggcgtgatctcagctcacggcaacctccaccctcagggctca

SEQ ID NO: 110882 - DNA, 1888 bp, Homo sapiens
gatttttgtcaataaaaacttgtgtgattatttgtatcctctcattatataagtacctacatcatattatggatcttgcctcttggcctgcaaagcccaaagtatttgccgtctggcacctggcaagtttcttgacttctgccctggagttttattactcttctcgtgaattttaacagccttacatttaaacaaagtttaccattgataggaggaccttgtgctcattgctctcagagggctggctgcaggcagaaagagcttatttaatgtggcacacattgttttccagtttttttcctggatgttttcagctggacacccagaacgtctgcctgcctgtctttttctgaccacttgtttgccttctccctccctcccttgatccattcatgaactcaggaacaccctcactattggtatctcggttctctggggccatttacacctgactagaggatctgctcactccctgtgcctggacttccgacctacagagctgtgagctaataaacaggtgtggatttatgcagctcagttagtggtaacttgttacacagcaatagaaaacaaatacagatctttgcaaggttatctcactttaaatgattttccccttctttgtctgccctttaaatttccactagtattgtttgtttttctttttacagcaaagttcagaaatgtttccccaatcatcttacttttcagcaacattgaaattctgtattccctaggattcagttacatatccctcttgtagcacttaacacttagtgtacacttgtgtaatattagtctttgaggtctgtttttgtatttctgctctcactcccaggacacaatagttgctcaaatatattctgaaataatgagtaataggtccgacatcaagaattttggctgaaaaaaaatcagagactcagactcctataagaacctcaggatggtcccagtagaaagctttcaattagattaaaatgccaaataaaatggcttttattatattcataaatattaagtgtccagtgttctttattgatatacagacaccttaaaaaatgggttgtcttttctcttgcagctaatgtgttcataagataaggtgaagtgttatttaataaacagtttttcatttttaggcatttttgaaagatatctactatggcattaaaaacgcttcaatttttcttaacgaaatgctatttaatttcatgtaaacttacagtttaatgctaaggcagaaaaataggttatttcctttttatttatgacactgctaaataaagaattgaaaatagaaaaaaaatcaggcctcctttattttttaaaatgtcagatctttgataagaatgcctggaaacttgaatcttatttattgaaccgtttcaggagttaagggtaaccacgagcccaggttggaatctgttgtctcagtgtaattattaatggcaactctttttatcctccagtgtgtttgatgataaattgtattgtgaccttatagtatatgctacctgttgatatgtttgacttgctgtctcattttgaataattgttaaccttgcagagattgaagttagaagtactattgtagatggtttgggaaggcagaatatactgaactctcccccattcaccaaatctgtaggaaagatattgaaaccgagtgatggaaatacccacaagttttcatgtctgtttggaaacttgaaggatcatttctctattatggaatttggaaattttagtagaatgtgtccagctatgcatctttttcatcagtttccctggcttgtagttagtcttacaagtctctcttcaaatgaaagatatttccttttcgttattttttttgctcatgtacatatttatatttatacattat

SEQ ID NO: 110883 - DNA, 1766 bp, Homo sapiens
tctcctgcctcagcctcctgagtagctgggattacaggcacccgcctccacgcccagctaatttttttgtatttttagtagagacggggtttcaccatgttggtcaggctggtctcgaacccctgaccttgtgatccacccgcctcggcctcccaaagtgctgggattataggtgtgagccaccgcgcctggcccaccagagtttactcttgtggccaccttggttttgatggattttggctggcttttttactgcaacctgttttattagcgaggttttttatgacctgtatcttatgccgaccttttttatcctatgacttagaatgcctaactgtttgggaatgcagcccaataggtcttagcctcattttgcctagctcctattcaagatggacttgctctggttcacgtgcctctgacaaaatgagtacacattgactcctccgggaaggcttgttaaaacagattgctaggccccaccttcggtaaaaagtcctagtgctttaccagactggtaacatagcccaatgcacaaaaaggttgggagtctctgctttggatctaatgccagtctgcaggtattgccaggagagcagagaaactatcaaaacagcaccacaaagacccagtcattattattattattttttgtctaacaaaaagaggttggatggtactgttatgttgcaagggacacactcaagatacacttgtagtcttagatactggtttggataaaccatctatgaaggatctttttgaaagatctttggaggtcttcttttagaaacttaattattgcctgagtgttagatgagattaaaaagataccgaaatggaaaggtggaggctgggcacagtggctcatgcctgtaatcccagtgctttgggaagctgaatcagaaggatctcatgaggccaggagtttgggaccagcctgggcaacatagcaagaccccatctctacgaagaaatacaaaaactagctgtgtgtggtggtgtacacttgtggtcccagctacttgagagacagggatgggaggatttcttgatcacagggattggaggttgcagtgagctgtgattgtgcctctgcactccacctgggtgacagagtgaaaccctgtctcttaaaaaaagaaaggtggagatcaacagcttaaaaagctggtaacagtagtatctacagtgtaatctcatcttgtgtgtgcaaaatgcacacttgtaaatatatgtgggtgacagtgttggaaatgagctttattaaggtgttaaaatggtcatctctagatgatggggatatgcttttattttcttggtttggctagtctttgttttctaattcattacattgtatgcctactgttactgtaaaataaaaatcatttagaaaaaagccatcttttcagtgagaatgtcatttaccacactctttaaaagagaaatccacccagctacacctccactgtttcttatgttatgtctctgtttcttatgttatttttctccatagaaattttcaacagctaacatattctgtgttttgcttatttattttttcttccacccactagtacataaactctataagggcaggactctttattttgttctgttttccccatcaccctgaatgctatcaagcattcaagtaggcactcagtaaatctttgtaattaaatacatgaatgaaaaatatccaatatctatgtatattgggttattgaaggaaaacggtgagttacagtcaagtttaaaaacca

SEQ ID NO: 110884 - DNA, 1017 bp, Homo sapiens
gttattttcatgaaagtgacaccttaagtgctttctttggtagtggtgttggggtaagcctttgtagaacagttgttacagaaaacttgtttacatggaagcattccttcagcgatgactgacagacgggaaaagcaaagtgcaggtcgaccatctcaaatatgaaaatgtgaaatccaaaatgctccaaaatccaaaacttcttgggattgacatgatgctcataggaaatgctctttggagcattttggattttagatttttgggttcgggatgctcaacctgtaagtataatgcaaatattccaaattctgaaaaaaggcgaaatcagaaacacttttggtcccagacatttagaatgagggctatgcaacctgtaactgagaatttttacctagtgcatattatgtccaagtaactaacaactgttgaaggaaagaattttaacatcccattttactctcattaagtggttgtggaaatgaccaatggcatttatacttaggtttgtaacatcatccatttattatacggtctttctttgcttatctgctgcattcttgagattgaaaattttatcctggaataataaatgaccctatctcaaacagctgccatgttaagatgaataagaacatcatagggggagtagatgcatttttgggaggcctccatctgaagtgacatgaattcataacactctagttctgtctacatgtcatgctgttactaggtgagcagggaactgtcattcctacaccttatttaatagaggtgatcagaatggaggataaagggaaatagcatgagactgtgaatggaagtggggattcgcattggttttgctgccaagtagaatcgtgtcacctagcaaatcacaacatttctggccttcactttcctgactagtaaaacgaggtttttgaactaggctgtctttactgattctttaactgctaaagttctatgattttacatatgaaaccaaacctaacaacattgctaacgtgtattttt

SEQ ID NO: 110885 - DNA, 1031 bp, Homo sapiens
tgacctgaaggctgtcaagtatgtggagtgttctgcacttacaaagaaaggcctaaagaatgtatttgacgaagcaatattggctgccctggagcctccagaaccgaaaaagagccgcaggtgtgtgctgctatgaacatctctccagagccctttctgcacagctggtgtcggcatcatactaaaagcaatgtttaaatcaaactaaagattaaaaattaaaattcgtttttccaataatgacaaatgccctgcacctacccacatgcactcgtgtgagacaaggcccataggtatggcccccccttccccctcccagtactagttaattttgagtaattgtattgtcagaaaagtgattagtactagttttttttttgttgtttcaaaaaaaatttttttgtgtgtgtttttttgtttgtttgttttgtttaaaagcaaggcatgcttatggatgactctgtaacagactaattggaattgttgaagctgctccctggttccactctggagagtaatctgggacatcttagtgttttgttttgttttttttccctcctctttttttgggggggagtgtgtgtggggtttgttttttagtcttgtttttttaattcattaaccagtggttagcccttaaggggaggaggacggattgattccacattccatttcctagatctagtttagaaaacatgttccccatctggtgctcttaggaaggagtatagtaaatgcctcatttaataacatactcctttttgaaagttgccttttctctccacccttgagtagatccagtatttgatgaaactcatgaaagtgggtggagcccgtcttgcccctcctcttttctaggacgcactatatgtgactgtgactttcaaggacatttgtttgccatttgctgatttttttgggaagttaatttctaacttctttcactgataaatgaagaaaagtattgcacctttgaaatgcaccaagtaatttctaacttctttcactgataaatgaagaaaagtattgca

SEQ ID NO: 110886 - DNA, 1085 bp, Homo sapiens
gtgtgtatatcacaatttctttattcactcattgagatgggcatttgggctggttccgtatttttgcagttgtgaattgtgctgctataaacatgtgtgtgccattactttttattaaaatggaagcttcacaagtgaaagagttatatcacctttggttacctctgtgtctcctactgcctgatgcagtggctagcactcagtgaagccatagctccctgccaacccccttcctgctgaccttctctgaatttaccatcggaacctctctgaactacgtaggaagcttagctatctctttacgttttatcttcaatgaaatgaaaaccctcttatactactcatttctagtttgctgccggcccaggctccattcccctttctagtaattccctcatagtatctcatgacaaccccaagaatgaggtagatcccgacagacccattttccaggtgaggaaactggggtttgggggctgcaaggagttaagtggcctcttatcggcacacagccccacatcccataggtgacagacttggtatctgaatccaaatctgccttccttcaaagcccaggctccttccatgggaaacctgagctgactcttgcaggcagggatgaattgtgatgagttgaactttctaggtagggtcagactagaattcctaattatgagcaaaagctgagaggtgggagagtacatagctagatttgagaagagagacccttgaataaagtcattgagattcgagtgttttagatttacttgctcaagggggacctgcatcatttaacaatgctatattcttccttcttgaccactgcaatcccaagtcatgctcttccttatttaggaccagtcagtaggacttgagaaccatttcattgagggtagctctggccttttgccagactccttttctgatcacttatcctatagccagcagctatgaaagatctgaaaactttcattctaagagtttgcaggtctcagaataaaacagagtgattttatctttccaggatctgggaccctgcctctgaagccttcagccaaccctgtatcacattggctaccggtagc

SEQ ID NO: 110887 - DNA, 1045 bp, Homo sapiens
gggtaggatctatgaataaaacacaaacacaggaataattaatctctactgatcaaataatcccatgtttttgtgttttaatgtgacattagccctctcactcccaacttctatttattaattataaaataattcttgtttttctgtaacaaataaaaaacatatcagttgagacagccttgactatctgaagtacatttttagcagtggcactgtatcggcactgtaaaaaatcacctcaaaatttagtggttaaaatagcaaccacttatgtagctcatgattctgtggttttgcaatttgggcttgtctcatctgggttcatgcatgcttttgcagtgagcctgtggttagctaggcagttttgtattgggggctcgtcaggctgtcacctgggctaaagagggtagctgaactacatgtctctcattatctagcaggctagcatgggcttgttctaccagcaagggtaggatcctaagagagagagagagaacatggaagagtgcaagaccttttgagccgcagaactggcaacaatactgctctgacacactggatgggtcaaagcaagtcccaaggccaggtcagatgcaaggggaaagagactctgccctgggatgagaggagctgcacagttacgtgataaaggggacttgctgcaagggagggaagcattatggccttttttattttttacttttgcaatttgttacaaccagttggcaaatatgtcaccttggacaagtctcttcacttttgcaggtcttggtgttcttgtatctaaaaaggagataatgtactagtccctcagctctcacagttgcaactatgccatgtaaatcagaccagtcacagattactctacagaacagaacttaactcataaagagatgtgaagagtcaataagacaacgaatgcacactgcttagtcctagcacaaagaaagagcccataaacagcagtggctcttttgttattaacaaaaaaatgaagataagctgtaggtgaagaatacggaataggttatgattaaaaaagaaa

SEQ ID NO: 110888 - DNA, 1026 bp, Homo sapiens
gtgacccaccattttgtcagtgtccacatgtctggtgtctgcacaccttcctttccaacagtcaaagctgagtattgccctttacagggaccctttaggtggcctgctagagtaggagaagcctcgtttccatcacaatttccactttcagctctgggatcctgggccgattaactaacccccctaagcctcagaatacctaggtttaatatggagaaatacaacctcctcagccggggcaatgttagattacatgtggtagtgcatccagagatgggcctgggagagtgcctggaacgtgttagccccctcttcccttcctagtagttccaggactgaaccaccacggggatcgatgagtgagcacgctcgccccctagtgggcatttctgccttgacctcctgagccaacccatccttaaagaggactggatggcctctatcgtcctagttggtttatttaccagctgttttgaactggtgtgagggcaattcatgttagggtaacaaggcaatagatcatttaaatgaaggcgacaggtttgagaatagggatggtgaattctttctccagtaaggggcaaagtaccatcccctttttacagatgctggccttgaggtctcagaagggacagcaggagactgggactcatggatgggccgtttgcacacatctaaatgcttgtgtggacaaccgagagcgagatcttcctagtgcctttatcacacgtggttcttaatttggaagtgcggggagaggtgtgaattgccttgttctgtctgtgattcaaggtaatctctatcatgtaagtgtcttgcaaagaggaggcagtaggcaagaaaccaaagttattgtttatcgacagcttgctctgtcaggtatcttccttagtgttttatgtatttaatccttgcagtaagccttggaagatggtagaaaagactctcattcccattttacagctgaggaaatggaagcctagagcatttgagtggcttgcttaaggtcacagagccacatgtgga

SEQ ID NO: 110889 - DNA, 1055 bp, Homo sapiens
gtttctgggcataacacatccatgctttcaacctcatatgcttcttgcagcataaacaatacacacttaaactcctaagcatttaccaggatacttatagaagaaggttgcagctacttgagctaatttttgcatgctttgtcaattcacattttctactaggttgaaaatccactttggtttgcagtggtgatgggttttatcctctgatgattcaacctttttgatttttgaaagaaaggagttttaaccttagcagtcatgtagcactttaaattcaaaacaagaatctgactctgactcttgaaatgatactgtgtgttttgtttttgtggaatgggagggccaaatgggtagttagtttcttttgcaattggaataactgtcataaaatcaggaagtgctggaagagaccccagaagtaattgatttcaaatcctcatactcaaagaaaaccaagacccaaagataaccaagttctgttcaaggtcattcagtttgttattttgtctcatcctaagcgagagcatttcctctctatggagtatatcctgtacctgtgttttgttttgttttgtttgtttgtttgagacagagtctcgctctgtccaccaggctagagtgcagtggcaagatctcggctcactgcaacctccgcctcccaggttcgagtaattctgcctcagcctccccagtagctggcactacgggcatgcacatccatgcctggctgacttttgtatttttagtagagacagggtttcaccacgttggccaggctggtctcgaactcctgacctcaggtgatccacctgcctcagcctcccacagtgctgggattacaggcgtgagccaccgcgcccggctgtacctgtggtattttataatcctatttggtttcttgctttccccaaataaaaaccgtttttgaactctgccagtggcattaaggaaaggatataaaacttgatagttatcaaaagaacatttccccccattattttagtgatataactatggaggaaattttaagcgttttgctaattttaaacttt

SEQ ID NO: 110890 - DNA, 1552 bp, Homo sapiens
aggcacccgccaccacgcccagctaatttttgtatttttagtagagatggggtttcaccatgttggtcaggttggtcttgaactcctaacctcaagtggtctgccctcctcagccaccttaagtgttgggattacaggcgtgagccaccatgcccagctggtattgagttcttaagaagggaaatacattgatttttaaggaagatagataaaacttgtgcagtagattataaaagaaatgattagaatttcatctctgactgatttgtgataacgagtatgttattattttagattatttgctttttagtgtactgtctcagttctgcttacacaaaaacatgctgaagacttttttgtaagatatttacttaaaaaattttaaagttttatatttgggtgttttgttgaatcactgtttcccaagattatattaatgaaatacagcttacaactcattttcttttttcttattatttccctttttacacttaaggagggctgaatggataacttttaaggtattgtcttaagtgttaaatgtctgagtatgctttccttgcctctccagaaatattttaataaccttagagaaacatgtaggattttctacaaaaagtgtcggctgctttagcggtttctccctgaagtgatgtgtaactgatcaggatctactcatgtcgtctttggtaaagttatgtcgcttgtcagggtgaggagagtttttgagatgcaaattttcccgtttttgttttattaccatggagaaatgtaatagttggtgtcttttggtatagctaacttttaaacagtacaggtggctcttggacagtcactgttttaaacaagcagcagtaaggcagactgaagacagtaggaaaaatgatcaacatggtggaaggaaagaaagcagtcagtaacaacttatataataatttgcaggaactcttagaactgaaccttacagttaagttgtgatatctggggtagattgtattatttccttatttcagaagaactgaggccccaggtcacatggctgtttatctgcagagctggcattccactctgcttagctaagtgctccctcaaccttgatgctatttttcctgagctgggtgccaggggagcttggatatgtaaagcttggttgatgtccttgataggtgcatggttctaagattgtgattttcatcctaagtttaggaagttacacacctgcgtggacaaggtgggtctaattatttttcattctggtttaatgttgacaagaaaacagacatggaagaggactttcctgcactcctggtcttccttttccttaagtagtgctacaagggtctgaccggaagatctttttactggtggcttgctgcttaatataatacaggttttgagtacaatcatttcttcgtattgtttttaaagtagagcaatgatatgactagtctgaagtgaacatagtctagaagtcacttgcttggtttggggattagaagtatttgcaaggtgaaccacccattctcttctgcttatttacactacactgctt

SEQ ID NO: 110891 - DNA, 4414 bp, Homo sapiens
aagggagaactgtccattttgatgagtatcaccagtcaaggtgttaccaaaaaaagaaatgagagggaagcacgtgcaagctcttttttttttcccatttttattttcctgtctttgtaggttacctttttcttttcctctttgccctctttagttttctaccttattttttattctatttctttattttcttttttgaaatggagcctctcggtctgtcgcccaggctggagtgcagtgacttgatctcagctcactgcaacctccgcctcctgggttcaggcaattctcctgcctcagcctcctgagtagctgggatacagacacccgccaccacgcttgtctaatttttgtacttttagtagagatgaggtttcaccgtgttggccaggctggtctcgaactcctgacctcaggtgatctgcctgtctcagcctcccaaagtgctgggattactgcacctggctttagttttctaccttagacatgaatgttctggtaattgtctgctcatagttggcgcccagtgctgaagagcctgctctagatggtctcaggcaggaaagatcagatagtaaatgttgggctctgtggacccatgaagtccttgtcaaaactacctaacactgcctgctcttggagcataataggtatagacaaatgggcatgcctgtgttctaataaaactttccttatggatactgaagtttgaattttacatgctactcatgcttcacggaatgttttttgtatgatattttttctttctaattaaagataaataaaccattttggattcacagaccttacaaatagaggctatgagttggatttggcccacaggcagcagtttgcttatctctgcttttatcagacagtgataaataagtatagccatagaatgaaaagtaaaagggaggcctgcctcttcctaattatgtaggtagctttacaactagcaagtcagaagcattgtattaataatatactgggttttggtttcaggtggcacatttagaacgaacagggcattacttaactgtgaaagataaccaggtggttcagttgcatccctctactgttcttgaccacaaacctgaatgggtgctttataatgagtttgttctaacaacaaagaattacatccggacatgtacagatatcaagccagaatggtaagtacaccttttgttctaacagttttttgttagtactttgctcaaaatggaacctgactgttgctagagtcatggccttgcattcactcattgagaatttatatttcagtgtgtaggtatgagggaattgactggatggtgtgattaatctttcacacccttcctttgttaagtggacagtgggattgttgatatttatgggcaggatttgaagccaaatgtgaagttacatttgaatagcatgaaaagtttcttcaggggctgggcatggtggctcacacctgtaatcccaggactctgggaggccaggatgggaggatcacttgaagccaggggttcaagaccagcctgtgcaatatagccagaatccatctctactaaaagatatataggtgtgtacaaaaattagctgggcatggtggtgctgcacgtctatagtcccagctactggggaagctgggcaggaggattgcttgagcccaggagtttgaggttgcagtgagctatgatcatgccactgtactccagcctgggtgacagtgagaccctgtctctcagacatacttttaaaaaagggtttttttttaatttttttaatttttagagtttctttggagccattctcttgctgttgtgattctcaagtcagtactgtttcttgcttgcagaaatctgtttttttttgttttgttttgttttttaacattttttttgtcccattacaattagccctcaactatttattatttatatattggtttttaggaactgtgcaggcataaaaatgatagctctttgtgttttaacatactagcttctacaaaatgtagagtaagaacggattgttttattttaagcaaaataaccctcaccttcatggttttttgttttatttatgccagaatctattctataacctatgacaggaaatgtcagccaagagtagtgggactgaaggcacatattctaggtgctgtcaccgctttatattgtgcagctgctttcttatacggatttgggacttttgacacttaaattgtgtaggacattaccattttatcttaaacgctttgttgagaaaaaaattatatagctaaactttataaaagatttcagtcaagtgtattttgggggtatagagttacagttattaaaacattgaaaatgaaaagatccaatcatttgaataccacgatgtttcctacacagaacctgttatatattactatatccttggagtggcaaattaatagtgtgccagagtaaagaaatcagtgactttatctgttatctttacattaatgtatcttgaggggtttgttattaagtttatggtaagtccaacatcagaaaattcacatcttactaaataaaatacttaacacatttctaaaagtgctatttgtaaggattagttatttgtatttttctgagacttgaattcatagatttgccttggttcatcagtatattaatgaataatgcctatcctattaacaactccagtacttcaattaaatgttaatttggaaatttttctgcccacttctaaacaggttggtgaaaattgcccctcaatattatgacatgagcaatttcccacagtgtgaagcaaagagacagttggaccgcatcattgccaaacttcaatccaaggaatattcacagtactgaattcagtgcttagaactgaagttattgagaggacagctttaaaagatgaatgaactcaaaagttcgagttgtgctcttcacgttggttcgataatggcctttatttgaaagctttttaatttttctttacagtaaatattccattctgatttcataaattaaacatttatgcctcccttttgtgttgacactgtagctcatactggaaaagtcgatcaatgttttgcagtttattgaaagtagttctatatataacaatgttataagcatttctttagaaatggttgaaaatgcttctaaaatgtgattatcgaccatggtatgcatgatcgttgtaattgttgacattccttttagaagttgtgaaatgttacaacttgtgcttatgtagacacaatcttctgtctcagtacagaggcactgacttcaataaagtctatttatactaattttggccaaagccctttggtatctttgttctagtctctaagtatagttgtttttcaagtgtggagcttttttattattataattatactgttactacatatttagtatctttctaccaggagtactccttaggaaaagtagctgttaaagcagtatttttaagagcatggcttagcgctttgttaggttaatcaggatgtgatcgatctaaaaggggtaaaatgtgtgtagtgatcatttgaaactggaccccaaaagagagaataatgaaaggagagctctctacttgtctttcttagagttcctttcataaggctcataatttattaactacatttttgtcagatgtttttattatacttctagcttctcaaacacgtttattagtattaggtaagaggaaagcatattttagatctcagtttaacaaaattcttagtgatggaagttttatgcagtatacaaaataatttgtatagtgtgttaaaatgtacatttgaccttccattttctatgacaggcagtagacaagttgaaaacttgtctacattcattttggaatgaaaattgaggtgttttatgtggcccataaaatgttttttaatcagttattttcatatgaagactaaatactgtactcattagtctggacttccctcttcttcccctcctacctttataagtttttaagtgttaaaggaaatatataggtgtgtgcctggcatttaaatatacttggtaactagcatgtgacttagggagttgggcaagttaactctttgaagctaactagtatgctttttagtgtaggtaggtgttactaaatgatgcctagtggcttgaaaaagttaatgtgccttctataagtgcctcattttgttcccatggaataatttacatggtggaataatacttcaggttacatttaaatattggttagatattcatgcaacattaagcattggcaacattgccagaatgtcttaaagttatgttgaaaaagtctaagtacttggtcagactgttctcactgaaatggcagctctcaccagaggaatattttgcttgttaatttaagctgcaagtgtagtttgtaagttgttgtgtatctt

SEQ ID NO: 110892 - DNA, 1069 bp, Homo sapiens
ctgatttctattaacagtcctttgaatccactcaaaagcaaaagtgagtttgtgcatgctcataaaaatttatcttaaatgttggtacatccagtttctttgagtgaattaatatactaagaaattttaagtatttaatgagtaacaaattaatgtactaaatggctaaggtagtctagttatacaggaatcgtttttagaattattttattaatagagcctttgttatacaaaatggaaactttggctactttcagatgtgattaggcacctgtttcttcaggaatgtgaatattgatcagtgcattaaagtttctctgaatctagggcttaattggaaatacattgtcataacagagtactaaaaggaagcaattgagcggatccaaaagtacatacagttggctttagtctttatctaaaaactaagcacctccaaattcaaatattcaaatacgtggatttcatttacagtcctctacagagtgatcattggtaattatgaccaagacccttgcgtactgcaaaagccaaaaacgtctgttgagtagcaataaagatgaaacataatttaaaaggttttatttagtttaagtatgctgtgttaacggctataagaacagaagtaaaacttgtcaagtaaatactgtgaacagttattttaaggtgtttataaaataagagaaactttgagaaaaatgcaagaaaattttgtggtgataaaattgaaaacaaatcacctgatttgggataagtctcttctatctcttttctgtttgttcattctctctttggctgtgtcttttaagcacgatgtggcttacccttaaggccagatgggctcagtagctagaatatgagcctgaggacactcagtttcagaatcaaaaatcaaaggagattggtgagatgtctgtatttgaatctaagtaacacagtgtttattgtggcatcttattatataataggcttattagagtttggtgaatgataggtatgagcattctttcttgaaactcttaactatattcttaatatttgatatgttgtactggcttctctttgacat

SEQ ID NO: 110893 - DNA, 3275 bp, Homo sapiens
ggcacccgaacaaacatgaatttcaaacttcatatcaagtaaatagaaatagtaatgtataattttaggcttaaaatctaatctgataatggtattcttttacaatggtagaaaaacttggtaaaagaaacatacctaatatataaaatcgctaattttgtaaaattggaccattaagctaaggaaataatgctgtttttagtaacaataaaatgtaatccacaaatgaatagtaacttggaaattagattttccctaaaggagaagaaatattgttaagaaacaaatgaatagctattcttacagctaaaaatagaaaataagttcttactgacgattaaaatattctctgctactagttttagcacgggagagaactgactccctattgctgagtggtttattgaacttaatgctgcaaatatttcaaaatattctgtggaattaaaggataaattgaaaaaaatttaaatgtaaaattatggcttagtttagacgtatggtatattctaatggtgtgaattttttatttaagaagtagctaaaatgttttcttgcagagttatgactgatcagactcagagcagatgggcagggcagtattgagtcactttaattaaattgtagcttcatttgcggaggtggtggtaggttgttgtctgcctttcttatatgttgttttatagattctcccagttgtacttctcccaagattttagtttttagagaaagtgtggggcaagaactaatggattgtgtacttacttgtctatctgcctagtttttatttctctaggttctcttatcagatatacttacatgattactgttgtttgagtttagaatattagctctttaagaagtttgttgttgtgatgtagttgtaatcttccaactacatctcagttttatttgtaattaaaaaaaacttatttttatttattacaaataaaaacctttagtttgtcaggagaatgagcatttatgtgcagcaatgtaaatggactgtttttaaatggtccatttataggaaaagtgttgaaataagaggcaagtaagaagtcagggaataaaaaatagtttgctgagcttgtaatgctttgtttgacattaaaatagtttttgaagttttgaggtcctgatactaacagtgcaaatctagaggcctttgagagcactacttatttattcccacttaactctagtggctagttcacattaaaattcacagctgtgagaagtttgtgtgcttttatgaattaccttgcttcaattaaattaagcaagagttttaatatttattatgatcatgttttgttgtcactatttggctattttggcatctttttaaaggggaaactgtatgggaaagagtaatatgatactgtattttatcttgttgttgattattcccattatcttctatccgaaccgataatttatgaattttttcattgacaaggttttaagagcttttaaaatgtgttgaaaaagtcccaagctgttaagtatttttattttcatactgcttttatgactatggaattgctaaactgaattaaggaaagttgtatttcaaaaaatgtagtacatgctttgtaacaatttaaagttttatgtgaattaatattgaggctctaaacaaataactgtagttacatatcttgatgacccttgatatgattgtttcagactaattgtcaacttttgaaatattggactttgcttttatattgaggttttgattcaaataagtttgttttttttcttttttaaatttgggactttattttctaatccttttgttaaaatgctgaaacactaggctgaatatcccagcctttttgaattttcttaattcaaaggcggtttaaccttccaccactactgctatcatccaaacccaagaattcttgatatttttatgtttacatatgcttctgctcaccggtgctaatagtgatacccaccagttggtaatagccacagtattagggaaaaaattctgatagaaacatggcagtagactggtttcaaagttgttgttagctctgcagtgggcaagcatagcttcctaactttcacagccattcagtagatttagtggatgcccttttgaaaaattacagttagctaaaaggcaattgacaccgttattctggttattggtagagctatcagcactggtttttttaaataagttgagctttttagtatcctgatggccttcagaatagctgttttgatgcctacttttagatctagttaaaataatcaggtactctgtagctttgaaaccctcttgtcttacagatgtggttaggtgttgatgtaccaaatcaaggtagtaaacaatccaagatgcagttggaggccatcctgccctgccctatgctctgtgaactgacctagctaggccttgttcctctatctgtgaatgcgtgactcatcgatatgggcgtttgtgttgggcccataccaaccttgtttagtcccacagtgttttgttcgccccacggaggccaagaaagccgcagatgaggccaagatgagatttgcccacatagatggagatcatctgacactgctgaacgtctaccatgcttttaaacaaagtaagtgtaaatttgattggagacactcttgtctaaatgtcacttgcagtgtataagatgtttctttgtcccactttgatttattatccgtgacaacttatattagaaacccagaggtacttttgaaaaactcctgacgagcatttaaaatagaaattgccaatctttttcaaagttgtttatgtttataatcaggggataaagcaccaattgtagaaaacctgaaaaataacagtgataaaaatgacagacttgtataacatgtatcactaacatacacgtttttatatacttttatttctgtgcattttacatttttaagaatagttttatattgtttatacaatcattactctaacatttttactaataaagaactttttacaccaaaataaaactaatagaaaaaaatggacaagtatgaatgatggttcttaggctaccagtggtctctaaacatgatatggaaaagttcagctctactgttagcccaagaagtgcattattattttggcattattattgataatgaaaggcattaccattttctcacataaaatttgcagatattgaaaaatattccttagctgtatgggagtggggttagttgtggtctttatgaaaagttgattttatgttaccaggaactttagcaactgt

SEQ ID NO: 110894 - DNA, 1590 bp, Homo sapiens
gttgatctaataacagatggttgctaagtgacaaatgggtgtatagtgtatatagcatactactaagaatggtgcacaatttaaacttgatgaattttttctggaatctttaaaattttttctgttgacactgcttaactgaaaccatggaaattgcgagttcagatgagtgaagactactatacgaatttctttctgcagttgcgagttttatggacagtagcaaacactgaatactataaagatagttggagaaaaatggtttctctctagtctagcctacaagtatttatctctactgagacagtgtagaagtaatgccaaaacaaatagctcaggaggcagcagatttttgttttctggaacgaggagactgaggcatttttaacataaccaataaatgtttttgttctttgctaggataacacctatcctgagattttgcgttctaatttaggatcagttgtgttacaattgaagaaacttggtattgatgacttggtacattttgattttatggatccaccaggtatgacttatcaaaacacatttttatcagatcttttaaccaaaattgactcttagtgtttttctccatcctatttaatatatgtattaaatacattttgctttttccatccagtatgcatcaagattaagtcttacatgatagcattaaaactaaaaaaggtgacagttatatgagcacattttttttttttcttcaaaagttattatgggggggtttgggtaaattgaattatcctctgggcatgaaaatgtgagaattcctaagttttctttggggaaaaacagtttgataaacacattgatgaattagcaattatttaatgtatttcggaagaagacagttttgcctacaggaaaattttgcaatgtttttatgattcattgtttgctagatctgtataattgaattggatgacagtttgagtttgagtttggtccactgcaaaatgaaaaatgagattgcttataatagtttgtactttgtcacatttttgcttgcttaaggcaccgtgtctaatagattgtcttttaccactagctcctgaaactctgatgagagccctggaacttttgaattacctggctgctttaaatgatgatggagatctgactgaattgggatccatgatggcagagtttcctctagatccacagctcgcaaaaatggttattgcaagttgtgactacaactgttctaatgaggtcctatctattactgctatgttgtcaggtaatagagggaaaggaacaaaaaaaagcccagctcttcaaagtttgggtggacttcacttttgtttttgttttttaatttttagtatgatagtggattttatagatggttttaaggaattaattttgttttctaaataccttgtaaatagcttcgtaatgacatagtgcttacaaaagtaaagtaagtcattgtgcacaaaagataagtaaagcattggctctcttgagtgctaataaaaattgcagtaagtttgagcacagttgtaactgaattctttggttaaaggtccatcactgctatctttgtggtttttttgttttttgttt

SEQ ID NO: 110895 - DNA, 1159 bp, Homo sapiens
acatgtcatcccgttgagaccatgcacttaccgaaatatttacatttgattctgctgatctgtccattcttactggattataacttgagtttttttccatgtggcattttgtttaaaatgttgagttgaattttggtgatataaataacgaagttttcatttgtaaatattgcccaaaaacattgaaatatacacttgtggaaatttgaatactaattataagggctgttttatcagacgttttgtaaggcacgttatattgcttcatcagtatttttctttttatgctgtccattaatttgattaagcaaaatgtaatgcggttgagtgataacctgaagtaatagctttgttgagaaagaagttgctgttgtggtgtaaacaaaattttggttccttaaatattaatttacctttttaaagcattggccattgaagatcaaatgatatttctagtttatttgctggcttgaaattccttgtgtcagtgaaagttagtggctgatctttaacagtcctgttaattttatttgatatgtaatataatttatatactctatttcttaacaggtagttgtgtcaactaacatagcagagacgtctttgacaatagatggtgtggtgtttgtgattgatcctggatttgcgaaacagaaggtacatatttagtggatactttataaattagagttggtttaacagtacttacaaccaattcatttaatggctaaaatttacctttcagaattattttcctatctttttttttatttgcaaatttctgctgtatgaaccctttatgttttggctggctctcagaaattaagacagtatttaatatgtaattctaggcttttttttcttttagagttgctttgctttctttgtttcagtgtagtgacggtgggtgttttggcttgtatattcatttaacagtatgggtttagtaataaagtacaggatttctatccctgcagttcagtcacttctcccaacattattagagttactgctgtcaactaggcacactatttgaaaacagtactatgttactcctctagtttaacagtgctgtatactaaatgaagtgaaatgcaggtgaagtggctattcaataaatacgttttatttttcaaatatcttttggataaattgatta

SEQ ID NO: 110896 - DNA, 1036 bp, Homo sapiens
gcccttgtggagatggtcctgtagttttaaagaaagacttaatgatccaggatctgaagatagcttactgtggtgctgctgggatgtttataagcaaataagttgatgtccttgtgttggagaccaccacagagttccctggggactaaaagtccaaattagtttaaatgcattattgtgtccagacagtattcaggtagggcaaatgaagtactgcgagttctactttgaagtggagttattgggggcggagtggggggaagtggttctattagaaaaaaagtgagttctattagaaggcaggttattgagggaggaaaatttactcttagcatgtcctgacagtgatgccaagcttttcaccatagggtctgttccatattagtcaatgcggtttgaacactttttaaggctctttgaacgcttactgcagtgttgcagtctagaaagcatgtaacaattatattgattcttactggtcataatgtaaatcccttgacaaattcaaggtcattttgtctcctgatgggttcctggttgtatggtgtgccatttacaattagaacatggttagggcttgcctcactcaactgctgaagtaccaaagaagcttttatcttgtcatttattagttcgcttttgcattgtgtgtgtgtgtatttagccttagctatttttagtccttgagaaaggcctaaaacttgtgcttttttgttaaggactcaatttaacacttgtattttagggtttgacttttggctggcaataggctcttactaatatcaataatgacgagggtttgccaagttggcataaatcatttgattcttaaacacttgcagaatcatgtatccgcgaattgttaagtattacagaatttaatacactcacccagacaaaaaacatacacacaggatgaaattattttgtggagaaaaattaactttttataatggtaactaaagagttggtcacatgagaaatttttatcacattgtattatgttatagaagaaatatgtgaaatgtattttttc

SEQ ID NO: 110897 - DNA, 1505 bp, Homo sapiens
cccgcctcagcctcccgagtagctgggattacaggcatgtgccaccacgcccagctaattttgtatttttagtagagacggggtttctccatgttggtcagggtggtctcgaactcccaacctcaggtgatccgcccacctcggcctcccaaagtgctgggattacaggtgtgagccactgtgcctggcggtttttatcttttataccatatttttgccatgccttttgtttagatgaacaaacacttcccattgtgttacagttgcctactgttattcacttcaataacatgctcctcaggtttgtagcctagggagcaataggctatacagtttaggttcgtgaatacactagaatgtttacacaacaacagaatcgcctaacaaatttctcagaacatattcctgtcagtaagcaacgtgtgactgtagttttctgagaaaaaaatttgtagctgcctaagacatttgggttagcctagttcttaaatatctgtgttgatactgtaaaggtgtttgttctcattaggcacaatgaagcaaatcttccatataattgcattagtgatacgtgacattaaagcctaattggcttatttaaaatgtctagcacatcaatttcttttagattgtgaaaattgaaaaggtcgtgagtgcatttaaatattcctgagtgagaaatttcaattttagtacaatttgttgagaattaattaggaaatctgactctaagaaaaggggtgtggaatgcaaataaggcagttatatattcatttgaatacaaaaatgaaagtttcttggattgttttggaaatcccattgaaatttgctaaattagttttggttactaaattgaaaacagggtatccatgaagtgaaagaagatggcatacataaaacagactgcatagaactaggattataataaatactttaaaatgtttcagtattcgtttttagactcacttttattttgtaggaaattgatgaagcctgtaagagaataaagcgtgaagttgatgatttgggccctgaagttggtgacattaaaatcattccattgtattctacacttccacctcagcagcagcaacgcatttttgagcctccacctcccaaaaaacagaatggagcaattggaagaaaggtaacattagaaatgctctttataaatatttcactaataatgatttatgagatataaactgtattcagttataaaggactaagttatgggtgattgtgatctaggttttatacaacaaaataatatccatttgtagggttccgcatatctcttgaccctaaagtaagaatgagtactgcttcttctaggtagtgcctccttagcaaatggaagattagttaggatgggttaagaaaggatgttggccaagtactgtcttttctcctattaaatcacttgttataaagtaagcactttttctttggtgccttggccttctgcccataattttgtttaaggcttcccaaatgtaatgtct

SEQ ID NO: 110898 - DNA, 1067 bp, Homo sapiens
tggaggaacctttttatatctggtccacttattttttttttttgcattttctgttttttcctatttgcaaagttttgttttaataatggtagcaataattatactgcatattaatgttttcttttagcaatctgaattacatataattttataaaatctgattttaaggtattttatgaagaaatgctgtagtttgtgcatttattttttttctaaatttttaaaaatgtaaataacttttactatagttcagccattatgtatttgatttttcatttacagtttatttgaaggttttcatgggcatttttatagctgatatatgtagaatagtaaatattgctatactgtaagaccatgtaagaatccttgaagacagcttcaaataatttactgttttctttcaggttatagttatgagcgctactctagatgcaggaaaattccagatttactttgataactgtcctctcctaactattcctgggcgtacacatcctgttgagatcttctatactccagaaccagagagagattatcttgaagcagcaattcgaacagttatccagattcatatgtgtgaagaggaagagggagatcttcttcttttcttaactggtcaagaggtattgttttaattttcttcattatttagcttttgacatactgtttctaatatgcagcaaccttaatcataagaacatgttaatcatattttttatttcaatgttcttcaacctgattgtattaatatgtaaaatatataaccccttttatctgcatactgtaggaatacttctgtataccactagagtttgtgttataattattttaagagtgttaaatgcttttggaatttcaagattttgcaattgtagtttaagagatccctgggatataagtgctattatgctgaagcatgaatgtgcatcacagctgctttgaaatcaggttatcttcatcagtatttagcttgtgagtgaacttgggtgcctattcatcatcaaaacacttcagtttggttttgtcttcccatatgctcatgaaatttgggaaggattactaaa

SEQ ID NO: 110899 - DNA, 2025 bp, Homo sapiens
tatgttatgttctgctactgagatcatgtacaagagtattgcctctctcgtgtctgtgatatatcggaagacaggaaaaattaccaaacgtcctcagatcaaagaaatttcaaagcagctaagggctatagtgttgctgattcttgcactatgctttactgtctttaaggcactgagtcataatttaattggcagtgttttttctttcctggtcttacataaaataaccttatagctaatgctgtttgtccctcccaggaatgtggtagtttatttttaaaaatatgaccaaggacaagaagcataaagcatataaatgagttaagatggatttgtttgccaatagtttatgaaatttagaattaagtttaggtgaaataaagagaattcacttctttttgttgtacactatcaatttgctgaacttaatgctccagcagatggcatgagctaaaaatatccagttggtccatgaaagattaggttagactaatcataaaaagagccaaaatggtgaattcataaatgatggcttcagattttttaataccacttttaaatccgtaaataaaataatgggtttttatctaactggatgagctgtgacttaagcatctaaaggcatcctgtgttttgtccaggtgccaaaaggaagatagttgtttttcatagtgacatcagtaaccagtgtggaatggacaggagatagctgacccctgcaaagttatacaatcttgacccttgatctcattgccttcattcttacgtggcgcctgtcttgtgataactggagtccatattagcagccttcacttgagccatccctaactaagcctggtttccctttttggttcattgatcaatctgacgtcatttgtttttatcttccatttatgtatcagcatttgtttagtgttgatgctgcccctcagtcccacttcttttattattgaattccttttgtgctttaagattatttctttggggtgggaggactcacgctttcagcccttttgaaccaagagcctgttgttagcttattaagtaaggaattgttaaggcttaacaaaaaatgtttatttgcatgtggtaacattttagtggtgtgacatgaagcaacttaaaatggtttattagattttgcgtgttgaatatttgtatgtttttaaaaggtttaagaaattgaaaatgacgaattttgccttggcattcatgtgaaaccatgtgatcattatgttccataattggtcatatcatgtcttcccagtacatttcagtattacatttttcaagaattgatgaagcatatcttgtttcattgtatactcttaaaagattttcttgaaacttaattttgcaattgatcatgaaacagtagcacatttgtttggggcagaagtttatttttaatttaccttatgtctttgcatttcatttttgtcacgaagtttggttttaaaatgacctaacggaacctttaaccaacatgttctttggaatataggtatatgactgatgggatgttacttcgtgaagctatgaatgatcccctcctggagcgttatggtgtaataattcttgatgaggctcatgagaggacactggctacagatattctaatgggtgttctgaaggaagttgtaagacagagatcagatttaaaggtgaagtaatttcttctctccatttaactatatatgtgtgtatgtgggcataaaaatggggaatacatactgatcaataaccaactgtaagaaatcacctgtaaaagaaggaactagtaagtaccttcttgttttgtttctgctttgctgtgctttcattttagactttatttctccccctttatagtaatgcatttttaagcccaatcttctcaatttgtaacccacctagttcttttataatctaataacatatatgtgtaactgtgctactcactgtacccttcattaagtacagaggcttattttacttaaggatcaaatctttctccctcagatccatgtccttgtctcatcacaa

SEQ ID NO: 110900 - DNA, 1048 bp, Homo sapiens
taaagttccttttggcacaataattgaattacaattggggatgtaaacttaaaccttgacgtgacttgtcaccggaatgaatcaattcaagtattcttttagggctggaggtaaaggtgaaacagatgtggcactttaaggaccattaattatacaaacaattataaactaatttattgaacatctgttatgtggcagtcttggttctagttcatgtgtagcacataagttaggtaagggtaattttattggactcttaaaaagaggtgggaataaaggataaatgtggttatttaacactgaggcagtttctgccagaggactaaaaagttactgtggtcaccctagaagtagaattctattggcttttgctaattcctagaaagctaacttggtttgctgaggctctacatgttttgttaaatttgacctttgtacttaagtatttgtgaggattagatagagaaggctctctttgtttatacagtgccaatatcttaaaaaatattaagtagaacctacaccctacacattcattctagctttctgtgagttctgttgaggatgaaagaatattccctttaaaacttgtgaaaatttgaggaataggcaatatatttttagttgtctttattttctattgttaacttaggcattttttcgtgattaggtatctaactctgaaatacataccaaatgtattttagctgtttacactaacaaagctgtatggtttgattgtggtcttaaacatttcagctctctttaagagtccagggtttgatgtttcctttttgccctgtttgatgtattgaacattgaaacactgtagattctaaattattcaaaatatgttccctttccttgtgagcatttacatctagtagtttgttgtcattgtaaccagtattttgctatatgtagtgctattgtgattacagtaagttagtgttgctcatgttgtgtaatatggttgctaagaacataccaggttgaactagagcctgtctttgtttattccttcaccaataaaagaaacattatgtaa

SEQ ID NO: 110901 - DNA, 2128 bp, Homo sapiens
caggtaatgtcaaggacttgaggataataagggggagattttactcatctttaggaggaatatcattattctgacttgattcacattgcattgaatttttttggtaagccacagttgagaacagaatttggaaattgggatacaagaaagttatgcaatattggtgctgtgtgtatgtgtagtaggaagtgggtggaggataggctttcaaaagatgagtacctctgaaagattttggttcacttcatagggaatgacaagtaacagattttatagttcaaatgaagtatttttggcattgtgatttttttaatggagcattttctagaggttataactacttgtaaaagcttacttaagacagggtaagcttattggggtttcttctaggagctaacctggtgttgcctttaagtaatataagtaaaggagtgtattattacaataagttagcttaaaatttaaaaatttcaaatgtaactttgctatttgataggaagaacttaactaatgggaatgcttcattaaatgtagctcttatcatatatagatataaaatgcttatatatccattgtgtagccagggcgaactttaattttcactctagggtggtaaagaggctaacttaggcagattatgtttgaggagcacagaatttaaccatagtttgagagcattttagctaaataaagtatctttaaattgtccgcatatagattaagggtctataagatagtttcttcagtgtttgggatacctattcataaattttaggttatagatctgacactgtgctcttttcggaagattggatctggtataacttagtgcacactctgttagtctagccttaaatggctaccccatcccagtgaacaagtaagtttacaaagctgccactcctaaatggtttttatatttccttttttatgtgtttgcttgtccccatccttttcttctgaagcattctttttgcaacatacttactttcctgttttcttggagtggaaattatgaagaaaaaacccaaagagatacctaaagagcttaccagtcagggaacaatatattgctgtatttgtgactagtcagtgtaaaataccttgattcattttgatgtaaggaaggagaggttgttggcttctggtgtagcccttttgcagtggattttaagaagcatttgtctgtggttgtaactttttttttttttttttggagacggagtcttgctctgtcgcccaggctggagtgcagtggcacgatctcggctcactgcagcctccacctcgcgggttcaagccattctcctgcctcagcctcccaagtagctgagattacaggcccccgccaccacgcccagctaatttttgtatttttagtagagacggggtttcaccacattggccaggctggtctcaaactcctgaccttgtgatccgcccgcctctgcctcccaaagtgctgggattacaggcagccgccaccacgcccagcctggttgtaacatattttaattcaggaaatcaccttcagttttttgaaggagctgataattttttagggaagaaaacaatttgataatcttgtaagcgtagaaaaacgtaataattgaagttgttaatttggtaggtaattttactgttattttaggtgatatgcttcctttttattttttcgtaagctgtaaaattagagatttttgtgttgaaggaatctaataatttgtacacataatgattagtcattcagtcagctaatagttaagtaccttctatgtgttgggcagtactaggtataatgaaaagtgaatctagtccctgttcttgttaaagcaaataaaaatgtaaataaaaagtttgacattgtgattaaccttctgaagtagaatatgggtgtttatatgaaagaatgatttgagaataagtttaggtgggaagatgttggatttatttatttatttttgagatagagtctcatctcatctgtcactcaggctggagtgcagtggtgccatctcggctcactgcaacctccacccgccgggttcaagcgattctcatgcctcaccctcccgagtagctgagattacaggcgtgtgccaccatgcccagctactttttgtatttt

SEQ ID NO: 110902 - DNA, 2648 bp, Homo sapiens
agaatcgcttgaaccttggtggttacagtgagccaagattatgccactgcactccagcctggtcaacagagtgagattccatctcaaaaaacaaacaaaaaaacaaaagatctgaacattcttgccttgagaattttgaattaattttaaatatctttggttcaccagtgagtgaatttcactttctagatctttgaaagtacattttgcctttgtaaaagggttgccgaattgaggatatatcagtaagtaaggctttatagcctgactagaaaaccacttaaacctaggtctgtggatttacagaacccgatagatactacttctttagttatttttgttcatttaaagtgttttaaagatatatatgattttagagaatcagcataattaccctccctttcagatatttgttagtgacaagttacccccaattgcagaagcaacctaactaaaatgtaataatagtgcagccaccaatattccttatcagttttactgtactgatactgtgcagaaaactccatgtttcctgtagcattagagtttgataggcgtttggaagctttgatgtaaaccagttatgctcttctagcagtggatttccatataatatggtgagcacttacatttttcccatggttcttttccagttaagtgactggaaaactgtaaaattggggaatccattagcttatattgataatggaactgggggaaaatgtactgccgtcatggcaaccaatttaacttgtgcttgggggtcccccaaccctttggctgcccttaacgaagtggtgctgctctaggtcctgttaaatttgagactggcagttcttaaaattgattttaagatggtacctaaggtgctaccattgtgcatactgctcctgagggggaaaggataggattacaaaagagttgggtgctaagagttaggttctgctggcttataaaccaaatttgaattgaattaaataaaagtacagcttcagagttacaagggggtatgatttccacttgattttgcaactcaaattatgtaagaatttaaaagttacactttcttagaaacgtttgttataaagtagaatttgttgtaagttggattttttaaaattgcatagagaaatacttcatgatgggatagtcacactgtcgagtgtattcctgattgtgtctacccaacttgggtgtgtgtcatatcagtattacacataactgttccttggtttagagagcttgtgttgttacaagttttgaatcacaagtcttatagtcatttgcctaattggatttggttttaaatcattagaatgagataaagtgctttatgttacatatacttgatatgcaggcagaatagaattaatttaaatgtgaaattatttgatagattccacagtggtgtgtggagtacatgcgatcattaccaggacccaagagaggagttgcctgtacccaacccaggagagtggctgcaatgagtgtggctcagagagttgctgatgagatggatgtgatgttgggccaggaagttggttactccattcgatttgaagactgcagtagtgcaaaaaccattcttaagtaagtactatatctttaatgacgcttttagtcctctgcttgccattttctgctattagatagaagactttgctagtgcaggcttatgtcatccaaatttagaattatccaaagtaggccttcttagacttaccacatgaccttagtttaattatatattattggtaatctatagttacttggtagaaattgaagttcaaaggtcagattttagttacttggttctgcattttaggtgaaatgttactgatactgtaaaatgtgtggttttagtagacacaatggtgtatgacttaattgtgaaagaaaaggaaagtgatatgtcttacttagtaaaagataactacttttagaaagaagaatgtataggatgggatgtgatttatttaggggagaggggacttttaatgttaattatgcagctattaccgtgcatctgttataagctaaaaagaggaatcttttgttctgtaatacactgttagagctgcctctaggtccttgttcctctatagctatggtgcagataattgactactgtattgagctttctaatgttttaactctaccaactttttattgtcttatacttgcattctgcataagttatgatgtatgctacctgatgatgattctttctcaagtcttccctctggttgcttctgcttattctgtatttatgtgatatttaagtccttttaaatgtgacttgtttgagtggggctcagtggcatatgcctgtttattcccagccacttcgtaggctgaagcaggattattgcttgaggccaggagttcaaggctacagtgtgctctgatcatgcctgtgatagctactgcatttgaacctgagcaacatagcaagaccacatttcttttaaaaaaaaagaaaaatcatatctatgtgatcttctccctgaggtttttaaaaaccattttggagcgttgtgtaggcagtgatatgagtctttgttgtcagagtctttgttgtcagagagatatatagtgttaatgggataaatgaaacaagagtctctctttttttttttttttttttt

SEQ ID NO: 110903 - DNA, 1980 bp, Homo sapiens
ttactcaatttggacctatcctttcttcatcctaccctcagtatctgatttctgttgtctaagtaggaggggttttacttgcagcagactgagttcttgtgttacctcacctaatgttaaaagttaaggaaggtggggcatcagcaaggaagggaaagatgtttgtggtggagaatgggaaacccttgattgtagggtattttttattatttctgatagttacataatccattggactttttattcatttgaacgttggacatttactctctttgtgattataacgctaccgtgaacattctgcataaaattcagaatctgaattctaaatttttgtttttaggaaggatcgagatcgagaccgggatcgtgaagatcggtctaaagatcgagaccgagaacgtgatagaggagatagagagcgagagagggagaaagaaaaggagaaggagttgcgagcttcaacaaatgctatgcttatcagtgctggattaccacctttgaaagcttcccattcagctcactcaacccactcagcacattcaacgcattcaacacattctgctcattcaacgcatgccggacatgcaggtcacacgtcacttccacagtgcattaatccgttcaccaacttaccccatactcctcgatactatgatattctaaagaaacgtcttcagctccctgtttgggaatacaaggataggtttacagatattctggttagacatcagtcctttgtactggttggtgagactgggtctggtaaaacaacacaggtgagttattgtataccatggtacatatttcatttatgtttaagtttaccaaatgttgcatatttgattctggtggtcatttcccttgtctgtcctatagaacatcttgaagaatagctgatttgatgtttaattggcactctgaatttcagagtggaaatcctatagagaatacctctcccctgaatctaggggaaaatagtggtgctcgcttttcaaattttgttaccttatgtatggcagaggtattttgactcccggacagtacagatttagggacccacagtttgttttctggtacttgggtggagaaatcactggggtagatttttgtcgtttgtatttaatatggtattttgaaccatgcaaaaaatgaaatgccaaagtaatataaagtctataccggtgacttttgtccatctagtcgtcctccctcccatagaactaaacactgttactagtgtgttatttgtaatatagctaggatattttttaaacatggatgggctattattaactagacccctgttgatagacatttagactgtttcccatggttgttttgcatgggtcaagtgtttctgtaggaagcagaaattgctgggtcagaagatcatttgtaattgtgatacagaaagctggatagccttccagagggagcgtatcaatttacctttccatgagcatgtaggagaacacgtgggaaactattaaaacgtgaatttttacaaatccaataggtgaaaaattgcattctaatgtactttttaatttgcattttcttgctgtgggtgagaagtaactgtctttatacacttaagcctgaaccatcaattaaaaatttctggtttcaaaagtagcagtccctgatcattgtagaaactttgaaaaattcaggaaagtattgaagtgaattacctgtcttaccatgcagagattgaacataccgcatacacaatttatctttttctaaagttacatgtgcatggagacattttgaaggtactgtagcaaccaaaataggaagcttttattatagactgagccttagtaccattcttcttttcttttcttttttttttttttaatttttgtgttgttgttgagacagtctttcacccatgctggagtgcagtggtatgaacacagcgtcaacctcctgagctgaagcgatcctcctgcctcagcctcccaagtagct

SEQ ID NO: 110904 - DNA, 1623 bp, Homo sapiens
tagatactagcaaacttccgctctctgcctacgctcccgccatctcctgtatttcctgctttggttaaaactggttactgaacatcgtcccatggggagggattagaaggcattgtttttttttttcatcatttattttctatgcatgtcccacttttcttcataagtagcttttgaaatacagggatcatgttcaaaacgtgtttttagtatttatggcgaaacaccgcccatgtggaggttgagagttgaaatacttacacaaactcttggtgttccagattcctttccttaaaggtacagaggaatttagcagttaatttaagcaatttcgtgaaaatcatttcttgtcccttgtgtgttttcattgatgaagtacaaagacctgtttggataattcaggcaaaacccacaaaagcccgagtagccaaatactttgcataattgtatcattttattgtgtacttgtgatacagaatcactgtgtcaagtcacctgtatagctgttttgaatttttcagctaaagttcttcattgaaattgatttccagggatatgtttagtgtcattgtagagtataagccaggatagggtgtactttttgaggctttgccatatgttgaattattcaatagaaagcaaaagcatgtcacattttaattttgtgagttatttagtttacgatattaggcattgtaaaaaagacaatgacattgtaagacagactctctttaggctatcaccctcccccaccattacgccccacaaaacgttaatacctctgagctgtatgtcacagactcagagctggaagcaacttaaaaaagactatacgcggctccaatcaaggaatgagaagtggagaacagagttaaggtggcttgtgcaagtttacagcaggatctggaaccctgcctttgtcattttcactcagcagcacacagttcagtactgtagttaagagtcattacagcctattttaatgacatttataatgcgttggtaaagtagggaacacttagttcttgatttctctaaggcaaaaataaattgctgtcatctggaactgatgtctctcacaggaggtcagattggaacaaaatattctgggagggaatgaatgaattcatttgtatttgtgcatatgtgcaccatttaaaatgttccccttgggattagtggtcccaccatatgtatgtgcgattgtttactttctcttgcaaaaacagatatccttagtaaaaaggttgacttttggagtctaatggtagctttatgattcccttgtatattatttagaatttgcctatggataaaggagagttcatctttggaataatgcccaagttataagaaatagtagagggaagtttttatactcatttctatgtcatttgagtgccatttatccttgaactggttttatttaacagtggacttaaggtgtttatcggcctcagaattttttcatactcgataattttaagtcacttgttgactgccatgcaatcctgcagattttttttttccctgataagcaagtggttttattggagagcataagcttgtcagtcttacaaactccactgccagatagggtttctgcagtactgagaagggaag

SEQ ID NO: 110905 - DNA, 1051 bp, Homo sapiens
ggtaatagaaatgaataggatttcctaactaggactagactttctcaatttcttgactcagaggggcaaggatagcctgaaatggaaagtgaaggccttcaggttcttcctaacagccgctccgaggaggggaaagctacaggaagagggaggagacccaagaaaggtcggaccaatgaggcagcgggcgggacaggagttcccgcctttgggcgtcgtgcgcgcgcacctcgctcacacgcacactcgcacgcacgcacgctgcggaagcgcgcgcgcgcgcaggcccagccctcgtcgccgccgccattttagctgttggttccggccgcaccgtgtgggctgtagtagcgggaggggtgggggtcctccagagttaagtggctgtcctcgactgtgcccatacagcagccagctttcttccttaataactgcccgttcgaagagtgcgaggatgtccaagcggcaccggttggacctaggggaggattacccctctggcaagaagcgtgcggggaccgatgggtaagccaggccgggggcgcgaggcggcagctcgggctttgttggggtcctggcagggagcgggccggggctggcctggccgagcgggtcctggagcccgagcctttgtttctctctgggctgggttcactagcggcgggtaggagaagcgcggcgcccgttcggcccggcaagggcgcggggggttgcgtgcgacggggccgctgcccagcccagtccggagggtggagaggcctgcagtagccatgagggcgcctcctcccccaggccgaaccgagcgggagtcatttgcgagggcgtcgggcgggagtgaaccgcggacctcgtggcctcggttcccgaggaaggcctggagccggaggagagggtgggggagggcgcggtgggagtattcgcttccaagggcagcaggcacttcccagccagaggggccgtggggagggcctgggtgggggcgcggccaggcactccagacgggaaaggcggagggcggaaagtgagagcagcgcgtggatcataatgtagg

SEQ ID NO: 110906 - DNA, 1017 bp, Homo sapiens
aattcaggttaggaaaatgctgccggacaacctgttttcttcagtaaattgcaagaaaacacataacgaaggaggtgtcaacagattaaaaaagatttaaacacctatcactaccaactgaaatttatagcctatttagatcctaagtctaaaaaataaattaaactatcctgagacaattggggaaatttaagcagtgactagatatttaatcatatcaagaaattattgctaatttttaagatataataaatgttaagaaagaaagactaaaatttttacagattgaaaaactaataatattcccctaaataaatatagcaaaattccatgtattatcctaatagttctctttttggggggtagaatgcgttggataaaattattttaaaagccacatggaaatgtaagtgcctgaataacaaagaaaatatgcagaagataaataatgagagacttgccttcaactgaaagccactgtaataaaaatcactggaatacaatcaacgtggtattggcataagagtagacaaatcagtggaacagaagagtggatccaaaaatagatctcagtatatatcataatttaatatgtgacaaaggtagtatttcaattctgtgggaaagaatggcttacttaataagtattgctggcataactgcctattcttctggagcaaaatgaacttgtatctcaatttcacaacaaatccaaaaataaattccaaatggattaaaaacataaatgtaaacaataagtttaaaaaaaatatttaggtgactacatgcaaatctaggggacagagaacatcttttaaactaaaaccagaaacctggaaagtataaaaggtagacatatttgattacataaaaatttcaaacctttatatggtgaaaggtacccaaacaaagtcaagagtcaaaatgcatttagaaaaatatgtacaatgtagataacagatattgggttaatatttcttatatataacaaattcttgcaaattgataagaaaaaga

SEQ ID NO: 110907 - DNA, 1031 bp, Homo sapiens
tttttgaagtgagattttatgaagtcaaaggggactttacacagatctcgacctgctttgaaacctagaggtggccctttgatttgtgcgtgtccttgccctctggacaacttaatatttcaagtaatcgaataccaacttccctgccagcccacctgccttccgccccgcttgtgtaacagtcctgttttgttgagttgctgctattgcactgccagtgcagcccacaccaaatcacaacccaagatactcagataggaagactccttcctctcccagtactttaccaaaggaacccccgccaggacccacatggggccacgtgttggcagtggaatcagcctgtgcaggctggggatctcaggctgatcagtaggggccagctttggagccagccaagctgaatcccacactccaggtctgtgctcaagagaccagatggtgtatttccaaatgggcctctctggtatgggcaataggcaagctcctggggtctggttatgtggaagattcttagtggatgttccgcctggttagctggttctcttcagagaatataaagtgaatgcctttaggggtagctctgaaagagaaacccaacaacttcattcctagccatgaaagtagcacgatcatattgtactgtattgttattgtaaaatgactatttgccatgtcatgagtaggtagatgttttgccacaaatatgaatgtgtttgttgtttcctgactttaagcaatgaagattgagacaataaatagcactcagagaatgaagcattgatgttacatcagcactcttgggtacattctgggactgtaggctgaggcttctagcctcagaaaccacggattttaatgaacgaactcacccacgcatagtagtgttgttacttgaaacttctgcaaaataccaagcaaacaggagaaaagtggtttgttttcatttttaagtgcaaattacttttcttctgcacttttttttccctcttggtttctttgaacaggctacaaatgcccaggtcccccca

SEQ ID NO: 110908 - DNA, 1076 bp, Homo sapiens
ccacagtttataaatggaacagcaaaggattctattcttaccagtcactgcacgagtggttcagggacacggatgcggagtttgttgatatcgatggaaaatcgcatctcatcctgtccagccgctcccaggtccccatcatcctccagtggaataaaagctctaagaagtttgtcccccatggtgacatccccaacatggaggacgtactggctgtgaagagcttccgaatgcaaaataccctctacctttcccttacccgcttcatcggggactcccgggtcatgaggtggaacagtaagcagtttgtggagatccaagctcttccatcccggggggccatgaccctgcagcccttttcttttaaagataatcactacctggccctggggagtgactatacattctctcagatataccagtgggataaagagaagcagctattcaaaaagtttaaggagatttacgtgcaggcgcctcgttcattcacagctgtctccaccgacaggagagatttcttttttgcatccagtttcaaagggaaaacaaagatttttgaacatataattgttgacttaagtttgtgaaggtgtggtgggtgaaactaagagaaatgtagcattagctctcacaaaagaggaccaagaaaaatcaacaaacaaatcaaagccaggctcagagctctgaaattaaaaagcactgaaatagttagatgttttcaaacttttagaactcacattttaatcagggattgcatttattggctaactgcatgacatgcccattctaccatttaaaaaaaaatcttaaagcctgtaatttctgagaaaagagtacagcatttactcttatcatctagaaatgtaatatgcttcccccccgctttttgatgaggaagaagacaattggataagatgggacagcacttataatgaaataaaaaaaaactttgagcccctctcattccactttagcaatctttttggtaagaactcttaaagccaaaagtctgctgaaaagatttgctgattattagtttaaaaatcttgtaacactcagcagtgctattttgagtc

SEQ ID NO: 110909 - DNA, 1027 bp, Homo sapiens
tgatagatacaagaaacaggagatattaattataaaagtttttaaactccatttttagggggttttaaatatatcaggatgttaataattctggagtttcgtgttactaccaaaacatgtcagacacatctatttctctttgtatgtgtttgtgttttattttgatttttagagatttgaggggtaataaatttgaatgtgactgcaaagccaagtggctatacctgtggttgaagatgacaaattccaccgtttctgatgtgctgtgtattggtccaccagagtatcaggaaaagaagctaaatgacgtgaccagctttgactatgaatgcacaactacaggtattcagagcctatctcatcagacacggatatttagaataatctctttgtctttcttttacactgtcaacagagactggggaaaagtgaatatagaactgtttatcaaaattgttttagagaaattttaaacattctaaagaaatgaatcgatgtggtaaggaaaatatctcaaaagtttgggagaatttttgttaactgccctggctttatttttgcttctttacgaaattcaaatttctgtaagtgtttcattttcttaagtcaaagtataaacttgtgggtttggcaggagaacattttcaaatcaatctaggtttcatagaaggccactgcagggaggcttagattactcggttgagactgttcttttgctttaggaagatgttcattggacatttaactaacaaacatcagaattttttttttttttttttttttttttttgaggcagagtcttactctgtcgcccaggctggagtgtagtggcgtgatctcaactcactgcaatctccacctcctgggttcaagcgattctcctgcctcagcctcctgagcagctgacattacaggtgtgcaccaccacacccggctaatttttgtatttttagtagagacggggtttcaccatgttggccaggatggtctcgatctcctgatctcatcatccgcccaccttggcctc

SEQ ID NO: 110910 - DNA, 1098 bp, Homo sapiens
caggactgcaatgctaaatctgactaaggtctatcaaagcacatacatagccaatggaggtagcagttgtaaagctatgagttttctcttacgatagttcatcttatggtcaaggttattggagaggaagttagctcatcagtttatgctgaagtctattactgaaaagacatctcagttttaaaaaccatcagtgagttctcagtgcaagaatcaagaactaattcgttgatgatgttgtgtttcaaagccccaaccatggagcatctcatcaaagaccctcttatatttgacttaatataatgctgtaactaaaatttagttctccctgagcctagagaatagtcgtagtgaattcacatcaattatttcccacaaagaccttaaagcatggccagtggtattattgcaagatcccatgtgccaaccctgtggggttttagtacagagaaagaagtttggttcctactcaacttcattatacttcctacttcctagtagcttagagagcttgagcttttcctgccttgtcacccatttgcttggtgactagatggtgtaggacacgataaactcaaggttgctgaaaaccaagcttgatagaactctcccccagcaaaaaactttaatgtggagatgtaaaacaagagaaccctctcaagggacagtgacattaacagaagtatgaatagccaggcaccgtgaaatgtgggattgagtagggaaaatgtctggaagtgctccagtcttgcagagatatgagaatttcttgcctttgtatagtgctttcttctttatttctccccaggatgtttttacccatgttgccagctcagaattctttggagacttccatgccacttctggaaggagtgcagaccacacactcccgtgcacgcatttttgcatacatcctgctaccacatggaatttggtgtagctgacctagtcttcagagatcaattcttataattcaggaatacttttagattttattctgaaagcttaccaacatagtttttttgggatactaaggagagaaaattcattttaattatacaacttttcctcttaggttcattgaagggaacaaaatag

SEQ ID NO: 110911 - DNA, 1038 bp, Homo sapiens
catgacctgaaagtcacctaaatgcactgtttcccaaacacctcagtttaaaagaaaacttcattttaaaatcttaatgttactctggaaataggagtgtttctagtttgctgagaacttaaaccagtcaggcagcatcctatgaacttacgtgcgtaattttatttcatcatcacttcatcggtatgatgaaggcatgcttatgatcccatttgatagataaggaaactgaggttcagggaacttaactaacttgtcccaaatcagagccagattctagtccagggccaaaagcccacactcctaactattcctcatcccatctcctctctgtgagcaatgctcaagtccctgtggtgatgctcatgttgtgccctgtaacccaggctgggtaatgtgtgctgatgaaaacaaatgtccaaaaagtagttttcaaaagcaatccagtgacaggcaaagtaagagtacacacctcattctcttgatctgtgttggtttcttaaatttgagatgagactgaaattaaaacaagcaatgtgctatagaaaaatttggataaatggaatataggagagcactattcatcctcaataaacatactcttgatacttttgttcttgaaatcttatatgcctacttttaacattacacttaacattttaaaatctgaggcctcttagaaattgcagtgctattaaaatatacttttcatataatagaaatacaattttaggtattcttttgccagtagacttgggtgatgactcaaatagaaaactacgtagtaacagtctcctgaaagtttcttaaacaaacttttttttttttttttttaactattgttatgggtccagctgcatgactttggtcaagtcacttagcttctctgggcttttattttcgtaaaaatagatttggattagatctttttagatctctaattttatgattgcttgtgtaccataaagcattcactggctgtttagtcgtgctgagcattataatgttttaaagtcacagctatcagatcatatttac

SEQ ID NO: 110912 - DNA, 1067 bp, Homo sapiens
cccttaaatgattttgttatgttttgcatttttgaggccaaccttattttgtaactgaaaaaagtccagttttgcatacacagaaatttggtcattttagaagtctcacaacctgaataatttgataataattgaatatgctattaacagctttttaagaaaaggttctattagtcagttttttccttgtctgtcatattatgttggttaatgtctcttatggccaatcttagtaaacagacctaacactcactgcatccttttgtgccttactttttactttccttttgcccttttggtatgtgcgcatgtaagatggtaagtttaaggctaatgaatatatgtttgtaatttcctactcactactctgcagttaaagctaaggccttaggcaaaatctagaaatgtttatattgttttgttttttatcaagtggtgtcaacttgagaaatacaaagaaaggctatgcttaactgtataaccgtgggggattttagccatgagaatatgaagctgatgtcagcctgctaacctgttttaccaaaaggaaaagatgtttccaaaaatgttttcggtgtagactgtttaaagatgaaaataaattatataatttattatatgaaataaatttttgataagtcactgacagtacgttattttacctaatcattacgatagataaaatctgaaagtacaaataactgaactaaattacttgcccatttttgattcagtcatcagtatcagcttgtctagaaatcagcaagaaaagtcataccttaatgagaagcatgagtcatggctgggggctaaattaaaacaaaaaaaaaaggaaagagacgatattccagcaatcattttgcaaaggatctattgactgtagaaagtacttagaagcatttaatcttttctaaaagaaatactatcttttatttgaaaataggttaatatcactttctcctttagatttcacatctaaattgtgctatttgaagtttgcaggtagtggtctttgatttggaatttgatctctgcactggtgcttattaaccatgtgaggccacata

SEQ ID NO: 110913 - DNA, 1047 bp, Homo sapiens
taaaatcaaaagagattcctagagcttataggtctttaatagaagttaagtaaacgataatcacgaggcaggacttttttatgtaaaaaagcagtgtattatagaatttcattttaaagtcgatacagtctatttttgtaggccatgatttgtggctgttttaaacttcgtaataagtggatgtaaggctttgtaacacatatcttttgtttatgggtgacattgtgttaccattaccagacatattaaattggtaaatctttcttctttcagggttgtgcctcttgggtccatgcaaactgtgagtggctatactttcagaggctttatgtcacatacaaataattacccttgtgcttacctcaatgctgcatcagccatcggaatgaagatgcaggatgtggacctgttcataaagagacttgacaggtgtttaaaggcagtaagaaaagaacgaagtaaagagagtgatgacaattatgacaaaactgaagatgtggatattgaagaaatggctttaaaactagataatgtacttcttgacacataccaggatgcttcttcatgacatgcgaagggtttcttcttgatcatttgaaagaaatgataaggctgtagtacaagcaagcagtttaaagataagacttgagatttttgaattgagaatttcatgggaatattcagtcaaggagcagactttggtctgaactagccattgatgattgttaagtttcccattcttagactgcatcaatccttgtgatccttaacaggttataatatacaattagcatttttctaattgttagaatatctgtcaattaagcatcatgactcagataatttttactagtgtaatgacagtaaaattacttcaattctctttgaaatgtagagtgcttcctcctaaccattctttaccgtttctgatcacacagaattgagaaagatctcttaggccactagttactagttgtttgttgagatgtgtaagtcacagtgtgcctgtaaaatgggcattccccaaggaagcagagtcaaggtata

SEQ ID NO: 110914 - DNA, 1161 bp, Homo sapiens
actagaatgattggaaaggaggctaatgtgactggtgtgtagtgactaggggaaatgatagtcactaggttgagtatattggctgggtcacattatgtggggccttagagatgaagagtgtggttttctaatagttactggaggaagtcatcaggggagaagcatgaactggtatgcttttgaaagacctctctagtctctgagtgtagaacagattacagaagggtggagaacaggcagaaaaatcatttaggatctattgctgtgtccagggaagaggttgatggctacgaggaccagagtggtaggtctggaagttctgagaagaagatggatttgtgatagatatgtaatagtgaagggagaaaatgtgctggttctttgcctttactgaaatcctgtggcttctgatagttgtggcagctttgaatttcactgtattgtggcaaaggagagaattggtcttaaggcacatggatgagttaatttaaaatgtagacttcataccaatcagatttttgtcttattaaatctggcagtagatatttgatttgttttaaatgtgacattttgttgttgcaggaaatgttttcatatttgtccaaccaaataaagaagttgtcagaagcctacaatgaaagactgttgcatacacctcacaatcccatatctttaggtaatttcttttttcctaaagaaaaacaaatacttatgatccactctaggaggaagctgatacttctagaaggagagaaaactctttctagttataatgatatttataaattcatcacagtattttaatttgtaaattgaaaaagtttagttaggcttttgaaatgctctaatgtatttctaagataaagcctatacactgagagaataagaatcaatattaagtattataacaaaaatgcagaaaataatacttaaagtcctgtttctaaccataactctatttataaataattaaatctttctccaggtcgggtttggtggcccacgcctgtaatcctagcactttgggaggctgaggcaggaggtcacttaagctcaggagctcaaaaccagcctggacaacatagtgaaaccttgtctctattatttaaactaaacaaataaacaaaactttctccagttaacaaaaccccaacatatcag

SEQ ID NO: 110915 - DNA, 1006 bp, Homo sapiens
atgtcctccataaaccataattgcatatatgtagcataaatattgtttttttattggatttgttgcagaaataagggcctcttttgtttaaatggacttgcttttgaactgtgaaaatttaattgtgatagtttattggttcagctctggagaagctgaggcaaagctattttgctccagccagagctatttatataccatcactgagagctcctttttatattattggtgttattgtgtactaaaaaaaggaatgttagaagaaaacttagaatttttttcattctatgcccttattcaccacaatgatatttttagaggttatttcatctagctctatctcttcagaaaaggctttatctttttcacagtagtggcagacaagaactcagcttgaagccattccttcttaagctttcttttttgaagggtgaaaggatcagagagagtggagctctgtgtgtgaattgagcctctttgcccttatccccttcctgatcaacacatttgcttcattgaggggagaaataaccatgaatttaaccccttttaaaaaagaggtgaaaatgtaagactgtatcttttagtttgtctatgcagaaagaaagtctatggtcttagaagtttatcctcacttctgttttgcttctggagaagatcattattctgtttagctttccttttagaaaagtgctttgctgaacagggaaggcaggtaatcatttattgttgcaaatatctgctgaattggataagaagaataacagcactatggctgctcagtggctggaatttgtgagctaagaactgggggacaaactaagttttaaaagaacatcatacacttcagtgtccttatagcagagctaagtttgaaaacactactagatttgcagccctgtaagtggagtagttgaatctctgcagaagcatctgatttcaagcctacatatggggccttaacaacttgaatgcagatgggtgtagcctctgaggcaagattcgc

SEQ ID NO: 110916 - DNA, 1051 bp, Homo sapiens
taaaataagtgggattaagtgacttccctaaggtcctgtagctacaaaatagcccatctagttcagtgcgactccaaagtcccatttttctgttaaaaaacaaagtactaaaatactaatactgtaagtcttttcttgagaaaataatattgcaataatcaatcaatgaagaaaagtataaataaattttttttatttttattgttttaacattatgtttttaacttttttgtttttaagatgagaccccagaatgacttaaggctgagcatatagagtattctgtatgcacataaccccacctccaggggaagttagttttgagtaacctatatttctgtttatatttactaaaatgacgaatttaagagattcatgaattatggatgttaggatagattaatggagagggatatagtagagtcacaaaaatatgcatataagactgattattttgagtcacaatggattgtaaagttccaaaagtgtgggaagcagcaactttgcctgttcagaatttgagagaagtaggtattactactgtttattcacaaacccaattgtcacttcattcaacaaatactttctgggttcctgcttgtgtaccaggcaccagggtaggaactggagatgcaatagtgaatccaacaaaatctttaaccctcatagagcattctattttttgtgcgaaagcagagagtaaaccttgagtatgacaagtcttggataaatgctctggtatttggggaggatggatatcattagatggagtgatctaggaagcactcttcaagaagtacatgtgagtggagctctgaatgatgcaggaggaagctttgcagctctctagagagagagattccagtcagaagctaacagccaagactctgaggcaggagcgtgcttggaatatgtgagaaatagcaaggaggccagtatggctgaaccataatgaacaaggtgaacagtggttgtagagctttgaggtgtgttaagggtttgggattttgtttttggtatgatcattggccatggaaggatttcaagcagg

SEQ ID NO: 110917 - DNA, 1066 bp, Homo sapiens
atagataaatgaaaaataaactaactctcttccctattgcttttttaaaagaaaaaattgtaaaatatatgtaacaaaatttaatgtttgtattactttatgcaacttttaagtttatggatacctaaatatctatggttccataattattatttgttgggggacctttgcgtatatactagttaagtgtactgttttaattgaaaatgtgaaaacaatttttatgcaaaatttacagtatacattttgttttcataggaggcttttgtaggctatgagatggatcagtgatccttaggctactgaaatttattatgtttttctttagaggtaaaacattaagtagatgattgtgatttgtttcactgagtgaattgtattattatttatgtccatctctgaaataaaatgaactttaaaataaaacagaaatatcaccagagaatgagtggacttatttttctgtggattgaaactgaactggattaaagtgatcctttttgtcatcagtgtctatgttattacttctatagatatctatttaacatttgttttccttactttccagaattcattcttgtcatatccaagtgttaaatagacttatggtcctaaaattgtgtagtagtccctcacattattttgacctgcctttgactaataccagtactgagccgtgtatttattaccagaggaaggttaatctaccaaaataaatattaagagttcttgtgtagaatagcatgcttcctagagtttcaggatcttcccttattttagttcacactaacattttgttttctggttggtttggttaggttttgagcctgtggtgatagaaaatgttttggaaggtgacgagctgcgtacagacctgaaagcagtggaggctaaagtccaggaacttgggcctgattgcattctgtgtattcattctactacatcctgttttgctccaagggtgcctgataggtaaatgatttgtgaatattgtcctttagctgtttatcagtcttttaaataaaatatactaattctcaaatatgcttaaataacacttcacaat

SEQ ID NO: 110918 - DNA, 1089 bp, Homo sapiens
tagctttttggattaactgggctcagcagggtgagtattgctttgggtctgtcatgtagttgcagtcagatactggctgagagtttagtcatctgaaggtttgcctagcatgaaaatttcacacagttacttctgctagattcttcctggccaagcaagttactaaattcagcccagattcaagtggagaggaagtagactccatctcttggtgtgggagtagcatgtgggcatagggagaaaaagaattgatggtggccgtctttggaaactagctatcacagcataattgatgaaattatttcaatttaagtaggagagttccacatcattaatagtttgtgacatatatctgtaacagccaaatattgctcctggtgtttttttggttattacatttgcatatttgtacattgtattactcggaatgctgaatgtatttgtccagtttttggcccattttttgcttaggttcattcatggcattggacgatccggtgatatttctgctgtgcaaccaaaagctgcaggctctagccttttgaacaaaattaccaattctttggtcctggacattataaagctggctggtatgtaccgtcttaatcataatgcttttggctgtctggacacacacacacaccactgactcatttcatttattattgcccctttccaaaaagagtatgagtggcttttgaaaagacttcttttttttttttttttttttttttttttgagacggagtctagctctgttgcccaggctggaatgcagtggcgcgatctcggctcactgcaagctccgtctcccgggttcacgccattctcctgcctcagcctcccgagcagctgggactacaggtgcccaccgccacgcctggctaatttttttttgtatttttagtagagacgggggtctcaccgtgttagccaggatggtctcgatctcctgacctcgtgatccgcccgccttggcctcccaaaatgctgggattacaggcatgagccaccgcgcccggccgaaaagactttttttttttaaataaaaagtctttagaataagatagaaaatcagagccataagccc

SEQ ID NO: 110919 - DNA, 1043 bp, Homo sapiens
ttttccgttttgccatgggtccacaagtgttataaaataattgtgtctgtggttattttggaggtttttacctttaataggactttaaaatagtttctgtgaaaactgtttaaaaaatttttaaagactaaaatgttcatgattgagtaatttaatactttttaagtttagttattttttaaatgactccattaacttcatttgtcctttaccatccgatttccatgaaactacctcactagttccaagaaattcttgcctttagattaatatgaacatcatttatgatgcttaactcttacttatataagcaagaggtttatgtactttagccagtggaagaatgtcatatgtctgttatcttcaacaaggcatttaacaaagcctacaaacagcataaaccatagtgttgttggatcagtgtcaaagtggaaggattagtgcattccttgttctagttattttaatcagtgaattcggtagtaatgacagctaatgcctacatagcagttaatatgcgctaggcatagttctgtatgcttcatatatattaattcataaccaaccctgtgatgtgagtactatttttgttttttttttttgtttttggcagtgggtggctgtaggggtggcagtgggggaacagagtttcattcctgtcacccaggctggattgtaatggcgtaatctcggctaactgcaacctccactccccaggttcaagcgattctcctgcctcaccctcccaagtagctgggattacaggcacatgcctggctaattttgtatttttagtagaaacggggtttcaccatgttggtcaggctggtctcgaactcctgacctcagatgatcctcccgcctcggcttcccagagcactgagattacaaggccaccatgcctggccttgttctcattttaagaaagtatagggagaggctgggcatggtggcttacgcctgtaatcctaacactttgggaggcctctttggtgcacacctgtagtccaagctactcaggagaccgaggcaggaggattgct

SEQ ID NO: 110920 - DNA, 1023 bp, Homo sapiens
agggatgcaatcatggctcactgcagccttgtcctgctgggctcaggtgatcctcccacctcagcctcctgagtagcttgtaatacaggcatcaccaccacacctagccagcttttgtatttttagtagagatggaatttctccatgttgcccaggctggtctcaaactcctgagctcaagcagtctacctgccacagccccccagagtgttgggattacaggcatgagccactgcacccagctaacctggcatcctttctaaatttttacttgaagccttcttccttaaaatgtttattcctaagtctacagttcaatactgttactttgaccactggcaaatttaggcctctaaaaggcttttataccactctcagaaagaaatatgtgcccttcatttaacaaggctttgcaaaattccctggcttttctgttttagattctctggggcctttattacaggattaaactttgctaattttcatcattagagtgagtttcatggtgtatatgaaaagagatactataatgcaaattctaaccatttttctgaattgtatgtttctaggtggtttggcttgtcagtgagacatttaactataatgcgattgaccgtgcaaaatcaagaggcaaaaagtatgctttagaaaaagtgccaaaagtgggtagaaagtttcataggataggactccctcctaaggtaagtttctctgataagctgtatttagagggcatttgggcacatacatcctgagctctaggagccaggcattgtgctattagctgtggatattatagcacagatttttcatcttccaggagcttatagtaaacaggtaattttagtgtaatataaagctgttgagatgacggtaagttcagggagctctaagaggatagatggatgcctaacccagtttagagggatgggaggtgtttccaggaagaggttgcatgaaaggcttataaagtaatgggtaaaaccacaggtctggaatcagacctaatcccagcctctctgc

SEQ ID NO: 110921 - DNA, 1023 bp, Homo sapiens
agtcatgtgccaccacacccagccagttctgttttttcttttattaattgttgggcagctttattttttatttcatattagaatagaagaataatacctgcctagtacttttttagagtttgagaaatatatggaatccccatattttgcttttatgtaataaaggcttctgggatttttgttcaccatgtttgtattttactaattcactttcttctgagtcctttcattcagtattagataatacaatattacctaataaatggaacatgtgtgcttaacctgtgaatcttgtccactgaacttaaaaaaagtattaaatacttttgctatttataagaagctggttttaacatatataatagactgcatagagcctcaacactgatatgagagttatagattttagagtaattgctatcgactttgagtaccaagttgaagttttagatatttacataagattttttttataaaatacttttacaagtttaaaacagtttgtacatttgggaaagttttaagtgattaaaaatatttcttcaatatttataatttatgttctcaagtaatgacttaaagctgttgcatcatttttaaaagtttgtgcttttaaatgtttatcaaggatatttaaaaatacatattcgtagcacttagcaataaaaaggaacaaacgatacaatagcgtggatgaaacttaaaattatgctgagtgaaagaagctacacataaagggaacatattgtatatttatatttaaaaattagaaaatgcaaactagtttctagtgacagaaaacagaccagtagctggactgcagagggacacaaggaaactttggcgtggaagtttcacatatgtcaaggctcatcacattgtacttgttaatataggaagttaattgtgtataaattataccttaataaagttgtaaataggaaagaatagtagaaataataataaatggcagttgtagcagaaatgggcttaaaatacaaacataaatgctcatatgtataa

SEQ ID NO: 110922 - DNA, 1057 bp, Homo sapiens
ggtcctaggtcatacgttcttcaaaattattatgattgtactattgtacttgaaattacagatgttattataattacagtcaaatgtagactatcaggccaaattaaaggggagcatggcagataaccataaagtcatttatatttgattttgaaatgtatttttgtactttattttgaatatcatccatatgtctgacattattggaatttgtaacattgttaatgcactaagtgatttaaattcaattgatgaagatgtgattttacagaagcagaagtttcattttcttgaggcttaaaaccaatgtcaccacttgggcttaactgggtaatttgtggtctaggccttttgttttctaagcttactatcttgtgtttgtttatttgcttttaatgaagtattttgtgtagaaggttaaattaggatgcaaaacagatctgccattcctttttcccttatatcttccttttggtcttcatggacgagatgaatgaggattctgctgccctgagggagttcattggaaacctgcgttctcctacctcttccaaccctccattagctcaattttgagataatggaaaattgactggaaattcaaaactcaaactactatctttagatataaacactagtaattaaaatgtgccttttgaagatgttttctaagagaaaggaaatacgttgcagtgatgtgggtactgctttcataaaacagttttttcagtattttgagaattgccatattaatttttataatggaaaacttaataaattgctactgttttatatcataaaattaaaataccatggtaatatttgcaaaaggtctggccataccagaaaagtacagttgagatagttaagatataaccacaagtcagagtacattggttgtattttgtaaactttcatgaactgaattcttatttaaatagtatggttttttttcaataagtatatttatagtgacaaatgtggtagactaaaggtaataaaaatcattgtcttaagattatgttcttctgtatgtacgtgtttggaatatttagaa

SEQ ID NO: 110923 - DNA, 2097 bp, Homo sapiens
gtgactccatctcaaaaaaaaaaaaaaaaaaaagatatgactcttcccaaactataaggattgtttagtgcattatttattttaacttgcttagttttagacatttctgactctccatgttcctcaatcatattatttatttttcttttgttttcttactgatatcatagctggcatcacatgtacaaaaccagcagtttttaaacatactgaccatgattattttctctctccaataatctctaataaaattaaaaaagaaagaaaaaagaaatggtgactttgaaattggatataagggtgacttggaagaaatcaaatgggatattcagtgtagtcttttttaaggctttgaatattgtcttgttgttttggaggtgagcttataactccatcagtactgctaagaacagaggagctttgagaaacatcttttcttttaggaggtaatttttcttgctaagtatgtcataagaacttgaagaatgatcttaatttctcattttaaaatgactgtcaagtgagccagactgtttaacagataaaagttagacatgtggatttgtcaataaatttaaacttgatagtagttgtcattactactaagttgtttgagtaatatattatgttcacattttaaatggatattgatcttcattcagtgactaaattggagtgtctcaattcttatgaaattgctgatccttttcctctttgtaggtatgcagccagacataaattctagccaacattccacagatttcttcctacttttcttctttacgcagtactctttaggaagtaaaaatactttttggatgctaaaaatagcaaaacacattgtgtttacaacaataaacttaaaatatatttctttgtgttttattttgtcttgaaggtacttgaagtttattgagttgcccttgactcagagaaagttttgtcaaacatgtcagcagttgttgttaccagatgactgggggcaacatagtgagcatcaggttctgggtaatgtgtccattacccagttaagaaggcccagtcaactcctttatccactggaaaacaagaagacaaatgcccagtatctgtttgctgatcggagctgtcagttcttggtagacttactttctgccctcggattcagaagagtactgtgtgttggaacaccaaggtatgtcatgtgattttttaaagaattatcttctcaccactattgaaactgtatgaagattttattaagtagttacttactctgtgcaaggtatagcatgaagctttgagtatttaaaatgtaaagcacagtccctctcttaaggagtttgcaacctgtattccatttgagaaaaatcttcatagatttctttctgatgcatgagagaagattctttctgatttaactgctaaattgtttataattttagacctctctgtttcagataagttctgctcttaaaaaatatttgcaaaattgaaaccttgattatacctgccaaattctcttcagtgtttcattgaaatatcataaataccagaagaacattgatggttttgttgtttgtttgtttattgtctatgacatttgtaatatcttattacatttgctttcactaattgctttaggttgcatgagctgatcaagttgacagcatcaggtgacaagaagtctaacattaaaagccttttattggatattgattttcggtaggtttacaaaatacagtatttcctttcattgtctcctgtttctttttaatgtttttctgtttttaattgtttatactctgttacaactctttagtttacatctagaagtagtaatttgttatgaggaaactttttagtcgaataaattcaacatgtaatctgtatttcaaacagggaggcagttgatttctccttttgctggtgggcttcctagattttctctgtgaatgtggctagttcgtctttggcttataatctacagatgaatctctattgagtgaggtttcttctcatatattatgttcaaagataattctaaactgcctcatacttaatcagacttccaggattttgtttcattagatctttgaagtgtgagaactcagacat

SEQ ID NO: 110924 - DNA, 1189 bp, Homo sapiens
tttcagatgaatcaaaactggtttctaggttatttatatttttagaataaggcactcaggatttttttctttggagacctggaaatccaatcacgtaaaagagaatttattgatttacattactgaggtctgggatatagcaggctttagtctagttgagatagtgagcctcacacaatgttgctagggctccctctttctctctccacctctcattctgtctttctctgtgtattgatttcattctgcagacagcttccttcctactgccagggacgttggtggcagcagctttaagtttatctagttttcagcttaactgcccagtggaaagaggcagtttttcctgagaactccagcagcaaaactccagagagtgttctgattagcctggctggggtcacttgcctattccagagccatcactgtggcctggcagatggggtactccagccagcctctgaccaatcacacagagttggttctccacaggaaacaggtgttcgacttaaagagtagggatgtaggtgctggagagacaaaaaaccagatgtccataactaaactattcaagacaatgtatacagttgccagcagcactcatgttcctaactttggcacttttacttcagtgaaaatggtacaatgtgatctttctaatagtatggttttgaatttacattaaaagttatataatgattctaagttattaaagacaagctttttcaagctatttttagtggacttacttacaaacagagactaggtgataccatagtgcgtcttctcaaagaacttgttaaaattgcaagaatccttggtttactttgtttttaaaaaaggaaaaatgatctttaattctgccatccaaaacattatgggttttggctttttaaaccttttttatgcatataaacattttaaaaagtagatatataaccttgaaaacttttcctgctggtgatattttaggtatatttctttttgagacaacatcttgctctgtcacctaagctggaatgcaatggtgtgatctcagctcactgcagcctcaacctcctgggttcaagcgatcctcctacctcagtctctcccaagtagctgggaccacaggcgtgtgccaccacacccagttaatttttgtatttcttgtagagacggggtttcaccttgttgcccaagatagtct

SEQ ID NO: 110925 - DNA, 1871 bp, Homo sapiens
accacgcctggctaatttttgtattttttgtagaggcaggattttgccatgttgcccaggttggtctcaaactcgttagctcaagcaatctgcctgcctcagcctcccaaagtgctagaattacaggtgtgagccactgtgcccggcctgtattaaatacttaaaaaaaaatcagctacagaagaaaataaatgaacagctgtcaagcagaaatgttgatttagtattctccttaaaattattaaccatgagggatgtatcttaattgccaacccattgcaagcttaaattgcataatcatctgtcagtaacctgattgtttatgtataacctcctggtacataggaacatgtgtgttttatatatgagtattctttggttttactactggttaattaaacatgggaaaatcacttaagtttgttatttattcactgttacagattccctgaaatttttgcaaattattctttatttcaaaaaactaaaaaatgaaattttttaaaggtgtgattttattgttttaaaatttagtttatatttgtctactctatagctgtgactgggcaaataactctgtaattattttacaggtattcacagttttatatggaagatagcttttgccattataatatgtttaaccatcatttctttgatggaaaggtaagagctgtgaccattatctcattgttctcttattgtggaataacagatttcagagtgcctcctttgttctttttctaaattccctcaaggtcaaattgtggctgttctaccatttactgatatttatttttgttctttcactgtttattgagcacctagaggtgattttattattcccttgttaagacttctcactactttttggatgaaggcccacattcttagaaggcccgtggggctctgtgtgatctgaccccgatttccactctagcctcccctctccctgtttcccctttgctgtctgtgctcagggcacagggctttcatctggaactggtcagacgcctttccaccgcagggaaggtccatgctgttcctgctggtttctgctgtcttttgccttgataacctccactcatgttttagaactttgttccaaatcacttcttccagcctcccccgacccctactccccaaagggtcaagttttcctttgtagacttaccacactgtaattaaatgcatgtgtcagggctgggagtgtacggaaaatctctattccttcctctcactttttctgtgaacctcaaactgctctaaaaaataaaagttctttaaaaaaaaaaaggactgcagtttaaaaaagcttctttcaatttgaggttaataatgtcactgagaataaacagcatagtagagctgatacatttagtttaagctctttgtcaggcctattataaaataaaatctgtaaccaaccaagtaatcacgctggccaaaaatattgtgaaattatcaagacaccttgaagcatacccataaatatatgcatatatatcaattttgtaaaaattctgaaccatgcttactatgtattgtgctttgagatattaactaatgataggaggatgaaaaccaagcaagactttaaaagtcagcgttcaggaaatgaaaacaaatgttaaattgttggttgggattgaaaaatgagtcccctgatttagtaagtatagcactccttccatttgaatcaatttagcattgggatatatattaatatttttcagctgtgaagccattaaaacaaggtattgaaataaacagcagttataattagatgtatttcagctgtttcccaaagcgtttatgtggttgctaatcactaagaattgagaactgttgaggtgaatgtgaaggaaaat

SEQ ID NO: 110926 - DNA, 1029 bp, Homo sapiens
cctcagggatactgaggggactgtacttgaaagctacttgcaagtcagttgagtggagatactgttatatggtatctcttaataacttcacttatagcaaaaaccattaaatgtccctgttaatgtttactttgcaattactaaaaaagcttaaattaacctttgggaaaatgtgttaatagcatggtttcatggaccagatgcgctttgtcgtttgtgaactttcattttttatttacttacagtgcatgttcaaatatgtctgcctgatactcaaaaacatatgcatgtttaactgctaatttgtagctgttattaaactgaactcatggcattggacaaaccagataggaaaacaatgttttcttcgtctttgtgtgcccagtgcttagcaccatcctggcttctgtttgttaaattgaatttaacattttagatagttttcatgggtaatgagtttcttttaggacattaaatttagccttttaatttaaccatttgaaatgtgtagtcttctgatagtgatggtgtttgaatttgcaattttaaaaacctgcttatcaaagaacccaaagataaaatctcataggagcaaagagaggcttcagaatgtcactgaggaatgctgcggtggcaagatgacttggtaaagtttccagtattaagagagagactgagtctaatgcattctcctccaaataggatgaagtgcctctctctagtcctaatttagaaatgaatttttatttgttccagactgcccttgaagtatgcagagcatttttacaggaagataaaggcgaaggaatcattatggtgacggatcctccgtttggtggcttggttgaacctctggctattacattcaagaagttaattgctatgtggaaagaaggtcaaagccaaggtgtataatttattactgcaaaataaatacatatctatatatctacttcctgtcaaatattagctgagctcagtgaatcagagcagtgatagaatatacatgtcttgagttctctttttaaa

SEQ ID NO: 110927 - DNA, 1022 bp, Homo sapiens
gtacttattatagcttagtgtaagcactatgattaggcttgcctctgattaaggcttttcagcctattggaattttagctgtaatagtgctataatgaatactagcctatactaggtgctttgtaagtaatagctgtgttccctgtctctcacaaacactaattttggtaaaactgttttgaagaatcttccatgatgcagacaaggttgattcatccctgaaaactaagataatgagttgtggcagagctgggattcacaccgaagacctactgccttctagtccagaggtcctttcactgcatcatgactacctttgtgcctcaaaagtggcactccttttctattttcaactttttaggtaacatctttgccttacctagacaatagtaatatacatataagggttacttttacatactcttagtagctatatttcgatataaaggaatatgtccactgacctttgggaatagacaggtttgaaatggcactctggtaaatattttctgtttttgtatgagatttaaatgtgttgaatcattgcaatttcttatgctagcggaagtttttctactgtagccttctattttttctttaatttactattattttttcctttttgtgatccattagatgacagtcacaaagaactacccattttctggattttcccctatttttttgaatcccgaatttgtcagttttttccaagcttccagatgctggattaccaggtagagtacatattctgttttctggcatggttggggaatggagattctacttgaatagatataagactattcattgattttagtaaaatacaatgagctgtattaaacactaatattataccatatatagctcagtccagtgttttctaaatatcagtaatccctagagtgcatgttgaaaatacagattgagtaccaaaataaacccactaaatcagaattagaggacaaagccccaagaaaaaatatctcaccaagctccttgggtgactccaagtgtgctag

SEQ ID NO: 110928 - DNA, 1010 bp, Homo sapiens
agatggctaccaaaattcttaaaatttaatctgtaataaacataaaacatgtagtgggtttgaagtaaaaaggggtataagatgtccgcatgtcaatttcaaatgagagcttatgggatatgggtattatgatagactttgctgctgtggtagaagctggttgctggagcagaagaaggtactggggactttgtgtgtgtgctgaaatccaatagaacacaatccttagggagttacagaaatgcaagtactctgtcttatttaatctttctttcctggcctgatacctggaacatagtaggcacaaaataaatgttgacatggacgtctcggtctccatttaactagtttcagtctcatgttacagaagacatttgcgtatagataaaattaaaaattggaaattgcagagattttgtgctttccctcatttctatacagtacttcatcacattaaatcagttccatgggagaaattttctatttgaaaatgcctctcatcatcattgtgagtgaaatgtcagggataatgatgggaaaatggtgtatcagctctactactagtgataggcaatttgcaaaattgtgtttgctttacagcacttccataggaggtttatttgtgtggctgaagctatgaaatatggatatatgttagaggtacattaatttactctagcagcatgcattttacataccatatgtttatagttaattagcacaacaaacccgcatttaaaaataataataatctcaattaggttatgcaaagtcaagcaatcaaccaccttcctgacacatacattcgctgactccttgggtaaccataaagaaattgttctttttttttccctctcttccatctgctatctagtatattgcatagaatattccatgtactagaaacctttctaaaatattattctccaacatttgaaaagcttcatatgaatctcttgggaagaatttttttattatgacactcataaatgctcaaaatatctttgttg

SEQ ID NO: 110929 - DNA, 1057 bp, Homo sapiens
tctgatttcagaaatactgaaatgcaaaaaaaaaaaaaatcttagaattgaggaaatagttataatcaggaataatgtacttatttattttgagacagagtcttgctttgttggacaggctggaatgcagtggtgggatctctgctcaccgcaacctctgcctcctgggttcaagtgattcttgtgcctcagcctccctggtagctgggattatgggtgtgtgccaccacacccggctaatttttatatttttgtagagactgggtttcgccatgttggccaggcgagtctcaaactcctcatctcaggtgatctgcccgcctcagcttcccaaagtgctgggattacagacgtgagccaccacacccagccaggaataatgtactttaaaactttattactgtcttagaaagttaaaaataggaaatttggtgattttacacttatattcaattaatactaattttaaggacttaatctctattcctttttcagagaataaactaattggtagcctgtaaaaatgtgtctctgggaggtagaatgtgaagcgggatgaggtcatttgttcttaatagaaatctgaacatcttaacattaagataccttctcaaaatagcaatagaagaaaatccctaaaatttgacagataacattttctaagctttttaaaaggacatttttaataaatacagctaaatttcattcttcttatattatgaaatttaatgagaaacaaagtctttttgtaggctggatttcatgttttttcctaattagtccagtacctagactagtttatcactccatatgccccattcttttcatccgatactgttctttctgcttggaatatgtccctccatgtggccactccgttctcttttgggaatcttccacgagtccctgatactgaaaccttctttggccccttggtgtttgataccacatttaaggcctttcacatattattctgtgattatttttactgattttatttccctcaaagatttaggtctcttaatgtcagcacccatttcatctgctcttgtgtatc

SEQ ID NO: 110930 - DNA, 1031 bp, Homo sapiens
cccatccttccgggtggtgggagagaagcagctcccgcaggagattattttcctggtctggtcgcccaagcgggatctcattgctttggccaacacagctggcgaggtgagtgagccggcgggagcccgcctgtgctgggtctgctcccggggggcccaagaacaccgagcccgagcctgttcattcgggccacaggcggccggagcctcagtttccccttctgcagacatggctggccacctgctaccccttccctgcctcccaggacggcagtaaactttaagtatatatgcgaaaggtgatgtctgtgctattttcggtacttttatggctaaagtaacagttttcacacagcttaacaccgtcacgcaatcctgcttccccaagtcttcttcactcattggtttattagttaaatgaactttttaaaaaagcccactatgtgctgctcatgagctagacataatggtagatgcagggaccctgccctaagtttgcttacagttttaatagcagtaggaagagttattgtcaaacttcagctgcaaatgtgcctgcatgtagctgccacacaggatatatttaagaacctggcttctcttgtccacgttttatagtacgggttggataaccaccctccactaaaaatacctctaaattggacaaggaaggcatgcattggattccagacagaacgtgcatgggtgttatcagcatttcttgttcacataaaacttcatcgagtataaaccagttgtacccaactttctgctgagagttattacctgccagccattttgtaaggaaaccttcacctgtgcatctttccgcctctggcttgagagttatctggccatgtgagagttgtatagagccaaatttggaaactaggtgataaggaaatcttagcaccctgcagactgtagtctgcaccatgttatctaccatgatccagtcgccagggtattgatgtctaatttttcagggccctccatgaaatctagctagtctccctccgctgccgggatgc

SEQ ID NO: 110931 - DNA, 1050 bp, Homo sapiens
gtttcccaccatcgtttagaaacataaaagaggaataaaaagcattccaagaacaaagcagatggaatcattgcttaccttttagacatgtgataacatataattgtttatttgttgaagcctcttttgtattttctgcttgacaacagggtttcaagtctggaaactttgatgtgtaagacgttaagtgtgctacgtgagaaagtagtagatctcctataaagtttgagcacttgaaaataagcttagttaatgtaactacaatatatgcaaatatttctttttttagtttttaaaatattgaaggatgtttaggtcaaaaattgccatgatgaagatgcacttaaaagagtaaaactgggcaataagggaaatacccatttatttttctcaattgttacactaatttattctgattgttttttcttgttttagttttggcctttgctcttgctgataccaagaaaattgttttgtgtgatgtagaaaaacctgagagcttacactctttttctgtggaggctccagtttcctgtatgcattggatggaagtgacagtagaaagcaggtaattagaaaaacttatgtagtcatagggtattcatgagatttttattttttgaaatggaaacttaggagtatctgagtattgggtgtatgtgcgttgtatttaaattttggtttcagtttatcaagatgaaattttttaatgctttcttagattttttttttccttccgataaacatctataggcatacctcagagatattgtgggcttggttccagaccactgcaataaagtgaacattgcaataaaagcaagtcatttgaatttctttgtttctcagtgcatgtaaaagttatgtttatattatgctatagtacatttaaatgtgcaatgacatcatgtctaaaaaaattaagcatgtaacttaattaaaatatactttattgctaaaaaatgctaacgatcatctgagcttttagtgagttgtgatctcactgaaggtggaggattttgccttggtgctgacagctgctgactgatc

SEQ ID NO: 110932 - DNA, 2099 bp, Homo sapiens
ctcataaataaaagatagtgctactcttagtagtcatatgtttggtgtgagttcttaaatgagagttaagaaatcataaattctcagtatctgagtacatatgaatgcatttcatatgctaagaaaagtgtttattaatatcatttctctaaatgtaacgtgtgcaggctgatgttttttttcccctaaaataacagaaattcctacttttcaatttcctatttgggactgttaaactgactacaactgtatagtatttgtgtcatctatttacttgataatgttgtaaaactgggtatcttttttaaaaattagcatttttaatggcaagagaagtaaaatctttggtgtttttataatgcttttattttttcctttttagtgttctcacatcattttataatgctgaggatgaatcaaatcttctcttacctaaactacctacactgccaaaaaagtatgtatcactggtttctttgaaattaatcttgcagatttctctttcttctgcttttaacactgtgacaattttctcatgcgttttaaaatatgtatttttactaagagtattttttaccttaatctctgtttccttctagctatagcaacacctcaaaaatatttaggtaagatacgccttttcttgttttcaagtaagataatctgctattatttggaagacagaattgaaagatgacccaatttacttctatattttagtgaagaaaattctgatgaaattattaagctcttgggagacgtcaggtaaatcttacagataaataagtctaatttcttaaagttatttcatatttgaggcagttttcagaagctttaagagcaaatcctttatttgccattttatttcattgttttttgtttttgttttctttttgagatggagtctctgtcacccaggctggagtgcagtgtcgtgatattggctcactacaacctctacttcctgggcacaagcgattctcctgtctcagcctcctccgagtagctgggactacaggcacgcgccaccacacccagctaattttttttttttttttttgagacggagtctcgctctgttgccaggctggagtacagtggcgttatctcggctcactgcaacctccgccttcctggttcaagtgattcttctgcctcagcctcccgagtagctgggactacaggcacccgccaccaggcctgtctaatttttttatttttagtagggacggggtttcaccatgttggccaggatggtctcgatctcttgacctcgtgatccacccgccttagcctccaaaagcgctgggattacaggcgtgagccaccgcgcctggcctaatttttgtatttttagtagagacggggtttcaccatgttggccaggctggtctcagactcccaacctcagatgatccacccgccttggcctcccaaagtgttgggattacaggcatgagccaccgcacctggccttatcgttgacattaataccttcaaacaatatatagaccttaatatctattattgtttttattgtgtggcctttcgttttatgaagttttaataataatatgatgtacatatgtttattttaataagttaaaggatataagtactagagtttctaaaattttaagtattcatgttttttaagcccatttaatatatttagcatcataaccatgataaaactgatggcactttgtattagttggtaaaaggattgttttgttattgagagtgtataaatatagttgttattaaaataatgtattcttattttactgtaagctgatttttttttaggctagaggaaatttgtgttctttgaaaaaaggaatgagcctgatgtgactgaatattgagtgttagtggatttgatgtctcacttccctctgcaggggagctttagcatgtagattatatgaaagcagtaataatttatatctcgctttaacaatgcaatcatctgtgttgttgattggttctcagcttgttgcattgtttttaattaggcttaatattctcgtccttggaggaagctctggatttattgagctttatgcttatggaatgtttaaaattgctcgagtcac

SEQ ID NO: 110933 - DNA, 2330 bp, Homo sapiens
ctgtgattccttgtctctactccacatccttcatactccagcgagccagcacaggcttgtccacatggtggtggtaacggggcatcgagggtgcaagtggaagtgtacaaagacttttgaggccctggagtcaacagtgttatttctgctgcattccgttagtcaaagcgagactcaagggctgaagaaatggactctgcatctgactggaggggctacaaaagattgtggccatgtttttcattctaccacagtcattaatttatttgatattaaaggtttctagagatcagtatctttttaaaattgaataattgaccaaaccagtattttgacagttagtgtagataagacatatcttatataaaaagcttggagatatttgtttcaccagataaaaatttaagaatgttttattatgaaattctaagaatcaatggaatgtttcgtagttaagtgatgaccaagctgttgtctttttctccatcttaactgagttaaaagagtgattgaggctgggcacagtggcgcacacctataatcccagcactttgggaggctgaggcaggtggatcacttgaggcttggagttcgagaccagcctggccaacatggtaaagccccgtctctactaaaaatacaaaaattagctgggcatggtgacgcacgcatataataccagctacttgggaggctgaggcaggagaatcgcttgaacctgggaggcagaggttgcagtgagccaagatggcgtcactgcactccagcctggacgacagagcaagactctgtctcgataaataaataataaaaataaaacagtgattgaaagtaaattctagatttctttgagacacttgatcataagcacatattatttagatagcaagttggtttaaatattttttaccatttcaatttttcttttttgctaatagtatataaatttgtcactaacatgtatgtgtgaagcatgggaagaaatactaatgcagatggattctcgtctcaccaagtttgtgcaggtaaagcagctgaagtttcccatggagagagttaaagaatgcatgatgtatgtctttaccttgaggtacatgagaaaaatcagtttgattcataaaaggctaagatcataatttctttcaaatggcttcgtctgacttcaaactgcttcctcagatttgccaaaagggctcttttcccattgatacaacttaagtggggacaggattgtgaagtggagctggtggggctttggcaataagggcaggtgttagaacagctgattggctatcttctagtcactgatgttcagatgatcactttatggatttgatggaagtctaaggcaaggaaagggagtcatgctcctataattttgaataaatatgcttataatttaagaaatacatatatcacaatttttttttcacttttttccaggaaaagaacacaaccacatcagtgcaagatgagttcatgcacttgctattatgggggaaagcaaggtaataaactcagattaggtgctcctgtttttgcttcttttttaacagtaattatttatttgaaaagtagtttatagtcatagtatgtgatttttttaattgatacataatattttaattgatacataatgtgttacatacttacggggtatatgtgatgttacatgcgtagaattttttgtggggctatttctttattttgtttcttgtttgtgcttcgaaatttaaaagttgtaagtgatgcattcagatttccaatagagaagtgactaaaaatactttgtttttcattgtagtgctgaacttcagactctcttgatgaatcagttaacagtaaaggtgcagttaatgtatctatgtattcaaatggctatgaacacattcttaattttttttttcgagtggcatataatatcctgattgtatgctaaatatattttccttttttaattagggcttgaaaaagcttggccagtctatagagtcatcatactccagtatacaaaaattggtcataagtcatttacagaggtatgaaggtgacgtagaattttttggtattgtatccacacatacctggcgttggccttctttccgccgccttttcttcatctggcattctctttttaagccttttctagctaaaattgttgcatggcatttgagaagaatcttcctatacccaagattgaaagagtcaataataattctgctttatgaagtaattttccaacatcttttcaccaggctagactctatctgggtttttttcttaatcagctaagcatgaagtatattttgaaataaggcatatatcttttt

SEQ ID NO: 110934 - DNA, 1067 bp, Homo sapiens
atatgctcatgaaaaagaaacacaatttaagttcgatttgtgatctctacatctacaacataataatcttttaatactttgtggtttgtttagttgcttgactaaacaaactaccaactgttcagcagtttctttaatttttaagatagtagctagctaacatttatggagggcttaattctgccacatacacatagcagattttggctacctcacttagaatgatagtaatgcactttcagaggacttggcaataaaacaaagtaacttattaagttaaaaaagtgttaaaaataaaccgattttaggccctaagtctttgatttactaaacttaacttttttttgtcttttactttttttctttttccattttcccttccaggtatgaataaacttaaatttctaattctgtatttctagtacttgaaagatgaagatgatgatcttgtgtcaccccctaacacagaaggaaaccagtggtatgactttcttcaaaatagcagccaccttaaaggtacttcatgaaccaaccagattttggccatttttgtttttatttaagactaggtcttgaatagttctgctaacagttttgctgaaaacttgctgaacacttacctaagtttattagacttatatttatttgattataggaacagcaaaataaccaatagtgtatgacatcaccatgatagatagaagacactctgaagttaactacgctgtaggaagattgcttattcctaagtgttctcatataagtgttttgcaccctgtaaaaaataggattttgagggaaactatagagccaaatagtgagaaaagtcttttttgccaattccaatttattatcttctgaaagcacagggatgctcaactgtattctcctcgggttgtagttggtgtgtgtgtgtgtgcatgtgtacttgttatacctttcattttctagaatgtcagaatgttaataccgtaaagctatccagcattattagggatgcagcacataatagcaaccattaaatatgccagcacatcttaccattttagatgaaaatattttaaagc

SEQ ID NO: 110935 - DNA, 1031 bp, Homo sapiens
catttaattgttagttttcatgtcattaaaagggtaacactgaattaggaagttatatgatcttgttttagattatttaatttttattggcatataatcattgtaggactttttttagagttaggaaaaatatgacagctcaggatattatacttcattttttagaagttaaaaacttccgaaaaactaaaagttaaagaagttttaactttttagaagttaaaaacttctaaaagtggctgccttatagaaatgatttttgcctagggttaagtatgcttttcattaaacaagaggccttgcctaacagagacttactttgaaattgaaagtagaagttctgaaaaataaatcatatttagaacgccattggtagcttaaaaatggttttaaacctgaatttgaagaaaatgttgagaccacgatgtaaccaaaaagaaataattgggttatttctattccaaatgtctttggtgactgtgtgattttaaaccaaattggtttatctatctaggcatttaaacaagttctcagtgttctaaagaagtacatgtactgaccctgacaatcatgttcttttaagcctttagattattgactatccaggttgttccacagagtctctttttttcccccttctttcttgaagatctgtgagtaatggactaattgctattaaatttgggagctttacatatgccacaacagaaaaagtcagaagaaggtaagtcttgaatcttgtttggatgaaatgtagatacatgtgatatgtgtatatgtttaggaataggatcagactcagttacggtggtaatataggtaaaagggctttgccacttcccacatcaagggcaggattctttgtgtatttatacatagagaatgatttgacttgtgattgaatagaaccttactgccctgcagtttatgtcgtacggtttcctataattaatactcctgagctccctgttgacaaagaaagtaatgtggttcccatgggcagatggcctgcagggctgaagttcttgtta

SEQ ID NO: 110936 - DNA, 1152 bp, Homo sapiens
tagcatgggaactgaatgggtaatcagaaactgggtccagaatgaagtagcaggtgaatttcagcacagcattctccttgtcctttctctgctaagacacagaaaacattagggttttaggtggatggaccacctgaggtcaggagttcgccagcctggccaacgtggtgaaaccccgtctctactaaaaatacaaaaattatccaggcatggtggtggatgcctgtaatcctagctacttgggaggtggaggcaggagaatcacttgaacctgggaggtggaggttacagtgagctgagatcacaccattgcactccagcctgggcaacaagagcaaaactgcatctcaaaaaaaaaaaagaaagaaagaaaagaaagaaaacagtagggttttacagtttttcacatcataacagctggtgtcaaaatcaaaattagttactaaattacctgaaattttggaaattcgtatttctaataatctgttattccagaaaaaataggaatttactataggagagttatatcacattgtcttatgttgtagaacctgaaacataaccatatgtttttcttgtgaatttgtattgttgttgacttttatttgtgttgatgaacagaaatagaacatatgatacttgggttttgccctgtctgattcccaaaagttaaatcagaacacagtgattgatttctttttgtgaaatgtaacttagagactattgatctgttttccttttttttttttttttgagacagagtgtcactctgttgcccatagtacagtggtacaatcttggctcactgcaacctctgccttctgggttcaagcaattatcctgcctcagcctcctaggtagctgggattataggcgcccaccaccacatctggctaatttttatgtttttagtacagatggggtttcgccctgttggccaggctggtctcgaacttctgacctcaagtgatccctaccctctcatccttccaaactgctgggattacagtcatgagccactgcgtccggcctattgatctgtttttcattactatgaacaactggtcaggctcagtggctcatgcctgtaatcccagcattttgggaggccgaagtgggaggatcacttgaatccaggtgttggagactagc

SEQ ID NO: 110937 - DNA, 1041 bp, Homo sapiens
aattttgtaactgaaattctgttcatctttgcatacttgatggcatctatgtcaatattgattgactatttatgagtagaattctgaaacctaatttaaaatttagtttgcccttttttttttaaaaaaaagtattgccttctgagtaaatgatggtagtaacatgaagtatagtttaaaactatagtatcgcattggttgttaagtataaataaataaaatctaaccaaattcgtctaaaacagactgaactctatcttttcatcaaaccaacatttttgtaagagcaatttcactttgtgttttagagtagacatttttggaaatccttgaataaaaagctcttattaaatctccctggaatagctcataaccaaagaggaagaaaaaaatagcttatggtgtgatatatttaggatttatatatttaactacttatttgtctgtgaagaagtcttcctgactaaagatggctttcagataaattttaatttctctatgagtcttttgctattcctataattcatgcctttttgttagaaactaatataggttttgtgtgattttttttttcaatgagcaaaaataagttaaataagtaagtaagtgaacaaataaacaggtagtttaaagcaaaggaagggcccagcgtgatgactcacgcctgtaatcccagcactttaggagactgaggcgggcagatcacctgaggtgaggagttcaagaccagcctagccaacatggtgaaaccccgtctctactaaacatgcaagaaattagccgggtgtggtggtgggcgcctgtaatcccagctacttgggaggctgaagcacaagaatcgcttgaacctgggaggcggatgttgcagtgagctgagatcgtgccattgcacgccagcctggggcaacaagaatgaaactccatctcaaaagaataaaaaaagaaaaataaagcaaaggaagtataaacggttcttaaattgatggaaatatgcccaactttactcataataagaaaaataaactaaaatgacattgagct

SEQ ID NO: 110938 - DNA, 1050 bp, Homo sapiens
attaatcaagtatttaaaaaaattattctacttccccttctgttagctttttagttatgcattcttaaactattattttagtagttataaatctaaagattataacagactagctcattactaataaacccctaataaattagagaacaaagcaaaatagggaaagctaataataagtcagtaaacatgacttaatagagtactagaactcttggtagagattatattttttcatattggtggatatatttcattatgtatcttacatgtctttgtttccataaaagacaactcctaatcattcataagaaagggcactaaatgaaaagctctcagaatgcattttctttaccttaacattcagttctggtttgttgctctataaaaattctaactagcaaaatattccccaagtgggatttattgagagcatatgaagaaaaacattttattaaatttgccatggtttgcgtattttctcttcccttttttttttcagatgggcaaaacatgtagctgagaaaaatggctacttgggccatgtcatccgcaaaggcctcaatgcctacctggaaggttcatggtaagcttgggatccacgttagagcaaacttttttccctgtctgtcagtatagtcttatgaaatggagtcttaaaatgcaactgagaaagcaatttgcagggaaatcacagctcccagtaatgatattcagagtatcatggactgattggctgttgattggaaaacatagcatttccatgtttaattatacacaaaaatttgttctctaggggaattgttcacactcatcaagttgagaaagatatacaaatacattgatttctctttcctttaagcttgcccctcttggttttagagtctggtctggagacagcataggggatcttaggtgagactctctgctttttatttccaggccacagaaagtccagaatttctaccttgttcctagcaagaagagagatcagtgtttaaggttcaggccacctcttccatagatgttttactgcatctgccatgactagga

SEQ ID NO: 110939 - DNA, 1083 bp, Homo sapiens
tcaaactcctgagctcaggcaatccggctgtctcagcctctcaaagtgttaggattacaggcatgagccactgcacccggccttctgttctatttctatgcttcctttttttcttcttttctgcctcaagccttctttattcttctcttcccgctactagtttgaaagttttaaattctatttttgttcttttataaagtttagagttagtcagtgtctttacccttgaacaatacaaggtccttataatgccttaacctttgtcccatgcacctgacataatatatttgtcctgcctggtgcctgtgactcagcaaatcagttaacaccatcactattgtatatggtcactgactgtttatcttcacccgcgttctttactcaccgacgctgcttacatttcactcctttctagcttcagttttctcccttctgacatacatctgttactacttctttggtaagaatttgtaactgggaacctctgtttttgtctattggaaaatgtatagaactgcaggtcttctgccatggtttttgaaaagtttgtcacgccatccaaatttaatcatctcacttgcttaattacagtgctccagtaaccctttggtgtcttggaagtccagccagtggagggttattgaagtatagtcatgtgctgtatcatattttggcccgcgatagaccatgtatgacagtggtcccataagattatcatggtgctgaaaaatttctgtcgcctagtgatgtcctgatgatcctgaccctgtgtgggcctaggctaatatatatgttgtatcttagtttctcacacaaaagtttaaaaaggaaaaaataataataattttaaaatagaaagatgtctatagaatgaagatatataaagagaaaatatttttgtacagctgtagatgtttgtgttttaagctaaatgttactataagagtcaaaaagttttaaaaatttaaaagtttataaagtaaaaaagctagctgaggttcatttattactgaagaaagaaattttaaacaataaatgtagtgtagcctaagtgtgcagtgtttatagagtctgtagtagtgt

SEQ ID NO: 110940 - DNA, 1135 bp, Homo sapiens
tttgggaaagcctggctgcccagcagggataggcggaaaattggtggggaaagtctccaacctgagcatgcatggacagagctcagagaattcaatgaggccagaaggaaagagaatcatggctcccattttctgagcactcaacatagccaggcacctggtgccaagatgtggcaacctacgaggtcctacctatttcaccagtgagcacctgaggctccatgaggttaaggaaccggccagcgcgggcggaaccagggccttcaaccctgtctgagcccacagaggtaatccttagtcaccaagcgccgctgtgtaagggacaaagaccgcacaaacggccggagaagacgcgagagatgtggcccaaagagaggggacgggcctgggtgattttacacagagaggggacgggcctgggtgattttacatagagaggggacgggcctgggtgattttacatagagaggggacgggcctgatgattttatatagagaggggacgggcctgggtgattttatatagtgaggggacgggcctgggtgattttatatagagaggggacgggcctgggtgattttatatagagaggggacgggcctgggtgattttacatagagaggggacgggcctggtgattttatatagtgaggggacgggcctggtgattttacatagagagaggatgggcctgggtgattttatatagagaagggatggtcctgggtgattttatatagagaggggatgggcctgggtgattttacgtgcggatgcagaggaggggcagcgtcggggcggcggagtccgacctcgggggattcaccctgagggttacaggcaaggccgctccaggcacgcagcacctgccgggcgccacccaggagggggcagcagcgccattcgcaaagccggcccgctccgctccgctctcaggctcagggctgcggagacaggaatcgcagcttcccctggaaggggcgtcccaggggacctccgccaggccaggggaacccggcctccgggcctgggtgaacgtgccttccagaccatcctggcaggccgctgctccctagaggcctaaggcgcttgggacagcctcccactctactcctgaatctctcctccatcccg

SEQ ID NO: 110941 - DNA, 4248 bp, Homo sapiens
atcttgtaacaggtacctacctgtaatataaatattctatattgtcaattaattaaggactttgctaaaagagagcaaggaatgccaatataaagttaaagaaaaatataaaataaataagttaggctgggcatggtgactcatgtctgaaatcccaggactttgggaggacatggtgggagggttgcttgaggccaggagttcgaaaccagcctaggcaaaacagcgagaccccacctcccatctctacatgtgacttaaaaaacttagctgggcatggtggtacatgcctgtagtcctagctacttggaagactgtgacaggaggttcacttgagctcaggagtttgaggctgcagtgagctatgattgcaccacagaacgagaccctgtctaaaaaaaaaaaaaaaaaaaagtaaaaaaagttagaccgcatgagctgtaataaccctttttggaccaatatgctgtgactctgtggctttaaggatgagatgccaatatgcattcttgtcccagtagagagccagcccagtttggcctgggtgtgagaagcaaagctatcaaaagctttggccaattttttcccccaaaaggaattccaaatatatccaagcttctatgttagtgactgattgaaaccaaagctttataccatatgacatagaatcctggaatagataactttaggctgaagaaaaaagaaaagttaaggcaggtgtgagcagctgtccagttctgccataaaagaaatcaagtttaacttcagcgataacatgccttcttttaagcactcgagttttgttaggttctctccagttggctgaaaattacaccctaaatattcctctaaaagtagataacttagtgcacttttatttaatattacagtacttataaaggtttctattaatgggtctcctccttcgagaagagaatcgtaaatgaaatacataaagattaatagcctttatttatttcttaaaccagctggtcttcctctaagaaagcagatatgctaaagtaaataatccttcattttaaaaaatagaaagcattccccttgaatgctgtttactggctgtgagcaaataggtattcacttagaaggctttgctctctgtttattacccatatttctataatacctgcttcagaagtgttgcagaaagacaaaattaatgtgcatggaaaaaaagcagagaaaatgagtgttaatctttgtggaacaatccagagtccagagaaagaggcgagtagggggagaagccacttgttggaatgactagtatattaagattctcttctgggttatgggttaacatctgcatcattgaggtctattcacaacaggatattgttcagtataactttttgcatccaacagaaatacaaatattaattttcatggcatagagaaaacttcaaaatttgggaaagtactgaaggatgttatcacaaagttgtcatttagagtccaagaacagtcttaacaattgtacaagcttcagagcaagggcagaaaatcaagacatcaaattgtcatgtgggaaatctattctggggagttgtagaataaatactcactaataagaaaaggtggggaaggtccttctaagcaaaggaaatgagtgacaagacaagcaggtatgaatgacttttttttttttttgagatggagtctcgctctgtcgcccaggccagagtgcagtggcacagtccctgctcactgcaacctccgcctcctgggttcaagtgattctcctgcctcagcctcctgagtaactgggattacaggcatgcgctgccatgcctggttaatttttgtattttaatagagacagggtttcaccatgttggccaggctggtcttgaactcctgacctccgttgatccacctgcctcggcctcccaaaggtctgggattataggtgtgagtcactgcgtccagcccttcagtttgttttttaaggttttacatatatttttattttttccagttttattgaggtatacttgacaaataaaaccatacaagtttaacgtgtacaatgtgacgatttgatatatgtacatattgtgaaatgattaccacaatcaagttagttaacacatccctcacgtcacacttttactttttttaatgtgtggtgaaaatatttaagatctaatgtcttagcagatttcaagtgtgcaatacagtattggcaattattgccaccatgctttatatttagtctccagaacttactcatcttataactgaaagtttgtacattttgaccaacatctttccattttccctactcctcagcccctggcaacctctattctattctctgcttctatgagttcaacttcatagattttacataaaagtgacatcacacagtatttgcctttctctgtgtgacttatttcatttagcataatggcctcaagttgcatccatgttgttgcaaatggcaaaatttcctcactttttttttatgactgaataatatatatatttttatgagatggagtctagctctgttgcccaggctggtatgcagtggcacaatctcggctcactgcaacctctgcctcccgggttcaagcgattctcctgtctcagcctcccgagtagctgggattacagccgcccaccatcgggctcagctaacttttgttatttttagtagagacgaggtttcaccatgttggccaggctggtctcaaactcctgacctcaagtgagccacctgccttggcctcccaaattgccgggattacaggtgcgagccactgagcctggccaaaatcctaacagaataacattctattgtgtatgtattaaaaaactgtggtgtgtgtgtatgtgtgaggtatatacatatatatatatatggtgtgtttatatatatatatgtgtatcacaattttttaatccattcatccatcagtggacacttaggttgtttccatgtcttggctattgtgaataatgctccaatgaacatgggcatgcagatatcactttgatatatggtttccttctgatgttatacccagaaatgggactgctggttcattagggtagatagcatatttggatctgtatactatggacacttggatatagctggagcacaaggtacagggaggggagtgagaatgggagagtaggctggaaaggtaagcagaagccacactctgaaggggctcttaggccagttggggtccttctactgcataacccaggttcctcctcaggcccaagtaggctcttagcattcccttttcttcctcagctgcaggcctcagggctttgctaggtttcccccctttactaggtgttaccactcaccccatctcttgcatctggaaggtggtgccctcagcttcctttttttttttattttgtttattgcaagacagcacagagtcagcttggcatgatggctcacacctgtaatcccagcactttgggaggctgaggcaggaggattgcttgagcccaggagttcaagggcagcctgggcaacatagtgagatcctgtcctcacaaaaaattttttttaattagccaagtctggtggcacatgcctaaagtctcagctacttgggaggctgaggcagaaagtttgcttgaacccaggagttcggggctgcactgagctgtgattgtgccatagtactccagcctgggtgacagagtgagaccatgtctccaaaataagaaataaaaaaataaaaagcacagagtttttatattaaaagattttccaatgctaattatgatggcaaaacaattcaggaatgacaaaaataatagacatgtatatgagaagtgtttttttcttctttttttgagatggagtctcgatttgtcaccaaggctggagtgcagtggcacgatctctgctcactgcaacctctgcctcccaggttcaagcaattctcctgcctcagcttccccagtagctgggattacaggcatgtgccaccacactcagctaatttttgtgtttttggtagagacagggtttcaccatgctggccaagctggtctcgagctcctgacctcaggtaatctgctcacctcaacctcccaaagtgctgggattactggcatgagccatggcacccggccaggaagttgtttttgtttttgtttttgtttttgtttttgtttttgtttttgtttttttgagatggagtctcactctgtcgcccagattggagtgcagtggcaccatctcagctc

SEQ ID NO: 110942 - DNA, 4449 bp, Homo sapiens
aggctgatttgggacttggatgagggccgttaattgtggatcttcagccactcagtgtgggctggtccaataatcatatgattcaaggatgtttagggatttcctgcctctacaatctgagcccctctgctgaatccactctcagattttgatgctgtagttaacccctggggtgaaattagaggaaggatataattgtataaccacagtaaatcacttcactcctgcaatgctcatttgatatcagtaatggagaaaacagattcctcccatttagaactactataagagcacctgaattaatgagcccaaatgagttcataaatgtgaatggagagaaagcacttcctctacctccactgaatgtctttcctttgggcctgtcttaagtggagtttagagggactattggattccttgaactggcaatttctgtaattaccagtagttgctgagcttcctgatgtaatttcttctgtagaacagaaaagttcctaatatttggcacagcaatctcccgctataattacaggaacacaaggctgttagtcacatccctacctaccccacctctaacaatgctctttttttctttttttagcattaggtagctgggagaagacttgagcttaaaactctgctgttgaatgtagctgctgagcataaagctacattcaacagcagaatgtggctttatggacggtggatggtgtccttaagttagggtgatattaatcaggttcaatgtcaatcaaatggtttagcaaagaaggacaatacttagggcatttatttaatgatttattcgccgctctatttcatacaagttttaaggaggttggcatatatgactattaaatatcttattctttactttgatgaataacaaatagttttattttaataagttccattcatgtttatattctatttttgaccaagtagaatagttttctttgtacctaatatacgctacatacttgtcattggttacctaccacaccctctctgaagagcaaggtcaacaataaaagagcttaattcagaggccataattcattctgtattctgttaataagcaacatccatttaaaatagcaattgcgctttcaaggtcctggtattattcaggcaaagactcaaaatgatcactttcttggcatacatagaagcccaaatgttaagatgtgttctgtgggcaactctctgcttgttttctttcctagacaagtggttaacccgtgttgcatatcctgtgtttatagaattccagaaaggtcgtgtcatgtaaatcacttgtggactgggcacggtagttcatgtctgtaattccaccattttaggaggccaaggcaggaggatcgcttgagcccaacaatttcagaccagcctaggcaacacagcgagccccggtttctatgaaaattttaaaaaattatccaggcgtggtggcagacacctgtagtcccagctacttgggaggctgaggtgggaggatcacttgaacctgggaggtcaaggctgcagtgggcagtgagcacaccacagcactcagcactctagccggggtgacagagtgagaccctgtctcaaagataaacaaataaatttaaaaaatcactttgtgtgtgtgtgtgtgtgtgtacgagagaaagagagagagagagagagagagacagagagagacggtgtatgggggggatgtatagggagaatgtaaacagaaacatcttgaggagaaatccagcagtgactgagaatgtcgatggaagatgctggccttcgcttccacgtgttattgtgtttctgtgttcattacctgttaccttttttataagtagcagagggtaaaataatatgtccaagtggcgactggctaaagagacagagcataaaacagctggtcagacaccctggtttagtctatcatttataaagttgaaaaacttgaagttgaaaccagatgcaagaaaattataatttatcaaagaaaaaaagaaagaaaaagaaaaaagaaaatttttatctatttttaaaaaacaattcattttgtcctaaaatctctgccagttgtttaatgagcagcagcttctaaaataaacaaagaatatgagaaaaaaacaaaaaacaaaaaaaaaccaccacccagaattgattagtaggaaaaagtcccaggagagctttctaatgttgccttaatttttttttaaatgctattatactgttcatctccattaacttttcttttttggaagggaggtactattttaaaattcagggttttgtctctaattttaaaatgacaattagcacaatcactgatacaaatgtttcttctgatttccatgaaacggattaatgttttaattcacctgaaccaccaactgaatgccgtaggccattttgaaaacattcactaatccttgaaaatagcatgctttccctcatattttttttcaaacactaatccttgggaaaaaaaaataccttctctcattttctattcaatgtttgctattgttgtaacctaagtaggacctctttgaacaaatgcaaaattaagtttaactcacaattgagtctcacatcctgtggtcttggaattttaaaatttcattcaaaacacacattataaacaaagtctcccaaatgaccatctagagaggaatgtggcaaaaatccagaaactattgtaatatttggaactagcatagcacaaataatcagtgtgtttttttgaagaggagattatgggttgcagttttacaaactccacgggggatctgcacgagatgggcaaagttaaattagttgtgtgcctcccagagaacctaaactctttacagtaagtgaagaggaagaagtattaaaaggatctttttaaaacctagtatttgttcattataaccataattggagcaaacattctggcttacaaattcctataaactcaagatcaaagcagtgtgcttgacaagcctgttctttagcacattagtttggtattattaacagtggagactgattcagggcgggttgttggggggatgtggaaaggacaaaggccaacgccaaaacttatgtcatcaagccaggaaaatccaaattttagaggcaggaagaccagaggagttatcaacgtacaaaataatattctgaagaagtgcttttgaatgaagaagtaaacctgtgaaatcaatttaagaactaaaactaaccattgaaggcacatttaaaatttacgcttcaaagaaaaaaggtaggtcagagaaagctgaattcgtacctccgaaaatgcacgctttcctggggcagcaacttgtttctctccgattccaaaagaatgaaataaaagaactccaaaaaaggaatgtagcaaggacatactttctacctcaaaaaaataaaggagttggggtcagggcagagccaactaagaagatggaaaccaatcacatttcaaaatgattcttactttcttaggaaagtttaatatgatgatatcctatgcgtttctcattttatccctcagttaattttaatggtttacaaattcatcaacttttctaaatctgtttagaagaacacccctatctagaagattcacccaaatttcatgcttatttttaatatcagtattaacacatcatgtagatctgtagccactgatatggtagctaatatttttctgcccttaagtaattgagtataagtagatttcaccacctctgtaatgtttcagtttcagttttcatacaccattctgagaaattttgtgaactaatatagcattttaggctgttttcctcttaatcatcataaaaatgcctcatgtgggagaaagaaaggaaaaagattttcggcatataaattgtattaagtttataatacacaaataggaattgctttatcctggcaaataacgagcagattttaagaaaagatagttaagactgtgtgctttttttttttttttttttttttttgagacagtttcgctcgtgttgcctaggctggagtgaaatggcgagatcctggctcactgcaacctctgcctcctgggttcaagcgattctcctgcctgagccttccaagtagctgggattacagatgcctgccaccacgcctgactaatttttttttttgttttcgtatttttagtagagacggagattcaccatgttggcaaagctggtctcctcacctcaggtgatccacccgcctcggcctcccaaagtgttgggattacaggcgtgagccaccgcgcctggcccagttgttgttttcaacacaaacctcttaatgaagaagcaaggtttttggaggagtggaaatggcatgaaattgttggttaacagatataaattaaaagattcttgacttggaagcagaaagatggcatcgcaccttatctgcccacttctgaccagagtgtccttggccaaatca

SEQ ID NO: 110943 - DNA, 1467 bp, Homo sapiens
acccatcctcctgcaccacgtggcctctgtttaaattcctttaataactgttctgggtccaaataaaaaaacagggatagccgggcatggtggctcacacctgtaatcccagcactttgggaggctgaggtgggcggatcacgaggtcaggagatcgagaccatcttggctcacacggtgaaaccccatctctactaaaaatacaaaaaattagccgggcgtggtggcgggcgcctgtagttccagctactcgggaggctgaggcaggagaatggcgtgaacctgggaggcggagcttgcagtgagccaaaatggcgccactgcactccagcctgggtgacagagcgagactctgtctcaaaaaaaaaaaaagaaaaaaatttaaattttttttacatgcatgcagtaaatacatgcagtattgcccatttttaaaataatagaaaatttcaataaaaagcagttttgcaatttgtcacatttttagaggcaatttgggctaatccctggaagtaggcatgatataggctgaagctaaatatgaagcctaaggataatttatatttatttatttatttgagaccatgtctcactctgttgcccaggctggagtgcagtggcgcaaccttggctcactgcaacctccacttcctgggttcaagtgattctcctgctgcagcctcccgagtagctgggattataggtgtgcgccaccaggcccagctatttttttgtattttagtagagatggggtttcgccatgttggccaggctggtctcgaactcctgacctcaaatgatctacctgcctcggcctcccaaagtgctgagattacaggcatgagaaatgagcccagccaggataatttttaaaaataagtataaaaggacaaaatttgcacagattgttagaagagtataacaacaaggagaaagtctgatgacacacttcctgatggaaccttagccattggagctgtcaaggagttacctcaatcatgggtcccagcacaaggctaagtcagaagaggaacttctctgaattgtagggtatcttcagctccattaagatagagccttaaattggctgaactttagagctggaaggaacctttaaggtgttcttttctatttcttcatactttcttctacatttgaaaacaaggaatttctatttccaactccattctttcccctctccccagtcccgtttctccagctctctggaatggcctacaagtaatgtactagatcttaggtcctccaggtaacatcagcatgcttattacccttcaagtctccccagcgttggggtcctaattcacaatggtaataagggaggaagtgacccagcaggcctagcatagggctggttatagagaaatgtcagaggagtatccagcattcgcattctagcaatgtctgtaactgtgagtatgagctagggaaagtttcttcatttttctg

SEQ ID NO: 110944 - DNA, 2145 bp, Homo sapiens
ttttttaaatactatataaaaagcaaagcatgtaattgaataaagttaaattaattttttctgctctctctcctgtctttgcttaacagtttcattgagatgcacttcacataccatataattcactcacctaaagtgcaaattcagtggtttatagtatattcagagttgtgcagccaccaacacaatcaactttgaagacttttatcactccaaatgaagtcctatatcctttcacagttatccccacatacacactgccgggccctagacagccattaatctgctgtctctatagatttgccttttctggacattctagaatcccacaagatctttcatgatttgctgctttcatttagcacgttttcaaggtccatccatgttgtagtgtgtttcatactttatgtctttttataaactaatagtattctattttctagatatatcacattttatatcttcatcagttgatggacatttgcattgcttccactttggggcttccatgaataatggtgccatgaacatttatgtttctgtatggacgtgttttcggttctcttaagtttacacctaagagtagaattgttgggtcatagagtaactctatcgttaccctttgaagaactgttaggttgctttttaaaatggttacatcattttacattctcaccatcaatgtatgagggtttcaattttccacaaccttgtcaacatttgtcattatctgtcttttggcttattgccacactagcaggtgagaaatggtatctcattgtggttttgatttgctttttccatgatggctaatgatactgaatattttttcatgtgatcaatggtcatttgcacatctttggagaaatatgtattcagatcttttgcccatttttaattgaacgatttgtctttttattattcagttttaagaattctttatatattctcgatactagacccatttcacatatatttgatctacaaatattttctcccattctgtattttttttttttttactttcttgatagtgtcctttgaagcacaaaagttttaaattttgatgaagtccaatttatctatttttttaatttgttgcttgggtttttgtgtcatatctaagaaatcattgctaatccaagattatgaagatttacccctatactgtcttctatgagttttatagctttggtttttagatttagggctatgatctaaggtaattttttaatatgttgtgaattacaggcccaatgtcattcttttgcatgtagatattcagttttcccagcatcatttgttgcaaagactgttccttttcccactgaattcttttgacactagtcaaaaatcaaatgacctaaatgtgagggcttatttctggactcttagttctattcatttgatctgtaagtctgtccttatccagcaccacacagtcttgattactgtagctctgtagaaagtttgaaatgcggaaatatcagtcctccaactctgttcttctttttcaagattgtttggctattgtgggttccataaaattgtggctgtccttgtcagtttctacaaagtggccaactgggattttgatagtgattgcattgaatctgtggaataatttggtgagtgttgccatcttaataataataccttttgatccataaacatgggatgtttttccatttatttagatcctttaacatttctttcaacaatgttttgtagatttcagagcataaagcttgcacttctttttaaaaatttatacctaagtactttatttatttaatttgatactctggatatttaatactcatgctattggaaatgggattgttttcttagtttaattttcagatggttccttgaaaatatatagaatacaatttttttatattaatcttgtattctccaacttggctgaatatatgtgttagtggtacagataataattttttagtggagttcttagaattttcttttctttttttttttttttttttttttctgagactgagtttcactcttgtcacccaggctggagtgcaatggcatgatctcagctcactgcaacctccgcctcctgggttcaagtgattcacctgcctcagcctcccaagtagctgggactacaggcgt

SEQ ID NO: 110945 - DNA, 1656 bp, Homo sapiens
cacatcactagagtaaatggcccattcattttcttgctttaccttcttgaactgctgcacatattaacaagctaagcaaaacttaacccaggcctgcaaaaaactcaaattgccagggccaaaaaatcctgtgaaaaattaaacacaattggacagaaaacggtgaatatttatttttgtttctcaagttctcctgaagctgtgattcattttcagtgttctatttcttttaatcctggagttcgagcttattttctatatggaattgcagagtctgatggaatccttcttggcactctttcaatttcctatacattttattaaccttgatgaacacgtggtagaaaatgacagggataatgttatgaatataagagaaccataaagatgaacaaaaaaaacatgagttaaacatttgtagagtgagcggctcctagtttctaacatgggctatcagcagggctgtcttaggcccagagcccctgcacaatctgataacaagaaaccttgctttgtattctcagaagctcctatcagctatctacagtgggtttcccaaacattttgtacatctgatcctcttggaaattaaataacaaaaataatattgtcatttctgagtggggatatgagaaaaaaatgaattaacaccaatcaagataaaattatgactgtatttgcctgttttaacttttttttttttttttttttgagacagagagtcttgctctgtcacccaggctggagcgcaatggcacgatcttggctcactgcaacctccgcctcccgggctcaagtgagtctcctgcctcagcctcccgagtagctgggattacaggcgcctgccaacgcacccggctaatttttatatttttagtagagacagggtttccccatgttggccaggcttgtcttgaactcctgacctcacgtgatccgcccgcctcagcgtccccaagtgctgggattacaggcatgagccactgtgcccaaccgatgttgatttttgaagtacagccattttgacatgctttgcaagaattttgatgagatgaatgcaagttatggacttgttgagtaatgataaaaactaatattactataacaattgtgttatagcactgttctatgtacttgaaacagtaatactttgaattctgacgatcctatgaattagaagctacaatctccattttataggtgaagaaactgaggcactgacaagttaaaaaacttgtctaagatcacacagctagcaatgttgaaatgcatcactgtggggccaggcgcggtggctcacgcctgtaatcctagcactttgggaggtcgaggtgggaggatcacttgaggtgaggagttggaaaccagcctggctaacatgatcaattcctatctctactaaaaatacaaaaaaattagccaggcatggtggcaggcacctgtaatcccagctacttgggaggctgaggcaggtgaattgcttgaacccaggaggtggaggttgcagtgagccgagattgagacactgcaccccagcctgggtgagagagagagactcggtctcaaaaaaaaaaaaaagtgtcactgtgtttaaaccaccacagcaaactgtaatgtccgcctctcatgagccactagctgcttcacatgcctttg

SEQ ID NO: 110946 - DNA, 1112 bp, Homo sapiens
gttagctgggtgtggtggcgggcgcctgtagtcccagctactcaggaggctgaggcagaagaatggcgtgaacccaggagacggaacttgcagtgagccaagatcatgccactgcattccagcctgggtgacagagtaaaactccgtctcttaaaaaaaaaaaaaaattagcagggcatggtggcatgtacctgtaatcccagctactcgggaggttgaggtagaagaattgcttgaacttgggaggcagaggttgtggtgagacaagattgcaccaatgcactccagcctgggcatcaagagcgaaactttgtccccaaaaaaataaataaataaaaataattctactaaagtagaaggaaacaattttatttggtaaatttttgtcttcttgcacatttattccatttctttcttttccctcctttctatgttttatatttataggaaatatatatacatagtacaaaattcaaaggatccaagatagactgtgaggaaagccactctctcacctatatcatccagctgtagagtcctttataagaaagcagtcattcttacaatttctagtgtgtccttccagagacattttagacacatatacgcaaataagtatatatatatcactgttttgcagttttttaaactttgtgatctttccgcaaaagtacataaaaagcagcctctgcttattaataaatatactctttcattctatgtataatttaaaaaaaaagacatctcttgatgtttgttaccagtatttttttttccaccatcagtgatgctgcaaaatataggtaattttacatgtgtgggcatattcataggataaacttctagaaatggaattgtaggatgaacaggtagtgacaaattttgccaaatggtttctgatatgctttggatctgtgtctccgcccaaatcttaggtcaaattgtaactcccagtgttggaggtggggcctggtgggaggtgactggatcatgggggtggattttcttcttggtgctgttcttgtgatagtgagtgagttcttgtgagatccggtcatttaaaagtatgtggcacctcccttccccgccttggtcctgctgctcccatctaa

SEQ ID NO: 110947 - DNA, 1958 bp, Homo sapiens
aggattttccgtccaattgtatcttgggtgtgagaaaggaggcaaggactccaaggttcttgacataagtggaagaatggagttgtcctttcctgagatgggggagggctgcagatggagcatgttttagggcaaaaagggggagctgttattccctttgtggttaccatggcttcccaaggtcgctggggctctcagaaggccatgattccaaattagatcagtggtctggactaggccatgactgaaataccttcttgggatgacagctccaaggaatatgtgccccaagggctttgtcctcctcctgagctatcctgttccaagccagacttgcactgagatattgcaccaaatggttttaagtctgtttttttgtgtatataatcaataggcaaacacaaacacacacacacgcacacacacacacacacacacccctaaaaccttgaaaacaacttaaaaaccagggtttcctattagagaactcactgtcctccaaatatcaaaattcaattcaactctacatttgcggggctgtgacgtgagcaggaagacactggttcctagataatgccaggctaaggctggtatagaaaccacatcagggccaatctgaaacgtggctgattgaagaatttacgtaatcaggaactcattggatgaatgatccaaaaggaagggctgcatttaaaacagtagtcactatagcacctgccgcagccatacgtaaaatggaatattgcaataaaaatacggaaaggtgacggaaagcaaaaaagccatattagtgggaggaaaaaacagaaactgatttgtaagattacttcaaaaggctaagaagagactgacaagaaattttaaaaatcgtgtccttaaacgggagcaagaatctatacaaggcaacaaggcgagagcgcagagctgtttatttatttatttatttatttttctacccagctcacagggccagcgggtagattagaaagaaaacaaccaattgctgccaggcgcggtggctcacacgtgtaatcccagcactttgggaggccgaggcgggcggatcacgaggtcaggagatcgagaccatcctgactaacatggtaaaactccgtctactaaaaaatagaaaaaattagccgggcgtggtggcgggcgcctgtagttccagctactcaggaggctgcggcaggagaatggcgtgaatccaggaggcggagcttgcagtgagccgagatcgcgccactgcactctagcctaggcgacagagcaagactccgtctcaaaaaaaaaaaaaaaaaaaaaaaaagaaaccaattgctaaagtagagtagctaaggaatcagaacttgtttcaaagtaagcgaagtagtggccagactaggtgactcaaggcatgactcaaacccgactctggaggctgtctgtcagctcccggaggcggggggcgcggtgtctaacacgttttaggaaagtaccaggcttgtggagggcgacaggaaacctccccgggagatcggcctggggctcctcctgccctagagcctgacctctcactctccgtaccggcagcgacttccaacctcctggcttccccttcctccgttcgaggctccccacccctcgtcttccatccagcgtcacagggcgtgtgcgtgttgtgtgcgagacgcgggtctcctcccccgccgccctccgccccgtgctcccagccacgcgccttcccgccccgcctccgcggcaagccgctcccttcccaccccgcccgcgcccgccgcccgccgcccgcctcccgggcacgcgctgcacgaacggcgcccggagctggtctaggcaaacacctgtcctgccttggctccgcgagatttggggcgaaagcttaggcaacaggggcacgttctcgcgaggtttaggaaatttcccacggccgtgttgtgtctgagccgagtagtggaagg

SEQ ID NO: 110948 - DNA, 5834 bp, Homo sapiens
cgggatcaggccgcctgaagcgcgattcgggcagccggcagcgtcctcggctgtgccaggccctcgggtggcccggttccctgtgcagtagtggtctcaacacacacctgggctcacacacggtggtggctgcgatggggtcttagagaggccatgcagcacgcgagcggcaagagctttgatcgggtcctctgggcagactcggaggtgggagaatgtggctctcaattccaaggcagttttcccttctggagagaactactccgcgctctggcgtgtgtctgcgaggtggccattaggggtgtctttgctagaggccttggcttgacctcatttcacacccaaggagaacgctaaggcgagagagctcaactgcaaaagttttccgcttgaggagctctggaagggcctcctcattagcatgggggggtgtaatgaatgaagacagtccccgacgtgtcacttgcccgaaccccagacatctctggcgctcctgcaccaaacgccgagattagcataaaggaggcgcccagggaacgtttgaatgaatgaaaatagctgggaacccagagtgagcgggaagccgcttggaaaacacccattgaggaggtgtttcatctaggcctgtgaaacgcagcccattttcccaggacccctcctcccttctcctcggccccgcctcctgacccctccattcctcgtccccgtagtaatcccctccggttttcctcagtctccacgtacgtccctcaaagcgcgtcctaaaacccggataaccggagcgctccccatggaccacacggagggctcgcccgcggaggagccgcctgcgcatgctccatcgcctgggtaggtttccagggaaggcagcgagcaggatcccctactctgcgggcggcgcgaggcgtctggctcttcgcggcggcggcgaggggaaagggagcgcgggggctgggtggaatcgaggagtgaggaaaaagggaaggggcgggggagagggaccagggaaggcgtcggggggaatctcgcgagggttggagttttggcgagagtttgtggaagatggcgcctgttgtgacagggtaagtctgagggaatcggagcgccgggaaccgggaaagttgcgggcgtctggcagctcacggcgggcagcgggttcgggggccgcggcgcgcttggcgttcgggggcccgcgggggcggcgtcgcgtgcgccgagcgcggcggcggcggcgtgtggccgtgcgctgccgctctgcgctgccgtggctcaggctccagcgcgtgagggcgggcggcggcggcggcggcgaggccggcgggtgcgggcgtgagtgcggcagggcgcgcggggccctcgggcgccgtgcctcccgcgcgcctccagcgggctctgcctgggggccccgtgcatctttgttcctcgcggccgttgtcgccgcttcgccccgctagtgcccccggccccgggcgctttgtctttcaccgctacccgctgcgactctctacccccggccctttgtttcgccgccttgggcgctttgtccgacccgtggcgtcccgcatcccctctccatctcctcccctccgctgtccttcctcccgtgcccctttgttgtgccacactcttgtcgttagcccagtgacctgccacagcccgggcaccagatttctgccttaattgttcttccattgtctttctcctgtgggtcccctctcacctttctgtatggtcctggatcaccccccgaggctttgtctcccccatccacgggcttattctctcggcacccccttcctctcccgtcatcggttgatttatccacaacccacggtgtacgtctgctgaactgtctcagccccggggactccatctgctgcttctaagtgcacacaagactctacggtttgttgttttgtgggtctgaaagatgcatgggatacttagttttctcctccgcacctctttttctcgggatttcttgtaccctcccgcccccctatcgccacccctttctctcgggattaaagcgtctccaattttcatcgccgtctttttagtgccgtgggttgttttgcttggaaacagtagccttggaaaaagatctggtctcttggtggttcttgcgccccccggcccccgcccccctcctggttcctgacggcgtaggccaagggcagctgtctgtcgaagctttgcaatctaggctgcctgaggatgattggagggtatcgtaggacggttagaaggaggctcaagatgtatatatgtgtttttctgttagtgtttgagaatagtttcagatagccacaatggatattcatttggcgtgtgagtaggagttgagtgaatttccatgttaaaaacttgtgagtgttggggcggagaatttcagcattttctagaaatctggatttagaatttatcagtaacttctgcctcataaggaaaaggagaggcattccgcttgggaattttatataaatgttttattttttcttaatcattagatagtttacagttatgtgctttttgctgccctgtagatgcgtgacaacccttctgtcccatcattggggttgaaatgaggacagcaccgaagagtgcagtttctggtcgatgaatactgcttctaagatctttgtggaagatattaatcaaatgcagttaaaaagtatacgtataatatgtatattatatatatatatacacacacacacgtaatagcctgtagtgagattattttaaagacacttcctagtgttaaagaacccttgaagtgtttcgagttcttattgttttggtaatgctaaaagcttggggttgtgtgaatgggggtggggggtgtggtgtgatgtattctaatgacttgagttattctgggtgctaggaataagagttattatatttaccaggattactatgctgaaggtattcttcaagagtttgttttttttctactggttgatctctacttttagaaggtatgttacccataaaatcatttggagtgtcatttcatttacaaactgaagttctacaatagtgaagtgttgttgataggggacatacgagatctactctaacgagtattggagcattggaaaatacttttttttctggctgtgattagaattagtagtttgagttttaattaatggaaaaccatgttttcatgattgatacataagtttttttgtgaaaatctgcagtctgggtcgcttgagtgggttttaccaataatcttatgtctcccttacttgttcttgtacataatcattgttttgaaggtaaaatcttgagctcactggttctctgactgggagcaaagtgtaaatactgtgtagtaatggaaggtattttgctctgacttgtacctgtaagaatgattacacagacatgataaaagcgcttttaccatttgagttgcgtttttctttctaaatcgtgtaatacttttacttacatgattggtgaaataaaactgcttttaattaaattataacagcagcatatttcgaaatctggatgcgttgtggctggagaactttcattctgagtattaactgttaaagctttaaattttattatccatgcatattgctgatggatctgtgagtatattttcagaaaacaggagacttgcaatattttcaaatctgtactaatacacacttgtaggcattagattttaagcagttaggtttgttaaaaagttatctgttgtcctataccaacagatttctatcaatgttttttttaagtgggtaagatcaaaattggtttggttgacaggccattcttgccagatgtaattcattaaataacctttggcacccttgatgggtaaggcattaggaaaaaattgtttcgtttgaaagttattatacatctcattcttctgttcatttttagaaataagacccaggacttggctttaaagcattattttgcattttgcttcctcctaatactaaatttcatgttatctcaactaggggcagtattttctcatggattgactaaaagttgttatttttggcatctggctttgtgattatttccaagttactctacttcccctgggccagtttcctaactatgtagtaaaatgggaattataataacttgccacatctgcacaggattgctgtgccttaagattcgcagagagcatccttggatgaaaactgtggggaaggtctaggaattgttactgaaataagctaatgtgaagtaggtcatattttataggaagtcaaataggaggtttttaagttcttggcaagacacagtagcgatagtgggattttttaaaatcccaaatatgtattataatatgggtaataaaacagatacctttattcctgccccccataaacttatagggaaagggacaaataaaacaaattacagggtgatgtgtcgtgtgtgagtgtgtgtgtgtgtgtgtgtgtgtggtgtaagagattgaagttctgtcaaactcaaatgtaataacattataaaattatgggatgcctttcctcttttgttttctgcatgtagcaatattctatttatttattttattttattttttgagacagggtctcactctgtggccaggctggagttcagtggcacaatcttagctcactgcaacctccacctcctgggttcaagcgatcctcgtgccttagcctcctgagtagctgggattaccagcgtacaccatcatacctggctaattttgtatttttagtagacatggggtttcgccatgttggccaggctgatctcaaactcctgacctcaagggatctgcccaccttggcctcccaaagtactgggattacaggggtgagccaccatgcctggcctgcatgtagtaatatttaacaaatggtagtacaacatgctttcactggactctaagccaagtctgttaatagcagtgattaattttaaatatgccttatattttttagtgctttgttatttgctcttaagaataaattctaataaccatgactataatttcagatttgactcttggccttagaaaagtgttttgcatttgaggagcactctgtagatacgtattgactgaatgaaacctgttgcttctctgttcttggtagatgataccatattccgtttggttcccaaagccacgattcctaattcctctctcaccagcctttacatttaattactgagaactgatcatttttccttctaaaaaatctcttgaatttgtttcccttatcctcactgccgaagttcatgctgtcatttctcacctggtttactatgacgtactgacagcctctttctgcttctagagtcaccacctttatccagcttctacatgtagcagagcagtctttctaaagagcaaatctgatcactgcttaatctaaaaacctttcaatggctccccctagcagcgttcattaagagaggcaacagagtggagggttatgagctcacatttagtgtttaatctgaactgggttccaattctgtctctggcacttaaaacccctgccagttaaaacccctgtaacattgacaagttaatctctttatcaattgcaagataattattcctaactcagaaagttgttgtgaagattaaatgagataatgtatgaaagcatttagcagaattcctggcatgtagcaagtgctcaaaagatgttagctactgtggcgcataggatcctccataactatttcatctgtctcttctccagctgagttgtttgccattttctctccataatcagtgcttcagtcatattaaagtattttgacatctctgcatgagcccagcagtttaatgcgtt

SEQ ID NO: 110949 - DNA, 4496 bp, Homo sapiens
gttttaggaaggcagcaatgtatttggtgcagaggaccgcaacccttgaaatatgtgctttggcattttaagcagacatatttgttaaattactgcttgaccacgaatgttgtcattgagtcacccccagctttttggggtctatttcttactgctctcttctctgcttgggcagctgtaacaatgtaggaatgttgaatgtctagctgctactatctctcagactcttatcctgcccacagttctgtatgcctcttaggcctggcacaacatcatggtgttgcttatgcctcattagacctgctgcttaagggaattaaatgataccctaatggtctaaaaagggtaatgtatttccgaacatgtcatatttactgtaggaggttggggaaggcgtcacaggcactgtaagtggtagtaattacctatccgtatagatatttgtgtaattttgttgtgttgagacaatgcataatggtaagtttgagagcttttcagtcatattggtgaagtttacggcaatcttgggaatatttatactattttaagtttacaaaaaataaaatatagaaaacacatttttttaatgcattctgagttgcaaaagccttgcaatgaaaactgcatctatttgatgtgaagcagaatacactagagaatcaagttgaccctggaggttttttttttttttttttttttttgtattcagtagtcttagcctaagagctaatgattatctgtgcattgttaatgagatgataatcagagttgtaagtgataagagtagtttctcataaaaagtttacataacaggagaaaaaatatttaatgttgggcgcagtagtagctcaggcctgtaatcccagcactttgggaggctgaggtaggaggatggcctgagcccaggagtttgaggctgcaacgaatggtgatcatgccactgtactccagcctgggtgacagagaaagaccctgtctcaaaaaaaaagtttttcactctataaaacttttttataagtatgatattgtgttatagaagtacagtattgctttatgaaatataaatgtaatattgtagtttttttaaaataatgtgaacagtctattatggacatagcttaatttcctccagtacaaactagctttagactggtttgcataaatagaacaaaggtatatgttcccttttggaaaactgcagatctgcaaagattgtgcctgattttgccagcatgttttttcacatctttttttttttttaatttgataacatttttcatgcaaaaaattacctagatctgtacaaagctcctaatccatacaccatttggagtaagcagaaacactggggtcctaagacatgtaggaggggtgttaaggaaaatgttaatagtataaccatgctttagtggctctccttttagtattgttttaataacaatatatttattaaataagcagttgaacacttattaggtataagacactctttgtgctggtcctataaagatggctaagaaatggtttggtgaagctcatgacttggtagagtgtacacaggtaattattgtgtaagggagattatggtaagtgctgtaaccgatatttagtgttggtgggaacacagatgtaaatgattatcttcatttggagttcatagaaaaggtgagagttgatagggagtgatgggaaattaagctggaaaagtaattgggagcctcttggaagaccttgagtgctaacctgattatttggttttttggctggttggtgttttttagagacagtctcattgctctgttgctcagcctggaatacagtggcaaagtcgtacttcactgcagcctcaacctcctgggctcaagggatcctcctgcctcaccctccccagttgctaggactataggtgtgtgccaccaaacccaggtgtgcgccagcaaccccagctaatttaaaacattttttttgtacagacagccttgctatgttttccaggctggtccagagctcccgggctcaagtgatccttctgccttggtctcccaatgtggtgtgattatggatggcctaaggtgattatttgaatattaatcagggatacagaggacaagggtaaggtattgaggtttttgtttgtttgtttgttttgacggagttttgctctgttgcccaggctggagtgcaatggtgcgatcttggctcaccgcaacatatgcctcccgggttcaaatgattctcctgcttcagcctcccgagtagttggggttacaggcatgcgccaccactttcagctaattttgtattttcagtagagacggggtttctccatgttggtgagactggtctcgaactcctgacctcaggtgatccacccgcctcagactcccaaagtgctaggattacaggcatgagccaccgttcctggcggcattgagggttttaagatgaggtagggctggatgtaaacagtgtaaaatagattggaattggtggacaccataagagaaatataatcaaaatctgattttggtggtgggcctaggaatgaataggccaagaagctctttttgaggcagggtgatgtagggaacttgggaataattgtactgtaagtcactaaaataagtttgtggctatgagcatttcacttaagctaggtcttttcctttgtctaaaaaatggaagaaaataatacctcatggtattgatgtgaggattaataagagatagaaaatgcctactgggccggctgggcgcggtggctcacgcttgtaatcccagcactttgggaggccgaggcgggcggatcacgaggtcaggaaatcgagaccatcctggctaacacggtgaaaccctgtctctactaaaaatacaaaaaattagctgggcgtgttggcaggcgcctgtagtcacagctacttgggaggctgaggcaggagaatggcatgaacccgggaggcggagcgtgcagtgagccgagatcacgccactgcactccagcctgggcgacagagtgagactctgtctccaaaaaaaaaaaaagaaaatgcctagcttggttctggtaatagtaggtgctcaataaataggttctccttaccccttttctgaagtgtggaatttaaagggtaagatgggagtggggtacacccccttcagaagggagggtaggaaaaaacctgaaattaaaacctggtgataaaataatcagaaaagggaaagttctgagtaaggtgaacagatacaagagaacctttttaacaaagtgttgtgcttattgtaggtctttaataaatgctggatgcttatttttgcatacttctgttacacttaacattgttctgcaattatataaatttatctgtaattgattgtttaatctgtcagtgagcttcataagaaaaggagcaattattttacttaccttgcacaattgtggagcacctaccatctgccagaatgttatttgctggatgaatatggcttgagcagatttggtaatatataacacttgccactaggtggctcttggtcttgataaagctgacattcagcatagataggtttttctacctagaaacccacgtagaaactgacccccggattatattcacttttttgccttttctgtacctatattttttgaagtggaatatgaaacacatatcatatagaaaactcatttagactgttgaaaattagaaaagtgtaatgcctttagaatatgtcctgtagaaagaagcagaatggaagctcaatgaaattcacaagtgaacaaagcacatttccccatctctcaatgtgcttaaagtgaggcatgatggtttgattttaggcattgttttttgttgttatgactgcgtaaattgctttaaaggaagatattgtgaggatttgtttctcagaggatttgatgaacgatgatgaagcgtggtgtgtactgatgctaggctatgattctgtgtgctcttatttgtattgtactcttcctattgagaagtaacataccatctaatggtaacttacataacatagaaaggtaactacatcctgtgtgacacgtgtgatatatattattaaatccattagattcaggaaattttagagccagagaagaccttactaatcatatattctaaaagtacccattcatttacacagacaggttagataatggctgagacacattcagtgactgagctagttcctggtttgttttagggggaggggaaggcctgtgttagtcttttgtttttgaaacagggtttgctgtcacgtaggctagaatgcagtggtgctgtcatggctcactgcagcctcaatctcccgagctcgtaatcatcccacttgagcttcctgagtagttgggactaggtgcacgccaccatgcctagctgggttttgtagagacggagttttccatgttgcccaggctgatcttaaacttctgggcttaagggatctgccggcctcagccttccaaagtgctgggatta

SEQ ID NO: 110950 - DNA, 1346 bp, Homo sapiens
cttttaatgttacatgcatttttaaaaaatagccctttttctcatatgtgcagacttagagcaagactgtaaatccctcagcacccaagccttgatgggtagagtgcggcggccagtgttgcttcattaaatggtcagctcggagcctgcctgctctttcctcgtttgctgtgttcctgtttttggtgctgcttatgatctttgtcttgtatttctaactgaccaggtggcctcttcaggaacatagttgtcctcctcactgcacacctccttatccactctgcttcagttgctcctactcgagaactggctggacgcagttacctctggcttactccagtctctgcctcttttctctctagcttcttggttatgccacctgcaataaattgcagctggctgtttccacagcctctggaagggaagatggaaggacagaggagagtgaaaagaaagaaggctgtcatacagagaagagaggctacaacttgaaattttatactgaaagatgatctggtttatgaacatgatgatgatgtgtgtagtgaattttttctagtgtatatgccaaggcaatattattctcttgactatgggattcattaagtctgttgtatctgtcatccatgcttatccacatgtcaaggaagtgaattaatttcagcattcccaagatagaagtgatagtatatggtaatttacttacagcttataataatgagtgtcattatttgattaaatggatattactaattaatgggagttgccatgtcactattgtaatgttaaaaaaaaaaagacctttcagaggttatttcataattattggtaagtaagccattctttgtcctggccttcctcccatgtattcaatgtgatatgtacactttgcacacaggatttactgacatgtcatttacttaaacagcagtttcttaggtaccctaagtcctggaaattgtcagttgcttaaataattaaatacaaataaatcagctgtccacctaagctaccatatacatttttgtttaaattctaatgtaatttaaaaggcatttatttaatttttagcttgttttcatagttatttcagggaaatgaccatcttgatatggaaatttttcttagaaattaattgatttcacatctgtataaaataatcatcttgattatttttcttgttggaaaagtaatgtttgttataagaaattcagaagttatttatttacttcttgagacagggtctcgctttgctacccagactggagtgcagtggtgccatcatatcccactgaagcctgaaactcctggactcaatccttccatgtcagcctcccaggtagcta

SEQ ID NO: 110951 - DNA, 1625 bp, Homo sapiens
ccaatttttaggtttttaaattctgtatacatcctgtgtggccttgggcaagttacttaattgcattgcaacttaagttttcccttttgtacaaaggagagcatacatgagaattcttctgaggatcaaacgtgtgtatgcaaaggggctgcaagactaggcctggtctataaggattgcttaacgtccgtttcctttcttaactcaagctactgccatgccttttattcatctcttgacttggtcttgtttttattttcccttatgcttacatattaaaacctgattttcaccccaggccatcagtaaataacctccttttaccagacccccaaacctcatttcagtcatcagcctatttcatttttctgcatcttgtgttttgttttgttatgttatgtctttattcttgactaacaagctactatctccacttcttgattattccatcttctctttgctacttctcttccaatcttaagtattgtgatttgcagtttttgtcttcctcttgctgtattctttgactttatgtctgtgtcattagtgtggatgtttagattcgcattttaaaaattcctactggttgttctgcaggctcattaaacttgccttttccaaaacaacttgttctttttaccacctgtatctgtgataccatcctataaaatagacttgatatctgttatagtgctgttgtccatctggctgccacaggtaaacgttaacttcagtaacttccttatttcctcccactatcagtttttcttattttcttattattattattattgttttcgagatgaagttttgctctgtcacccaggctggagtgcagtggcgtgatctcggctcactggaacctccgcctcctgggttcaagtgattctcctgcctcagcctcctgagtagctgggactacaggcgtgtaccaccacgcccggctgattttttgtattttagtagagacagggtttcaccatgttggccaggatggtctcgatctcctgacctcgtgatccacccgccttggcctcccaaagtgctgggattacaggcatgagccaccgtgcccggcctgcatccattatttcttatcagatattctgcgttctcttctttttgctcgctgccattgccttactctccaggctgcttcatctcatagactattgtcacagccatgtcaacttccccagcccacatatgcttacttcttttttttttttttttttttgagccggagtctggctctgtctcccatgctggagtgcagtgctacgatctcggctcactgcagcctccacctcctgggttttacgccattctcctgcctcagcctcctgagtagctgggactacaggcatgcaccacctacgcccggctaattttttttgtattttcagtagagatggggtttcactgtgttagccaggatggtctcgaacttctgaccttgtgatccacccgcctcggcctcccaaagtgctgggattacaggcatgagccaccacgcccggcaatgcttacttctttagtctgtagttttggtgtttgttctgcatgtgagtatttgggggtttgtagggggatctggtcacctaattttgttgtaaatggtgccc

SEQ ID NO: 110952 - DNA, 2052 bp, Homo sapiens
gcttgtaatcccagccatcccagaggctgaggtggaaggattgctggatggcagatttggaggctgaggaaggatagctggagattaagagttggagaccagtctgggcaacataggaagaccccatctcttaaaacaaaacaaaacaaaacaaaacaagtgttgcgtgtgtctgtagtcctacctacttgggaggctgaggctggaggatcacttaagcccaggagtttgagattgcagtgagctgtgattaaaccactgcactctagcatgggtggtagagcaagaccttgtttctttaccaaaaaaaaaaaaaaaatttctttagaaatttaagtaagcttttgatgttttcacatacattaaaggatatgggtaggtttttctctttaaaacactgtatatgtagtttttttctcctgataacaaaaataacaaaatataaaaaggaaaaaacgtaattctaccaaaacacattaacattttaaggtatatttatcctttcaaagttaaaaataacttttaccacctccctaaattataaatatattgtaaaaaagcctaaatggtagcgtagtgcttccttgcttctgcccctgatggtctttgtttagcgttttttgtttgtttgtttgttttttgagactgagtgtcgctctgtcgcccatgggcgatctctgctcactgcatcctccgtctcccgggttcaagcgattctcccgcctcagcctcctgggtagctgggattacaggcgacagccaccatgcccagctaatttttttttttttttttttttaaataaagacagggtttcaccctgttggccaggatggtcttgaactcctgacttcaggtcgtcctcctgccttggcctcccaaagtgctgggattacagacgtgagccaccgcacccagcctgtttagtgtttgatgcatagtattttttagatggctattgaatgcatgtaaatgcgtacataatcttttttaatcttgttcttccatctgtccttctgttggtcctcctttcctctacataaattgaattataccaattcagcagcatattgttcttcttgttgcttgggtggttaaacagtatctcttctgtagctctggctatccacaggtgtggctccccatgcttactggctgctttgaggttgtttccaacttttttttttttttatactgctgccacaaacatatctgtgcatgtgtgaaggtaaccaatatcttgatacctttaagtggaatcactgttttttccatgaggttattggccatttgtattttccttgtgaaatatatacttataattctttatccttttttttttttttttttttgaaggacagggtctcactctgtcacccaggctggagtgcagtgctacagtcatagctcactgcagcctcaacttcatcggctcaggcaatcctcctccctcaccctccccagtagctgagaccacaagcatgtgccaccaggcttggctaatttttaagtttttgatagagagagcaactcaccacgttgcccaggctgtctattcatttatgtcttttctcattttgtatataagcacttttattttccacatattacttttgtcaattctatggttttttccctagtttttcatttgtcattcatttttatttattttttgtcatacaggagttaaaatttttaggtaggcaggtttgtagtttttcttttggctttgtgtttttttgttgtttttttttcatcttcctcaccctaacattatggaaacattcttatgtgtatttttctttcttttttttttttttttttgagatggagtgttgctctattggtaggctggagtgcagtggcgcaatctcggctcactgcaacctctgcctcccggattcaagcaattctcctgcctcagcctcccgagtagctgggactacaggtgtgcgccaccatgcccagctaatttttgtatttttagtagagacagggcttcaccatgttggccaggatggtctcaatctcttgacctcgtgatctgtccacca

SEQ ID NO: 110953 - DNA, 1431 bp, Homo sapiens
tcctttctcccatgcgtggttaacttagtcatctgacaacacatgattgagtgtgctcactaaccagacaagcctctcagtccaggcagattatagatctgaggcaggagagtaaagttgaacagggaataggtttatgtggaattttttttgtctccctgtttcactatacaattttggaagaagggtttgtgcaaaaaacacaggttgctagtcatgaaacacattctgttcaccactaattaatttgggtagtatctctgcttcacttttcttcagtgtaatggtatctctgacatgctagggagcttaggaaaatggttctagcattatataaatgacaggtattgctattagcaatgactcaagattctcatgttttttggtattctacatgtcatccattctttctattatactggagtacttttgttttatgtaaaactgttgtataaatgtcattttaaagtctctgctgtcaaattttgttgttattctaagacagcagctgtggatgtggcttaaaaactgatgagtttctacaatgatgagcctttatggagcaatgaaaggctgcttgtaaattgtagccacacttgcaatgaattctgtgtttgttattgtgaatccctaagggtgactgttttttcagcagggcgagttaggacggcacaaactgagagtttctgttctggtaatctttacttcttatgactttaaggaatttggaatatttttgcttgactgttgtaatgaatctctaaacatattatttggatatgtgggcagataaattgtaagatatgttatagacgtggtttctgtcatcaaatatttttgctcacagtagctactgtgtgtaatagcatttatagatgatgctttacctctagttactgcctaaagatataaatattgggttatttgaagctacatatttccagcttatacatatgaatagtttaaggcatagtgtatgtacccacttttatttcagaaaaatacaggttgtttgtttgtttattgttttttttttgagatagaatctcgcgctgttgcctaggctggagtgcagtggtgtgatctcagctcactgcaactgccacctcctgggttcaaacgattcttgtgcctcagcctcctgagtacctgggattacaggtgtgtgtcaccatgcctggctaatttttttgtacttctttctttcttcttttttttttttttttttttttttttttgtgacggaggtttgctcttcttgcccagactggagtgcaatagtgtggtctcggctcactgcaacctccacctcctgggctcaagtgattctgctgcctcagcctcccagctaggtgggattacaggcgcccgccaccacactcggctaatttttgtatttttagtagggagagggtttcaccatgttggcca

SEQ ID NO: 110954 - DNA, 1639 bp, Homo sapiens
gaaatgacttttaaagcagaagagaaaaaaggaagggtggaatagcaacaatggaaacaaatgaggaatcctgctccccaccccacctcaaagcccactgtatatgtggggttatggtcagtatttctggtgttagagtgtatatttgcaaatctctgaactgtttatatgtatgaatctcatcataatagattcacattcttcttaaaggcaatgcttaacatgtttcctgatcataagatgttcatattgaagattttaaaaaaatacaggttgaatgtgctgcttaaaatgagctgctgctttatttttaaacatttaaaaaattttgttaaatttagtctcgttcttcctacaaaagagcttaaactttgacagtaacagctgttcttttgtgtgggacatgttttcatgaggatttttgtgcacattaaaaataaccatttttgtgaatcgtagttattattcatagtcactttataagagatataaaggttttccagtgagttacttctgattcataaccaaattatagcagagcagatgtagactaccagtggaataattagccaaaaaatattagggggctagagatctctttgtgtaacatttaactttaatttcttggacagcttatatgaataattaaagtgttgaggcagttaaaatttattttcctctcttgggatttcccagttgtcatagatagctgtagtcactagggaagtagaaatattatttccagcaaacagatggctttcctcgtattggtccccaaaagcgcctactgaggtttgtgtttctgttggatgatttcctaatcacaccaactcagtatacttttgaaagatcacacctggtaacagaatatgatgtaaatattaatatgacttagtgaacttgagagcatccaaaattgtaagtttatatagttcctacatccctggggagagtagtctgtccaatgagaggaatcgcctggtagctagtactttacttttcttatcacaagtcccctttctgcctcagttgtactctcagggattcccaagctgctacttctgctttttaactctcattaactctgtcatctacgtgctattttcatttctgcttagtcagatgactaccccatcccgtactttgaggcattggtaggtttttgttagaattaaggataggattctattatgtatggggaagattttcagagaatacagtgatgctggggcttaaaatgacaaaatcacatcttttctaagctctataatgaagcttttttggagatttcacttgttactaatctttctctttttaaaatgtctgtttttcttctcccattggaaattaaaacacacacacacacacaaacacaaattgggaatctacatgtatatttatgctagtgaaatttcaaaaatagtcaagtattagtgaagtggccacattgttggagtaaatacttgggggttcatcatctcactcccaaaaaatttaggacatggacatgcacgaggagttcaggagtggaggtttaataggcaaaagaaagagaaagagaaaggaaaacagctttctctctagtgagagagaggggacttccagagaggaaaagactggcgactgcggatgtactgga

SEQ ID NO: 110955 - DNA, 1645 bp, Homo sapiens
gtgtatttttagtgtattaatatatacaaagttttgaattataaatgtgaattttgatgtaaatacaattctcaaaatattaatataatccaccaaataagttaattttaaaatggaaaattggatataccaaaaatcattttagattcttaatatcatttagcggtgaatgtgtgtttttccctatcctgcctggaaaagccattcctaaatattttcttccattcattcaacaaatatttgtgtacctactgtgtttaatggcatatcagatatacctgccatcatgaactttctatatttagcttatcaatcatatattcgaagtacagtcgtaacattttcacatatttagtagtttctagtgcctattgtgttgcgggctttggtggtaaagtgatgataggtttacagagatgaaagacaaaagttatacccttgggacctcacagcataaaggaaggagactgtagtaactagcatggaagcggaatgttttctagacagtttcataggtgcttttttttttttttttgagacagagtctcactttgtcacccaggctggagtgtagttgtgtgatctcagctcactgcaacctctgcttcccaggtcctgcctcagcctcctgagtagctgggactacaggtgcgcgtcactatgaccagctaatgtttgggttttttttattttttttttcttttggtatttttagtagagatagggtttcaccatgttggccaggctggtctcaaactcctgacctcaggtgatccacccaccttggcctcccaaagtgctgggattataggcgtgagccaccgctcccggcctcatagggtttttaatacacattactgaagataaaaatagagtgcaactagataaaataaagatttgtagttctgtgaaggatacatttgtctggaggagcagagtgtaggaaacaatgtgatatcctttcaggagtgagtgtgtgtgcgtgtgtgtgtgtgtgtgtgtgtcacattcagagccattaggttgttttaaggaggaatgggaaggggccagagggatggactaatgggctaaaatcatcagtttgaaaagacggttgtggctacaggcagagatttcactggatcaggtctcttgtttctgttcttcattagtttcttcccacctactctggtagagttctttcactatatataattctgtcgccattatcagctttctgaagagtgacctacattttatagtctgcattccccacaatctacagtaaatctaaatcttaaaaatacataattttttctgacagtggattgaaagattttcatcagttacatctactctttcaaccaggaaatagtttcattttctccttagcacttactttttagccctagctgggaaactttcatctttattctttacacaagctgttccacatgcctagagtggaacagcttgtgtaaagctgttttcatctacgtctttcctaggaagctctttttatggcttgcgtgtattaaaaatttgccttatcagtcatcttaaagtaatttaaattgctttatgacagtaaatgaatatatttattgatcagttatcagttttactttgtgtagcttgagtgttctttcttgtagctacatga

SEQ ID NO: 110956 - DNA, 1024 bp, Homo sapiens
atttaaaaaattaatattgtgattattgtttatttaacaatgtatgtatgcagttattcatgtgtttgtggtatatagttttgctgttacttgtggttactagtatagtaattctagtcttcgtaatacctacttaatcaaaaaccttttaagtttttatttttataaaattttgagtgatgtaatgaaaattttcttaattatatgaaatcttggaaacctgattttcatactgtgtgtttggtattaaatgttctttttaaagagtagtagaagtgagtgaagaatgctgaattcattaatgttacatcagattcagaactctcttttaggtaataaaagaaacaatattgggaagacaggtttaaataaatcatgggtagataagtgtaatagaaatacactggtatagtccatgatttttgtcagttagtctaccttaatgttaaaatccttttggtatgttagcagttatattcttaatggaatttagttgttaaagtaagatgaaactgctttatattaaactctagtctataacagtgatctaatcaagttccaagatagaatcatctgcttattagccaaggcaatcaattagttcaatcaggaattttatgtctgatgggacagaatagtatccaccctccaaaaagatattcttggacataatggtttcaggatagtgttcaatgtgttgtttacaaaattgtttctttataatacttgctatctcaactttaacatttctttttggggtagcacttgagaatccatttgttttgttttaactccgcagaggtttttgatgtacagctagattgggaagtcctgttctatttggaagacttttttttttttttctttttcattttcttttttttttttttttcttgaaatggagtcttgctctgttgctcaggctggagtgcaattgtgtgatctcggctcactgcaacctctacctcccggttcaagcaattctcctgcctcagcctccccagtagctgggattacaggcgcg

SEQ ID NO: 110957 - DNA, 2251 bp, Homo sapiens
tgctttgtttcaccagattccccctattccacattaaccccttgtcttctcccagattatccaactcttcctactcttttccatagcgttgttttggctttttggcattgtaagaggattgctttttttcccccttaagttatgtttactcacttcattgtcactgctttccacctcatactggttatcctgttggaagcacgaggttttgtgttgtctctctgtggaatttgtttcttcaaagctttgtgtctttcctttggttgtcatcatgcatgatagcagcgtgtattctttttctttggtaaatttctccgcctagagtgtactttagaaggaaactaaactgcattctagtttagttggccccaaactgagatcagtagccagagatggcacccaagggtggtgaggggattaaaaatgcctgtagaagtgttggtggcagcagctaagcagctagattaatcaaatgtgcatgaaatttaactttaaataaactcctttgttgttgaattttctgtggaaaaactaacttgagtgagaaattctagccctggggcagggataggccagagataaatgacacaaatatgcttataaaatggggggtgactgggtgcaagcagaacacactgaaagcattcatatttgaaataaacagtcactatctctgtagggagccaattttcaatccttggtctactttccaaatctgttctttcccctaccctcattagcagattttgcttattttgttgactcctgtaactccatcccctgggacagtgaatagtcataacaggtattcagcaaatattagccaaatgaatgaacttttgatactactaggtttttaagacatgcatctatcttgtcatggcagaacaggtcatactcttatttaccaacctcttaatttacaaactgagagaatagctagatatataagaaggtaatcttattttgaaatgatttcaatttctagaaatttgtcatcactgaactcttgtgaggtggggattggtacatctgaaggccaagaatatctgagtgtgttatgctaacaatgaatcaatattgcgcttacaagatttcccttaccaaatgatttacccagtcttcacaatagctctgcagattgctaacaattaacattcctattttacagagacggaagctctagaataactataaaagtgttgggattttttctttgtttgtttttgtagaaaaacctggattttgaggaagcaaaatgtggaaagagtttatgtaataattcaccagatttttctcacagtggtagatatccaagtgtgagattatttgattgtgatctatgctcatattccacagaagaaaagctctgtatttcaactaaaacatttccatatttggggctgaccagatttggtttgttaggaggtggacagttgcccttttatggtcactagatactccattgctctcttttatttctcttcaacttggtggctgtgacactccctcaaacaatcttttctttctcttttttttcactgctcttttgtactccagtgttctctgctttcctccctctctcttccaacctaccagcccctttctctctcttctcctcccattcctcatttacatgcagcctgaacaaaccaaagagtttgctgtacattctgcctgtaaaagaatagtatgtgaacattgcttttgagtcagcgaactgggcaggtcaagtgagaagttatctgaccaacaaggatcaagtcaggaggatgctgggaatagcataaatcttagatcttaggagattgtccaaaaaggagagagctgatccaggatgagtagtagttttcagaataaaggccttgtcaaatataataactggaccagtggttttaattttggagaaatgctagaaccaaaccaaaacattgataaataataggaaaaattaacagttagaatgactccctttcaacttgatttttgttccaaagttcaaatttttacttagaattaaggttttcttttcaatctgaaattcttctttatatcctgagctcctaacattttaaaagcacaggtaatcaatttgttaactaataacattatgtttaataatgtcattattttcttaaacacagtggtatattattgttactatagtaaagaattgcctgggtgtaattgctggagatctgaacatggtgtatcacattttccaatcaattagttttagactcaacaaaac

SEQ ID NO: 110958 - DNA, 1012 bp, Homo sapiens
aatacaacatggacggcagtgcaggtagctttctatatctagctatggttagcccatcacaatttgttgattgcaggtaagatttgaaagtaaatgcttttaggaaagaattttaaggaaaacagtttttacccattttaagaaaacacacgttttatctatttttaatgagtataagttgtacaatatacattttaattatgaatgttgaaagtattggtcttaaaaatgatttttaaaatttctagcagccagaattgtaaaataaagagacctagttctatggccatgtcctagagtcagtgcaaaccttgcgtttttagcagtttatttttggtgtctttcaagaaaatgagatatatatatatatgtatatgtatgtatgtgtctgtcctttttcttcataaactcaactgagatcacactctatcattgttctacaccttttcacgccacttaacagtacatcttctaccttgatatttccccttaatggctccatggtttttcatagctttcataccacttttaatatttcacattgatgaccatttaggtcatttccaaattattgctattattttaaaaagctgttacacttaaagaacgatggggacctacagaaggatacaaaggacagtttgaaggggaaatctgggacactttggttatcaaggtaaataatgatagtaatggattaaaacctgtataataaaacaacagctttgaagtctatactgagataattaatctcaggataaatattatttatataaataaaagtcatttataattaataaatggggcaaagaggatagcttttccttacagatgcatgtcgcctaataaatgtagaaggacaaaaacctggacaaaatatgtaaaaaccgttttccaggtattgaacatcaggtatagaaggataagtgattcctgagaaactgggagtccacagagggcaagacagttagcagggctgcaaagtggagaggaattaactgtataaagaggt

SEQ ID NO: 110959 - DNA, 1081 bp, Homo sapiens
tgacagacccttagtaacagacccggatctatttcacaccaaagctatacccctaatcactaacggtatgattttgtcctcacaagctaggctacgcagatttgaatcctcactcttcagtatcatcttgggaaagttacttaacctctacccagtttctaaaatgtacataatagtgttaccctcaaggtcattggttatgttaatacatgcttagaagagtactggaagagtgattgcttaattttagctcgtttaatgattataattaaaatctttgtagaaagcatttgtgactgcctcggatattatcaaataccaagtttgtgtcctgttttacccgagttgtcatgaaagggatagaaatgtaaaatatggatcttgcctttaaagactttgtagtctatttgggaagacaagaaaaataaacatgaaacctgacaaacacaatgcagttactgctaaatgatgtaatagagactacaaatacaaatagaatttagtatccggaaatacacttaatggcttaaaactattcaaatatatagtagctcttcaagttttgtgctgggaaattttgtgccagttttgtcaggatattggccttctcttggctttgcttttgttttctttttctttctttcttttttttttttttttttgagagggagtttcactcttgttgcccaggctggagtgcaatggtgcaatcttggctgactgcaacctctgcctcctgtgttcaagtgattctcctgcctcagcctcccgagtagctgggatttcaggcatgtgccaccatgcctggctaattctgtatttttagtagaaagggggtttctccatgttggtcaggctggtctcaaactccagacctcaggtgatctgcctgcctcagcctcccaaagtactgggattacagccgtgtgccactgcgcccagcctgcttttgttttctgattcaccctgaactctatgttcagtcacctgactttgcaacacctcaaatccctcatcatgttaccctctccagactgcatctctggtacccagcagtttggtctccctattccctcccttg

SEQ ID NO: 110960 - DNA, 1055 bp, Homo sapiens
actgaggaagggaattacattattaaactacaaaattactgcattttattaactttataatattttagagccacattagcagtgtatatgttgattctagttattctggaaggtgtaattgtggtttgagttacatcataaattccaaagaatgagagacagtttcttatttttaaagaacaaggaatagaattgaaaatgagcagtattcattgtatcattgtataatcttccaatttaatttatggatttactttgctttattgtttttgtttttaagatttgcttatttaaaaaatatttataagcattcctctcattacagagcgtagtaatgatgaaagatttcatcaagaatttcacctctgtaacagtaatatttgtatttgtttttagggaagctatgcgaaattatttaaaagagcgaggggatcaaacagtacttattcttcatgcaaaagttgcacagaagtcatatggaaatgaaaaaaggtaagattatttttctggtggatagttaattgtagttaccacatgaatttgccaattatgtattaatatacatgtcagaggatggcttctattactgggttcatttgctagtacaaaataaaaaataggggatttgtctcctgaaggggagaaacaaagtgaattgtggtatactgttaggaatagataattggtgctgtgaagaaaagtcagcatggagacagaggacctctcagcaaggcagtctttactttctgcagaaagggtgcccctcgcagatggaacaatggagagagcacacttgaacaaaggaaaagcagacatatttgtcccttacgcatttgggtcatccttactgctgtgtcctgcatccattggctggagctggacctcacagtattaaactgatacctgatttgctactaacataaaactttcctaaatacgttaagtgcaagggagaacaaagaagagaggaagttgcttacaaaaggtttaagaaagcaataacatttccaaataaggaaggggcataagctatgagctaagacttgcctgggcct

SEQ ID NO: 110961 - DNA, 7451 bp, Homo sapiens
ttgcctctaaagtagtctggttagggttgagcaaaaagtaggttccattaatatattttcagtcagttcagtagataatattgtagaggctgagggggaagcaaacaagaagtagatactaccaccttcaggaagacctgagcaccaaatccagcctgctggtgtctgcttgtgtgtgcacatatgcacataaagtttttttcttttagtctgcacgttgttggcctacagagtgttaataagtgtaaattagttgccaaatttaaaaaaacagtatttcatataaaatttgatttcagtcatctattgaacaattggaggacgggaccaacactaggcctgcatgcccatagttcagccacgtgagtgtgagtgggtatatatacactagtggctgattatcattgcatttaagctctgggttttcttatactaggattaagaaaagtaagccattttctgtactaataacagtacaagaagtgagaatgacaatggaggctgtgtgtttcaagaaagaagagaaggaaactacttctttgggtaactaaaggatattcctaatttttttttttttaagacagagtctcactctaacccaagctggaatgcagctgcactatgacagctcaccacagccttgacctcccaggcttagttggtcctcccacctcagccaccagagtagctgggactataggcgcctgccaccacgcccactaatttttgtattttttgtagacatgaggtttagccatgttgcccaggctggtctcaaactcctgggctcaagcagtccgcctgcctctgcctcccaaagtgttaggattacaggtatgggtcaccgcgcccagcctggatattcctgtttattgtacgcgccgttcacccatttatattacttatgtggctactatagttaattcgagttttcaggccctctagagagatatggcatagatgttttaaagtgtgtacaagtcaacattataattgagcaaaggtgaatttacaccctatataaggactggattgatggtctgaactatgtaaaatatgagccttgagctaggctttgcaatagataatatttttaattgctaaataaaagattataagaaaatcattctcagaagaacttgtgaaggtggtttttgacaactagcaaaacaaacctgtcatattctgtgagttgaaagaatacagtgtattgttctttgagcatgagatatttctcagatatctacagcgcaccaggtgttccaagtgtgtataaaattcaaagatatataaaacacagcactgctcataatcaggagatccatgtatttttggctcttttgcttagttttattaatattttggatgtttctactatggacaatgctctaacacaattttccaggttaattaccacattaagttaaatgcagtatccataatagtaatgtcactcattaatgattgtgtcattttgaataggccttaattagtaattacagatttttgtggtggtttatcgtgttttgtaatatgttagagtacactggatttgctgaactctggtaatttagaactctgagccatacaaagagaagttctgtactctaaaaagtatttaatctaactgtatgcataactccaatattttgcctgaacagatttagtcattgtggaagtcccgatttctgtcctgtgggcatgattatttgcattacaaaaggcttcaccaaaatttttcattggggaataggtgcatttcaatatgattttgtattcataatgttcaaggaaaggaaatgctttattgaatctaattgatttttgcttcttgtttttttttttcccctattattcttcaggtttttttgcccacctccttgtgtatatcttatgggcagtggatggaagaaaaaaaaagaacaaatggaacgcgatggttgttctgaacaagagtctcaaccgtgtgcatttattgggataggaaatagtgaccaagaaatgcagcagctaaacttggaaggaaaggtaaatcaagactgctagttcaccagaaaggggcaccatggtaccagaatgtagttttcatattcatttttgtggtggagatttttttctttaataactattggtaacaatttcttgaatatataaactaggaccaaaaaacatgcctctcatagctttggtctagtcactcatgaagcttacgctgctgacattggaaggtggcatgcagtaagcttccccagcttgcaagcagttttagcagactataaatcagatttctattggaagccagtaataaatttaggaggctgattgctcatcttctgtttgacagaggtttatcaacaaaaatacattgttcagtaatgttttactctgctattttaatcttagttttatactagacacgatgatatatacattgtggaaagcatttatctgggttataacgatcataaacgtttacttgacatcagagtgaagcagagtgatactgtagacaagaacagccacagttggctttactcaaattttagtgcgtggcaggggttcttcaattaattttctagagaaaacaatctatcagctagttttactgattatattgtatgaatttagaaagcagtcaatctagatctttttttttcttcccccgggacagggtttttactctgtcacccatgcagaaatgcaatagtgcaatcttggctgactgcaacctccacctcacaagtagcgggaccataggtgtgtgtcactatgtccagctaacttttttgtatttttttgtagagatggggtttcgccatgttacctaggctggtcttgaactcctgagctcaagcaatccatccacctcagcctcccaaagtgctgggattacgggtgtgtgccaccgtgtccagccaatctatacttttagtattgaaagatagttttttattcacttagaatttagctatggttttatttttccttgctactgtactttggaaaatggttagttctgatctcaatgactaaacatcttctaaaatagcgcataaacagctgtttcattatttgatacatccttgttgaatattttagtgtttgctatgttgtagttggcactaggtatatgggttgggagtagtgttggtggaggtgagctaggggatttgtactctcaaattgaattttagtgattttacagatagtactacaggtcttaatgtcaacctccttcaaatttagctgtttgtatgtcatttatatctttatagtttttgtaagtaagatttgttgactatgtattttaaattagatttgggataatacttattacaataaagattgtttcatcttaaaccactaaaactatttctaaattatgatccctgagctaaagtaacgaatatatttaagtggtgggttgatctaatagatcttaagtcttgtctcatctgttttcttgttacctaggaagtctcagagttatatgtctccaggcttcacatgtagacattcagtactatgaatgagtggatcagataggtagtgagaagccagggattctagctacctgtgtgtataactgtttaatcctacttcattgctcattttaaccagttccagcttccagtaattttaaatgaggtgataccaaataaaccaaccagtagtatcactgcttgcctttcgcagcattgtggcttagtagtgccacatcctaattttgtacctttaggggctgcctcaacatggagatctttctgctgtttttcattatatctttcttcaacttccactagtataccctttccccaaggcctagaaactggcagaagaggaatagaatacctgagagcttgagcatttaactagtatttaaaatacctagtaataggttagtacaatgtctgtaagccaaaattatatgttaatatttaattttaaggaaaaattctattagggaagtttatgtaaagcaagactggtgagagttagtagaaggcatcccaggcagaaaaaaaaacaatataatcatgtgcttagagcataaaggtataagaacatggttttgaccaaggtaggcaaagatgtcctgagcagcggattctgagcttcagtgagaggcactttgctcttgtctgcctcacttaaactccattcgtgtaaggaaatagtctgttcattgagtggtacaattagttattgagaaatatgggatattcattttgcaatttttggtgtttatacttattttaaatattcactgcaacaaaattctagtatatctagccctttaaatttatggtcatgacatttggctgtatgtaggtaatatgttggatcttagattttgtgtaatgtttttaatttgttaaaaaaatttacattttttatagtcacagctaggtaagctacgcaacaaggatgacttagttaacactcttgtgtttttcttatttttaaacatcatatactcttggtaacattttgtttctataatttaaacatttctgcagtatcactttgcagcattagatttggtatttcttctttctttcagggaaatgtcttttattgcctaaagatcttgttttcaaagagtatttctagagagatgattatatgccattttctcttctagaattccgttagctaatttaaccttttgcaatagcaaggcaaatgtaattttagttttatttgcttattttctatgagtcagtgactttttccttcttttcttaatggaatttgagtagtttgtggtcagtggccttatagttttttaaaactaatagttcccataaaattatcttgattatgatttttgtggattcaaactactcattgtaattagggatatatttcctttctttccaaggagatatatgtgtgtttgttttttccgaacaaaatgcagttctttttgtgtaggtcttatgatccaaccttcttggttctttttttccgttcttgtttgccaatatgtcttatttatgctggatttcagtattttctctttctgatatggatcttaccttttaattttaacactcaaaagccatctcaacatttttaagctttcccattagaatgtaattaccttcatttagatataaatttcatttttgcttcccatgactgtctgctttagtacattgatacccattttcatagacctcgtcttatgttgcagaagaatttcattgtttaggcttaatttgaccttcaatgctgtctgtcacttttaagagtatggccgacctatgggtatagcagctcacagatgccatctctgagtgcgttagagatcttgggtgcaaggagtgatgtgactgcaaagtactgttgttttttgtttctttatctttattcattttgagacagggtgccaccgtgccgcccaggctggagtgcggtggtgggatcacggcccattacaacctctgcctcctgggctcaagcgaccgtcccacctcagcctcctgagtagctgggactacaggcatgcaccaccatgcctggataatttttgtgtttttcgtagagatggggtttcaccatgttgctcaggctggtctcaaacttctggacttaagcagtctgtccaccttggcctcccaaagtgctgagattacaggcatgagccaccaccctggcctgtttttatttattactatgattggctttatcttatttttgccttctacagagcaaaacctctcaaagcttttaccaaacttttgatttttaaaaacttagttaaatgtataatgttcaagatggcatctaaattttcttatatagctttgctatgagaaatacaataaactattgcagtagttttgtctgctaccgaggctgtctgtgaataaaattttaaagataaaaacctagaagtcattaactgtttcctgagtagcatttgctctgctttttaaaaggaagatacaggagaggcagttgaagaaacttgtttagcttaattttaaagtggaatgttgatcctttaaaaaatataattcgatactttagatacttatgctgtgtttcagcatcatttatcttatctggaaaaggacaataatttagacccctccctgattcacagggatcaagagaataggaaagattttagaattgttatatataatataagcagtagcattttgaagggtctttgctgtttgtaaagtgctatatctctttatcttttcagttatcagaatttaaattctggtaaactgacataatgccttgagcattttctctagtacctttaaattcagttcttctggtgatacatatgaatcgtccttttgggcaaagttaaccattttaaaaatagttctttaaagtaatgcttatataatctctttctggtttaagatattttataatcatccagtttgtctatcattgttttcctcaatcttataagtgattactctagtgttcagctatataaagaaaaatattttatgcactattttgagaagaactactgctaaaatcttttacataatttcttgaattctgatagctttattattattttttttttggagaaagtcattgattttttttaactgtaaaatttattttaaaagttactgctgtaacgttgagtgataattccatgatacagttgtagagctatgtaaaacaagaaaaggctgtttttttaaatggtcttttaaagaggatacaatagatgacaatgtttgtgttctacagactttataaggaagactttgtacttttccgaaatcaatttcagtaatttttatagttgataatttttagagttggttttatcagctatcccttggaattgttttacttattacttaaaccatggccattctgagttttaggtactacataaacaaacaaggttttgctgctgttaaaactttacttttctttcacagaactattgcacagccaaaacattgtatatatctgactcagacaagcgaaagcacttcatgttgtctgtaaagatgttctatggcaacagtgatgacattggtgtgttcctcagcaagcggataaaagtcatctccaaaccttccaaaaagaagcagtcattgaaaaatgctgactgtatgtatgcttttcttatttatccccaactgccaccatgaattaataagacagactcttttttaaattaaaaattgccttttcaatagccaattaattctttactaatatttttgtggccctctttattgtctctctttttttaatcgtaaatcgacagtatgtggtctaatgaagcagttcttaaccagagttggttccttaatgctcccagggacattctggggaaatgggagattttctccttctgttgttacagtgactggagggggtgatgttggctttgggtgtcttgagcctgtggtgctgaattgaatgtcctgcagtgtccaaggtag

SEQ ID NO: 110962 - DNA, 1120 bp, Homo sapiens
cgcccaggctggagtgcagtggcaggatctcagctcactgcaacctccacctcccgggttcaaccaatcctccctgcctcagcctcctgagtagctgggattacaggtgcccaccatcacgcccggctgattttgtattttttagtagagatgaggtttcgccatttggccaggctggtcttgaactcctgacctcaggtgatccacccacctcgacctcccaaagtgttgggattgcaggcgtgagccaccatgcctggctgagactttcaaatttatataaaagggagaaattagccacccagcctcaacaggttttatcaattctgtttcattatctccatcaccaccaacacctcttcgtcttctaattgctggagtattttaatgtaaatctcatcctatcctttcaaccaaaatttctgcaatagtgactaatacatgcccttttttttgaaacatcattatacgtaacagttgacagcagctcttaagtgtcatctaatatcctatttcatgtacagatttatcagattgacccagaatgtctttttatagtttttttgctttgttttgttttacagtggtttgttcaaacatggattcagataaggtccacacattttagtctgtaatagtttcttctcaccctctctcacctttgttttccttctatgtcatttatttgttgaagaaactggatcatttttcctgttgtggaattccatattctgggtttggctgattatatgtttctctgtctctcttactttccatgaactggtggttagacataaagactttcagaactgattggtaagatatacatttatttccattggattggaagtcataatatctgattatccccttttttttttttggtcatgttgagattgattatagtagttcagctgttgtaagtctattccacccataaagttcctcagcaaactttaacctaatggttttaatagtcattgatgatgtttaaatccatttcattaaatgctgcaaaatggtgatattctaattttttaaattctaacttctgcattcgttagctggagttttttctacaaagagggactttgccatatcagctatttgcttcaattgt

SEQ ID NO: 110963 - DNA, 1061 bp, Homo sapiens
tcttggaaagtgaaaatatttgtcaaactgttaaatgataagaaagaataattatacactgccaagcagaatttccttcttttgctccctccccaccttctgctccaatcacataaataagagctgttttttctttgcagtatgcattgcctcaggaacaaaggtggctctgtttaatcgactacgatcccagacagttagtaccagatacttgcatgtagaaggaggtaattttcatgccagttcacagcagtggggagccttttttattcatctctgtgagtataaaagtgtgcatttaatgtttttagtgtgaaattgttaaaatcttttgatgagatacatggatatattaagttttgtcatttgcctaatcataaaataaatttaaaaagatgacaatttgatttatttttccacctactgcagtggatgatgatgaatcagaaggagaagaattcacagtccgagatggctacatccattatggacaaacagtcaaacttgtgtgctcagttactggcatggcactcccaagattggtatggctctacttttgctttagtgataatgtgaagtaaaaattaatttcttaaacaggaaaatcacaacattcaaatggaaaaacacacctcagttttatgctttttaattttaaaaggtatgttagtaatcagtgctgtttataattgacagttatgctctaccttatttcagaaatgctttaaggtaatagccagtttttacaagtacattcttaatgattttttcttaaatgatttccaatatattttggtggcaatttcctttttggctgtttatctgaagatgttcagtagagggcactataaattacatttcttttctttactaatgcggataaaccgtattcatttttttgtggtacctgccatatcccaatgtaggaccaagtttgcaaacagaagacattcttatttcttttgaaatataagcgtaatttttgttagcttactctctcacaagaagatagatttattaaaactgaaataaaattggtatttctaactgggagcagggca

SEQ ID NO: 110964 - DNA, 1521 bp, Homo sapiens
agcagttgtagtggcgtctttgagataaaaggttggagagattgcaggagattggacagtgaggaagaggcgtttgcagaaaaacaggtagtgagagggagggacaggagcatgtagtcagtgttttctttacttttgattttgagatgagagatagttatgtttgtatgttgttggaagtgatcaatagaaaaggaaacagagtaaaagttctgtgtcaaattttgctcttcatcatgatcatctacttagccattaccttctaggtgtcaagtgtcatatagggtttgatagtattatctttcagatattcatgtgttttgtagactagttgcgttataagctttagagatcagttggacaggcagccagccctgggatcaggacatattctggtccttcagctactaaactggtaattttgagcaatttgtctgacctttctaagcccattttgtaatctgtaaaatgagtttgattttgttatgtttttaaatacgtaagttttggataatagatataagacgtttgcactgacagtagccttctagagatttttccctttgatgttggagtatttgtcattttatgcatattattggaaaatatcattagaacttgctgttcaaaatatggtctgtaggccagcagcattaacatcaactgggattttgttagaaatgcagaatatcaggccccacaagagtcctgctagatcagaacctgtgtttttcacaagaaccccagctcatttatgtgcacattaatgtttgaaaaacactgatctagaaaacaagtgcctgcctgcctgattttttttttttagatgttcagggaagagggtaacagtttctacattctgacatgcttgcaatctaaaagtgttttttattcctagtctttttgtttgtgaatgtttttatatatgtaggcataggacaaataactgtgatgtattattatgcagtatatagcttctatgtacttttgatgttttacacaaggaaaatcctttccatgtgtggatgaccttttatttcttaattgttaaatatagataattaggaaagttgataagcagaccgcattattggatgcagatgatcctgtgtcacaactccataaatgtgcattttaccttaaggatacagaaagaatgtatttgtgcctttctcaagaaagaataattcaatttcaggtatgtttttaaattactggtgaaatctaaaatgtacaaactgtgaggttagcagcttgcaaaaatatgaaattttcatttgctgttaattatatacaaatacatgaagctatacacagatatttatctcaggtatgagcatccttaacacacaatcctcagacatgcaagcaatccttcctcaaggaagaactcaaaattatgaaaatgttctcagagaaaacagttaacatctagttccagggttcttaattgaagaacaaagagcccctcaggatatccaaaaatagattttcagtgctcattgaatcctctgaaattgt

SEQ ID NO: 110965 - DNA, 1781 bp, Homo sapiens
tccctggtctaggtgtgttaaggtaggggtaggggctttgccttcccatcttgattccctcccatggaacatgcataagcttctagctgttgcctaagcatgaggagtcccattgtctttcttaggagtccttgaagagttttaaacagccatttacatcacagatattgatctgctgttaatgaaattgtacctgcattggtatactcataatggttgttctgaaaggtattattatttaatatgtcactgaaatagtttgtattataagaaaaactgctgtctatggggtttctgtattagcattctgtttgtgtttatgtagggattggcaaagcaccatactttagaaagtttataagtttttactgagttatcttcttattaactcttgtctgagggttacttggtaaaattttcttatcctattaatacaaactgtataaaacttagtttctaaacttctttctttattaggccactccatgtccaaaagaaccaaataaagagatgataaatgatggcgcttcctggacaatcattagcacagataaggcagagtatacattttatgagggaatgggccctgtccttgccccagtcactcctgtgcctgtggtagagagccttcaggtgagaacgcctagtccaagttggccttcagctctttgcagctactctcagctgtgacctggcatcatttcatttcatgggagttttgatttttctccaatcgtctgattaggggatttttatatacaccatttgttgatttaaagaaaaaaaaacaaaattaggaggagcgtacttgccagaaaatttaaatgtaaataaacttgtatgttatcttgaaatgtttttagctagctttgtaataaaaaacattttaattgcccttttttaaaaaaaacaaatgaaagttgaatgagaatctaatttgtgtactttaatgaaaaatgaaaagttttctcagtgttgtgattttctgtgaattgcagttgaatggcggtggggacgtagcaatgcttgaacttacaggacagaatttcactccaaatttacgagtgtggtttggggatgtagaagctgaaactatgtacaggtacttgataaaactttttgcatcatccagaggttgtgaggggtgtgggtacaggagattctttcctggcactgattgtaatgtattaaacaaccttgtgttaagtctcatttttaacatgtactttgctttttaaagtgtttttaagtgatttctatttcctcctcaggtgtggagagagtatgctctgtgtcgtcccagacatttctgcattccgagaaggttggagatgggtccggcaaccagtccaggttccagtaactttggtccgaaatgatggaatcatttattccaccagccttacctttacctacacaccagaaccagggccgcggccacattgcagtgcagcaggagcaatccttcgagccaattcaagccaggtgccccctaacgaatcaaacacaaacagcgagggaagttacacaaacgccagcacaaattcaaccagtgtcacatcatctacagccacagtggtatcctaactaccgtctttttgctaggacttaaactgacttgagtgtggcaaaaagttaacaaaaaaggagaaaaaatgaacaatcgtttgtggtttcttgggaaaacttttcataccaggtgatactattcaaaaaccccgttgtctccctgcaagtgctgatttgaaatgcagaagccacagtaaaaaaaaaaaaaaaaa

SEQ ID NO: 110966 - DNA, 2904 bp, Homo sapiens
tagcctagccagaacatcattgtaatcttaaaacataagatgcttttattagatgatcaactaaaatagctggaagacagtactttagaaacagatagttgtaagattataaaatgcaaatgtaacttatgttttcatttttttctctgccttttttgtttgtttgttttctcttttccagtactgagcatctccacaaatgtctcctaactcagaaaatgtttcttttcttttcagttgagatttggttgcattcagggttgtaggttggccttgcttgctaaccccgccggttttaccgtgctttcattcctgaactttgtttatgcctttgtttggtttcttcgaaattgcagcagactcattgggctacatttagtacaggaaccacgtgtgtaatgttatacaacacagtctagtaatacaatcatccctcttagagtaaaaactacctctagattgtggtaagcttttactgtcccataaaacaggagccacagtaccttatgaatgcaaaactgtaacttcctacagtgtttccctacagaacattgtctttctggtgtcctgggctgttttgaaaaagtttccattaatagactttttagaaattattattagtagcattttttttccagctttgctgtcttcatcactcactctatgctcagactatgccactgtaaatattcttcctaacatctttaaatcgccttttcctcagttttcaaggggaaggtcatttgtaaagcacgttaggtggttaaatcagttattgcggttttctcttactgcaagcctttttaatcacccccaggctgcattttattctatatcgccttttttcttcaaatctgctccaatcactcacttctctcttataagctaatcctgcctcacaccttaaatctgtttcagtgatcaagggcagaactcattgtggccttatctttctttgttgtaattgttcactgtctctttcttacagaccacttatttctgagtagtagttattcctctctatggagtcatggcaggaatcattacacagtgcttttgttcagagcatggacatgttcctagtgctgctttgctttaacggccacaagtttcctccacttcctaggtttggtatttagttaaggaatcatattaaattaaccaataacaaaagagatacttttgaagaacaaactattccttacccatttttgtagctcaaaaataatttttcaagttcatgaccttattaaaatgaacttgtgtttttttaacaaacatgtatgttttattttgatagtttctttccgtaagataattgaaatattatactgtaaacccttttcttttctttttttgaaaagtccaagaatgtacttatacaggcatttttccccacctatttttggccattctcataccacagactaaagagtgaaatgatttgtccattgtagcttattgtttatcagtagttcttttgtcagctgcttacattttttctttcatggttttgtgaatcattttcagtatgtaatttataggaaccttgtcctctggttatagtagactgtgtgccctcctccagtgatggcattattagacatgctggtcatttaccctcagaaagactctcttattagaatggtgagtgcttcagttatagtatgtttgaatttttaaaaaattctgttttagaaatgtatcttatgctctcatgactatgcagtttctaaacatacacatagaagctgagtctctgatccaatatgtttttatttgttccatttaatttatcacatagattgggaaggcaagctaaaagccttaaaaatgccctttatattttgagtgatttcagcgttgaacactagtatactatctaaatttgctgctcactttctttaaactgtggcaattaaaggcatgtttatacatgacttaatcgtgaaatgtttgtcactcttactgcacagacttatctgcaatcataactggttagtttttttgttttgttttgttttattgtttttaatgaaactggtaccatctgtgctttcacaaaaaacttccaatgccatttttgagaactaacctaactagtcatgctaaccagaaaatccactggggaggaggttccttttgaaacaaaatgctgttcagttagtaaccaagttactttgattgcaaaagcagctgtgtttctgataagtactgaacaaatgtgtgtaattttctgtgccagacttatgactttgttttcaagcactgtaatgtgggatggatggttagaaacaataatatattagggtttctgtttaaccctttcaggactgaactgtatctccttttgttaattttcccctgtgttgtgataaatgtttgccagcattcagtactgtgttggtccagatgtaggtttatatgctcatttttagcttatttcttgtaccttgcagcatgctctacgcattcagtccttaaggggtttattttacaaactgtgcgcctgtaaggtttattagcaataagatagaaaattgagcaagtttataccataattttgtagaaaaaaagaatctgctcagttccatatttcatccgtgaaaaacttgcaatacgagcagtttcaaggaataaataaaaaggaaatgtaaaccattgtaaaagtcttctgtcgaatgtgcctgatgcatgtattatcgtcttttatttcagaatacttcataaagataaaattaaattctatattatagttggtgtatttacaatcttaccatgtacatcacatcaaagtgatagctctactaatttaatttccttgtcaatgtttttaactatatagtgctttaaagagattttttttccctgtgtaaatggtgaaatgggctttgtcactcaagg

SEQ ID NO: 110967 - DNA, 1116 bp, Homo sapiens
cagctaatcatcacaacatcctgcaaactgggtgttattttacagaggcggaaactgtaacacgtttacgcaggtagtgtcagagcctaacaattcgtggttgtaattcgcagtatcattgcgtgccacagtcctgtttctgcagaaattgagaggtggaagagaatgatcctttatatagtaaaacgcacaattctccgtgtcccccttgtgcatcagaggcgctgtggctctgaaagaatgagctttcttgcctttcaaccatagacaaggcaggaacaacggtgtgaaaagcgtcctccccgccccggtctttttccgccggcggaacgcagatgctgtggccttcaggcgctgaggggaccagagagggacggacacaaggctcggcagttgcctggtaacgcccgctggaggagtcccagtgtaataaggtcccggagaagtgtcactggccctgagtgggacccggtagcccgttcgctccgcgccggcggcctgtccccgcggcttggcgggctagggcaggggaaatgttgcaggaggagtcggacctctctctcattattgcccagatagtccaaaagctcaagggctccaatttgtactctcagctggaacggcaggcctgggtaagtgaggccgagtgggaagggatgcagacgggcggggccgcggcgatgtctcttcttcaccctcctcacccaagccagagctcgcctctgacctctccagctccgctctggtgctcaaaaaacaaacagacaaaaacaaaaacaaaaacaaaaacaaaaacaaaacaaaacaaaaaaaccccacctccctgtccggtgcaagctgtgctgcctcagccccaggcgtggttaatagatttttaaagaagggtggggcgcatcacacctttttttcagaccagagaaacgcttactcatttatctattcctgtagtcatttacagggtctaattttttaagctgctggactcactgaaggtagcttggaccatgccttccctcactttttccgtcctgtgggtggacttgggcccccaagtacctttctgctttctcgtcaatgtatcactttcttgcagtttaccctccctgcaattattcc

SEQ ID NO: 110968 - DNA, 1002 bp, Homo sapiens
ctgttacttgtcaattacttattgaatacctaccatgtggcagcaccgtactaagcactgagcatatagtatagaacaataaacaatttctgccctcatggagttcatagtctaacagagttcccaagtctaattgcacgtctgctttttttttttttcctttactgctatcactgtatttatgtctgtagcattctctagtgtttaacattcccattttcaagttgacctttccagtttgttaactgggaaatgacataatgcagcttaccagaattgtttctaaaataaagagactcagatgaacccctatgcacatgtgctttagatacaatttttaaagaattagcatttgcttctttgctttgctcaaatccatcttcccagttggatttgaattcttaaataatgttagatataagtgctatctaataattgaagttgactgtgaccatacctttagcagtactgtgacagtacctttggcagtcaccaaaggaatagatatttatcatgacaagtaaggttttaaatttacaatatgtactaaaggtgcctgttgtgtataattccaaacactggattctcaatctgaggcaatattactgatattcctgaaaattgttctgtgtgacctactgaccttttacttgataggggagggactatgttttattcattatcatattgttggcattctgtacaatagaactttaagtatatattttctgaataactcgttgggatttttttttaagcagtccagtgatattatttttattcctcatttgggttctgaacaaattaagaaacaagataaaacaaaaaagcagatgggagatcaaaattacactttcattaccgataaagactagataggaggacatagcttagtatgagagcaaaattagtctttcagctgaactccagaattaaatggatttaaccttccagtcaaatagcattggatcaggggcagtatgttcagtttattcttctcaa

SEQ ID NO: 110969 - DNA, 1045 bp, Homo sapiens
aaatggtgagaactctttggaagaatttggcatcccactgtaatgcttaccaaaggtataccgataaagggcattcttcccaccgcaaggcacggtacttgaacttgaaggatgcctcctgagtaggaaataatgaattacctggttttataatagtgcttaattgctattttttttccaatgttatattcaggtattactttgtttttcccgggatacatctgtgttgagtcactttgcattcaacagtgcctcgccaccaaaatcatacataagaggtaaatttttaataattttaaggaagtattaagacttacataatcatgccaagaatatttgttttatttttggagatagtggtgttgccaaattattataaattacttaagatttctctcagatgaccgtaattatcctttcatacctcaaatcagtgcccaagtaatttatcacaaatcacgggaaagtggttcccagaagcagcatttcaagttactttctctgtcttccctgtgtgctctaccctttattgttgtttttatgtcatatctgttgacttttctttttctttctaagtttataacacagatttgctttttctactttttttaacaatctatacttctctcaaaacgctccaccacacacaaaactttgatacaatttatatgcttttagctctccaatgtctagtttagttatttttctcctctttatcaccagctgcttataaaatatcaatatcctgccatcatctgaagatacaattaacttcagctgaatgcccttcccaacttttcctttttattaaatggtgaacacccaacactgaaagctcagacttcattgtgtatggtcattctgccatttccatgaagaaagaaactttctcctgtatctcttatgtctgaactatctgcctgattgctccacctcctaccctaggagaggccacataaccttgtgctggatttcagctacccctaacataaggttttcttaggtccattgcttctaaattgaatttatggaaaccttttgtttg

SEQ ID NO: 110970 - DNA, 1083 bp, Homo sapiens
aacttgaaagcgtttgttcttttggttgttttgtgtcgcttctgttgtacttatgttcgtgttactttaattgatgaaagggtttgctaataccaaaagattggctggtacatttttaagttaatttcatatcatgaaatgacatatcagtttatagtagtttttaaaattccgttgttagtacattcacaaaataagttgatttttaaagatttatttacttaatcatattgaaatcctctatggttttctcttataggaaaactaggactggaagaatatgctgtcttttacccaccaaatggtaagagtaatgctattgcttcctctagtgggaagtgaaaaaattacaacttttataatcaaaatgtgactttcttattctctttaatggataatcatttattatctaaaataaaccttccatagaatgtataatttaatgaaatcctccacatttgtggtaggtttgtgctaaattatgcatactctctctgattctccctgggaccaacagtaaacctgtgagaaagctgagtatgcttagatctaagtccaaggcacttcattttcctgtgaagaacactagctaatccaatgcagaccttccttttgggttttttggagctgggctttactcaattgagtggattatcttgtattgcaccttattgttctcataatttgaccaatgtagtatttatgaaacaaaaatattattaaaaggtatcactgaaatcacctattttgatgttataaagtgatcaaatatataatgacctcattagacattaaatattcttttgagataactagacaggttttaagatatgcttcttggaaaagcaatatatagcagtccttatgataatattaagttgcatcctgaagaagttcttttactccagcagagttaagaacatgggttttgtaatccagcagacttgggttcagatcccaattcttccagcttatcctatgaccttaagtaagttacatgacttctctgaacttcaggttcatcatctgtaccatgtggataatagattacatgagatatggtatataaaaccacaaagtgcc

SEQ ID NO: 110971 - DNA, 1041 bp, Homo sapiens
tagttagtgcttggctcctcgcaggtgttcagtaaataaatggccgttgttgttataattataatcatcattcttctttgttagtgaaaatcaagtattgatttgtcacttgtttgccaatttcatatttggctaattatcagttataatagtacatattttctttgtattcaataaaatgatcctttggcctacaatataagaatcaaggaaaagcatatatttaggagttgaacattttaatctgttctcttttggctgttcctttatcatatcttttttttcccttcccataaacctgactaagagcagtatttattttatttcagttatgctttttttccccctttggacctgctgtgggtaacatgactgctactccaggtgaaacattcaattggaatatatgtcagggctactaaatttccccaaagaggcaactgtattattgctatgaaattaaatagctgttctttatccccccattctaagcctatatattcctatttcaccttcctccatctccagttttgctttcatacatcgctagtgaaagttggcaaatcacagaattccaggatgttacagataaacaaatgaagcaacaccagttatcctgggtttcttatctctaagagaacttgattttgttcttatcttactttaatatttaatctggaataatcagaaatatgaccaataattaagattaataattcttttctggccgggcgtggtggctcacgcctgtaatcccagcactttgggaggccgaggcgggtggatcatgaggtcaggagatcgagaccatcctggctaacaaggtgaaaccccgtctctactaaaaatacaaaaaattagcctggcgcggtggcgggcgcctgtagtcccagctactcgggaggctgaggcaggagaatggcgtgaacccgggaagcggagcttgcagtgagccgagattgcgccactacagtccgcagtccggcctgggcgacagagcgagactctgtctcaaaaaaaaaaaaaaaaaaaaaaaagatt

SEQ ID NO: 110972 - DNA, 1140 bp, Homo sapiens
cagttgaaaatatcccaaagtgtagacctttcctccctggcaaacaaacctgttctgtggaagggctgggcaaaccaaacatgaggcagatggaaaggaacttctgtgatgtgacaccaagataaataaaggttatgagcacataagcattttggatgctgaggtcaattagtgaactgctctttttttccccttcttatctacctttggagaaacagtttcccactgtgtaaaactctttcctgctggagcagaaaatttggccagactgtcaagctttcagcaactatgttcaattatatacaaaaaaggaagtagtaatcatactctttaactgctaaaatgcctgcactatataaaatatgattccagatattaggaagtggtaaaaaattgttggtctacagaaatagttttctttgatattcttgtaaacatgaaactcagtgactttaaagtattcatgttttcttcatttcagttaaggagtaaatcctttgttgcagatctcttgtatctactgttacatattcactaactccagctgacttgacttttaaaattttaccattctcatctttttctccagaatttttctctctgacgagttctaatgcttttttgcccgactgtccaaaatctctagtcccctagaaaagtgcctgtgcttcccagttactggttgcacttggcctttatctggggaaattaagagacctggctgctgacttctgttccttaggcacaatgaccaggaccactgtagcagcatccttcatgccatctctggaaagccattctgatagacagcagagccaatgatttttaggaaagcacacagattttcatgtcagagatgagtagttgctgcttactttcagtctcaatagtatcttcacatagtggttagatgcacaactccagagccaaggttgagtattggctttactattttctacctgggtgcctctgaacgtgtcaccccacttactatgcctcactctctatattagtaaaatgggctattaatagtatttaactcacagaattggtatgagaatgacttattctctttgtaaaaatgtattttaaaaaatatatgtgtttgcattaggtatgcagtatacctaggaaccagtc

SEQ ID NO: 110973 - DNA, 1037 bp, Homo sapiens
gaggatgtttatgcatcttgtaactgaataaacattagttccatctcaaaatgatttcctgcagtcagttactacttacactagaataacaggactaggattcataatgtatgcttatttatagaagcaagttgaaatgttaaacctgttataaactcatgctaccttgtatatttgaagaagactgaggctaacatccaggttattttctacagcacatttcagcattttgcacatgtactaacattaagatattctgaaaagagaaggaaagttgtagctttagtattaagatttaggacaaatccaaagaaggagcttagtgtcaaaattacattgtaattatgtttaccttatttcatagacttcgctttgctattaataattctttttattttttgtttcaggcagttcttgctgacctttctactttaaaagttatgcctcttcttcagatttttctgtttgctactgtcacctgatcttcttcacagtcactggcaacacatctagtttttcattagaaacaaatcatgaactatgcaaactctgcataaaaccaaaatgaaactttgcatataagccaataaagatcatgttccctcttcagttaaacctaagtagtttctcactttttgaaacaataactctgcaccaaatattgcatcgcatgctgctgattttcaagagagaagcaataaacacaacttctgctaaattgagcattatatatataatattataatatatatataatcctgacttgtcaatggcatgtaataatatatgcaataagaactaaagatactgtaataaacttcaagaggtaatgtagcttcttggataattcttttatgtcagtttataaatttatctctagataatgtattgttttgtctcataaattgctcctcactaagagccaggggtggggtagggtgtgagaacacttgaaaaagataatgtttttaagtaggaattcaaaagttgcttaaatggtgttttaagcaactttttacaccccagggattttctac

SEQ ID NO: 110974 - DNA, 1084 bp, Homo sapiens
cagcttcctctgcttagaatgccttctcttccctctttacctaactcttacttgtacatcaaaacccacctcaggtattgcatcatcagggaagactgcttctcttaagaatccttaacccctacatatacataagatgtattataatcaagttagcttgtctttcactcccactagactgtgactccttgaggacaaaattggattccttttcagccatatatctctagaatctagcattgtgtttgccccataatagactttagtaaatatttattgaatgaacgaatgacatcatctattctaattcactcatttactgataaaggaatttgcggagttgcctttggaagtccaaaaggaaagaatattttcagaggaaaaaatgaaatggttcagtcactcttttttttcatttaagttaactttattaagtataatttatgtacaataaagttatatgtatattttatgtaaaataaaatgcattttaagtgtacagttctataagtcttaacaaatgtatatacccatgtcaccaccaccacatcaagatatagaacatttccatctcccaaaatagttccttttgtgcccctccccatccaatcccccatacacgcattcactccaaccactcatctgcttctgtccctaaagattagattcatcttttctagagtttcacgtaaatggaatcatccatatgtacttttttgtgtctggcttcttttgcttagcatgttttgagattcatccatattatgtgatagtagttcattcctttttactactgcctaggatttcattgtatgagtatttcacaatttttttatttaccattgttaatgtacattcatgttgttttcagtttgggtgtattatggatacagctactataaacatttgtgcacaagccttcatgtggacatatatcttcatttatctggggtaaataccttaggagtaggatttctgggttatgtgtaagcacgtgtttaacttagaaggaggcctccaaactcttctgaagtggttctactgttttacgttgccaccaacagtatatgagttccagtgtttc

SEQ ID NO: 110975 - DNA, 1046 bp, Homo sapiens
tggggctatcaatttggaagttgtcagcctatagatgatatttaaagctgtgagactggctaagatcacagatcagagcatgtggatggacagagcagccatcagaggggaccctcatactaggtggtctgggaattcagaagaaccagcaaaggaggctgaaaagaggtgaccactgtgagacaagacctagcagaatgtaatgtcctggaagtcaatgaagagtattccagaagaggtttatgcatttttttttctatgctaagaataaactctttttttttttatcctggttgttgtgtgtaacgtaattagttcatttccattgttgtataatattccagtatatgaataaaccatacttattattaaaaaaaagaagaggtttatacattctgtcagtttctgctgctgaacagtgagctgagggcagataacagcattagatttggcaacgtggaaactactagggacttaacagaagtgaaattggagcaaaagactgattgggtggattcaagaaagaataggatgagaagaaatggcaatggcaaatttagacaccactttttgagtgagttttgctataaaggaatctgatgaaacaggcccagctggaggcgaatatggggtcaggaaaaggccttaaggtgggaaaagtatatcttaattgtatatcaccagaacatctgggatgcattggctgaagcaacctgcgtaagcatacgatttctttgaagtcttaaagatgcacttgaatttttccttttattctgaacaataatctgttttaatttataagtactctattctctccaagtccttgagtacaatggatcccccagaagaaacatactgtatttgtcctatttccctgcagtactgcaaaggctatgcatacactagtctgagaagctgggttccagccaggccttccaggcctctgctcctgagcacagctccttcctgtcctccttcctctaccctggccaggctgggctctttgcagccttcctgtttttccaggaaaatgggcctattaagga

SEQ ID NO: 110976 - DNA, 1090 bp, Homo sapiens
ggactgggctgattttttttttttttttttttttgaggctgctagaaaaagtcagcagcagcattgcggtattgagtctacctctggtgctgcttttgcaaaggcagctggcagcgagtctcaccggttcaaagctccgcttgagcacagcgtcccaggggagcctgctaaaggggattctttgagagccataatacctagtgatattagtggttccgtgttagtatgcagaaatgcctaagtttacagtgcattttttgcggggtggaaggaggccgttttaagtggtgatggaaagtgtttggtggtgggagcatcactgggtgacaaagggtgtagaaacctcagcaggtaaccagaaattatacctaaaatttgcaaagtgcagcatactcggggcttgcagctggcagcacagttctgatagactgcactagcaccttttttttaatatatagaacgatctcataattgaaaacttggaaacgtgttttgtaaggttaagtgcagaattgtatcctttttaaagccttccggtgttatgtacaactgatcagttgtggtttaagtaaaagttattatataaggaccctgaaatgatttctttgggaaaagtaatggagctaaaataatggtttttttttttttttttagtatttcacttatttttaaagtagatctgtagatttcctacaataattgtaagactaaaaagtttaaagtggcagaagatgacccgtgattaatttaaccaaaatgatagtcctgcgggcgtctggaagttactaacagcttctctgacaagtgctcaggaactgtattctttaaagccaagcagtttctctgatttctatgataggatatttactattctagagagaagaaggatgttggtaaactttaaaagctttggaggatgtagagtatagaacataatggtcagcatgtttaactttaccctgaagcatatcaagccctattaaatggaacttgatacatcaaacctaccaattgggtaactgggataaagtgattatagaataatcagtattaggagcatagtacagtttgagtgagaagataggtcaga

SEQ ID NO: 110977 - DNA, 1048 bp, Homo sapiens
tgaagatttaatgcctcatgcaggaagggaaggagcaggaatatttaggcttctagaaggtataagtggttctaggtttctcgagcagaaaaatgtggttaatacataattggctaatgctctgtgaaaaagtaattggtaaaaaggcaagcaattcagaaaatttagtatttattgactgctaataagtatattttatactgtgtagatcacatcaagaaaattggtcagatggaattttaataagccatttacaatcccttttaagacttaaatttctctatacttatttaaggcatgggggaaaaaggtgattcttattggaaaaaaatccgatgtatcacacaaaatgagtttgtgccatagggctttaaaataagtttgctagaagaataccctggaattatttctaacgttcttttactttccttttgtcagaatattgatttttaacaagttaaacgtttccacttaaagtttaaatcataaaactacacaatatacaaattaaattgttattttaataagtttatgtaaatacagtcaatagcacccatatcttggtaaaggtaaactgaaaatctatgatgaagttagaaaatattgaaaatttctttgaactatatggcctctatagggctctttcccattcttaagagtgtatgaatagtgctttcttttatggttctatttgtaaatgttatgcaaagcctagaacctaatttattagcattagtgtacacttcaggaagtaaaaccgtagactgaatttacaaaatactgtggtgtggtatcatattgtaggcagcgttaatggatagagatggagtagagcatcagtaataagagaactaaacgtcacgtgaattttgaaaattgaaaatttttgaaagcattctgagagaagaattggtctctttgtctcctgattaaagttgtgatttagctgtgagtattctcaatagctctgcaaaatgacagccaaaatcacttttctgttttcttctcgagattggcatttttaatacttacctttagaagctcccta

SEQ ID NO: 110978 - DNA, 1082 bp, Homo sapiens
ccagtgcttttcttcaccagtctttggtcattgctgtagttgtattattgttgctaactacaggattaaagaatctcttcatatccatttgatctagtcgattctgaacatttaagaattgatagtaatctaattggtctggaaacattgcatcccttggtactcttaagaatacatggcagaactggcctctgttgggaatctcatagaacaggaagcattcagagggccagttagaaaagtggatccaagatttagcttccttttatgcaaaaggaggacacaggatgatttagcttgccaaagacttgctttgtggctggatacatgctagtattttcagattaatttaggctctttttgcgtaatgatatcaaggatttttgatagtggcctaatcattgatgataattgtggtgtgaacactttcacaatgattgttggacgtctgcatttatgtaatatgatagttaatgtatatattggctaagctaatactaaaactaactgctaataatatggataataagccattttttgacatttactggagtttggacttcaccttgttaagatctacctaggaatttacttctgaattgatcagattttattaactaaataattattaagtacaagcagcataacacaaaagagaagtgggaaagaattaaaaaaaagaataagatgtaggtgtgaccattttggactcagactaggtaataataggcacatttattaaactgttcctatgtgttagtattgtgctaagtgctttttatattatacatcactgtttttgattctgagactaatcctgttagatagctactgtttttttttttccttctaacttttattttagattcattttagattccaacttttattttagattcatatgcaggttcattgcctgggtttattgcatgatattgagattttagttaccaacgatcttgtcacccaggtactgagcatagtactcaatagttcaatagtttttcaacccttacccctcctcttacctcccccacaagtagtcctcagttttctattgttgctgtctttatcttcatata

SEQ ID NO: 110979 - DNA, 1688 bp, Homo sapiens
ccttagctatgaataacaatatttcagactactggcatattacttgtttcaatattaactcctaaatttcattgttgtgtgaatttcaagcttaatctatagatgatgatttctaatgccaaatctaaaaggtttgttctgttctttagctatctagatctttatattagtatacattggatattcagtctttcttgacactgtctaattctaccttctgtaactgttttccttgactggtttcattgttgctgattttaagggtggttccctcttaagtctctgttctcagcctcctcttcctctagtctagctgaacatttcctcctcagagaacttcattactaggaaagttctaaattgggggtagggaaccccaggccaatgattgatttgatttttggctttatttcctttggcccttggtgtgctatagcacaagcatcatggctgcagtcccgagagtaatttcctttctactaggctttgtcagccatatcctttaaagtgaaacaatttcaggattaaggctaggagcagttgcagaatgtttaataatgtctattcagtgttttcataagatagtggtaactcccctccagtacacacaggctgattggagccacagagcctggcaagcgcagtttacttggactaacattcatctcagagcccaagtacctgtatctgtccaagtgtttctttttgcgtatggatttgtttttttgtgtgcttatggatcttgacctctgtgtaacttttttctctagtcattttcattttctctacctctttttgatcttcctaaacttgacattatatggaactgaaacacctcaaaaactgttttgtttaattaagtgctgggattttaatttaaaaaatgcttgaaatgaatatctcatttatgtgattacagaatactaaacagccttatcataagcagcctcatcaaaaccccctagggtagtgaaagtgatttgtagtttcttacaatattctcaataagtaaaaaggctttttaaacccttgtttgaagtttttgtctcctactcagcacactgcaagttgcacaggcccatgttttctattactgtcttttttttcttttttaaaaaatctgatgttggataactagataatcttaatcccccttctttattcctattgtccagcaatacatctctaacgttttcattaatgacgtgtatgtaatttttgctctgtttccctgatgccttgaaccattgtcatgtttagctcttatttctgctttgccacacatattcagactgtattaatcctcgccgtttctttcttctgggtaccacattaagaaagaaaagctaaagtgcaattataggtacccctggctatttttgaatttgcatttgtaactataccctctgatgtttattccgtgtttgtttggggtcgtacgctgtagcttatgcctgtaatcccagcacttttcgaggccaagatgggcagatcacttgagcccaggacttcgagaccagtctgggcaacacggtgaaatcccatctcctcaaaaaatacaaaaaaattagctgggcgtgatgatgtgcgcctgtattcctggctactcaggaggctgaaatgggagaatcacctgagcctgggggaagttaagtctgcagcaagccctgatcaggccactgcactct

SEQ ID NO: 110980 - DNA, 1086 bp, Homo sapiens
tataaataactataatttaaaaaatttttaactgatatatgatagatgtacatgttttcaggtatcattcctttttcactcttttgtatactttattaaaaaacaagcaagcaaacaaaaaatttcagtgagtcccatgtgccagacaccagttgggtgtttggaatttcaagatcagtaagatattcaccctagcttgtagtctactagaaggcatacccacttaaagggtgatgatacattgtgataagggtaaaagggcctaaggctatgtgctgtattttactgaattgcaaagatggagttactaattttgatgtggagatgcaggttattagtaggttattagtgaatcctttttttttttttttaaatatccagagtaggaagtatgtgccgagaatgtatgagtttgtcagacagagaaaggcatggtggaaaaccataggtgtgaagtgaggaagctgggtggggagtgagattattataggcattgacatttgagaatgctaaatgtggttgtgaattaccaaatacccaggatgacagagtcaatgctgggcctgttcgcagtgcagcagcatccatatttgcatgtgggatttaaatttttgccaggcattttgtatgtttcatccaatttaatccttagagaatccctgtgaggttatctccatgagttagtacatataacagaaatttaggattgctctcaaatagttcgtactttaaaaaacccccctgtgccaaggatctttatgttaaagcataaggtatatatggagttgaatcaggaaatgaggctggagaagtagcagatacaaacattgtgattaatgttacattgtagatctttattgtccaatggccttatgagtttctccttcatttacttctggtaaataacaaaattttgctattaaatattctgaaatcttggaatatgactcctataaaatatatctgaggcccaataatttgtcctttttaaaattaaactttgactcgatttgttcagtttgactcggcttttcagtaagtgcgtaatttctgtttgtgctttgttttcataaatacaaggatgac

SEQ ID NO: 110981 - DNA, 1050 bp, Homo sapiens
gagaaaactaaactaatgaaggtgctgctgtcataattttacttttaatgctgtggttatttgttgggcaaatgtagttttgctacatgcagtatgtgatcttagaataaaattggcagcttcttcgtattatgattgctacgcgttccagtactcactagtttgcagattcctttaattgaagctgaatggcatattggttttattgattaatcttttaactcatagtatcagttatacaattcacaatgataaatctctttgagttttatacaaagcatatccatattcttaacttactatcaagtttaacttagtgtaatcgacctaaaattagaactcagatctattaactccttgttttgtgttatttttgccatatgctatatagtattttttatgagatctgttcaaaaatcttatagaaatatgcacatatgccggtcctctgaatgtaaccaaacttatatatgaataatctatgatgagttgtttaaacgtgtttataaaattatctggtaacttttatagtgtactaaaaatttagttttacgttttgaagtctttaagtttgttttcaagcaggtagctggtagtcatgatagattcatcataagccctaaatatgttaataattaggattattttttctttatattctagattagtaaaggagtaggaagcctgtatgtgtctcaggcctctaatttatcatataacaacgtgagaacactctgtaggaatgaaaagataataagtctttgtattttgtcagtcttcaagatttctagacaaatgggagctgtttttagttaaatacaaattcccaagcaagacatgacatatttatagacaattcctttctaattattatggggatgttcttgaaaaatcttatactagcagaatttcaaattgaaaaacagacctttgggaaaaataggctttagagatactgtagccccacaaaagcccttactaatatttatattcgctaaaagaaagtaccatagtaatcatttgcgtgttctgaattagtaattcagaaaa

SEQ ID NO: 110982 - DNA, 1021 bp, Homo sapiens
gtggactttacctaggtttcctttaactcagggttgcattttaaaagtcttaaaactcgccctgccttgctttactcttatcaatctctagatcccttctttttccagttactctaacataaaaagtctcacaatagtggaaatgagaaaccataaataaatttgtgggtattagaattttcacaaagtggaattatcatcttagaggatttattaaatttatatataatagtttttgtaactcataaccaaatgcctttatttaatgtacttgctgaaaattgacagttttttggccaaagcagtatagtcaatgtcttcattggtttagtggcttttggcagaaaactatagtatgtgtttaattattggattatactttacagttcaggttttttctgtctcttactgtctttttttctgttttagactatttgagtttattttcatgtggagatggtaaatagaatgtcatctttttataggtgatagaaaatatttttacattatctgttacatatatactttccaatagttatttcaagctgtatttttttgtattaaccttttgctttgacttgcctgatttaaggtaactataacttaaccaattttaagagggctttctgacctctttggatcttggttgtcttttgttaattttggaaaatcttggctattatcttttcagataattcttttttcctttgctttctctattctccctttgggacaccaattaagtatatgttagactgtttgataatggtgttcctttatggtttctttattttaaaaaacacaccttcccttttttttctgtttcagtttggatgacttctgttgacctaagttcatgaagaatcctgtcaaagggattctccatctttgataaattcttatttttaattttagcattgccatttgactctcttacagttttcgtatccctgctaaaatttcctgtctgttcttatgttgtccagatcctttaacatattaatcttttcctttacctttt

SEQ ID NO: 110983 - DNA, 1058 bp, Homo sapiens
tttttttttttgtatttttagtagagacggggtttcaccatattggccaggcttgtctcgaactcctgacctccggtgatccgcccaccttggcctcccaaagtgctgggattacaggcatgagccactgtacccggccttgtgtgtcttttctgccatggggactgatgatcagagaagcctgccctgaagcatgagaaagaggggagggttgggagggaaacagtgtgtgaaatagaggaataaactaggctttataaataaacttgcatgtaaatggtatattatttgctaactcagaatctctttgcctcaatttctccttgggttaaaaataaagagataatcactatctttcaaggtcatggtaaggattaaattggaaacatatgtatgcacatatatacctgtcttatattgtatataatttggtgttcagtgaattaggtatttttttcccttggaaaacagagggattggcacaatgtcttggaattactgtattatagaaacacaggaatgaggtatattagtatatgctgggacattgcctgaggtgccgaaagtgtataataagttacattatggtgggcaaagcagtttaacagatccattctttgtaacacagctgcagtaaaaatagaattgtataattaaaataagatatgaaaagactctttgaaggttaatttaaaaatgaaaatttactgctgtgtttattaatctctttgaaggagacttaatgctgtatcaaatgttccttttgtaattgacagaaacaaagcaccatgtacagtgttagagtgtgtagctgtgctgagtgagccatgtaaatctgcaaggttatgtattttggtatgatggtgatagcttattttcatattatatagccatgaaattgatcctcagcatttatcttagtctttgaaaagttactgtgaacagtagtattatcagattgttacctgattaatacgtcacaaatggatgagcctctcagcaaaccaaggaagttatctcaaatgggactgaaataatggtattagatacctgagttc

SEQ ID NO: 110984 - DNA, 1043 bp, Homo sapiens
ccccatctctactaaaaatacaaaaatgagccaggcgtggtggtgggcgcctgtagtcccagctactcaggaggctgaggcaggagaatcgcttgaacccaggaggtgtaggttgcaatgagctgggatcatgccactgcactctagcctgggcgacagtgtgtctcaaaaaataaataaataaataaataaataaaatgaaatgaaataaaataaaaaaaatgaaataaaacatttgaaaggtatagatgaagttagcaatcatttaggggaacttttagctaacaatcagggaaactactttgtttttgctagggtccaggtaaattagcaggtacttcttatgcaaagtgagtgattacagagattcagagttctaagaggcagtcatcagtcagaaggagttttcaccaaaggtcctgtattttctgtttagaatagtacttaagccataattagagaacatctgcagtggtttctcagccctctgttggtaaagtctgtctcctttaattgttgaacttttgaaaagtctgaatagataatcagagattatctagagtcttcttcctgcatttttatagcattcctggtatagcatttggtatatctagtccagttacaactttccctttcttatttgctgttctagcatgtaatatatgctctcaataaatattagtattttttgaatgcctatcatcatgtaacaggtaacatgtataaaaggctgaaactcatttttctctaaaaaatatgcagcagcttttattatttatgcattactctttttggagaaatagccattaatcctgttatgtgctaggtgtttgtagtatgctagatactggaaatataagggaatactaggaatatgaaaaagactttgccctagagagggtatcagaagagaaggaagacattattcactttccttttgagtttgaatcaggtctttgatatattgaaaaatgacacctgaaaattttctcgagaatttactctgaaaatactcacgttgaatatttgaagtattgaagtat

SEQ ID NO: 110985 - DNA, 1021 bp, Homo sapiens
ttgcattatggcgggagagttagtaagcaaacgaatcaactcatatactgccctgtgataaagtgctgtgaagaaaaattaaacaagtagaaagagtgaaggagaaggctatcttacatagggaaataagacagcctctgaggaggatcatttaagttggaatgaaaggagttaaccaaccatggatatatttggaagaaagagctttgccaatggaggaaactgcaagttagggctttcagtgaataatttattaatgtttttttctccttgattgtcactttaggataatctgtagatccctccatgatctggccttcgcttatactttttctgttaattatctaattaagtgggaataatgcctactttgtgggcaaagtgaaatgtgtaacacttaatttttatataagtatattttatgcaatataaatacaaggatgctccatattcatagttattatcacccttttgttatataataatcattagcttatgttcttgcctatccctgtcttcctagagagcacttgctcatctttcaagaatcagtgtaaatgtcactttctctttgaagcctttcttgctgtgcatgtagacatgactattcccttagttttgtcaccattgtttatttgtatatctgtcattgtatctgccatctttatttatttgtttttaccttttgtgtacccagcttctaacctagactctggcatttagatatttgctacataaatgaattgtatttagaagctaattcatttggcttctaatatttacatatacttaaaccattcaacaaatatgtcactgtggtagatactgagaataaaaaattaatacaatgcatgttcccaatcaagtttagggtaaagttacgatacaatataatatacttaatataatggtttgttcaaggggagtgtaaattaaagtggagatagattatctaaaggaaaagtaaggcaggaagtatagatatgtattctagattgtgaatatcattccacaggtgtct

SEQ ID NO: 110986 - DNA, 1067 bp, Homo sapiens
gtttaaattattcaaaatgagataggcactctatacatcttttagaagcaagatattaaatagaaaaaggttagggccaccctaatacttctcatttagcttacagagtgagaaaggagggaaagaagtagatgaaaatggagttggtgtagttccaagaaattgctctaaggagtaaataaattgatgctcccttgacaagcagtattaacttaacatgaaaacttgttagaaatgcaaattcttgagccccaccccaaccctactgaatcagcagcttggggatgggacctagcaatccgttttaacaaatcctctgggtgattctgatgaagtttgagaaccactagactttcaggactctgatagtagccagaagctctttatcttgaccttttatgagtagacagtatagttacaaatcttactttttttatgattaggtctttgaaaatatggttcatgacttactctttgtaccttgataaatcttaaagttttgcattatatttttacagttcttttaatctcaggcacaatatttataaatataaatactactgtgatgctcttgcaagataccttgttttctgctcctgtattttgtgactttacttttgccaagttcaaccttaaaaatttctttgtatgttttataggaagtcattgacattcagttactataaagcagggttgtatttgtcttttttatgtgggggaggatcttttggtttttaaagtaagatggttctgtaacctagatggttaagaatcattgtgcaagttattgagacagattttaagaaaacatctgatgattttatattagaatatttcttacttaaattgtgaaacttctacctggtcccagcatttatttagtttagtacttatgtccttatgtcctgacaattatagtaacctatttactggagtttcttctctgtctcttgcttttccagttcatttaccaactgctgttgagttatctttttgtttatgacatttgataagagctgatcctcccagagcatttgtggtcatgtatctgcttgtccctcaaagca

SEQ ID NO: 110987 - DNA, 1040 bp, Homo sapiens
ggtgactgtatacacctatttgttatataacttagaataatacccggtaaataataaacattgactaagtacttctactgctgttgctggtggtggtggcgttacgattagtagcagaagacatttcattaaatacattttacaaacatgtaagaataatgtgactacaataccaaaaatttgccagttactgtttgaaaatagtcacccactggatatcagatttcatctttttctctagttgtcaagactaaggtaatgaatttatatttaacttaatgttttctcttctatagttcatcagagaagatatgaaatataaagatgctactaataaacacagccatctgcacagagaagataaacatataacgattgaggatttatggaaacgatggaaaacatcagaaggtaagactgcctttgtgatctggccccctccccttctgcacatctagcctgcttagttgttctcaactcacttatagtatgcttttaccaaaaaaatcaaaataacatttctgtgaggatatttatattttagtaaataattttcccttcttgtttttgatagatgatttttatctttctgagagtcattaagcatcaggctgttctcatataattatagtagaataaataagataatgcatgtctgagagcctaaagttgtaaagcattatttcagctattacgtgacattattataaaaggtttagcaaataaacatatggaaacacaaagttttccttttagttgtggagaatagttcctaatgtttttaggaggctattactgttaagctttttcttaagtaaatcctttatgatgtctcgtaataggtgtatgataaaattggataattggtattttattccctttctactgttaagttctcaaggtgtattatggacagtaattgtttagtacaggaaaagtctgtgatctaaaaatctcaacttggttccatatactaggaagttactaaaattaaaaaaattttacaagtcccctaaacttacattttgttttcagtaact

SEQ ID NO: 110988 - DNA, 1044 bp, Homo sapiens
aagacaaagaaaacaaataattacactataaggtgatatgtacaataatagcagtaagtttagggtatggaggtagctcactggagggagtgattagctcactattatacacagaaggtggtgttcgggttgacccaggagttctagaaggagacaagaagtagaacataaatggtagctcccccatggcatcttttttttttcttgaaatagacaaggttttgctctgtgacccaggccggagtgcagtggtgtgatcatacctcactgcagcctcaaattcctgggctcaagtgagccactagagtagttgaggctacgggcgtataccaccacgactggcttattttttattttttgttgggacgggatcttactatgttgccaagtcttgtctccagctcctggcctcaagcagtcctcctgtcttggcttcctaaagtgctaggattacaggtgggagtcaccacacccagcctccttctttagttacctgaaaatttgctagaagtgaaagtggaggcggcatgctatagaaagtatgtaggctttcaaactatacagctttaaattctggctcttctatttatgaatagtgaggcattggacagattttgaaaattcacttataaaatgtaattcttgtgtgacataaatcagtaatgtagtgaaagtacttgacataatttatggcaacacctgttaggcgcttagtaaaggttgattctctcattcagtaataatgcgaaataaactaaaaagttcggccatattcaaagttttgtactgtttttgacttagtctcacaatatttattgataaaatgaacagactaagctatatatttaccagcattgtgtgcaaactctggacagtgaaatgtacccaagatctttctggaatgttgtcaactgtgggaaagtaaaattgttttatgcagaagttgatcctgacctcaaatagaatttcagcaatgactttaatgcagtgtgtgtgtgtgtgtgtgtgtgtgtgtgtgtgtgtgtgtgtatgtgtgtctgtgtc

SEQ ID NO: 110989 - DNA, 1785 bp, Homo sapiens
ctggcaggatttgctgtggaattgaattcaggttactagtgggggacagggacaggaataaaagttcattcttaggttttatgtggcattgaaatttcttgggaataggagtaattaggaaaaaacccagaaatctgaagtctcatgggggaggttgttaataatgggggaaaacattgaaaaatactggttgagatcatggcgcaaagagggaaggactgagtgctgtgaggtcaagaagtagaggaggaccctggagagaaggtggggaagaaatggccggtgagataggaggagagccaggagaatgtggggacctagacgcttagtgaagaaagcattttaagaaaaagcaatgtcacatgttccagaaatctgaataagatgacaacacagacttgacaattggattggcaaagtcgaagttaaggttattgatcttaacagagacagattcactgtaggagtagaagtaaaagtctttgattggaatggattaaacaggaagtaaggacaataaatattgttgactttaaaaaggaagagccaagaaatgggactctgatacatgaagggagataatgttgtgaataattttttttaaatgataggagattttaatcatatatacatatatacacatatatacatatatatttaaatcatatatatattttcatatatatgaaaatataaatctatatatatgaatatatattatatatatatggaatgacccagttaagaaataattgatacaggagaagatcaaactatcttaatttaaaaactatccctatttaataggagagtgctggtgtatagtcaggggcttaatccaccctggcccaggtcctgtctttctctgtttctttctggattttggtgttattttctcctcctgtgtttcctagaggctagttctgtggctggtggcagttgcaggcttatgttttcctaggatcatggccaaagagaactaggagtcttgcctgcctgttctagttagagaaatgccagaaagtaactggcttaggtcttgtggccaaatctagatctgctgctgtgacctccagaatggggtcctgtgattacttctttccccatctgcctactccgggtgatttggagtcttgtctccaaagaaggaagagagagaaggagtaacctagcagccagccagccattacagattaatgaccaagaatcactagactttgagaagagcaggtagaagaaaaccttgaaaggatgcagggttgggtgggtggtgtctggcagcatgggtcatgtgatataaaatatagctactctttcagaacatctctaagttcctgaaacttgcagttcaaaacttttggaccataaatggattttctgaaaggcctcttttggtcccactctgaattttacggtaattgagtgtatcacttcctaaatagagacattttattaaatcccattttggtattttaatgaaatgagctaatgtaactctcaccactgaaaacttccaaaatcttcctggctattacagatttttactattgcctggtactttttactttgaaaccctaggtgagtttacctagaatctccaaacatgtctgtattgttaaagatgaaacataggtatttttaaaagcatcaatggaggaggagaaaagtgaatttgaggcagcaaaaagtaggcgctgtctgtgctgagttagtttgaaaatcttgagaaagagatgctttctgaatactggtaaatttgagtagatggttcttcatgagctaacc

SEQ ID NO: 110990 - DNA, 1057 bp, Homo sapiens
agaacaacattctaaaaaaagattattccccttctttttattgaaattagaaaactgtccagagttcttgaaagcctttcatgacctagctcctctctgactttctgccagtctctcaaacactgctagttcattccatctgaaggcttttttttacagccttttcctctctttgggatatttttcacccatgtcttcacaatgggactccttgcaatttttaggtctcagatgtcagctccttagagaggcttaccctgacatctttcctgcttttcttaagttaatcactatctgaaatttcccttcctcttcttccttctttcataaagtgcccctccccaaacccaaaggaatttaagttccatacaaggactttatccgttttattcactgccatatgcccagtgcttagaatgaaatctggtattcagaatgttttcggtattacaatactatatgggtggatggctagatgaaagaatgaacaagtatgtatctggtaattttctacaaccagaaaaatgatagattatttcattcttacaaacttgtataggtgtttattttcgaattaatcatgctaatctttgtcctaattgcttttactatcacttctgtttttgattgtaaggctttcttcttctcatagagtgctagatacagttttggtacttaatgttgattaaattgaaaatgcaatctaatatctttatattctctgaaattatagaatatgtatttctgaaagcaggtgtgtttaaaatatgcattccccttttatctcctgcagttcataattggacccttgaagacactcttcagtggttgatagagtttgttgaactaccccaatatgagaagaattttagagacaacaatgtcaaaggaacgacacttcccaggtgagtctttgttatgcaaatgtattttccactcagggagaattatatgctagatgtcatttccccatactgaatctacaagttacttccgtggctgagggcacaaaggaaatataaatatatccattctttaatctttctaaattatgcat

SEQ ID NO: 110991 - DNA, 1029 bp, Homo sapiens
aggaagggagttgggatgatggtggtgatacttttgatgactcccttcaccccacagaggaccattctggcagcatatgattggaggtgctgttgctttttcaagggtccccatgactttgaccactccttctcccaccagcaggggcgtggtgtgtctatatgggtttacctctgcccttctataagtctagtatatcaaagagttacaagaagcacagtcattatttgaagaaagaattttaaaaggctagagcttgtgcatgggaaagagatctccaatttttggttttgttttagatactacttaaaaaatgtctttttgtattgaggtcctgtcatactcaaagattaatttaatcatctgtaattcttttaataggcccacctcataactggatgaaagattttatcctcacagtttctatagtaattggtgttggaggctgctggtttgcttatacgcagaataagacatcaaaagaacatgttgcaaaaatgatgaaagatttagagagcttacaaactgcagagcaaagtctaatggacttacaggagaggtaagttcagaaaaatcataactcatttatgtaggcaaatacaatttgtaaaaaaagtgatatgggcatgtgcttaaatacttacatttaggttattatacacatcaggaatagatgcatatttgatttcacatttttagaaaagtatacttttataattacagatttattataaatgtgtatacttgagaataaatgagtagaagaacagtggaggtaagtcaaatatagtggaattagatgtgtagttaaattttatttttaacttgatttaaataattaggaatttttgaaaagctttttgcggaagagtatttccctgctttccctgtcatttgaacccaggataaccaaaatagctgtatagtaagttgcctgatatttgtattaaccaaacttaaggctaatgaaaaatgctatgatttctgattgaaatatgtatttaatcgcttgacccagtattcattatt

SEQ ID NO: 110992 - DNA, 1087 bp, Homo sapiens
cccaccttttttttggtttaattttaggaatgtaactccattggggctttccaggccggatgccatagtggaacatccagaagggcaactgtctactgtctgcttatttaagtgactatatataatcaattcatcaagccagttattactgaaaaatcattgaaatgagacagtttacagtcatttctgcctatttatttctgctttgttctcagtgatgtatatgcaacattttgttgaaagccacgatggacttacaagctttaatggactcgtaagccagcatgggcttgcaaaaatttcttgtttaccagagcatcttcttatctttccacagagctatttacatcctggactatataacttaaaagaagtaaaacgtaattgcactactgttttccagactggaaaaaaaaaaaatctctgcaagtgaaactgtatagagtttataaaatgactatggataggggactgttttcacttttagatcaaaatgggtttttaagtagaacctagggtttctaattgacttgatttctggaaatgaaaacccgcgcttttattatgggaagcttcttgaactgcatttactattgtgaagtttcaagtcccgctgtaaagatcatgttgttttgttttccccagggctttcactgtgatttactgcattgcaggctgtatgataaaacacacataatttaaagagagaaggctcttgattccttatgcaagtggaagagttgaaacttgattgaaggacttaaaacattcacaaccttaagccgaggtggggggatatggggattcaggcaattgtttacacactttgaataactgcaaaggatttacggtttgtgaaaaatgtgtactgtggaaaagataataaattgaagacattattgtgtgggattgtgctgatttttgttgataacacaaaaaacactatgttttctggagagctgtgtaagctgtcttgttgcttagttgcaatataagaaatagtgatgttttggacgtaagttgtcaacaaatttctattttatattgttatatttttatgtagtttgaaatgtaaaaatgttctaat

SEQ ID NO: 110993 - DNA, 1086 bp, Homo sapiens
tgaaaatgctaattgataaaccagaagtttcttttgagatttgctttaaagaaatgctttagtaagaatatgaacaatttcctgatgtctcctataaattgtgattgtttattctattactattgttaaaaacttgaatggtatttatattggctgatatttatatacttaatagattgagttctgtaagggcaaaaacggattgaaatgaacatagcgttttgcactaatgataagataacctgagaggtagggttgaggaacacagggttgaaagctgttggagaggggaaaagttgtgcataaagaactgaaaagggttctggagtgttcattcagagtgaagggaaaactttatccttctatttcttataaccagacaggaggagttcttccctttgaaaattgcaaaaggaatgagaactttgcagttggatgaatagagaagggaaaagttgctggagcacggagtgaagatgggaggagctgttagcaaggcccactgctgctcctgggtgagaagggagctctggagcaggaccagctgggggccggcactgctgcttagagtggaggaggctggccaaagagactgtgggctgttttcagtcagggagcatgtgcattgtttgtgctcaatttcagacactcatttataaacaaattcaaccaagggatatttactgctttatgttgcttatgataattattttgcattaatacagtatacacatttgtaaattcaacaggaaattattgagttttggaaagctacagtaatttctgtattacatcatttatatgtgaaaagttggacatttctgtaagtttttaaaattatccatttgttactttaacattttaaaattatggtgttttcctgattttaaaagcaatattttccttactgtaaaaaaaaaaaaaaaaagatcgatgatagaaaagtataaagaagaaaatagcaagcaggtcaaatactactatccaaaatgatcacttttaatattttagtatgctttctgctagatctttttctacatattgaagtatattttacataattgaaatcatactatatattcaatt

SEQ ID NO: 110994 - DNA, 1423 bp, Homo sapiens
cggtgtccgtggaggacaagctcacctgtttgtgtggggacggctgcaatggtggtgatcccaatgaaggttggaacttttggacaagaaaaggcctggtttctggtggcctctatgactctcatgtaggttgaagactttttccatccctccttccctgtgagcaccacatccatggctccatacgtgcggaagggagaccccccaagtgcagcatgacctgcgagcctggccagacctacaaataggacaagcactatggatgcagttcttacagtgtctccgaagcacaaaggacatcatggccacgatctacaaaaatgacccagtggaggaagccttctctgtgtatttggacttcctgctgtacaagctcaaagaatagcaaggcgtcactggagagatgatggaggccatgccatctgcatcctgggctgcaaagtggagaacagcacgtcctactggctggttgcaaatcctggaataggtactggcgtgataatggcttccttagtttttattttaagttcaggggtacatgtgcaggtttgttacataggtacgcttgtgtcatgggggtttgtcgtgccgattatttcatcactcagatattaagcctagtacctgttagttatttttcctgatttcctccctcctcccactctcctccctgcaacaggccccagtgtgtgtttttcccttctatgtgtccatgtgttctcatcatttaacttccacttacatgtctatcaatgatagactggataaagaaaatgtggtacatatacacatatacacatgtatggaataccatacagccataaaagtgaacaagataatgttctttgcagggacatagatggagctgaaggccattatctgtgacaataacttctttaaaatcctcagaggacaagatcactatggaattgaatctgaagtggtggctgaaattccacacactgagcagtactgggaaaagatctaatctgctgtaggcctggctggacagtcctgggggagtttttccctgcatatagtcagggatggggatgagatggaggtagaagtgtgttttattttttgagttcacgtaagatacaagttgtagatgtggcctgaattggattgggtctaacctattcatgacccatcagagctatcttccaataacacacaccaaattctggatacctcccagcccattcagtggactgacagccgtagtgcagacagttagaccacataagccactgctgcaagcaccgtgtgtttttttccccaaagactagtgctgtatgtagtgcctgctgcctggctctggctgctttcccccactccccctccacctcccctacctatacatcttcagagagcaagacagagactcagtgatggaaagtggagtttgtaacgagatgaa

SEQ ID NO: 110995 - DNA, 1032 bp, Homo sapiens
ccacggtgctggcgacagacgcagacagcggtaagaacgccgagatcgcctactcgctggactcctctgtgatggggatctttgccatcgatcccgattctggggacatcctggtcaataccgtgctggaccgcgagcagactgacaggtatgagtttaaagttaacgccaaagacaaaggcatccccgtgctgcagggcagcactacggtgattgtgcaggtggctgataaaaatgacaatgaccctaagtttatgcaggacgtcttcaccttttatgtgaaagaaaacttgcagcccaacagccctgtggggatggtcaccgtgatggatgctgacaaggggcggaatgcagagatgagcctgtacatagaggagaacaataacattttttctattgaaaatgacacggggaccatttactccacaatgtcttttgaccgggaacatcagaccacatacactttcagagtcaaggctgtggatgggggagatcctcccagatctgccacagctacagtctcgctttttgtgatggatgaaaatgacaatgctcccacagttacccttcccaaaaacatttcctacactttactgccaccttcgagtaatgtcaggacagtagtagctacagtgttggcaacagacagtgatgatggcatcaatgcagacctgaactacagcattgtgggaggaaatcccttcaagctgtttgaaattgatcccactagtggtgtggtttccttagtgggaaaactcacccaaaagcattatggcttgcacaggttggtggtgcaagtgaatgacagtgggcagccttcccagtccaccacgactctggtgcacgtgtttgtcaatgaaagtgtttctaatgcaactgcgattgactcccagatagctagaagtttgcacatcccactcacccaggatatagctggtgacccaagctatgaaattagcaaacagagactcagtattgtcattggcgtggttgctggcattatgacggtgattctaatcatcttaattgtag

SEQ ID NO: 110996 - DNA, 1050 bp, Homo sapiens
tcattaggcactaagtaggaatagccaaatctctcaggacttttagctggaacatccagatgaggatgggttcttggcagtacctaatgtatgcagccttagggaaatagtttttaaattcttacctgcaaaagattcactaacagagcttttaggaagcgcagctctcctctgcttatctcagtcatgggccaggagctttcacttttacaaagtacactgggctcttcttatgaaaatactctagagtagcagtgtccagtgaaaatataatgcaagtcacatatgtaatttttaattttctagttgccttatttatgattatttttaaaagatgaaattaattttaattatacatatcatttaacctcatatatccagtatactatcattcaatatttaatcaatgtaaaattattaatgagatattttatatccttttaaaaatttaatcttcaaaatctgatatatattttataattacagcacctcatatcaattcttactagccttgttgtaagtactcaataatcatataaagctagggactgccatatgagacagcataacttgggataattacattcaaatccagtaaataaacctgcaaagtggaaaggtccaaattcaatcacttgactgtctaaataagaatatgctttattttgtgttgtcatgtgctaagttcttaaaatgaataatataaaatcttacaacagtaatatgaattagatatgctatttaatctatttggtagagaaaaaaattctcgctttagatgtcgatttgctcaaactcacagagaagtgagagacagaattagtttgatgtgacctcagagcatacctgccaaccacccttgagtaccctcttcaacactatgcttgtttcttgtataattgagtgaaattcaggcttttctccaatgttaaagtcttatacatgatcaaggccatgtttgatataaatatataataaaatagaattcagagataatgtgactgcatttatatattaatcctgtatgccacttgacttcctagaattgaa

SEQ ID NO: 110997 - DNA, 1053 bp, Homo sapiens
attaaaacatttgacacctataatttcctatttttttaaaaaaatgtttttcctatctattcatttattaaaaaccttgcagaaaattttacatagtatctttcgcttaagaaaagaagagaaatactattataggagaagaattaacaagagaagcttaatgaaattttaggttgttagactaaatttaagagagagatggggaaaaaaaggggcaaaatggggatgttagcaaaataaagagcatttactatagtttgaaagaggtgtattccacaatctaaaatatgataaacaatagaaagtcaaagataaccttgtgatttcaaaatattaaaattacatatgtgatactatgatataacaagtaatatgatttccctaattggttatttccaaatatgcatgtattcattaatccaattttcagggcaaccaaacatgtaccaaaaacactgaaaagaaacagaaagtacatgatatttgccttcatagaccacatggtagccttgtatagaatgtgataattaaatgaataacttcacaaaaatagttaaatagttgataactgctatggaatcataccatatataagaaaagtgcataataggaaaatctaatgtggtcctggtatacattactttaaggtagttttagttggttagtaaataacgcacgatatcagaaactttgaaatatttagctttcatctgtgtataaggaattttagaattaaatgtgcagtgatatggtttgtgtaaattaacatgaactttctgaaacttacaatttaaatcataaagattcacttatagatgccttggtaaatgtgttttgctttatgtaagtagcccaaatattcccatatatattaatttttaaagctattgctagagaaacaaaaagatattgtttttatttctagaagaagacaccatttacattttaaaattaagacatattttaatgctgcttaactttatacagctaatattgataatatactgtcagagcattttaatgcattttctgttctctaaacgattaatttta

SEQ ID NO: 110998 - DNA, 1086 bp, Homo sapiens
catggacacaggaaggggaacatcacactctggggactgttgtggagtggggggtggggggaggggggagggatagcattgggagatatacctaatgctagatgacgagttagtgggtgcagcgcaccagcatggcacatgtatacatatgtaactaacctgcacaatgtgcaggttatatactaaaacttaaagtataataataataaaaaaaagctatgtatagggacaatcttgttcttggcaaacatagcagtagtatgctaaggtagctatgactaaataataatcccctgttgatagtaaggatatttgatttttttgaaataaccattgtttctttcaacttgaattcttaaagctgggattgctataagcacacttatagcacattaagaccaaagcagaaatcatctgtgtgtatatgtatctcttctgtattatactgcttagttttcacttgaaacatctttatatcctaagagttcagactcaaacatagtaggcactcaataaatggttattgaactgtctataatacaatggaccacattatcaagccctccaaatggaatggagggctacagcaaaaggtagacacacattcagtacatagagaagataatacttgataaaatacataaaaaatacatttcttctaatttttagaactttttttctctgtgaaacagtaaacaagtgtgattacaattaggtctaaaataattttgttgatttattagtttaggtatgaagtaaactacaaaggcatgcaaattcagttttacgtgtgaaggttcatacatcaggacatgtagaacaattaacttagactcaatgaagtttatgagttttgcattcacacggcattgatcagattttcataagagaagaaacaatgagccaagtatggtcatagcccatttcttttttctttttggttttttttttttcttttttttggagatggtgtcttgctatgttgtccaggctggagtgcagtggtgctatctctgctcactgcaacctctgcctcccgggtgcaagcaattcttctgcctcagcctcccgagtagctgggactac

SEQ ID NO: 110999 - DNA, 1131 bp, Homo sapiens
ataaaattctgtgcatttatactttttgaaagtatacatagtccagattaaaccatgtccacaaaaatataattaaaacatgaacattttaaaaacttttattagtttgacctcctccagtatatagggattctgttaaattaattttttttattaagttaataagttgaagttgttttcatgtcaaaattacatgtccttaggaggacatgaaaaggaaggtgcattgtgagacagttatataacagctaggtagagacagaatgagatgataatcctactgtatgttagaaagaaaatacatatctatttggtattagagtcatcttatagtttttttctgttgtaaaaaaaagttatgcccatatgtgaaggtcctgcctagttaaaaaatgaggataaaatggtggctcattttgtagcagccaactgggtccctggatttggagaatcatagttgaaagactgttcaaattaacacatttcaaaatactaatttgtttagattgtctttgaaatttatatagattctttttttaaagaaagcaaacaaactcagggtttttggaaattgttttattggcgaggtctatggatggacaccattgtataggggctgctgattttccctttacatatttccccatctcccttccccaggtgttgctgccatcactacctttcccttcctcccctttcctcatggcaagacgcatggaagaagagtgctgttaaggcctctccattaatcaacaggtatggtggttctcatgaaacagtgtagctgcccctcttctgcattctccattaatagtctgtctcttacatttacaaggtgcattcattcactacacagagccttctatatggaagaattgttcaacttgagtttatatgtttcaccgtgttatgtattacctaaatccctatacagtggtagatttttctcaatgtatagagtttagaagaattaatgatattattctcagggaaagttgctatgcagtttcctcaacaaaatatgtataaaataaatggaacttgtatgtatgaatatgccactttcaacattctacaaacaatcgttatataacacatctttgaaagtataaaacaggaatatttctgtga

SEQ ID NO: 111000 - DNA, 1036 bp, Homo sapiens
agaatttaagaaatgaggtatccatagtctctgtgtctgaacatttagtacccaatctatagtacacccccaattaagacaaatcattgccaacttttgccctggaattgagtaatgggaactggctgaggtgtatttcatgcatacttctagcagagctgatatcataactcagacaaaaattgatttgtgtgcctcactcttccaagagactaagccttgtgagtagaggaaccagtattcccaactcagtgtcatctactgaaaagtgtctcaatatatttttaaagaatagatgtagttccttgatttcattaaaaatatatccctaaaaactaggtcataaacacaaggacactatgtcgtctccactgttactccttgactttattttgcaaatatttgttgagcagacactgttccaagtactgtttagcttccagtaataaaaacaaaattaaccatatggagtcctcaccctacacaaattcaagatgcagtgagaaggacataaaaattgatcaaagaaaaaaattactctctctctctctctatatatatatatacactatatatatatatacacacactatatatatatacacacactatatatatacacacactatatatatatatatatatatatatatatatatatatatgggatattatgtcagaattaaaaaacaaaagacaagacagctcagccttcaaaccaaggttggagacttcttgagcagagcacatgatcagaatcttctttttaatctaaaatcatccctgaactccatgcttctcatcccttaaccttctaaagacattattgtgcatacttttttgcacaaataactttctaatattttaatcattgaattttgaaagattaattcagttcacttgccagttattttgaatccagctttaataaagaactgcctaacaatttgtagttttcatgtctctgtgtgaacaagaatgtcacctaagttagcacaagtctcattaaatattgaaaaacagaaactggcatagg

SEQ ID NO: 111001 - DNA, 1037 bp, Homo sapiens
tttaaaagccttctatatacaacaggtatgagaaacaatacttagctgaattttcttatttgcaagaattagaactactatctctataggtagccctaggttctattctctgggccacttttacaatagagtggagtcttgccactccattacaattatcattttaataaaaattatacttagaagcccttatccctggtttcctctttttcctgacctattcccccagataatttggcccattgctatctgtggagtgctccagaaaacatcttctaaatgaattggtactaattagcaggatttttgatgtcagaacgagaccaacctcagtcatcaatggaagactttcttctggaggcaaaataagatttttcttcttccttcttccccttttctccttttgcttttcttccttgcctcccatctctaggaggaaatatgacttgtatttcagccaaatttggaatatggtggtacattaaaaattttcaccaagtgcacattttcatgcactagagtgttctcagaaattgtgtacttgaatttcactttggagctcctattattcattttgtcctttcctcttcatagtgtgagtcatggaggttttgtgtaggcctgtggctctttatcactcagcctaagtccccaacttttccccttccctagtcctctgaggatctctggagtgtcatctgatcaagttattttaatgttttaagaattctgaacaattgtattttcccatgttggccattttgaaatgaaaattatttggtattaaaataacgtggtggagagcgttgcgtatatagtgatgcagagatgcatgctccttagcttcgtataaatctaaaacttttcagctggtttttttcttccatactctgaattttctttgatgtttggccatatttcatgagtatcactcaaaagttcatttaaatgttgcagtgaactaaatattatatgtatgccccaattaatagaggaacattctgttaaaaatctgagttcacagaatcctgactccc

SEQ ID NO: 111002 - DNA, 1029 bp, Homo sapiens
tcacggattatcctaagggaaagtatttgggtgcagcactgtaacccaaagtccttcgtatacttctgtttaggaaacacgttgcttgtttattcactcagagaaaagacaaattgaatcagaacataagtttcagtagctactgcttcccccacgcagggatgtcactgcccacatgggcaggccagggtcactagttaaaatgttcccattgtgaaagcatattatcatcttcgggggtatttttgcttctggtctcgtgactgaccagtggaaaaagtcataagctatttttgtgaaatgtatttctagtacaatttgagtcagtgtttagaaaacatcacatattaataaaaaggattatatagtgagcacctattttatatcaattagtttatacacattatttctaatattcctagtcaccctgccatgtaatgttcttatgttctatttgcaaggatttcaagatgtggaccactttttgcaaagccaaaagttgatcgttgctacaaatggtggggagaacaatgttatgattatagcatggactctggtaccaaactacttgggctcacatccgtctggtcactacaactttatgattattgcaaagttttgtaactgtcagattgtattataaacacacaatataaatggtagttttcaagaaagtgagccttgtttccaacaatctcttctgcctctgacatggaatagattaactagatatgtacagtacatggccagcattttaatatggagtatatcaatttactagggctgccataacacaataccacagactgggagacttaaacagaaatctgttgtctggaagttctggaggctgaaagtcaaagactaaggttgagcaggtttggtttcgcccaaggcctctcttcttggctagcagatggtcacctttttgctgtttcctcacgtggtctttattctgtgcacactcctctctcataaaggcaccagtcttattggattagagccccacccttaagatctcattttacc

SEQ ID NO: 111003 - DNA, 1045 bp, Homo sapiens
aatagcacgttttaattgtttgaaaatgtgtgagcacaagaaattgtggcaagcaatgacaacgtgaaaaacatattgtcaactcacttatggttagagacatatatgatgttactatatgatcatttacggataaaatgatatcacgattaatagtataatctacaattttgcacatttaaattttagtgttatacacagttgcacatgttatttttccaattagaatatttaattacaagattacttacctagaattattttacatgtactatgctactttttatatatttgtgtgtataaggtaatggatcctgagattttaaaacagatagattacatttgaattctgacaataattttgaaacttgagattgtgcagacatcacacagtgagatgtaattgtgaacatgtgttcacaaacaggaatcaatgctttcagtgaatgcattctaagagaagattctttatctaagcacataaaaaatgttaatgtaatctggtttaacaagctaatcaaaatttagagatgatataattttatgtgtgtggggagagaggctagaagaaattaaggctttagcaaaaagttgcagagagtttgaaagatattccagtggagctgtctcttttgagctgaccagtgtgtttataattttagagcccatatgatgaggagaagctagtgttttacatgtacaaagagctcccaacctatattacagagcatatttacaaaagtatgcttaatcatattaagatatatgcattcaatttaaatatttttgaaatgtactgaaaatactacatattgttgtgaatatagatgtgtgtgtgtgtgtaaaatgtattcctaaaattcatgtatacggttattgtttataaaaatagtataagatttggcttatgaaaaaaagaaactaaaatttacttttattacatagaaaagtgaattattaataatgcatgggttgtatacaaagaagatgtgacagaatcaagggagacagcaacaggttcaacatttagaaggactcacacaca

SEQ ID NO: 111004 - DNA, 1031 bp, Homo sapiens
ttttattcataaggactgctaaatcgtatgattcatttgattagatagcattcacaacattagaaaattaaatataaccactaaaatattctacatttttgattacttggttttgattctttgtctcataggcaagagaaatagtataaacagaggaatggaattataactagaaatcctattttggtgaataagctgaggacttcctagagaagctgtatgatgtgaaatagttgcaaataatggcaaagtaactcgtagataaattattttaagcctttatttgttaggttgctgcatagagctgcaaagcatcaacaacatatttcctcaaaatgtagagtttacaagttttttgagctccctgatgtttgcaatctattccagtctcaatgtcctctaattgtacatcaatcatctaatgatctagattgcccattgcttgcagctatcttttcatgttttatttggttaaaggaaaatcagctttacattgtgaaaatgcatactgttagcgaattgtgaaattgtgaggaattgtgctgtaattactgaatattggctctccatgaacatgttgcttaaacgtgggaagatctgccagagaaattaagtttctctcctcagtagtccatcgttacagcaacaattgtggaaatcaagtgagatgtggaaccatttttgattgccttaaatggcacatttatatatgccagaaagaatatatgcttctatgtaaattgaaaaagggaaatgaaacagtctgtggatgtggactctctcgggttgaatgtaggtggatcagttcgtacttaacatctgttcaggctgcaaatgcagaggaagtttaatatgtttactcaatcatactggtttcctgggtgccaaggcagaaaatctaaaacatgtgacttctgttcacactatgtgggagctatttagaacaaaggtgatgatcgtggaagaaaatgtggagacgctatctccggtgccagcactgttggacttctttgttgccagcaatcaacagc

SEQ ID NO: 111005 - DNA, 1159 bp, Homo sapiens
aatttggccttggtcttttcatcctgtttgtttcaaacgaagggacaaactagtgaagaagtgaatgtaattgaggacctaattaataattatgtagaaatatttgaggtaattattttgtatcctgcccttgttaaaatggttataatgtcactgtttgccaacaaatatttatgttgtagggtgttattattcagatctttattcatatttagaaatacataaaataaggaatagtcatatttttttaaattatagatataagtagcttttaagctatagtcattatttaaatttggttgcatttaaaactttttaccatctgatatctgtttgacagaatatttctatttataggatttttgcatgtgttttctttttcttcatgtgtatgaattatatctacttagaagtgtgaagttataaaatgaacaattcattaataaataccagactcttaaattctgcagttgaaagccctttggttttttcttttagttgtgtccccagttggaaacaaataacattctaaaatattattattctatggtgttttactaagtcatctgttttaattgactttttaaatttccattttataaagttaatattttcatgtttcatcagaaaactgttggagtagggatgatttcttggttcaaagaagtaaaaataggggaaataagcccaggattcaaattggtggatttgggcaaaaggtccagttctattatataactagttctagcacctcaattttgtcatttaaccttttgaacattcccttaaatggtgtttatgagtccagttgttttccggaagtatggctgtaccacatgaagtcaagacagttagtgtaattggttaccattgtagagttcttacgttcttattataatcacttatcataagacaagaaaaagaagctattttaataaaacaaaatatcacagtctgtatcttaatttacataggaatagacaccagattgtgggattttctttgctctttgatctcctctttacttctttctatatgtgtccactgtttttgatcaatagcaacttctttgcaataatctgatgctgagaaaataaagatttagaaaaatatgatgtgtggcttacatgctgtctctattttctgtatttgtagtttt

SEQ ID NO: 111006 - DNA, 1046 bp, Homo sapiens
gtgcaccaatgctattaaatgtcaaaccatctattgcactacatatatattttaggattcgccctttgacaagttgagaaagttctactcttcactaattcatgaggagacagctcaactcatcatcagtggatttttttctgactagaaagaaaatttgaagttcaaaaatgtcacagtttatggcagaattatactcatattgtaggagggccactgcattttggatttctttcactgcttgctaaaacacccgttgtagttgtttataagcaaatagttacaaagattttatatcatatttaaaactgaattattagataaattatgtaaaagttttttctctttacctaaacttgtgaatatagcaagacataattttgattaagttcacataatcaagaggtttgatgtttctcaaaaaattatctgagttatatgatttcagttagacaaatacatccagcaatagaatacttttgagctaaagatgatataagatcaatgaaaaggctgtagcatgtcaggtgtattagtgcaaatttcagaattcttcaaaaagaaaattacaacacctggaggtcaggactgctgtagtgttgtggaaaatagaaacaatagataaagacgtcaaaaagcaagagatgaagattacaagcaccagtattagtaaaacagtagtagttatagcaagttcagatgttaaaaatgagtgtggtaaggtgcaggtatctttgtcttcttacaggagcatttcaagaaagaaaacaaaggaaagaaaggaagttttttgtttctctttttatattaggtacagtgattatcagaaatgtaaaagattacattccttattacccacacctggcccccaaagccccagaattcatgcggtttattcatgcctctttgggttgaatataaactagccctgtcaagtctgaaatcaagattatatcgttttactttggtgtaaatagacttaaaatacatcaacaattagtttatgttttaaagcaaactttgtatctagtgataggtctttaaaa

SEQ ID NO: 111007 - DNA, 1137 bp, Homo sapiens
aatttaacattttaggaaatgcaattggatttatacatatgtgcgattatgcattctctgctcattgtactaagtttataatatatatctctggatgtagctaaatcacttaacctttccctagtttttgggatttcaacttatttccatttttgcaatgcttggctaaatgcatgtgtttgtgtgcatgtgcacatgtgcatgagagaggaacagaaatatattgaaagaaacagatattgtgccttcatttcaaatcatgtacttatgaaagagtcctgtggttggaactaattgtcaaaactaatgcatacgtattttaagattcttagaacatattttcaaatttatttttagagtatctcatcagcctttaaaatgctatgctcatcttgttatactccagtgatgaacattaaacattttagatctttgataaattgcctttgacacatcattgattttacatatatacgtgtatatgtgtgtgtgtgtgtgtgtgtgtgtgcgcgcgcgcgtgtatgtgtgtgtccattctaatagtgtgactttgtaataagttgctcaggaaattctgttttgtgaatcttaggtgtgataggactgagatacacagacacgcacacacacacacacacacacacacacacacacacatatatttgattcttagactggtttgtggttacatcggctaattctttctgtgacttacctttccatggctgataaccgtatttctgtggaagacttactattttatttttgtataaatccttaggatattatcttttccagccatatttgtagagtatttcatttgcttttcagttttgtttaaaatcttttttatatgagcatatttattttttatgtggtcaagtttattgatctattatttgtgaaggcacttctggttcttgtcatagactaggctcaaatatgattgtttatgcttcatggttattatattgcagttttaatataattgtttttgttagtcctaggacttggtttctaaggtcttattgaactgtcttgattcattatagcaaataagaatttttctttatatggctttgaagtgccctttggaatttatgcttagaaaatagacaattagcataactaatttct

SEQ ID NO: 111008 - DNA, 1052 bp, Homo sapiens
atgttgagagagataccagtcaattttcaattgctttgtgaactaggagataagagtgatgatccctgagcttctggcatgggtgatgctatgaatgatagtatcatttgccaagatagagaatatgcacttctctcccagtactcaaacatagctagttaattatagctgtgattgttgaaaagctgtttcagtaccatgccaaaatgagaaaatttcattgtaccacccttgttttcatctcccttttgatctattagccctttgggaaatgatgactgtcagcaatggtagattctgttggacttgtcagtgacagataaaattgtggcttttggaagtaacacaacttccaattatttatactgttggcctatagagatagtgtgaatgattgaaagaaagagaaaccaaccagctataagcttgaaccttatatttttgctagtaacagcttgagccagaaatgtaaatcatacataaatttaatgaattaatttcacatatttttcctgttcttatctacctttgattaaaatgctaaactacattaatgtttcttaaaggcaaagaggagaaagaaccccctaaactggaaatgttcataaattgataattatcccctgtatatagtcactatttagatagatattttaatcttcatggtcattttctctatatgcatagcatgagtgtctttagacagaaaaatattgcaataatattttccacacacacagcatttttgctctaaaaagctctaaacagaaggtgttccagatggtgtcgttttaatgtgtattccttgtatactttaaaaattattttggaaaataaagctttcttgatcacacttaggggtttctggcatgctatttgatgttgttattgggacttagatcctgtgcttttcttttagaccttagtactgtttgtgcaaataaaaaaataatattgtcaaatatcacttgttagtgaatattctagaccaggaaggcagaaggcattttcctggacggtaggaaattgtatcatcactttgactgaaatgt

SEQ ID NO: 111009 - DNA, 1109 bp, Homo sapiens
tattggccaggctggtctcaaactcctgacctcaagtgatccgcccaccccgacctcccaaagtgctgggattacaggcgtgagccaccgtgcctggccaaatcttatgtaaatgtatagcatatcacttatgaccattatagtcatttaattttgttacttattatttaaaatagtggactagtggtaaaattcatttattcatttaatgagtatcataattaaaacaggtaagaaaggagaatattctatgacgatctgttcacattaaaataaacaatatttagtagcatattgaaatgctaaatttcttaaagagctgtttgttaatttaatggtcagaaaaaagtaacaatgaatagattaagcattatttatgtaatatatttgactcacatctactatggtttaaataaatctttgtcaggactttaaaagcaggccatctaagatctttggtgtgaaagtgtcttatcatgttttttgatgtaattaatgaaaaacattgatattaaaatctgaaaaaagttttataggagcatagattttaaataagatttttatatgagaaaggaaagagatttgcaaagctgttatttacataaaactacattgaacatattacctttattatatgatgactagttgagatgacttgttttatagtaaatctgatttgatttttgatgtgaacaaaactgattattaattgacttgtttttgttttaatagtgcttttactctaaatgattattcaatgtaatatgacttatggaatgttaaaataagtagattctatatattaagttactaagtagtaaatgaaatataaaaaagaatagtttatatcagcatattaatatgtttaaaatattcttgataacattactgatacaagtagctatgcagagagaaagtatctacaatgagatgtggttaaaaaataattgttgccataaaattcttgctgaattgcctcaaataacacattggagagtatgacctcaataatgtaggcactgaagatttatatagacatattttaggaagagagctggaagaagtggtaaggagattggaggaagagagactaattgttgagaatttaa

SEQ ID NO: 111010 - DNA, 1053 bp, Homo sapiens
gcagaacatatttgctaacaattaatttgggaggcttgctgtgtttcacttgcataatagatgtgtggctggggaaccagcccagagacaagctctctacacttcctgaagttctttttctattgtcttctgagagccaagaaaagttatgccaactccttgttttaaacatttcagaaaattgcaaaagcacaaggtagacagagttgatatttgtttagaaataatattttttaaattttttaaaaaataagaagttcgttttcgtatattttctgtgttaaagaccaaaagtacctatggttgtctgccttcagggaaggagaatataaaataaaaataaaaagcaagcctaagtaaaaacagttcttcacttcttccttatatagtcagaaaaatagtttattttttcttttaagcctgcaacatgtgatatctttttttgcttttgtttttcatgtcagtagccattttaaactacctttgcctttcatatgatcatttaaaaaatatactaatctttcactgaattttgaatgcttataaatgattctgtatatttgttcaggtctttttcagcttaatcaaaattcaatatgttttccatgtaaatccaattgacaaagccttgttattttagtaagatatttatgccctaaaacaaaaatcaagggaaaataaaatagatatataagcttaatgagggatgaaagcttatattatcttcgtggaaggattatctttattattagaaatgggttcagtgacagtgtttctgaccacattttgttgtgcaccgaaccttacaaatgtgtgcaacaacgctgttaattttgtcattaacaaaaaattcctaggtcaactgattagaaagtactattatgctattttttcctatgtgccatggccaaaactgtgtattatcatagcctattgttgtctatggtgtttaacattaaataataatatatttacacggttacattacaaatgaatttaacaatctaagttcatgttacttgaatgtaaaataacaatttcatatgttttgca

SEQ ID NO: 111011 - DNA, 1650 bp, Homo sapiens
atttatttcttaaccctttgatgtcttttagtgaggtttggggaggagtagaagtaaatgcaagcttttaactgagatttttaactggaagctggttcacgttgtattttatataatatgactccataaaataaagaagtgtgaatcttttaacatagctttttatacaccactttatgaaagcactaagctctttgtagatatttttaaaattggtagttgcacactaaaattcaggctttatcattgacttccaagaatctttttagcccctagaattttatgttgagtacctttttttttttcttctcattttaggatgtagatatagcagagatggaagctgagattgaagatactttttttgttttattttcgttttttggccccagctcatttggttcatataatcttggaaattgctattttggtttgctcaaaagtgagaaagtgctctttagaatagagaagtgctggcattttatagaaatattttagtaattccttgcatctttctctctctaaaatattttgttactgtatcgtttaaaagtcttctgcttcttaaaagaataattggataaataaatagctgaataaaaatgagtaattagataaataaaaataaatacgtatggagattgtagtcctagaaaatattgggtctcgttagggttagaggagggaataacataaaatatgctgtgattctttagggctatgtaaacaaggcagatgaatctggaacagcatggtgattatactttttcctttgagattgtttagaatatttgagaagtatgtttttcattgccttaaatggcaggattaataaaagccataaatttgacttaatgtctttgatgttctttccaattgtgtgatttttaaaggtgacaatttggtagcttctcacaccttagattggtatcattggttagttagcatgcttgttagatattaggatttgttttttaagcttaaagatgtaatcttgaaaaaaaaaactctgctggcacttaggaattaaattaaacaagagtgcctctgtgtgagtacttcataaatagagatttaattgtgtgtgtatacagtgttgttaaaaaataatttttaagaaacacattttgagacaacaaaaactgataccagatggtgaagctgtttttatgaaagcagttgaaactttacaccacctgccctaccagagctcaagggaagagtttatagaaatatgttcaataatactgcacaagtctaataaattattcgaaaaaagcttcttaaataaatgtttcccttcagaaccctaaaaacaaaatgagataaaactcaggctaatgtgtttcatgtctgctttaccttttttcctgaaggaattctgaagtactttgcaagactgaactcacatataaaatgtagaggtcaaatgttattactacctacagggatgtcctgggtacttagctataaaatgtactaatgtctgctttgtatagcagttaagagcagtctttgggaagacactcccagatatgttctttattacctgtatgacttggacatattatttaagcaaccactgcctctgtgccttcaactctaaaatggatataataatgttacctgtctcacatgtttgtctggagg

SEQ ID NO: 111012 - DNA, 1073 bp, Homo sapiens
tttggggggctgtatttcaaacaggtcaaagcagatgaaaagcttaataagtgatacttgcttttaaaaacctctcactgggttttgaggattaaaataaatcatcttcttcactttttcgcagctgtaaataataaacttaagcttttcagcagatttgcatagatgcaaatatgaaagactggatataatttattccagcatttcccaaatatgcatctcagaagagaaatgtttgaagctgttgtaaagaaaagagaacatggttggatggctgtgcctcttcgaggagatgcataaattaacatctccaagaatatctgcaataaggaaacctttttgaatttttacattactattttctaaggatgtttgtgcgttcagcataacacacagagcatctttataaaaactgcactgtatattaaagaatttctattttacttgaaatgttttaggactttcttacttggggaaattcctctttttttaaatttaactttttttttggccatgagaaggactgatgtggcagtgtgagcctgagacagctaaaagttgatcatgtgaggttaagtcagcacttggaggtggaggaggacacagatgagcaagatgtgttacttgtctttttgtagcttccatttagtgcagaaaagaaatatatatgtgaatagtgataaaacccaaagacaaaagtataataattggagcaaaaaggtctgcagaatacagagtcctgaggttaccaagggttgagaaagcatttcttcaaagaccttcctggaaggagagggtagcagttgaattgccctttgcaaaacggataagattttaactggcatttttaggtaaaatgctcttctgtctacagggaaaggtactcatagaggtgatatctagatgtacttgagggttgagatagtgagcaggtggaggttggagttattttattgaagatggacagttgggttctaggaccaggagagagaaactgccagtgaaaagcatgttcagagaacaggtaactagggaaagtgaaaaagccaataatcaaatacaaaggaaaggtc

SEQ ID NO: 111013 - DNA, 1030 bp, Homo sapiens
gccgcccgcgcggccgccgccaggcagcagaggcgactgcggacagccggcggggaccgggaaagaggaggcctggcgcctccggcagaggggcgaggaccgagcgcccaaggctgggagagacgccggcgctgagcttcccagcgccgcctcacctcgcttttcgaactccgcgacccgagcgcaaggcgagtacccggggcctcgggaaggctgggccgggatggcccacgcgggggtgggaggaccctgtctggaggggctggggcttttcgacacttcaccgggtaaatttcctcagcgcaaagtgctcggctctggtgtccgccccttggatttcgctcccgcgtgtgggcgtctgaaaggaaaccagaagccggtaagtgatccaagaactccacttctgggatttgacccgggagggtgaggatccggatagacagctggacactccctccattcctctcccctacctttaaataagaagaagctgtagtgagtttcaggcaccaagttatttactcggtagagatcatgaatttgcccgggtgtctgtgctgccccgcaccctgcttgttaaccacgttaagacgactggcctgttaattaactttaattacgatcatttggcttccacctgcctgaacccgataccttacacgggaacctgtatgatgtgagtttaccagattgatctttcttgtttacttttggagacagttctcttgggagaagtggtgtccatcctatttaataaagtaagttttactttatctaattctggcttgttttcttaaacacctcctaccttgaggtgatctggagttattttgatttggggaaagggttcgtggattatatagcctttgataattagaggaaaacacaagaaaataagctaatttgtgtggaataatgacatcttagggtgttgtaagtaggtatcctgatagcaaattctttttttttttttttttttttttgcaagcttgtccttgaagtaggctgttcagtagaatacagccttcgg

SEQ ID NO: 111014 - DNA, 1049 bp, Homo sapiens
atggcaggtatgactaggcgaggcacaagtacacccgcgcccataagtcagaaattatgagattcatcctcccaaacacagatgacagcatcatatgcacatttgtttgcattaaatcagtactcacctctgcaggtgcttaccctctattcagtttaagtgagccctttggaaagaaactgggtgtgggggttgtattttcttccatcactaagccatttgttccactgtacttcttgtgtaagtctcaaaagaggagaagctatggcccacttggagtcaggcctggctgccccagaagagacggtaatgagggctggactctcatcgggtttgaattttggctctgccatttgttgtgggacctcagaaatacttaaaattcctggatttcagtttcctcatctgtaaaactgggacgctaactactcctggatttcagttttctcatctgtaaaactgggacgctaactacttcctctaatgtgtgtctacctagcacagcccgcccttagtaaatgtttaaataatctgagtctcagcctctatggcctcccattttctcaaatgtaaaatacatctggactagagcagaatgggaggtacaggatggaaagaaagaatgagggaggggctcaaactacacacaccttctcctggctcccctcgtcttgaccttatataaaagccacacgaaatagcaggaagctttcaagcttaaactcttgggatttcccctgaatttctaactagagatgtaaatttcctcattatgaaattgtctacttaaatatctgtccagggatagtttcaaatgtttctaaatataccccaagcatgtaaagaacttgttagggtaaaacctataatcaattccatgtttgtattagtgtgaggcagagaggatgccaaggactgaatttgaggaaaggaagcaacagtggagttcacagagaaagcagaacttatttacatgctgaaatgatcacagtataagtagggagactaaagaaaactgtaaaatatggagaaattaaagctcaagaacg

SEQ ID NO: 111015 - DNA, 1039 bp, Homo sapiens
tttaaccaagttaaaagatcactcttcagaagattgacagagtttagagaatgttaaatagaatataagatttatagttgatctcaattcaaggaaaatacatttttggatttgttattttaatattaattttaaaaaccgaagtacctgcagataatgcttttgagggttgtaggggacacccagaaaatctccttgctatctcccattcccaagcagtagtgtgtccctggtctttcttctcaccccacagttcttcccagtcttctaggctccctgaccaacctctggcagtgtcagaatatatgcaccactcatagctcaaacatacatgatacccaaatgcctttctccagccctgcccccctacacagctacagatccattaaaaactacttccggtagggcatatctgcttgcatatccccagaccccatccaactcaactcacctgaaatgcagtctatcggtgctccaccttcaagcccactgatgtgctctcctttctgctattgtctcagctgatgacatcatcaagtgctctttcctctctagggcaaagactggcttggacattgctatggtttgaatgtgtcccccaaatttcatgtgtttgaaatttaatcctcaatgcaacagttttgagaggtgggatcctaaagaggtgattaggtcacaagtgccctgccatcatgaatggattaatgccattaccttgggagtgggttcctgataaaaggaagagttctggccctcttcccttctttctttctcacgggtttctctcttgcctttctaccttctgccatgggatgttgcagcaggaaggacctcatataaaataaaagtccccctgacctcgaacttcccaaccctcaggactgtaataaatctctgttatttataaattactcagtctcaggttgctatagcagcacaaagcaggctaagacacttgtcaacgttgcctctctttgaccccctcagtgcctactacctggcaactgtaggtacgcaaaaactcagttgataaatatga

SEQ ID NO: 111016 - DNA, 1036 bp, Homo sapiens
aggagagagagcactccctcctgagcaacctcgggaagattagaaaaggcttgtgagcgaaagcgaatggtgctggtgggtccagagcacactgaggagagggcacgtgaggacacagtgagaaggcggcatctgcaagctggaaagagctctcccgggaatcgaatttgccgacttcttgatcttggacctcccggcctccaggactctgagaaaataaatttcttttgtttaagccacccagtctagagtattttgttatggtagccttagcagagtgatatagggctctgatttgaaagaatcttagaagttatcccacccaactattttattttataaatgtttttccggactcaagactggaagcaagaactggtcggaagacaagaaaaaacctacaatttgtcccctaattgtagatgaacctacgtgtgcagagttggaacccaatattcctttaaagtacagtaaaaataggttttgcacttggaaagactgagcacggtttagaggccttaaacacccccctactaggggtaagacactctgctaattgctaagacactaagaggtagaagatctctgctgtttgttaaatgactcaccaaccattcaggcaacagatatttcctgagcacctattatgtgccaagtaccgaacttgattccagggatgtagaaagagtttactgtccaggaaaggagacaagtatatagatacatgactaatatagtgtcataagtactagattcaaatatgtcatataatatgctatataggacaaggagctccggagtaaccgtaggaagattagaaaaggcttgtgggcaaaggtgggcagacagtggttctggtagatttccagagcacattccaggagaactatgtgcactcccactgccctgtcctcaaacagcatcatctcttttgtacctggattactgactgcaacatcgccttactatcacctatacctgctagtgtctctggctaacatatttgccacaaaggagtcacgatctttttaggcca

SEQ ID NO: 111017 - DNA, 1103 bp, Homo sapiens
gaagatggtctcgatctcctgacctcgtgatccacccgcctcggcctcccaaagttctgggattacaggcttgagccactgcgcccggcctagaaccctgcttctcatataagatgggcctgcacctacctctggcatgtttttctttgtgtatttcctgtttttcatcctgtaactaatgctcattatttaaaacactccagttacttttccctttaggcctggcaaacttttctttttcttttttttttttataactgtacattttacaaaacacctgaaaggacccagaggcataaatagtattacatgatttatggtagctctggggtgagctgtgggggaggccagttacaaggtctccaagacccgcctccatgtcagtgttggggggtgccttgagcacttcttttatttcatataggaaaatgcacatctttcatttgtctcccaaaagatgatttccataaaaatatacttcaaagtatttactgtacatagacttcaatgattttatttccagcatcaaactaaacatttctaaccttttaaataaatggggaatttagtttcatgagaatttttactgacaactaataaacactgtatgtgtacatattcatatacactgtggactggagaaagtcagtatggaaataaatttcactgagatccagaaagtagcaatataggacttttaggggtatgtattagtgtaaataatatatgtgcagtctaggctaatcattttaattaaaaacaaataagcatacttttttgctttaaaaatatgccctcaaaatggtgggggataaaatgtaagatattctttagctttaattatttttccatcttattcaagtcagagcacttttttttaaatagcaatacaacaggcaagagaatactcaaaaatatttaaaactgtattgataccaagagtatgttttaaatattttctaataaatacttgagcggtttttgtctggcaggcttccaaatttgccaaaattaagcgttcagtattttcaacacatacgctttttactggtttatactgaactatctgatgagaattcctgtgttcccaaagcaactgatgt

SEQ ID NO: 111018 - DNA, 1013 bp, Homo sapiens
acctgaaagtagttccagacttgactttgttcagttttacagtaaaaatctgcagttcttgtacagttttggcaattcagtgcagggtattacgtatttcattagaattaaaaacttgatccatgctgttttattggacagtgtttcctttttagctaaggggataaaggtcctttactcatcatctcatttgggaaataaatctctttctttctgtctgtctccctcattcttcctcttgtgctctgtctctattctctttgaatattatattgaatataatattgaatattatggttgaccaaatgaatattatattgaatataccattgaatattatggatgaccaaatgacagaagaggataacatagataataataaggtacatatcttgaaggacaagctgtaaaataagtaaaaagtatgttcttcaaaacacttctagcaacttcatgctatttcttcatatttctgcaagctgggtctatctctggttttgtttagtgtttatagggtacacatgattttggcaggtgggagaacgtttcgttccttaaccttgtgtgggttcacctgcatggtatgtgtatttcagcatacacggggagctctataattttagtcctgtcctgggttatgccagtctgtaaaacaggaaagtaaaaagtcacagagctgttcattaaatgagatagttatagaaagtcatttgaaaagcagggagctattttacaagtatgggcctttgtttgtgatgtaaacgtagacattgacaagggccagttgttagaatgacttaaaaatacaatccagaaccctgaaggtacaataaagacctaagatggaatatttaatcattgtgttcttacttgaaatcccaaccgtgctgtcttggatggtcagtagagacttccagtgaactggctttggtggggctttagaaagacacctattgaaggcacatcacatgggaaaagcaggagcaagagagagaaagggggaggggcacata

SEQ ID NO: 111019 - DNA, 1062 bp, Homo sapiens
attgacaaaaattatctatatttattatgtacgacatgttgttttgaaacatgcatacattatggaatggctaaattgagctgattgacatatgtattacatcatatatttatcatttttttgtggtgaggatatttaaaatctctcttagcatttttcaagaatacaatacattgttattaactgtagccaccatattgtgcaatagatttctgatacagtctttagagttgtaatttttcctgaaagaggtttttgctcaaatttggatttgatggcctattcctcctaattgaaattttatgtcctttgaccatcatctccccaaccctcccttcccattttgccccatttttaaattgggttatttgttttcttgcttttgagttgtttgtgtttcttatatattttggatagtaaccatttataagatgtatggtttgcaaatattttctcccattttataagttatctcttcactctgttgattgctttgctctgcagaagctttttagtttgatgaaatcccatttgtccatttttgttgcctgcgcttttgggatcttatcaaaaaatcattgtccagatcagtgtcatggaactttcctcctatgtgtttttctagtagtattgcagtattacagtagcatttcttttatcaaaacaaaaattcataatattagacatctgtttttatttttgttttattcagactattgtattgatttttattttagtaatttatttcagtgattaaaagctgggttttaaactccttacttttaattgtgccacttaactaccaatggttttgggcaagttacttaatgttttcaagccccggttatttcatctttaaaatgagatcgttgctggacatacatgatacgatatatgtgtagttcataagtcaatccttggcacagagtatctgctaaacattcactgctgttaacaattgtcatggctggtggtcttaattatttattaggtcatttctgaagcatcagcttttggtactgtgaattcctttttacatcttaagaacattacagctttgga

SEQ ID NO: 111020 - DNA, 2081 bp, Homo sapiens
ggctgattttggccaccactgcccagagagcggtactctagatctgggaaggttagaaggaattaggattgctcagctggtttttttggcccgaatctgtctgattctgattatagaaatttggtccaagcatctgaagtcctgaccacatttaactgatttacaatgagatattctctgcacagcacactgttattcaacaggattatataaacgaggattggatttgatcagaagacatgggtgcaaatctgagcttcacaatttggacattgtacttaactgccctacccctggtttccttgaacgtgaaataaggtattaaattcattgttttaatccaagagccaagagaaagtctggaatgtagttggttctcagtagaaggtagtcatattgtgttgtgctgctcaaatcacaatgagcacgagtggccttcaaagggtgacgtgttttccgagcctccaacttgttgtaattgattttcaaattaaaaattaattcttcgttatgaaaaattttaaactcaaaagtagaatagtatcatggatgtccatgatccatggagtaaattaattataatacctacagttttttgggtattctgtacttgggcatgctttgaaaggcacattccgtgtattagctaatttctgtaatcctcgccacggcagtctataggtgctagtaccccattttgcagatgaaggtcttaagcacagagagtttaaacaacttgtttagagataccagcaagaatgtgatagagttagacttgaacctgggcagccttgcttcaggtgtcacagacttcattcaactgggtccaagacgagcaggtcccatgagtagagcctgctcagattgagacctgctgggtggccctatctgattaccccaatgaagtataggccctgaaaaaggaaggaagggaatattcattggtgttttaaaaattatgtattcattaaaatttttcttgcagttttttttcttttcaaatctcatccccccaaaaaaagtatgtttgggacatttaacatgacttgattttccaactagaaaaattctgaaaattttacttctgggccagactctctggttctagacgaagccagaagatctgcactggaatgcagctagtgaagcaggagaggagtgctatgtgtctcttctacaatctgatacagtctttagagttgtattttttcctgaaagaggtttttgctcaaatttggatttttagccaaacaattttactgcaatgttttgttttattgtagaacagactcaaatattcaaatacaaatgcatatccacttattggttaggtttctttttttatttcttttgtttaaggtgtttgttaccagaaactaaacttatattctaaatagaatgttatcaagactgtggcaggatttctctctctcccttctggttccttctccctttaaaaccccaaatctgatgttgggcatggcctccccattcgtctaaccctgctttgttggtctgagttcttgtttgtggctacatctaacttgccctcttgccctctgcctgatttattttggcaatgcggttaaaatggtcttttttctgcagaaaatgtgttttggtttctcctgagaagaataagcttttgttcttcaaagttaaataaattgaattgctttcagcctccaaatgccactgccttgtcttcattgtcactggtctttggctttttaaaaatgatcctgtcctaagcattctgtgtcgcatgtttctgaagtctgccctcttttgttccattcgctgatagtgtcctgttggaaacattgatttagtaagtttacataaccatactttaaaattttttattgaaaattaatcagattttaatggacacatgaaagttgcatatatttatcatgtgcaatgtaatgttttcaaatgtgtgtacactgcgatggctaaattgagctaatgaacgtatgcattgccacacatacttataatttttttgcgtggtgagaacactccaaatctactctcttagcaatttttaagaatatgatacattgttattaactgca

SEQ ID NO: 111021 - DNA, 1036 bp, Homo sapiens
atcgagacaatcctggctaacatggtgaaaccctgtctctactaaaaaatacaaaaaagtagccgggcgtagtggtgggcacctgtagtcccagctactcaggaggctgaggcaggagaatggcgtgaacccgggaggcggagcttgcagtgagccgagatcacgccactgcactccagcctgggcgacagagcgagactcggtctcaaaaaaaaaaaaaaaaaaaaaaaaaaccacacacacacgcaccagaaccctgtgataaattgatagtggcttaactttcatcttaactcctttatttctgttccggcttgagtggtatttatcctttccatgtttcttatcccttgtaaaagagcaacggtgacgatttgggagggatcatgccctaagtgctccatggaaccatcagagcctgaacatgaaggcagaagagtttacacttacatagggaagggagggcgggcaatgggggagaggtcaggcagggacacagcaaaactgacatgaaccctggagtcagactgccaggttcaagctccagtgtgccactcactaaccctgggacctgggcaagatacttgagctttctatgcctcactggaaattggaagtggtgctctttgcctcaggggcgggagtgagatttccatgaagttgcacgtgtgaaggcagggcctggcacgtgggaaatgctccgtccatgctactgattattaccatgtgattcattcatttttggtcggtgtggctgagtggaggagagatgtggcttttgggtgaagcttctctgataatctgccgggctcagagggttgaaggtgctctggaagcaatctggaacaactctgtgcacctaaattttctgagacatagggactctgatcattttctagtgttagttagccctcgcggttttgcctgtggggagatctggcgtctcttcctgagtttaggagcagaataggagccttcttaaagagagaaacagtacagaaaagtctaccattggcttctcagccagttactggtg

SEQ ID NO: 111022 - DNA, 1047 bp, Homo sapiens
catacacccagtctggtctcaaattcctaggctcaagcaatccacccacctcagccttccaaagtgctgctgggattgcaggtataagccaccatgcctggccaatacctgagtttttaaatgccttttgcatgctctgtaaaatatccggcttagtctgtgatgtggctgagtagaaatcagctggaaggttgggcaggggccaggggaatgtactggataggaatgcatgttcgaatatgttgtttttcatttgtgtcctaacttttggctgagttcatttgagatcctctgggtggatgatttttgctttattcataattcttgtttattagaaaagcaaaccccatcacctctccccattcccccctcagatttagagttacaaaagtggagcacaagtcaaaccagaaggaacggagaagcctgatgtctgttagtggggctgaaaccgtcaatggggaggtgccggcaacacctgtgaagagagaacgcagtggcacagagtagcaggtgagccgtggttttggtgacattgggggcagagtggtgcagggtgaggagaaggtacttggagcctcccaggtgctgtggcagcataggaatggtatttgacagggaagtgggagagctttccttgacccaggaagactgagggggactgaacatgattacttgtctgcctagagcttcttgtaaagaagtcacaaacttagtgcctccaggggcttggcctgtgtgataatgaggatagaggattacttgtgaggcaatgtggcatggtggggattgtggcaaactagaattcacatcacccaccatatagggcttgcattaccacgaggcagaaagcacctagtgttgctgcatcttcttacgcaaaaaaagacaaaatccagacttctaaaatgtaaaatcactgattttcgatattggcagcttacttttttttttttaaacaaccatgcaggccaaatgacttgtaatcttgtcaccatttttaggtaaactgtgacttgaaaaagtctggagcaaacaaaccaatgc

SEQ ID NO: 111023 - DNA, 1031 bp, Homo sapiens
tgtgacccatatgtgaggtggagatcttgcagttcaagtgatgaatccattggcccttacctgaagcatctttgcagtgggatgcttttgcagttctgctgttagatgctgagtcccatgcaggaactgcattgccgatgttgcatttggaaagacagtggggagtactggtaaggaacacacatgctggagtgagaccgggtgagcactgagcgaaagtcaacagtgctgcttacatgatccttctctctcagtatactgacaacccccctgggaagagtaacctgaactcgtcacttctacctccttcaagtcctggcaccactacttacaaactgttacgttgctccatgcctcagtttccccctctgtaaagtgagaaggacagtcacactcacctcatagagttgctgtgtgtagactaggtgaggtgactcacataaaggtcttaaaccagctttgggtacttacgcactcaagaaatgttggctggtattatttttattttaattcagttgagtttcatcatgtgttgcacaagcatcatggagaagacttgcagggctgtttgccacttacagcaaaacagcacaattcatgaccacactgttttattaagaagcagagtcatgggaatttatgaatgcaaagcagtgagaacctgtagcttgtttggacaaagcatgttttgttggccttaaaaaaaaatctgctgaaattttcaactcagattcaacatgccttttttttttttttttttttttttttttttttttttttgaggtggagtctcactctgtcacccaagctggagtgcagtggtgtgaactcggctcactgcagcctctgcctcctgggctcaaacgattgtcgtgcctcagcctcccgagtagctgggactgcaggtgcccgccaccatgcctggctaatttttgtatttttaggagagacggggtttcaccaagttggccaggctggtctcgaactcctgacctcaagtgatccacctgtcttggcctcccaaagtgttg

SEQ ID NO: 111024 - DNA, 2734 bp, Homo sapiens
gctgggattacaggcgtgagccacagcgcctggccaatacttgaaattttaagatatctggccagtcaagggcttatatgatcctgaagctcatctggaaaattaaccttctctcatccctgaatcgatatgggatagaattgatgctacaggaggattcagagtttagggctaattattttggcacatacaagttattagactataggtcacttatgaaatacatttcactatcatatttttcaaagtatatttatcaaaattagttaactgcaagggagcagcggcatataaatggtcctttagtttggtggagttggtgtggggtgagggggtggtttcttctactttatattgctattgatgtgtaagaagcaatgccttatagtagatctgctctccttgccatagattctttgtcattcttactaagttcctgtggggtggaagttactgacagatggtgccatgttatgcagttatgttgggggagaccctcctttctctaggcccccaggacttcatctatgaactgaaagaatggaattagatgtgttttcaacagcttttctgatgtgattactcatcttattcattctattttaattctttaattttatttttattccttagcgaatgctgatgtcttaaaggcgatggtagcagataacagcctgtatgatcctgaaaggtgagtgctcctcccctctttcttagtgcgacatcttttcagttacttgctcagatatggcgccatctgaaatgctcttctgctagagcaggtttcccagctttaacactatagttattttgggaccaggtagttctttgctgtgcggaactgtcctgtgtattgaggatgtttgatagcatccctggccttcactcacaaggtgtcagagcatcccctgcccccaccctcccaaggtgtgacaacccataatgtctccacacattgtcaatgtcccgtagtggggacagtcactcctggttgagaactgctgtgttagagaatagtgatgggaagaaggaaggcatagaggttaagggcaagaacatagccttggaattgggagatgtggttgagtcctgcctgtaccacaatattaactgtctgttcttgaggaagttaactgaccaccctgagttccatcatctataaaatggagatcaccacagtaccagctttatagggttgttataaggaatacagagtaccttaagcattgaaagacctccatgaacaatgatgattaaatgaacaagctggtttggagctacctgctatgttctgtttttgtattactattttaggttatggttgttgagcagcatattccttcataattaattacagagaactgtatttccataaaagtattatttcttcaacaaggagcatttattggatgcctactgtgtgctgggtgctgctctggagctggacatccacagacccttgccatggaggaacacaggattggagatgtgtgtgtgaggcctcatggtggagagcctgtgaatgctgtaggatgggtggagactgaaggctctgggggaccccggggggccaatgggcattcaggaaggttcatggaagaggtgccatctgaaccaggcgtgcaggaggtggagacaagagtcagggctggctgtaggaagaagggccagaagaaaagtcaccacatcatgatagcctgggactcacctgtgaagggttcagtccagggtggccaggccaactgacatggcaaaggggctggatctttcttcacttgctatgtgggttgtgcactcagcacaccttagatgtttaacaggtgtttgtcaaactggctacgttagatgtgtgttttagaaaggtaactcagaatgcaaggagttgagtttaggagagacgtagagtcatagagacagaagagctctgatttctcccacattccagtcctggccacagacggctggtgttctgaccatcttagctcaaggtgtctttgtctcagtcatctttgggcatcctgtagtgcccgtcagtgggttttgtacatagctggtacttgagaaatgcttgttgaatgaatgttgttaaactcttgcattcagctttctaatatgtggtgctaatttaacattattttactccaggaaggtactgctttgtgtttttattttaacaggtaggaaggcatccctaaagagcaccagaagacttttggctcagtcatgtttgaggcggtctcctcaaccgtaggctctacttcttttttaagtgtgtaggtggccagtttgcatcaccgaaaaggctggtttctgccatcacagcctcctgtgtgtctctggggctcttgccacagtccaggtgtcaggctgtgggtgccacgccaccctcagtactcccacctgcaccagagggctgattcctgctcagtttggctctgttaggttagaattcctccttttctgctgggccagagccttcacacatgctttttgaaaatagctcttatctcgactatgtatttctgctttttttttttttttttgagacagagtcttgctttgtcacccaggctggagtgcagtggcgcgatctaggctcactgcaagctccgccttccgggttcacaccattctcctgcctcagcctcccgattagctgggactacaggcgcccgccaccacccccggctaattttttgtatttttagtagagatggggtttcattgtgttagc

SEQ ID NO: 111025 - DNA, 1057 bp, Homo sapiens
tttttcttttttaatgagctttcttcccatttctcataaggctttaagaaaatgatgagagagaaataataatgaagactggtacaaatgcattttcaaattattgtcttggaaagtgagtatttgaacttcagaagagatagatggacagctttgatactttctctttatgcttgttatgcattaggaagtttggggctggagggagaaagcctagaattgtagcaccatgggtgatctcctgaggcttctggaaactgttcagtgaggtcttgggttctaagattgattgacttgatgctggtgaccaattgtaacctgttctcccctcctcttttctctttcagaattgaatgacagtgtgaatgaaaacagtgacactgttgggcaaatcgtccactacatcatgaaaaatgaaggtgtgaacattttagtgttccaaaacaattcagtattcctatcctttattaaaaacctgcttcgaagagtcaagatttatatagactctcttactgacttcacctaagctttctaacacctcagcttccagcattattcagctacgcaagtttcacatgagtgagttttctaagcgtgagtcggtctaagcgttgcagagacccagccctggaggcgctgtcagctggtgttcaaatcctggcctcactgcttactggttgtgtgcaatttggggaaactatattgccttgtttcatgaggtagagtttcttcctgtaaaatgaggataataatatttacctcagcctggcacggtggctcacatctgtaatcccagcactttggaaggctgaggtgggaggattacttgaggccaggagttcaagaccagcctgggcaaaatagtgagaccccatctcttcaaaaaaagtaaatagccaggcatggtggcacattcctatgttcccagctacttgggaggctgacgtgggaggatcacttgagctcaggatttcaaagctgcagtgagctgtgatcacaccactgcactccagcatgggtaacagagcgagactctgtcaaaaaaagaaataataag

SEQ ID NO: 111026 - DNA, 1029 bp, Homo sapiens
tctccctgtaatttatatgcttcactaatgtagattaatatcttcagttttttcatggcacgataattatgaaattaagtgaatgacacatgtttgtaagtcacagagctctgtagatatttagtgtttgttaggggttgccacatgtcaaattcacgatgaagacaccttctcaatcacctgattcagagggaggtgtttgactccaattctgagcccctctttcatccctctttcccattgtccccctaaaaaagaatttattttcacccccagattgaaacagacagtgattctgagtaaagctccttgatctcagcatgctgcctacttcacctattcttgttgcgtggaatatgtgttatataaaggaattaataaagaaaacattgttttaggaccataaaagggattaaataaatgtttctggtttttcctgaaaataaggcatgaggttaaaccctaacttagacggtatattgcatatatttagggatgtatttattatattgattcttcagggagaaatcagaaaacactggctatttcaaattctggaggttgtctgataaagtaatgaatgcaacctcttacaaacctaagaaaccaattatttcctttcatgttcaaagacaatggatatttccatgcgaaagagaggtagtctttgttctatggcctctggtttgcaaataaagcttctgtttgatattgtttgtttgctgctgtgatgaaccgtgctcatttcataccaggcatattgtccccattataatcattatgatgcaggagttttcttctcggtcactttgtaaactggggacctcctggctggcgacgctctgccccagcctcgacgccctgcttggccacgctggcgtgcttcagctcccctgtggtatagcttgtacccactttcagcagttcccaagctcttgtagcgcacccaagaagaatgaggatacacgacacactgaagggtgaggagggcggagaagaattttattgagctatgaaaatggctttcag

SEQ ID NO: 111027 - DNA, 1043 bp, Homo sapiens
gtagcagttagccacacatggccactgggcacttgagatgtggctaatgcaactgaggaactgaatttttaattttatttaaattcatttggcttaaatttgaatttaaatagctacatgtggctagtggctatcttactgaataatgcaggtcttttatgattatgactaaaatacagtgcccacctttttgtagacactcttctgaatgctttacatattaatattgtttaatcttcacagtgacaccatgcagcaggcttccagttactattgctgtatgacaaataaccccaaagcttagtgggtgaaaacaacaatcatttcttttgtttaaggatttgttatacaatttgggcagggttcatcagagacagctctgatgccccatggagcatcagttgggactataggatctacttttattatggctattactggctgataagttgatgcctgctattttctctccacagggaagcttaggcttcctcacagcatggtggctgggttccaagagcaagtgccccaagaaacaggaagtggaagttgtcagtttcttattgcctgaggctggaaagtgataatgcatcattcccaacacattctgtgggtcagggagagtagagtgtaaatgtaaggggacgagatacagacctcacctctcagtagaagcagtatcaaataattttgaagctggaaaccaaaaagtatctgagacgggtctcagtcaatttagaagtttattttgcaaaggttaaggacatgtccagagaaaaggatctcaaatccacaggaacaatctgtggttcatgccattttcctaagaagattttgagggtttcaatactcaatacttgtattgagtattcaatacttgtattgaatattgaggtttcaatacttgtattgaatattgaggtttcaatacttgtattgaatattgaggtttcaatacttgtattgaggtttcaatacttgtattgaggtttcaatacaaggggaaagagggagcagatgttcacattactgaatctacctgt

SEQ ID NO: 111028 - DNA, 1048 bp, Homo sapiens
gaaaagacttcattcatagcctgaaacttggcattttcagtggaccttaaaagggagtgtatggaatggtgtgctgagcaaaggaaacagcctgtgtgcaaaggcatggaggtgggaatagagaagttaatgcagactgggtgtggcagagactcctcagtggaagtcatgtgagatgaggctgcagaggggagactgaggttaggcgacagagcccctgaaactgcactttactgtgtagttgcggaggataggggacaacaagaggcccccatgcatttccatgtgatagaagagccccagaggctgagccgaaaggagacagggccctgtgctgtcagcagggcagttcagattgccattcccatttccttatctgcagaagtgtaggtggtagggaggcagagggtgagccatcaaacataatacagtcctttgtaagtaacacaaataggatctatgcagcagaatagatttaatgcaatccatatgatatgcagatagaaacaatttttcaaagtttaaggagtgctgagaaatgagaatcatgaagtaagtgctaagtatatagttttggcctagtgtggtggctcacgcctgtaatctcagcactttgggatgctgaggcaggaggatcgcttgaggccaggagttcaggaccagcccgaaaaccatagcaagaccccgtctctacaaaaataggacaaaaattagctgggcatggtggcatgtgcctttcatcccagctactcaggaggttgaggcaggaggatcacttaagcccagaggtgcaaggctgcagtgagctgtgatagtgccactgcactccagcctgggctacagagtgaaaccctgtctcaaaaaaaaaaaaaaaaaaaaagaaaaaaaaagtatatagtcttgatggcttggtggtgtgaaagccaaggagtgttcattaatggttaaagctcgctaattatgtatttttcttaagttagagtaaataccttcaaattatacaaatcagcttgtctattgaattcttgattacaggcatgagccacca

SEQ ID NO: 111029 - DNA, 1038 bp, Homo sapiens
tcaaaaccaattgtttcgtggcttctttgatttacttatttatccaacaggtattaacaaagtaccttacagtgtgcaaggctctgagaatgaagtgatgtgaacaaaatagactcagtacctgcctttatggagctagtaggttatcaggaaggcaattaaacaagcaaaatgacatgccctgagtaccttgtcaaggaaagtatgacacagggccaaaatacctaacctagggctggggttgggacatgcatggacaaactagactccagtgcaggttgggcatgctctctggaggaaatgaaagtgaaatttacagctgcaaaaactgcaggagttggtcaggtggaaagaacttgtggtcaccgaagagaggaggtaagatcaagcaaagcaacagcagtggttcccaaacttgagtgttcagaagtccagctggaaggctggttaaaacagatctctgagccccacctgagagtgctgagtccataggactgggatgggtctggagatttgcttttcaactctcatgtttccaggtgatgctggctaagtatcaactgtgagcaggggagtgaaagagataagagtagatggaatcccctctcctcttcttggggctgtatgtatcctgtcctctgaccatccttcaagctgagatcaaggatagcatttccaggaaacatttcctaggtattctcactgcctttattgcctcctgtgaatacactgtccacaagtctatggatacatgttgcatcttttccatgttatttagccctcagttacatgcaattgtttccaccatgtttgttttgtctaactagagcttcttgaggcagctgagcatatgaaatgtgtacaaaatatttgattgcctgatcaaatttaattcttgcaaccactgtgtggagcaggttgcatgttattctctgttctgtggagatgtggaaactgagacttacagggaataaccaagatgaagagaaggggaatttcttgctcaagtcagaggaggggaagtcaacgtgaggtgtg

SEQ ID NO: 111030 - DNA, 2133 bp, Homo sapiens
tgacatgttttactggatgggacaattttttttttcttttccttattttgatacaggggctcattttgtcacccagactggagtgcagtggcacaacctcggctcactgcaacctccagctctctggttcaagtgattctcctgcctcagccttctgagcagctgggattacaggcatgtgccaccatgcccggctaatttttgtatttttagtagagatggggttttgccatattggccaggctggtctcgaactcccgacctcaagtgatcctcctgcctcggcctcccaaagtgctggtattacaggcatgagccaccatgccctgctggttcattttgattttcatcctgcgtttgattgctgggacacataggtgcataatcaggttccacttggatgtgaggttggagacattcattagagggttagagtcagttgcaacagaatctggggaagagtttaatctgggagtaaaattattaaaaattcagcacatgatgcatgtaattagccatcatcagcaggagaaatccatccctagagtgggtgtgtgtttggtttgacctctgagcaacacccaggtctcaggactagaatgtgactgatgaaagctctcatctaattgcatgacagcctttttttttttttgatgaaaattaatgcggaagaagaaacaggtgtctaaaaaggaaaggatacagagcacaaatttgccagtatcttgaggcgtgtgtaaagagaagatgctctgaccagccaacatctgatccccttgcaaccaaagatggtgttaatgtttgtaccttgagcatagggaagtagagggaaaggaatgggaaatactgttgagtgcctgctgtgtgccaggctttgggttgagtactttgtatgcatttttatttttatttatttttttctttttgagacggagtcttgctctgtcgcccaggctggagtgcagtggcgcgatctcactgcaagctccgcctcccgggttcacgccattctcctgcctcagcctccagagtagctgggactacaggcgcccgccaccatgcctggctaattttttatatttttagtagagacggggtttcaccgtgttagccaggatggtctccatctcctgacctcgtgatccgcccaccttggcctcccaaagtgctgggattacaggcgtgagccaccgcgcccggccgcatttttatttgtttatttatttttatttttattgttttttgagacagagtcttgctctgactcccaggctgaggtgcagtggtgcgatctcagctcactacaacctccacctcccaggctcaagcaattctcctgcctcagcctccctagtagctgggattataggcgcccgccaccatgcctggcaaatttttgtattttttagtagaatcggggcttccccatgttggctatgctggtttgtaactcctgacctcaagtgatccgcccttctcgacctcccaaagtgcagggattacaggtgtgagccaccgcgcccagccttcataggcatttttaaactcattgctcataaccctgtgaaatacttacttccagtaaggcaactgaggcaagagaggttaaacaactggctgaacatcacataggtactgtgccagtcagcattcagagaagcagaaccactaggaggtgtctgtgtatgtgtgtacctttatatgtatctttatctgggataacccagcctgcttgattccaaagttcattccctttccactgtaccccactgctctgcagaggaaaaatagaatatgagtcaacctctgcaatctcgctgagattctaagatagtttagaacgtcataaaattgtaagcatgtggttatcagaagttgtcaagtagagaaaagaagggcagatagcttcacggtgggtagtggcaatgcctttttcacttccttcctagtagaagaatctcattaaacttgtctcttagcagcagcattcgaaactatataccacaagcacccaaagggatgattttccacgtcttggcttattaatgtccttaagttctctggttactcaaccttcaggtttattagtttctctctcagacagtgggcatagccctcgagtaaggagtgggt

SEQ ID NO: 111031 - DNA, 1044 bp, Homo sapiens
atagcctaactgcgccgccaaggctgctgctgggtttggaaaggaagcgggagaggaggggtcgggctgagctgtgggtggggaaaagggcggggccatggatgggccacgtgccttcttaggtggagtccggggctcggtagggagaggcggggccaagctgaggtgggtggagaaagagggcgtgtccatggcctagctacgccgctgaggctgctgcggggtttggaaaggaagcgggaatggcagggagaggcgggatcaggctgaggtgggcggggagtcgggggcggagccatgagtggacctcgtgccggcttaggtggagcccggggcgcgcggggagaggcgggaccgagccgaggtgggtgtggcgtggggcggggcaatggcggggcggggttcgccgctccctggggcccagcccagccactcgatcagcccgccggctccggagcggctctgccttcccgagcgcgggacgcggcgccctgggggaggagggcgaagcgacgcggcgatggctccgcgggcactcccggggtccgccgtcctagccgctgctgtcttcgtgggaggcgccgtgagttcgccgctggtggctccgggtgagtgtccggtcgtagccggggcgccgggtgctgagcccggtcccgggagcgcggaaggaagcgaggggtcgggacggcagccccgcggcgtcctgctttctggcacagccgcgggatcccggcactgaacaactggctgtcccgcggcggtccgggcagggcgcggtgcgtggcaacggctcccgtccctcccctcccgcgggccccgctcccgccttccctccctggggcctcctccgaggatctgtgttccccagcgctgggcagtgcggggcgtagggaccaggccttcttcgggggcgcttcctccacggccgctcgcctcggaaccccgcggacccgtttcccgccgcccttgtcctcaaaggcgccgcgagcggaagatcgtgacacagagcaccgggtgcgctgtcggcgcctccttctccctttt

SEQ ID NO: 111032 - DNA, 1072 bp, Homo sapiens
taggccgggaaggcttgtccccggacgaaaccagccatccggccggccggactgcaagttcggagtagaggagcgagccagggtggtgtaagcgcggccagaccctggacgctgtctagttgaggggcgcacgccttactgtcactcagaccgctggctcgtcgtcggtagtcggctgtgcatccccatggacccagaatcgctccgtcccgcgtattcctttggccgctgagacctttgcagagcagcgttctggtccggtcctcccatcccgagggcttggttacaaacgtgggttgtcctcccgggtgggcccgcctggcttcaggagtcccccttagaactttgactgccagggaggcacacctgggacacagcacggttttctctctcttcattccgtttcttagaatcaggaacccagctctggacatcactccctctcctctctataaacttgcgtctcgccctttcgacctgttctgcttgctgttaggttttctcggaatgtccctcgctgctctcctgctgaacttgtttctcccgttgtgactcatattttgtgcctgaacttaaatgtggcttacgtagagagtcagtccttccttggctccgaagcgttaaattatttatccctaatattcactctaaacagtctgttattttcctttatagctcttactacaaatggtaaaaacaaaaaactccaaaaacacttgtttgtaggtttgtttaatgtctgtctccagggccgacttcaggggcgagagacccctgcagtctcacaggactcgcgctccttgaagggcccactgttgttttaatgtcctgctgtcctgtcttgaaagtcttactggtaaaacaagaggtcacccactttcattgtgcactggacctccataaattatgtggccaggcctctctattctcactaccttggtttgtagtgcctggcataggcatagtgcatgacacatagtaggtcactgaaatacttgaatgaacaaagaagattacaaggtcagtaggggtcaggtctttgtctttatttaccattctctggcccctacaa

SEQ ID NO: 111033 - DNA, 1039 bp, Homo sapiens
tccgtaaggtaactttctggcatcaaaattgtatgtgcattcacaaagttgatagtgcttagcaaattgacctccaaaaatataccagttggtgctcccaccaacagtagatgttgacagcatatgatacctacatttcctcctgctctgtgatccaatttctcatttttcctgatttgctagttgaaagtaatagctcacttttatttgtattctttaattaacctatattttctatgtgtttgttcaccttttatatttataaacatctttgtttataatatatatacatatatacatattatatatacatatatgcatatactatatatataaaatatattttttagatgttttctgttgtctttggaattttctattgaaactgtttgctgaactgtttaaaaatctgtataatatttattagtcttattttatagcttctgggttttatgtcatgcttaggaagacatgctctatagcaaaattattaaagtaatagcaaaatatttcccttgttctttctctagaactatcatgtttgtgttttataatatttaaatcttttgtttcattagtgatttttaattttatatggggcatgaagtaggaaagcagattagatttttttctaaaaggtttgcagttgtaccaacatcaatggaagaatctttcttttttttcttttttgactaattggaaaggtcacctttatgcaacaatttctaacattaatcaagtgcttattatatatcagataactgctggaggcccttcacatgtcattttttttcttttttttttgagacaggttctcacattgtcacccaggctgcagtgcagtggcatgatcttggctcactgcggccttgacctcccagattcagggaatgctcctgcctcagccctctgagtagctggtactgcaggtgtgcaccaccatgctctgctaattttttgtatttttttgtagagatagggtttcaccatgttgcccaggctggtctcgtattcctgagctcaagcaatccacccgcct

SEQ ID NO: 111034 - DNA, 1036 bp, Homo sapiens
ttgctaaatttcacttctggagctgtcttggttggtcctatattatctttctaagaggggaaagacctcttgagttcttaaggaactgaatgtttttaaagactatcatatgctcgattcttgattaaataatcttttattttcatattcttcttcagactttgtcttttgctttggctgacaaaaccaaggccagaattgttttagctaacgacccggatgctgatagacttgctgtggcagaaaagcaagacaggtaaaattaattgtgattacctatattatagaacatataaaggatgatctcttcattggtaaaatgtttctggggagacgggacctatttggaaacatttcccatttattttgcaaatgatcatttcactgaacctcctgtagagtcttctaatggagagcaagatagagatctagtgtggggggaggttacgtgattggcaagcataatgcagagtaaatcaacccagtatatatttcaaattgaaactcctatttgggaacttctcattttgtaattgatctttttataagtaatgtctcagtgtctaatgagggtaaagcactttggtgctagctgtatgcttcagtatttgctgaggggtttaggagggagcagtaccttcaaggagatgctgaatttagtttggacagaccagggaggaattcctgtggggtatcggcacagtgtttaagacaagtctgaccagagagtttgtacaaaggagaagtaagtacgtggggctaaagttgaaaggtaggcagggcccaagcaattttgggcgtcaggtagcctatgtgatgttttgggggcaggagggtgctgctgctgaaatggtagggttttcagattgtgataaaacaggttccattctatatcagtgttgagaaagttaagctaagatgatacgtcctgataggtgagatttacttctagccatctggactgccaagagaagcagaaattacacatcttttctctgatgttctgaccatttaggactgagcttgatcttaaggg

SEQ ID NO: 111035 - DNA, 1051 bp, Homo sapiens
gtcaggagttcaagaccagcctggccaacatggtgaaaccccatctctactaaaaatacaaaaattagccaggtgtggtggctcatacctataatcccagctactcaggagcgtgaagcaggagaactgcttgaacccaggaggcagaagttgcagtgagctgagattgcaccactacactctagcctgggtgacagagcaagacttcatctcaaaaaaaaaaaaaaaaaaagaggaactagtcatcaaagcctgtgtggtcatttcgcaccttaggcaataagtgatcagaagtgtggaacctgtctgtggacacagagcttagttggtggtggtccagggagaatctgggttttctatctcaggatccagcattctctccctgtcaggagttctcacacttgcaggagcatcagtaaccaagaaggctggggaaacagagtgctggagcccacacctggactttccgattcagtaggtctggggtaggagccaaaaatgttcatttctaacaaggtcccaggtggtactgatgcaactggtcctcactttgagaaccactgtttgttttctagttagtgtactctgttctctgagtgtattggagctgttggctgtaaagcctgagtttgcattctttacaccaagcagatctttcactggagacaaaagaagacacaaaggtagcagaagagtgttgctttctatgttggggttgggggaggaaagttaagaatatccttatgagatgttaggcacgttctttgatattttctttgttctatttttcattttcatctgcacacagcatatttttaaaatagaaatagtatgaaaacgcttacgatgaaacgtggcagtcccacccctgccacctcattgccatgtcaccaagactagatttgtaaatcatgtgctcatatagtgatgttttgatataccagttttacaatttgttgactttctatttttgagataaagatttagttcttacgctttctacattcaataattctcttctccccatcctcacagtacgtttatgccacag

SEQ ID NO: 111036 - DNA, 1118 bp, Homo sapiens
tgtttgtttgttttctttttttttggagacagggtcttgctgtgtgacttagtcacttaggctggagtgaatggcatgatcacagctccctgtagctttgacctcccaggttcaagtgatcctcccacctcaccctcctgagtagctaggaccaagggtatgccatcatgcccagctcttttttttttttttttttttttttttggagggacgagtctctccctaggtttcccaggcaggtctcaagtgatcctcctgccttagcctcccaaagtactgggattacaggcgtaagctactgcgcctgccttaattcatgtagtaatagttgctttgttcttccatttgcctggatttctatgtcctgtcagcagtttttcccaaatccttcaaatgcctctcagtagggttttcctggtccatgtccaatggccgccctcctggttgggtgcacagctgtcatcctgggaatgcccttctccaggattgagtcccttgctcctagacctcatggcttcctctttctatatttattttcctagatcacatcctctaatagctttctgagaacaagtaattgggtggtaagtttttggtggcatttaagtccgaaaatgtcttattctgtcctcacacttcactgactcacagttttgaaagcattgctccattattgttgggcttccagcattgctattgagcctccaatccttcctttttcagcagatagttaaggcctactgtatgctgtatgtaaggttattgatgccatacttattcagtcctttccatgcaacttgttttgtttgtttttttcctctgggaagattttaggaacttttctctaaacttcaggttctaaaatttcacagtgatatgctatagtatgggtccctttttattcatgtttctggatacttggtctgtagaatcatttattttagttctgagaagttttcttgattatgtatcaggaaagggagctaattggttattttttaaaataatcacctcccctgcattttcagttctttgtttcttgaagagctcttagatgctggctttccaagactgatgttctacttttcttgtttctttctttcttcttctgtttttct

SEQ ID NO: 111037 - DNA, 1018 bp, Homo sapiens
atgcctgacaagagaaagagatttataaccaaattctgtaattgggacttccagtctttccccaagtagagaattggacttactctatatgctaaaaacccatggttgaaatatgaattagttcttaagtgatttttggcttgcataccatttttgcaaacacaaattgtcattactctgctcatttaataaaagaataatttgtagtataggtatatacctcaatcagtgattttgttgttggaaacagaacagtaaatcacactggccatgatgctaacagcgtgatagattttctgttcttgggacaccaatgtcactgtatctcatagcgaaggattatctgctgtaggagcattctcttgactacttataacatttgctgggtgaaataattctccaggttaaggcctcttctaaacagatgaggtcagcactaactgcatttgccagagaagacatatgcatttactgccagcatcataaacacaaaactacagtttgcgaggaaaccctttgaccagcatctaattaattcactgagtaatgtcttgggagaagaggcatgtaaaggaacaattttataagcatgccatgagattgttttctattgtatgttccatagaatatgaggaaacttcaaaacattttgtggaaaaattgaattaaaaagtaaaaaacacatatatacataagctttatttctcaagataaactttatcaagttcaagacacttttgtaagcaatgttaacagccattgagtcggtctctaaagaactgagggtcctgggaatttaaccatgtttatacagtcttttatacattattaactggagaaaaattggcgctctttaaagattttttaaaattgagaagcaaaaggacgtcagaaggagccaaattaggcctgtaaggtggatgcctaatgatttcccatggaaactcttgcaaaattgctcctgtttgatgagaggaatgagcaggaacattgtcatggtggacaaggactctggtga

SEQ ID NO: 111038 - DNA, 1086 bp, Homo sapiens
gagcattaggaaaaacagctaatacatgctaggcttgatatctaggcgatgggttggtaggtgcagcaaaccaccatggcacacatttacctatgtaacaaacctgcacatcctgcacatgtaccctgaaacttagaaataaaaatttttcaaaagggaaaaataaaatgtccatctcttgaatcctggttttttacttatcccacatggccctgtcgtttgcacagattatgtgatggttttgagttgatgggggctgcagaaaaattgtgctaatttacagtgaaaatcaaatcaagacatttgattgatgatgtgtgatcaaaattgtgcacggctagatgtgctgattgatgacgtggttttggatatgccgtgtattgtctcagctgcaggtaattggaatccatatgcattagctccattcctctcccactgtggcatgcagacattttgcattcggagccagtaatttggtgccttttccgacaagtttggaatgaaagcatgaatgctaaattttggaataccacagtgtgatatgaaaagcatattactaattaatggaatagaaccaggtaggaatttcttggacagataagagagaaatggtgtttttaatctggaggtgatcctgagtaattcttctgagctcagtttttaactgacaaatcttaatatcagactttattaaaaacgttttcaaagtggcatgtgcaattaaagcttcatcaaggagaggcactgcatgtcattactggtaatagaatcctgctcctgtagtttttaattcccacttttctgaaatgaaacacaaccagttatgtagtataatatgtaaaatctactagggaattcaataattttgcaattaagcttgaggtattttaaaatcattttgtctattaaatatgtcactataactgtttaatcatgacttgaataagagacaggagaaagcatatctgggaaaatgcaaatggttgatgagtagaagaattgactaaggttgatgtgtagaatagtggtaaattctacagaaccttagagctccttcaagggagggataaacatgagccacgcctg

SEQ ID NO: 111039 - DNA, 1043 bp, Homo sapiens
cctgaaatcttagagcatgaagccctgtgtttgtagcagttaggacctgcttggagggatgctgacaggtggtctacgcagacactgctccactgtgcctaggtgaggcctttggtgaattattttactttcctgaacctcagtttcctcatctgcaaaacagaataagtaataccttgcagcagggttttaacataattaggggctgtgaagtaaagtggttaagttggcagagtgcctgggcctgattctggttttctcctttcccacctgagtgcttcagtttccccatccaaaaataggtactcatactctcgacctcatgcgctgtaaatgctttgaaccatgcctggtgcatggtggatgctgcctgaaggtttgctggttttagcagtgtctggcagataggaagcactcaatacacattatgttttattactattacaattattcttaccatctagggttgggagatagataatatatgaaaacatctggcatgcagtaagtactcagcggatattgttttcatccttcctgacccttgatcttggagcaggggtaccttgaagtggagggaggtgatccctgcactgagttggcattcttttttatacttgtgttgtccctgagaacaagaactctagatatttggaaaagttccaggagcatcggggctcttgtgatattatgacctagagatcggtgagcagatatgtttagttctaccttgaccctgagcgaaggctgccaggtgcaaacctgtcatggacatttatttatttatttatttattttatttatttatctgagatggagtctcactctgtcaccaaggctggagtacagtggcacaatttcggctcactacaacctccacctcccagattcaagcgattctcctgcctcagcctcccgagtagctggtattacaggtgccaccatgcccagctaatttttgtatttttagtagagatgggcttttaccatgttggccaggctggtcttgaactcctgacctcgagtgattcacctacttcacc

SEQ ID NO: 111040 - DNA, 1042 bp, Homo sapiens
gccaggtgtctgaatgtgttttaaaggatgcgaccctcgccaccttgaaaggctcgctggtcgttagggcatcttgctgtcaccccatgcactcagtcccttggccggcgccttcccagggcttgtttcctgtgtatggctggttgagtaataagctcacaactcgttagccatactgtgaggctttaccaattaataatttaattaggtggtggttatgtcttgagttatcatgcaatgcttttatagtcttatttaattacatttttatgaatacctgtttgtgagcaggtatggctttgcctgtgatttaagtgatacaaaattggagacacagaaactagataacactagtttttagatgggcaaaagtttttaggtagattttcttactaggtaaataacattccattagaatcacttcctgaaacatagctggtggtaaaatgagatgactttcaaaaacgttttgagtcattaaaaagtcatttcaaaaaccatcacagacttttaggacgattgttagccttctccgagtgtcagtacgttggaaaagtttatatagaggaaatgtaggctggtagcttaatttggattctgaatcttgttatttcaaaattattatttttgagacagagtcttactcttgtcacctaggctggagtgcagtggtgcgatctcagttcactgcaacccccacctaccaggttcaagcgattcttgtgtctcagcctccccagtagctgggattacagctgtgcgccaccactcccagctaatttttgtattttcagtagagatggggttttgtcatattggcccggcaggtctcgaactcctgggctgaagtaatgcccccaccttggcctcccaaagtgctggggttacagatgtgagccaccacacccgccctcaaaattattatttcgattacaggacaacagcggaaaaactattaaatgtttttggagcaaattcatgtatacctcttagcatacatttttaaaatgtggttattttatatttcatttcctgtaggtgg

SEQ ID NO: 111041 - DNA, 1044 bp, Homo sapiens
ttgtctgtgtttggtgcaaataaccgagtaactaattgctatttatatgttgagtacgagtacaacttgcccttccatcatctctttcttctaagcacagcttccatgcaaagttctgtcctgactctgggcttatttatttacctttgaggtttcctgcagactagaccagcccaccttgggtgccggtaggcggtaggagttgcccttctgtttaccagcacacagcacagcagccttcctatgtaaggtgtgaatctgactatagcaaatatttaggcaacaattttcttgtgttgcttgaagtcagtccagtgttggtttgtccttgatgtgtgtcctaggttaatgtgatgtattgttttaaaatttttttttcttctgtagactcatactacattttattagtggatgcttgagtttaataaggaggggagaactccttgtcatagtcaaaccattccttgaatttgaaaaatgtgctgcctcggctaagcaaagctggtataaccctgaccaggatttcagcagagttcctgtggagcactttttatctggtagtggtggcagctgtgttttgggctttgggaactctagttgcttagagtgtgccaggaacttgggcgtaggttggttttactgaaagagaatggaggagagcagagatagaaatcccacctaatccacaaatagaacacagcccagagcaatgcctgatgagaaaaaaagataaagtataatttgtttccttagacaaattctttaatctgattttaacctgtatgtgtgtcccctgttcttctgtttctatcaaaactctcctcatccttcattcctttcctgaagcacctctgattaatcattcattcattgacgaatgtactaagcagggcagagaataacgggaagggcaggttgtgccaggcagttagagtagcgtatgctaaggcctggaggccccttggtggagctgcactcacaggaggttggtgggcctggagcgagactgctggggggagtagcagaggcgaatgaggaccagga

SEQ ID NO: 111042 - DNA, 1022 bp, Homo sapiens
gaggtaataatttcccaaatgtagtaaatcccactttacaacctcacggttaattttgatcagggataagtagaactgactatacactgttaacttagatattgtccttctcaaaaacatcatttttattctgggtgccagagatttggcttgggtgtgggtgttaagaacagtccacagtgtcctggagtacctctccgctgatctgggggctctttaaacctctctaacaagtttttgtgctaatcctgactgagtagatggaggcagtggagcccagctggcctgtcactatggggcagagggtgactctaccctcaagccctgcatgaagaccccagggtgggcaccacagccctttacagtcacttagcacctgctgctgaacacgagcatgcagacctggtaaggcttgtgagtttcagagaattcctgcaagtccctggaaatgtgggcactggcagctcttctctctcttttttttttttaaatttagtgggcttagaggttttagcctaataaggaaattttacactggacgattttatcccaaataaaagcaaatcatagggacccagtgttgcctaaaaaaccagtccttactggggaggtctagttgtgtctagcctggctctgtgaccagatgccagccattccagcctcctgtggctgcatttcatcccgaaagtgaataaggtgagtgagtgattcaaaggtcccatccagggggtgacaaagaatattccaggtggaagaaactgcatgagcaaaggtatggaggtggaaacccaaatgaacagaggcttaggaggtgtgttcgaaacatgtttggtacaaacggaacttacagagaaagaagccaggtgaaataaggcaggaagagttgagtggagccccattggtgggagaccctgagggttagcaggactgtgtttgttctggtagggattgcagaggagccctagaaggtttgtgagcaggaggctgaccccatcagacctgtgtttccagaagatcaggct

SEQ ID NO: 111043 - DNA, 1011 bp, Homo sapiens
aacagccagggtagggcactttgaaaactgcgggagtgagggccccacctccaaacaagctgcttcatttaggtgggtggacctggacatcagggcttgaaaatactggccattcccatgtgcaggcacatttgagttgagaatcagtgctttcagtgaaggggctggactttgaggacttatattctcatccagattgaatattcagtgattccatgaagtctatctatatttatgctggccacccaacattttaagttttaaaaactattttagaaaacctacgaaataatttcgtatccttacagtgcaatcttcctttttctttctcacctcctcccaccctcttttagctcctacagccattcgattacttcttttgtggtttcatagttttaaatgtttgtagaaaggtgttggtcagtcagaaggttgtagtgaatcttttaaacaattattttggagtacaaactatgttttgtgtttgcatagaccatctctgtggggtttaaaagctactaacagcttatccaatttgccatttcacaaccagggaagctgaataatgctacttcttttttacatgggatgaaagatcaagacccaaaggacagaaagataaggcagaggggatgaaaaaggggcccctgtgtcaggggctaacagtcattagcacttcacctatgcccagatgcctcctcagccagctaacagggacacctgatcactccttggcaagatgtaacacattaatctgacctgttgtctaattgtaagcatgaagcaggcattgaggcattagatcaccacagcatgaagcaaaagagccaagacagaccactgcacaggagcggccttctgtgccttcgcccatgtttgtgttctggcacctgtcaccttatattggaaatcacatatgcgtgagcctcctaaagtcagagggaatcatgtcttactcattgtaggaggcatattcaaatcttcatgattgaatctagtcctgtcaggctg

SEQ ID NO: 111044 - DNA, 1238 bp, Homo sapiens
agtttttacccccttcctttataccttacgaccaacaaatacaaataactgcttgtcaataaaaacaagccacaaatctgttccttctggacaatgattacgtagcattttttttgtgtgaagtgctcatttgaactccttacaatgagaaagcatttcatctaagggaaaaaacacaatgtgtccggccatatttttgaagtcttagaatgtgttaccatcatataacgggaaaaatgctagaattttaaatacacagtgcttcagacttatttaatatttgtttcttacttgttgacagaaaaacaaagcagcaaatgtaaagtaaaatgactttttattctaaatattgtttcaggagctctttcctaaatccttgtgaataaaattacacttgcagtgtatttataatcctttataatccctaaatccttaaaaagcaagttgacccaaatgtttaaataaggactttatttacagaactgaatatttctaattctcttgggatgtcattatctggctacatatgaaacagtattcacttatgcatgcttcagaaacttcatacattactgtgcatttgttagtatgtgaacaaagaaacttgttttggttgtgagcaaaatgcagacttactttcaaaattgagttttagtataaactcaaataggttggcagaagaggagtttaatttttatgtatctaaataaggcctgtttcttcattaaaagaaaattaaaactaagccccacacccttattgaatctgtcccaataagatgctttttgggttcttgtttgtgctatagttggttttgatttacttcgtctgcaaacagaaatgacgtagatactattgctccaacaaaactaaaaaaagattttcactaaaagtacccagatcatatcagtgggaataaatccactggcctcagtgtatttgcccaaaaaggatctgtgttttgcagtaaatattgtaattggaagtatatgttcttttagactaaataaagttttacttgaggacatttttcagttaggcatgtttattttgggggtttagtattgtcttccgccttatttatttttacttatctgtatgagccaaagctccagccagctctctcagcccttatcctgttgtaagttgctgactccttttcttgaagatggagtgtcccctttctgggcgtctctaacctcatccttgcctccccccaggtccccatcttctctgcc

SEQ ID NO: 111045 - DNA, 1044 bp, Homo sapiens
ttgcaatttgttgttgaaactatatttggcaatatgccctttgccttcaaatgttctgaaattgttagacctcaattatctcctttatatctgtattacacataacttcttggtgcttctgaatgacggggcacaccttaccctgagcatgagaaccttgagctcaattatgcctgaatactaaaacttagcagagcaaggagagagagactttggtctttgactaaagtgtgtctttttaagattctgagtaaaggataggagagattggtccttggaaaaaaaactaccacaacctcgattgtgaccaagttatgaggtattcttcagtttcttctgaccctgggaatccaggggacagttaagtgatctactttgtgtcatctttttgtttgtaccatttactactgagtcaccaacaaattcatgtgacttcacacattttctctctcctttgatacataatgaaagacatcactgctcacttcagatgcagcagaagacacagcatgtagaaatgtcaggtattttcataagcctcagaggactgaataagctttgaattttctgttcagagtggggttagtaattgggaagactcacgtgacttgataaaataatcttacacacttgcttagaagagtggcaaggttcttgtataaattgattatttttgtttgacaaatgttctttacagaaatcacttttaccaggaaaatcttataaactcctttttggagagtaactatggctttttgttgttgttgttgttttttgttttgagacaaggtctcagtcacccaggctggagtgcagtggtactgtcttggcttactgcagcctccatctcctgggctccagcaatactcctgcctcaggagtagtggggactgcaggcgcacaccaccttggctggctcatttttgtattttgtatagagacgaggtctcgccattttgcccaggatggtcttgagctcctgagctcaagcaatccgcctgccttggcctcccaaagtgctgggattacaggtgtgcactaaca

SEQ ID NO: 111046 - DNA, 1029 bp, Homo sapiens
tgcattcattccgtgagtgccagccacactgcatgttccaaataacacgcctctctctctcctcaggtgcctgagatcatcagctccatccgtcaggcggggaagatcgcccggcaggaggagctgcactgcccgtccgagttcgacgacacgttttccaagaagttcgaggtgctcttctgcggccgcgtgacggtggcgcacaagaaggctccgccggccctgatcgacgagtgcatcgagaagttcaatcacgtcagcggcagccgggggtccgagagcccccgccccaacccgccccatgccgcgcccacagggagccaggagcctgtgcgcaggcccatgcgcaagtccttctcccagcccggcctgcgctcgctggcctttaggaaggagctgcaggatgggggcctccgaagcagcggcttcttcagctccttcgaggagagcgacattgagaaccacctcattagcggacacaatattgtgcagcccacagatatcgaggaaaatcgaactatgctcttcacggtaaaatatcacccagctcgtgcacagccccagtctgccatacgctttcaagagaaaatctgctttatggagcgaagattcttagtcaattgcttttgatttatgtgtgaatccatatattttcatgctgaacaattctattcttaggataagctccttcctttagccataagcctttacagtcatcagggagaaacatgcccatgtgtaatttttatctcacccggtaattataaagacaccttttcagtgtggaaagaacagtgaaaacgtgtaaatgagaccagcagagagatttaaaaaatatatatgaatttcagatgatatatttcaacagaatcttttagttggaaaacaccctctctactattaatatttttatttatgaaacatttaccctttgctaatcaggaagagtggctttgtgagtgacattatatttgaaatttatacccaaactgaaatattaatttagccaatggcttgcttgcttttttt

SEQ ID NO: 111047 - DNA, 1050 bp, Homo sapiens
ggaaggtgaaggaggagcaaaggcacatcttacatggcagcaggcagggcagcgtgtgcaggggaactgccctttataaaaccatcagatctcgtgagatttattcactatcatagaacagcacaggaaagacccactcccatgattcaattacctcccactgggtccctcccatgacatatgggaattatgggagctacaattcaagatgagatttgggtggggacacagccaaaccatatcatttaccttacctgctttaagagctttgagcatacttgtagtattttcagactgtaatcctagctgttattccaattattatctgtcaacctgtgaagagtagtacagaaaactcttaaagcttaaaaaatcttttccaaagattttctgacatctcagcccagctaatttcaaattgactttttggtgactacaacttctcttctctttgattaggttgatgaaattatgatgaccctgaaacaggccttcacggtggccgcagtgcagcagacagctaaggcgccagcccagctgtgtgagggctgccccctgcaaagcctgcacaagctctgtgagaggatagagggtgagtaggggaccctttccagcatgaacacagtgggagttaaaggtcccaggagaactttagatgatactcatctgttggaagattctgcctaacagaggcttgtattagtcacagggattgtaggtggactctcagtgtgcagtgggtgtcttctgtatgtcaggaattgtgccggatgctggtgatacaaagataagaacccagaacccccttctgccacctccctccaaggtattctgaggatggaggaggagttagggaaacaggttaccaaaccggttgcctagtgtttatcaaggttgtgtgagtggtcagtcatactgggcactgcagagatatctagaaagataagaactaaggaacttgtaccagtttctccattacaaggtcattagtaacgtctgctagtacagtttggatggagaggaggtagcagaaaacaggttgcagttgag

SEQ ID NO: 111048 - DNA, 1902 bp, Homo sapiens
tgctgggttatgtggtaagaatgtgtttagttttacaagaaactgctggcctgttttccaaagtggctgtactgttttgcatccccgccaaccataaatgggagttcttgttgttttgtggacatttgggctcagtgtacccataaccctttgatctagcagtgttaagttgggattgtggcattactgccactttcctttttgagaatctaatgcccactttctccagagaaatccactttttgcatataacttgtaaaattttgtaatattggggttcacagcctggagtccaggttgagagtgtctgctgtagcctccaaaatatttaatatttcagtccgaaatttgaaagaacaggaaggcctcaatgaaaacaaacccttctaatcattaactatcctttccttaagtaacaagaacaacttacctttaatctttttcgttaagaaaggactgggtttctttaagaaaggactgtcagaaagtctgggttagtgttacctttgctttgaatgcttattatgtgcagggtaaagttgcttccttagttagctggggaagaagtgaccaagagtggtgttgacccagattcagatccttgtgtagttgatccatttatgtcactgaatttgttttaaagaacagtctggaaatttggagtagggagaggggaggaacaggcaatggatacttgtcaacataaaaaaagatgtattttcaaaatttatagactaaaaactttgtgtatcccaaaacaattcattttactttcttcatatatgataaaatcatacattaaattaggtggactttaaaaaaattcactctggcatttcaaatccaaagcatttgggagcaggaggagaccatagagtttcctctgtgcaccatcctcacttcagcagacagggaagctagaattaaggggcttggcttcacacttctcggcagcagccggaacctacatgtcctgacttctggtccagtgtgctgtgccacgaccctgtctaaaagttaaaaggcatagagagaattttttttttaaagaaagaagaaagaaatgtacatgccatgaagttttgtatggaagggggtgccccatggggattccacagagtgcttcacggtgaacacattcgacataggaaattatgacactgaatcccgttgctgttttccttgcccgttccctaagagtttgtcaatgtttggtcatcatggcccctgacctttgggtatttatatggattttgtgtttttcctcttgttttaaaaactatttatttgttaaacattttgactgtgtctctatctgatattaaagattcatttttagatgggaggacatcagagatgaaaagctaaatctggcccactggctccactgttcctttttaaaaattctctctacttttaggatcattggtgccccctggtgagatgattgagtaaaagcactagtttagtggatggaagctgttagcatttaaaaagacggcttagcaatattgttgacgattaaaaataaatcctgtttctgatttttgttttaaagaaattgagaccgagaaatgagcagcgagagaatgaattgattatttcttttctgagatgtttatatgaagagaaacagaaagaacacatccatattggggagatgaagcaggtatggcatttttgtctcttgtaattgttgccaagtctctgccaagtctctgtataaacaacgttttgaggattttctgaaactctgatacctttttttctccctatgttttattttcctttgttgcacatagaggggaaatttgggagtgttagactatgtatgcttgagaagataagaaaagtttctgcctgcaccatagtggaggcagaacagttgctctaataagagga

SEQ ID NO: 111049 - DNA, 1079 bp, Homo sapiens
ggagcagtttgagaaacacttccttagatggatgagtgcttctcaaatttcaggtgctccgcctcccgggttcaggccattctcttgcctcagcctcctgagtagctgagactggttaaagtgcagattctggttcagtaggcagggtggggggagccctgaaatgctgcatttctgacaagctccaaggcaatgctgctgctcctggtctgcagaccgcctctggggagtgaggtcctagacagcagtcttgtaaatgtgagtttctgagttaaaatccaggggaacatagtgtcgtccagcctccatctaatacacactgatcccaccctgcaattcattgcaagtgtgggaaggctatttgcttatttgttgtgtacagatgaaccacacaccgcccctttcatgtaggaagttacctaggaggagagagatgacagatacagaaacagccccagcatcaagcagagtgtggtaggagcccagaagttacaaataagagacattggtaacttcagtgtcagaagagcaaggggaagggaagttaggtttggtcagtggaaccagggaaaaggtgaggggtgagggggcagtgatgcttttggactaaatcttggtgtaggaattgtgcctatggaagtgaacagagaagaaggcattctagacagaccagtgtcaatagacataccatgaagacattcatgtcactcagtgggctttccagtaagccttattgcttgctttttatttttctccaaaaggcagatctaggaatatatacatattcattcttcaggactcgatagttgtgaagattcttttaaaaggatttaaaagtctgtctaagattgcaatttctagagtcattctaagagagatgcaacttttcagaagctgcttgtatgtattgtatatgtttaagtgtactttacatctttcttttattcatcttgaattgagaaactactatattctattttatgtaattggatcccttctaaaaaattgatcacctaggagttgcaaagaaaccaaatagccctgaaacttgacaaatgaaaatggccctttcagttgtc

SEQ ID NO: 111050 - DNA, 3328 bp, Homo sapiens
cctaattcttatacaattaaatgtatgtaacttctccctttggtaaacacatttctttttttttttttttcaaattaaaaccctcaatacttgttacctaaaaggcactcaactgtgtaaatgaacaggtagaattcagtctccagtccactgttagatgcattcattcttgtttactctattcctgttgatttattttttctcttccaacaatttcaataggagcaagctgctacaattcctctttttgaatattttgaatatattaaaaatatattggccactagccacgtcctgggtgcagtgttaaacatcagtttgcttgagtggtagtagttcattcctttgaaaaagcgtgcatcgtgaaggcatacaactttaaaatattgtcatgattctcaacaaatgtttgagcactcactccatagatttattgcatacctaataaaacaataacttatgtttgtgtaacattttacaacataaaaagtacttttggttgtatcatcttgctttgttcttgaaactcagatacatttttactttaccctcttacagaagaaattgaggtgcagaaagaaattatttgccctgaattgcagcagtaagtgcctacagagtgattttccatattctaagaatattgatacagttcttaatctcaaattatgaagtcgaatctcaacagtagatcagattcggagagagccttaaaatgtgggtttaacatgagtgaacacatgtggcaaagataaagaacttggttaagcagtggagacaagttctccagcactcacaccccttagaagctgcagtaaacagtcctgttttctagagagagggcactattcatggcgttgttcagaacgttacagattgtggcttatgtccttcactcctgcacttggccagtctccccatttctccagcaagccagcagtgtgtccttgaggagcgggcatttatttaatggaccttcattttcttctgcttttggtggtggcttctagatggcattataatcagaacacatacttagatactgcaatgtttgcccgtgcaggaactagagatttataaatcccacatattccccatggtgtgtctgatctgctgtgtgtttgctcccaggagccatctgtgtgtgaaaaggaggccttgcccatctctgagagctcctttaagctcctcggctcctcggaggacctgtccagtgactcggagagtcatctcccagaagagccagctccgctgtcgccccagcaggccttcaggaggcgagcaaacaccctgagtcacttccccatcgaatgccaggaacctccacaacctgcccgggggtccccgggggtttcgcaaaggaaacttatgaggtatcactcagtgagcacagagacgcctcatgaacgaaagtaagatttgtttaaatttgttgcataaatagctggggcatatctgtgactagccaggtatgtgcatcccaggtatgtttattgagtgagagaaatgagtcaggctttactcttggtttggagataaaactggaagcagtgacatgttcgttcgagctgcttgtgagtatacaagcaatgggtacttgtattgtcaggaagcaagtgaaagtgagcaaaaatggtacctaacatgcatagtcattactcctcaaacaaagtaagagacgttgttgactgtggaactttgctgctgtgaggaagagggcaagcggatgagtctccccatctgaagccctggagcagggttataatgggagggagaggcgctgatccttacaggcagagcaagagaggtatgctggcctcatagggtgacaggggtgcttcagcttctggtcctagctctgccgtgaactaattgtgacctggacgaatttgctaaattctctgaataacaaaattggagtagatgttttctaaaatctctcactgtaagaattctagattcttctaacaagatttattcattgtaatagttgggttcctgtgaccagttagaatcgtctggttatggagaagagtaatcagaagttccccccattccttccaagtgtcccttagtgattcatttaactctgtgtgccagagactataaatggacacagttatctttaaaaacaactttaaacaattttaaaaatctctcacctaatatgaatcaaggtcacacctgtgtacagtcgctgccttcttctgaccagcagccgcagaagtcccaggacctatgtgttcgtgtagttcatacacggatcattgagagtgtgagttagtacagaagtgtttggaatgttctgagtaaagaagtgtgagcattaacagtcctggatgatggagcagagcctcccagctttgttttctgtcagccattggaaagagttcttggttctttggaattcagcggggtagtggtgatcccaaaagcaggggacatgtcagaaggtactgcttaataaatacacgcttttagagacacacatcgttgggttgtagctgtgtaagtttcttgtgtttaacaccctgtctgcacattacttctgtgctgcctcaccactgcctgcccactcctctgttgttggcgttttcagtgatcattgaaacattcctgtctggagagtcctagttctcttgtgaagtctgctgtttctcaaaagccagagttgataggacttagtatcagtacttttcctttctccatgaagaatgtagctttataatagatgatgtcacacatccgtaatgggagggatgaggagatgcctgtctgtctgcctctctagcatggcccattctgctttctttcccccttgtgagctcttttccgatttatctacaggaaataagacattgaaattcagggcaggatattgttcattttaaagggaaatgtattttttaaagttcagtttttttttgcttttgtttatactttaattaaaaattttttttcctgccagttcctgaaaaagaaaatagagaaagaaatattattgttcctgggcgaagtggctcactcctgtaatcccagagctttgggagactgaggtgggaggttgcttgaggccaagagttcaaggtcacagtcagctgtgatcgtgctaccgcactccagcctgggtgatagagtgagacctattaaaaaaaaaaagtattgttgggagcataaacacgtgggaaatggtcaagaacggccgtcaatatactctgtttttcactgaaaactacctttgccagagagcgagcagagatgaggaaaaggagtggaagaagtcctccactctgatagtgttactggaacaacgagacaaaagcggtgt

SEQ ID NO: 111051 - DNA, 1086 bp, Homo sapiens
tgggattacaggtgtgagccacgctcccggccaagattttaaacattatttaccaaagtaggaacgtggtaattatggtcttatataattctgaaaatgatttctagtaccaaactatgaattttatacttgaaagaatgatgggtttttcacagaaagttgaagttattatggtttgtttcctgttcaggtgtttttgctggagaatgttcgatgaacagcagttctggtgataagttatggatgtacacagctggtgtggtttttaggattttattttgcagcagcatcttcctcaaacagttgccaggggacggctttccttcttcttactggtaccagcctttctcttgcagacaaggcagtatgggagggttgggagacaaaacagaagctgttggtttcttcagcctggcaaggattcagattgcaggttgtagattggaggccgtcagtggggatacctttccggacaaagtggtgtttctgcctggcactgcttgccagagaagtttcagttcttcattctccgtcagagaaacccatatggaccacattctgatagttttcttctgtttccctaacaccgaaggctcagcccctggtgcaggtcccagtgtacagcaggctgcatacagttagaccagatgttcttgtagtacgaaaagtcaccgagtttccattcacttgtgggtggcaggtatggccctccttacctcccatggcccaggtttctctgtcctgccgttttcacattttccaggctttcacctccaggtaccaaaattcacatcatttagagattgtgtctgcctgccaatacgcggatgtaccagtgagggattgttctcgcctgacgagaggtctggatgatgagagagcagagctggccctggggctcagtggtgacaccctcgagcttggctgcttctgttcttctgcttcctctgcttggattccttcgcctttggcttcccctccagttccaagcagaacaaaacaggagatatcaaggaggaaagggtgacccctctatatctggagagcaaaactgtcgcggaaatccctagtgtacttccatttgtg

SEQ ID NO: 111052 - DNA, 1052 bp, Homo sapiens
aaaaacagttttcaaggagcatttgaacttgtccactttaagtcataaaatggattaaagtgtttgaaatctattgggattgtaaatttatgtcagtgtactgactttcaagagatcttgatgatcatgtcgtctgttttcattttctactacatgagaacattgaagcctgaaacttaacacaaacccgagttccccacttgcctaagagtcatggatacctaaaaagtatgctacttcccaagttgatttctttcaggatatgggcccttcaaaggaaagcagtgaggctggggttttccaggtggaaaggtcacatttccacatataactcagcgaacattgtgttgggttgggagaagaattggttcactattttaaactttttgtttcatcttgaggacttccccatcccctctcctccgcaaagcacaaaagtatttcctaatttttaagtcatgggcttcctttaatggattctgaactcagatcacgtccagataagcattgtgtaatgggatgggtggggttagatattttagtcacagatgcatgagaggagggagggtggaggacagcaaagtttataactggagcctatagtagtttatctcttgtcatcggccaggtcacagagtctcacttcaggacagctgtgcaagcagaacccccatcacggttttcttgatgcctttgacagtcacctgtacatgcctctgggacctttcctcctcctttctctttttgttttttttcccttggtcacatgtttcattctactaaatgtctaaccagctcttctctgtaaattacagagctgtgatggcaccttgcttgttgattatttctggttgaatagtttccaatgggacttctctggagataagtcctgtattagtccgttctcacactgctaataaaaacatacctgagactgggtaatttataaaggaaagaggttgactcacagttcagcatggctggggagacctcaggaaacttacaatcgtggtggaaggggaagcaaacatgtccttcacatggcagcagga

SEQ ID NO: 111053 - DNA, 1045 bp, Homo sapiens
tctgcaggcactccctgtcccttcgctgggccccgtggggaactacttgcagtcatcaaattcatcatgctgctttcttttaattcccacacttgccaaggtgggactgccccgcatctccttcccagtcgtgtgtcagaactcagcactggacctttcccctttccccactcccacccctcctcaccccgacgaacgtctcacttgggatcatctcttctgaggttggacctgcacagccgccctctgcactctcgccaccttatgggctgcccttgaccccttggcacacagacctggaagttggcctgctcagctgtctccttaggggtggagcttggttttctttcatcactgttctgcgatgaattgaatgcatgattggtcacaggaaggtaggggagggataaacaccttatgatatgtttcttataaggttttatatgtagaaagttatatgaaagtgtcagatatctatatatgaagtatatgtgaagttttatgatagttttgcataatttaagaataaactctttaaaggagctgagtcccaatcccttgggtcgagagttgcgtggctcccggggcctgcttgtttccttccactctgcgtgttcgttgctggcccctcataggctgtcccagacctctttgacttctctcctttctgcccagtcttccctgagacgctccaggctccctggcctcctgcttctcggagcttctcttgtgtttgttttctgtgctcagggcgccatggtgctataggccacagaggaggcgtctggggtccctcggggcaggtgcagcaggaggaagccgtctccgagggcatgaccttggaactgagcattgacagaggagagtcagccagacaaagaaaggccaaaaccccacccctctcccaccctatttctacgtgaccatgggccctggacacagcaagacggtgaccccgggcctcctattgttgcgaggagcccctgggaaaatgttggcattttcttcatagaacaggtttctcttctccagtattcttcagtaa

SEQ ID NO: 111054 - DNA, 1758 bp, Homo sapiens
actgcatagttatcatacccatgtcttagagttttgtgagtgtaaattattgtatataaagctctgagaacagtttggtacacagtaggcactgtatgaacattttctgtaattatcaataatataattattaaataacattttcagaaggagataaaaatattacaccttaaaaagcaggtatctttaaattcttcctcagctactgaagttttgcttactatttgacatatcatttgtttcacgtttgtggctcagacgtggcttatgccaatgcatattaacacaggaattttaaatttggtgatattattatattttatctgaatgaacagaatttgctgatttgacactgtgtttgaatgtgcattttttgttgaaaaatgacaattctggaatgccgtctccctttccagattattcagagctgggagagcttcccccacgatctcctttagaaccagtttgtgaagatgggccctttggccccccaccagaggaaaagaaaaggacatctcgtgagctccgagagctgtggcaaaaggctattcttcaacagatactgctgcttagaatggagaaggaaaatcagaagctccaaggttggtttgccatcttgatattgaacaggcctggtcttatcttggctctgaagttaatcacatcagacataagcatgctgtcttaaaaatacagcagcacgatagtctaatgtatacatctatctatatctgtttactttttcagagtaatattaacactgtttactttctggtgatctaatgatagtttcaccaacaatattcattattcctctatggtcactgttagtacagtgtttagaacttctgagatccaagctttaaatctaagctctaacacgctgaaaggtgcttttcattttgttttgttttcccctctgtctctctctctctctactttatcctcagccatggtctgtgcctgtgtgttaggtatgaacttttcttgtgtaagtcattaacatacgtaacttcactctgtgtgctttttcagtgatttgcaagtaatctgaaaaaaaagaattagctgagttctacctgtactgatatcaatagtgtcaaaatatgacatgaactttgaaagtttagattttgttcatttcctgtttccatgctgacactggaaccaattaatgttatcttcaaagtagcttaagatgcaaagtttacatactctttggaaagagcatgagtcttagggtatctagagaactgcccggtgataaagtagtgaagattttgagcaggaagtctgcataatctctttcaaagggaagatgtagcagatggttcagtcaccctgccattgccccagaacaattttggaattacagtacatttcattcagcatcattcttgattgcaaattttgatcttttaaaatgaccttgatgcttgtatagagctaaaaagtcattaagacaccaactctgaggaataagctcctgagaatgtgttgcatctgtgagtttcagttgcatagctagtgtcatagcgagtggatagacgttctctgtgcatgtccctacaatgcttgtgagttatgacaacactgtgtacgagcaacatagtttctgcagttgaaaagtacgaattcatagaatgtaaagagatagtgtctatatcttttgactgaaaacagaaaatgagatataaaggaataagacctttcgacatgaaagtaaccccacagttggaataggctagtaagctttcc

SEQ ID NO: 111055 - DNA, 1018 bp, Homo sapiens
cactggaacggggaaactgggattggcctagacccggcagtggagtcccaggtgccctgcctgcccggctgactccgcccagggaggcctcccacagaagctcctccagactccacctgttacctcccccactcctctcacccaaggctgtgctgtggccaagtcagttgtttagtctacactttctgtttagtctacaccatggctacctcaaggcccagtgaaggtgtgtagtataaagcaaaatcaaatccatatttcagttttccttaaaaagtgaccttcatattctggccagaagaacagaatggttggttggatatattttgagttttcatgggtttttgttttcctgcctcttgttatactttctgaaattggcttttagtctaaacaggttttttttttttttttttttttttggcaatgtgttttcctccaaagagtaagaataataggcctcatggctgggtcgtgttctacagtttgtgaatattttctcaacctttgtcaaatttcatctttacacatcctgtgtgaaattgggcacgtgccgttatttccaacttagaggggatgaatgagcccttaagagcttgagttctctgcccacattgcgagttactcagtgccagaaggagttctggaacccaggtctcctcagtctccataccacatcccttctagggcaccatgttgcttctgtgtttcttggctctgcccactccatgccagcacaactctccccacccctgctttggtggaatcatgttcctttggggtagatcacaccagccagaggcaactgctctcagcttagcagatggtactcatcacattattcttgaagccttgggtcaggagcctgccccacccatctgcatccatttgtccagccctcagacaattgccactgttttcatgtctattctttgactctctatcctgggtagacaacatggactgcccagcatcctgtcttctgtctggggctcccactgtcgtcctgaccacgctg

SEQ ID NO: 111056 - DNA, 1052 bp, Homo sapiens
gaaatagccactctacaagcggtgtcaattagcatgggctctggtttctgtgtgaggtagtttgctaacatgagagggtatctgattagctaaaacgataacactgacagattaaattcagaataactaaaccttccctgtgttcctttatgccacatgactcctgcatattctgctaccagcacctgtttgataccagacggaggggtccatttgggatgggacaggagcatcagcagaaatgcagaagtggggaagtgctccatcttcttggaagctgagctggcaagggtaatggaatgaaagagattgtgaatatttttgagactatgaggaaaccagtacactggtgttgcccagtacagaagccacatgtggctgttaagcacttgagatgtggctactccaaattgaggcgtgctgtcagtataaagaacacactggatttcaaagacttggcatgaaaaaagaatgcctaatgtctcagtatttttatattgattatgttgaagtgatagtattttgtgtatgttgggtgtaacaaaatatctaattaaaattaacttcacctgttattttctaatgtgggtgctagaaactgttacatcctgcatgggggtcacattccagttcagttgcatgtgctgctacccattgttctacacacacacacacacacacacctgcacacaacctagaggggtcagagaccccaggagcccctgcttctggtgcccaggctaagcgctggagtggaagataaagctgggagggtgggtaaggaggtgagtgcacggagctccaggctaacagagtggataatttgttctttgagcactggggagctatggattgcttactagcagcaaggtgacttgtgcagggtatatctgggggagatttactgggggaagagatagaggaggcaagaagtgaatacagaacgagaaatcaggacagtggttaggagaccgtagctttcctcttgagtcaagttcagataacacatctggactgatgaaattctttttcaggaagctgaggaagagccc

SEQ ID NO: 111057 - DNA, 1032 bp, Homo sapiens
accacgcctgactaattttttctattcttagtagcgatggggtttcgccatgttgggcaggctggtctcgaactcctgacctcaggcgatccttccacctaggcctctgaaagtgctgggattacaggcatgagccaccacacctggccaacagttttcttttttcgattgaagttcagctatttgcaggaccgaaggtagttctgattactttcacctgtacttccaccaaaaaataaataaaacaaccatgagtaattgctgatttttaattgaaagcattattccaggaataactggtggacttcgtttgcagaggaagtggcaaagactgattgatattatgatccagcttctaaagattttgctgcttaatctgaagcacattggatttctggttcaataggctttctttttttgtttttattattacaactaatatgtattcttttcacagggcgaacctttcctacacacccatacttctctgcccagcttggagcaggacagctatcgctttacaacattttgaaggcctactcacttctagaccaggaagtgggatattgccaaggtctcagctttgtagcaggcattttgcttcttcatatgagtgaggaagaggcgtttaaaatgctcaagtttctgatgtttgacatggggctgcggaaacagtatcggccagacatgattattttacaggtatagagtgttccttatgtctttaatacaacaaaatgctaagaatgtttcttatccctctccagatgtgcctcaggagctttttcaccgtcaggtaacattgtaatagctgtcactgctgataaaggactctgtgctaggcattattccaagcgcttcatctgcacttccctctaaggaagacactgttcatcgtctcaatttgtagattggaaaactgagtctccaagagattataaattgggcccagtcacacagctagcaagtgtcagagctggactggaaacccaggcctctctgactctagggccttccctcttgcccccatca

SEQ ID NO: 111058 - DNA, 1549 bp, Homo sapiens
gtcatcactgagtcatctctgccctggggccccaggcactggagctgctgcttgcagaaagttctggggctctggaagagaaatttttccttcggctcataaatgggtaaaaagacgttaacaaacaagcagactccactttggaaatgatagcccttctattgcagagtaatttgaagctctctgaagctcactctaatgacttcataaatcaaagctgcagcttgtaaaggtaagatatttttctgtagactttgtaggcagtggtgagactcggagtttcataaacattatgcatagagatgccagtgtctacatcattcctggatcccacagactcctgctgtgctaagtgggtcgttgtccagctggccaagggctcctgggattagaggcgggaagtgggatctcaaggccgcactggcttgtgatgtcactttgcaagaactgcttttttttccacagtccatcccatctttcagtacttaaaaacagaaaagataggtttttacaaaccatttctatttttagcactgatgacttagagaatggtgatggagatagcttagttttatatttcaaagcctgccattcagtcactatagtcttttttggcctagggcccatttcattataagcctttaagtctggataaactctaaaaacatgtagaactttgttgactaagtaaaatatttcagtttgcaccaccttagctcatatattagttaataggttacctggcattaagtatgtatctgctccttggaggggcggctgccagtgatgtgtgcgccttaaccttcacatgatactcacaccttgctgaatggcagttcttctacctggtgtcacataatgtcaatagccccttcctgtatttttctagcttgagtacagcagggccctgggagagacgcttgctctgttcactttctcatcacatctacctttgggggaagaaaaatctaaaaaacaggacctggcttgctcctgatggaggaggaggctgcagtgttcagcctctgatgtttttctataggacatgctgccaaatagatgagggaggaggaggagtataaaaactaagggtttggcaaaaaacacagaagccacctgcaatatagtgaaggcttcagagagactttaggatgaaaatagactgaaaacaagattgtttctgtggccaggaaaatctccagctattcaggtgacatgatgccgcgtgatgatgagtgtgtccagtctgtctgtgctgttgttctgcacagcactgtcatcagccttcagcgtcccctttacccgttactcatagaatgtagcggagccacgactggaggaccgcagccttccagaagaaagttgagaaggctcagccttgacaaagacaaaggtggctggaaaaagagatgcagtgcaagctcacataggaagattgcactttgagatcatgaagtttagtttcaaatagagttccaatacacagtaacgcaataagagggttgctgaaatgtcctcaaagaaaagcagttcctttgtgttgttccca

SEQ ID NO: 111059 - DNA, 1036 bp, Homo sapiens
agatcccttagctaagagagcgcctgctcaacctgccaggcgtgtgctgggaacttccaggagttgcctcgtttaattctcacagccatcctgggaggtaggcgctgtctgccccaggtgggaggccaggaactgtggctgagagaggttaagtaccgagctcaagtcattcatagagtcgccagtggagccgcaattttaaggctgactcaaagcctctgagccagttacctcggctgtcaaatggagataataatccctgctgacctcacggtcgctctgaaggacaaaagagaatcagttcaatccagtaaacaattctctctctccctcttactcccctcgcacacatgcacacacaccccacagatataatggattttagtttttaggcatcaaatgacttttgtgccttattaatattatccactgaatcaaaaacagcaagctgaaaaattcatctcaaggaagagaaaataagattgttgggaatggtgagaaaggaaacatggtttttgaaaattgattccagggaagataggctagtttgaatgccagtagggagccatcagaagaagtagttttacactgatttttaacaatattggagttgcttaaggcaatgcaatagagaggcagtttctgcccttttaaagcctgacttcactttctgaatgtgtgttctgatctagcagggttttttttttttttcttttaagatggtcccagcttgactgcattctcagatccatcagataaacgttagggcttcactgctgtgctgagaggccccagcccctggggttctctcatagaaacaactggaaagaaaggaaatgccttgggcagcagcagcagcagctgtcttctgattctgctttccgccctgccttccttaccaagagaaagtacagacacggacggcttgagtcacttaggcacttaggagttgtttttcacacgtgtggtgttttcgtcaccattactattgtgggaaagaagacaactcaggcatcgtttcgtattcactcatctg

SEQ ID NO: 111060 - DNA, 1048 bp, Homo sapiens
cagctcagctgaggctatgaacctcttccctcgtccatatgaaaagtccagacggggatagaatctgtgtcttcaattccctctgccctgacccctttgtagtcgctctgagcttaggctcctgtgctataatttctgatcggggcgccagtgctgacagtggattaaaaggtcagaagactggcccttttcatctcaaggaatcaaataaatgagaatccgcatgctggattttaattctaaccagtaaacatctgttgatcaaagacccatgtcagtcctatgctggagaccgagaataatgaaatgagtaagatttggccccttcctcccagcctgtctacatctggatgtgcagtcattctactgaagatagttctagatacaagaactaactcagcaatttcccggtactaatttaactgaaattcacaagtgttgttcaaatacaagtttgggactttgaggggatgtatttattggctccaaagaaagcccatggtaaatatctttccacacatccattttccaaggaaatcataatgattctgtgtccggaattggtgggttcttggtctcactaacttcaagaatgaagccgtggaccctcgcggtgagtgttaacagttcttaaaggtggtgcgtctggagtttgttccttctgatgttcgaacgtgttcagagtttcttccttctggtggattcatggtctcgctggcttcaggagtgaagctgcagaccttccccgtgagtgttacagctcttaaggcggcctggagttgttcgttcctcctggtgggttcgtggtttcacaggcctcaggagtgaagctgccaactttcgcagtgagtgctacatctcataaaagcagtggagacccaagagtgagcagcagcaagatttatgaaaagactgaaaaaacaaacctcccacactgctgaagtggaccccaacgcgttgctgctgcgcccagggcgcctgcttttattcccttatctggccccacccacatcctgctgattggtccattttacagagagccgattgg

SEQ ID NO: 111061 - DNA, 1048 bp, Homo sapiens
gactggccttatctgttgctaagaaacttataagaaacttacactcccagattaccttgtgctacgccatatcctgttttgaatttccaaaggagaataaataagaagaaatgatagtattaacaaaatagcttccatttgttaaacccttcctatgtgccagtctccatgcttggtttatatttagtatctcagtgtagacctcacagccattctaggaggcagtggtcactgtccccttttcactgacgagaaaactgacaatgagaagccagttctcccaaagttgcccagatggtaaacggcgaagtgagggtttgaccccaggcctgcctgtctgactgtaaaacttggcctcataaccactaaaggagcagataattatttagaggaaaaaaacaaatgtggggtcttcttcaagatagtgacaatggagattataaagcacaggagtgtaggaggagtggcacggtgtagcaatgtgtgctacgatgacaaggaagagggagttgaatgctacccagagacggctgcagcaggggaagccacttacccatgcgaacaggttctagaaagatgtgggaaaatgaaaaatgttggtggggggaggtggcgtgaagttggtaagattatggaggagggacttttcttccgaaattttcattaatattgttgatacatatttctaattagaacttgtcagagacactggaactgcttcctaaagggcatagaaaatgtcttatttcagcttaaggtttatccaaattgagtcggtaaatggtttgtcaactcactgtgctccgtgtggaggcagggagcttgtgtgaatgagttacggccacattcaccaaatctctcactttctttggtttcgcacagagtctctaaaaagccctgcaatgggaggattgagtgtattttctctctgctctcttggggaggctcccaagagaaaggaaatgatgccagggtgggcagctccaggagctgggatgcttgggggctcctttgtggaactgtctgaacttggggagttcagagagct

SEQ ID NO: 111062 - DNA, 1433 bp, Homo sapiens
ctcactgcaacctctgcctcccgggttcaggcgattctcccacctcagcctcctgagtagctgggattacagggacccaccaatatggttggctaaatttctgtatttttagtagagacaggttttcaccatgttggccaggctggttttaaactcctgacctcaggtgatctgcctgcttcagcctccctaagtgctgggatgaacaggtgtgagccaccgcacctggcctccactatactcttaagcctcgaagtcctctgctggattctcagcatttagctagtagatgagaaaagagagaaaagtcatggtggattgcatgagaggcacctggccaagcatggagttggtgaacatggcttctgactcacatccccttaccagaacttaggcacagggctaaagctaactgcagggaagtctgggaaatgtagtctagttgtgtgtccaggaggaagaggaaaatggattggtgggtgcctggcttgtctcttacacacaatggattgagtgtgttaaaagaaaaacctcagacaaatcaaatttaaagaatttagttgagcaaaaaatgattcatgaattgggcagcccccaaaccagaataggttcatagagattccagtgctaccttgtggttgaagatttatgagcagaaaaaggacagtgatgtacagaaaatggaggtgaggtacagaaacagccagattggttacaggtcggcatttgccttatttgaacacaatttgaagagttggccacatttgattggctgaaattcagtgtttggcataagagtaggttacaatctgtctacacatccagttaggttatagttcactatgtacagagacatctttaggccaaatttacaaagaggccactttaggttaaatttaacaagtgaaacattttcattatgtcaaattttaatgtttttgtttggcacctatgtgatagctcgttcctgtttataaaagactttgcttatgctatattctttctcactgattacatcttgggaattattaatatttcatatttctgtttattcagaatcctctcatttttgctcttattatttctggttattccattcttttttcaaaattctctgccttctattttgcagacttgcatttcagtcagaatgaattcaatctctcctccaacacctcagtggatatttttttctgtgtttcatagagttcttacagctatttttatgtaacgtaaaactcttaaactttgcaataagagatcaaacattaaaaaaaaatgaaattattggattcattaaataaaaccccagaaacacatacaactcatagaaacacttcaatgtactatgttaaggtcaaagcaggtaacttttgtttaaggagttacctgctttgaccaggagttgcagaagtcatagcttaatttttaca

SEQ ID NO: 111063 - DNA, 1034 bp, Homo sapiens
taagctaaaggatgaaaaccctaatatctacatggactcaatctatgatttgctaatcattgctacagtttagctgagtcgaggacagtggttttgatagatacctcaagggaagtagtgttgccagatggccaatgtcttcctttattctttaaaattctctaatttttttttctttaaaattctctaaatgttaatcgttcactaaaatcagtaagcctcttgaactgtgttcttgtttttgtgatagagtagggtgcctgatggggagaagatcttaactttttgcaacctgaaaagctgccctgtggaggattgagaagtactttctgcctttctgatgagcctgtgatctatttttggtacagactggttggggaggggctactttgtgggactacttggcaggcccagataccaacaataatggatgactagcgtttaggtggtgctcaccatgtgccaggcacccttctaagtgccttaccaatgtgcattcatagattcctcaaatggccctataatgcggtattcctatcttgttgatgagaagactgagacacaggaatatgaaatacactttcaaacctaagttgtctgatgccaaagtccatgttcccaacattgtgattcccttttaaatgatttatgccagggtagacagggatgtgccactcaaagggacaaacatcaaccaggacaggcctgtggaatatggaattccagggactcacagaaagaagtggtcaagggtaagacacagggaagagaatctggcacctccaatgtttaagcaacgtgatgattcagactatttgggaatcgttaaagaatggggaggttaagggtatctgaactgtgtatgtttttgtagtctacaatctgaactaagctacttatttttggatgcaattacagggggtgatggtgatcaatgtaggaaaagggtacaatttattatttagtttatttacttattcaatacatatttatggagtgtttactgttccatctgcaccagacagctacaaaaa

SEQ ID NO: 111064 - DNA, 1132 bp, Homo sapiens
cctaaacctactcctgtattttccattttccagaaggcttggtgcttaggaagccaattctgaggctttttaaggtcctgagttgcctttgaaatgatcaaagagacagttagactcaatatggttaagttataaatgcgttttctgagttttgattctttgcaaattagccatccatggagggcacgtgacataacgggagcaggtcttggcacaaaggcaggaactgcagcagggaggtgggtgggcagggagcgagggagatgagatgcggggctcctctgagcatggggagtgacctgaggctctgctcgggctgcagaggccaggctggggaaggaggcccggtggcctgaggcatagtggtcaaaggacagtgcatactcaggcaaagttaagaccagcatcggcaccaattggcattagtgagtgtaattcagccattgggaaccagccaggatactaatctgtggccccaagctcagcagccagtgcagccaggtgagctgtacagcccagtgggaggagaagctcaccctccttcagaggagataggcaccaaggcggggagagaccatcctagaaggaggaagagagattgggacatggctccggattattgagcaggctgtgatgtgggggatgaggacacaagaaaagaaccaacattcactgatcacctactctgtgccaaatgattttacatgcatcatctccagttctttcaacagtcctgtgagggggtattagtgtccccactttacaggtaaggtcacaatttgccagcggtcacagagtaatcagaggccatagcagaggcagaatctgagcacaaaccttcctgactctttgcccccaacacagggtgggcaggagttccccaaggggctccaggactcccaggatgcacacagtccaactctggttgactttgtgcctaaactcttcttttttttttttgagacagagttgacctgtcacccaggctggagtgcagtggcacgatcttggcttactgcaaccaccgcctcctggagtcaagcgattctcctgcctcagccttttgagtagctgggattacaggcacccgccaccacgcccagctaatttttgaatttttagtaaggtgagg

SEQ ID NO: 111065 - DNA, 1830 bp, Homo sapiens
gcagcgtggctgaaggcggaagacgccttaggcaactgcctgcagccgagcctgatggggacccagggacagatccctggatcaggacccatgggacctacctaacatttccaagtggctttcttagagatggcagatgagatctggaattgtcatattcatttttttgggcagatagctactgacaaggagaagcacttttctggtttaaattttatagcagtatacaataatactagaagaatgtgaatgagacttatttttaataagtcaagttaaacggaaattggaaattgctcaccttcttgtatttcactaaaataaacattttacacttaaccactgaatttcttactcagaatttatgtttccattaatatcacccaagacattttaaatatattgattatattctcacaagagtctggtatatgggaaaaagtatgaagtggtattctgacaagtacctgaaatgtgccagcaaaatcaagtggggaataggccagttgttcattataggtttttccacacagcagttttgtgctatccttttctgtacgaatttgaggagcatttttataagagaaattcatctggatgatctgcctcaccctagggaagaagacttgcttttaggggaaaaaacaatctgctagcattaatatctacaaattttttggagttagtaatagtgtttaaggaaagtgtccacgagtgatttcttctggtttgaaaagaggtatgttagttgaccttaggctgttaatagaaacctgaaattagatgttcgattaaattaaactccctagagaaactggtatcttcatttctgcagtcagtgggctttgctgcagaactatttattagaagaaaaaaacctaatgtactatcggtaagttcaatgatgatacattgtaaagaacatttagcttgcatgaaagggaatgcaagtacaaaaatctcaacatgggaataacaaagaaaagtaactgcttagaccacaaaaccttgtcaggtacaaaacgacaacagagttttgcagaaagctattgttttattcactgcaaagtttctaaattaaaacccaatcttcttgttgctatgggcacagtgatgctctttttttcctttttttttctttttttttttccttacctgtacttagtctgcacacaccacattcttaaatctctgataacgtaagcttgagttaaacagtcctggctaacaaagtaaagagaaataatgggaaaggaactgtgaatggattttactatcttaaaaataacccaaagggaaaatagacattttagaatgacttctagaaattagtactctggtgtacagattgcataataatttttagataaatgtcaggaacagaatcacattcttaaaaggcgaatttctataaacgtgtgtatatgttgaacagatgagcagctctgcaaagatgtgtataactgcatttgaaaaagacagtgaaaattttgggttactgtagatgtcccacagtctgtcttggaatttagttctgtgactaaaggaggcttacagttgctccaattttggttctgtggggtaccccaattgtaatctgaattcctaacagcagtgctctatcttttttcctcttgatgcactgaggctgaaccataatcattaccctaactcggaatttgatctgagctagggactagccattggaatggggcagaaagggacaaaagaaatcaggagggaggctagtgttcattaggaaggtctctgctgcttgaatatgataaaatcacatttcacttatgatgtttactgtatgtggcagctctt

SEQ ID NO: 111066 - DNA, 1779 bp, Homo sapiens
gttttacaataatatttttcattttttaaaaatattctatcagttgtgggttaatgaatttctaggataactatttaagacctgccttaatattagttttctgttggttcttgagaaactaagatttaaggaaatatttgcttgaaaaagaaaagttttggaaagtgcttttgtaaacttacttggggattttttttttttaatcaaaaggaatcatctacagcatctctgtggaattaatttaaagagttgctgaagcagcaaatcaggctctcttctccccaaaattgatgataatggtgcgttttaaatgtcacattccaccacattctttatgtataaatggaaaatataaaatatgatattaagagagttattagtatcaaatagttggctactgataaccttctatgaaaaaagctgggagttttagaagtcccaataacttctttctcctttgggaaaagcagctggaaatacttagctgacctgtaggacaagagacttttaagcttaaaattcataagtaactccaatcgaagcaggtttttttgtttgttttggttccaaagttgttaacaatctaactaggtttggtaaacagagtctttatttggctttccccaaattctttcttctctcttttgcagggagatgaagtggttaatagagataattagggtctaatatattctatcagaaaaaaattctgcaagcttctaaatgctaagctgaatagttggggaaaattatcctatcttatagttgctatgattaccagaaagatgggaacaagagttttaatttcttaaccatataaatcatgattcctaatttaatttcattgtgtctccatcgccccttgagatacttgccttcttaatattttcaaatcaacatttttgctataaaacgacagatttcttaggcagcatttcttgttctctgttttcacacccagttgagtttaagaaaaataaaatacacacaacctcattctttaaggtactaggaattacaattacattattctggaacttggattctttctgaagtgcatcatttatcattggttctagctttttaaaaaagcaaatccctagaatcttaaaacaattgatatctagtttgctagtatgtgatattctagtcagaattcctcttgggagtgagttggaagagggttatggtggtcgctagcattctcattttcaagaccactctgttcctttcttagaccatgtttctcatcttaagcagtcatgcccgagctggagacaggaaaccagacagcagtctgccctgataagggacagcattgtctgaaggcggggaatagccctgcttttacccccaactcagctctctttgcttgaaatttagtagtcatagaagaggcacaatgctgttgacagtttctgaaccaaaactaggattcatttcttccaaagcaaaaaaatagtgtcctcggccgggcgcggtggctcacacctgtaatttcagcactttgggaggccgaagtgggtggatcacctgaggtcaggagttcgagaccagcctagccaacatggcaaaaccccatctttactaaaagtacaaaaattatccgggcgtggtggtgggcgcctgtaatcccagctactcaggaggctgaggcaggagaattgcctgaacctgggaggtggaggttgcagtgagccgagattgtgccactgcactgcagcctgggcaacaagagtgagactctgtctcaaaaaaaaaaaaaaaaaaaaaaaaaaa

SEQ ID NO: 111067 - DNA, 1021 bp, Homo sapiens
tgagtacctacttattagagctaatctcaaattatgtgcaatcattactctgagttatgccataggatggagtagatctacagtgatctaacctgaaaaggcattttgaaatcttaattgcctgctggaacctccccctggcactgcttcccatgggccagtgtggctgtgcacacccacaccctccctactggggaaagaccccagcattaggcgattttacctaaaagtcggtcccacagcacaggctctgaagcagaacagaaagtgcccgggtctgcaggcagacacgcttctgttcctggctgcagctccaaccagctctgtgaaattgggcgagtcatttcacctctgttcctccatttcctcatttctaaaatggggatgaggacctgacccttccacctttgtgcagttattatgaggatttccgtatttacttgggtcaagctgccaatttttctcagcagttatatcgacaatgcaggtgcactggctaggaagaataattgcctaatttggggccttcagaatgtgtcttttgatcttgcatccaagtgtgcgtactgagacagggtgggcagcaggggccagttggaaggagtggaaactgtcactaatgtaaacagactgtccccacgttctgtcttctccggggaccaacctgttcacagaaatcactatcatgtacttactgttggtggtgtaatgttgtcctctgcctggggaggtggaagagtggtgtgccaaggccaccagtcttaagtcagactaccttgggttcaagtcctggctctacgagttagcagctgtgtgatgttaggcaggttacttgacctctctgtttcagtgttcttttcagtaaaacgggaaggtagtaaccacctcattgacattaaacagcgcctggggattgccaatcacgaaggtggtggtgattggcaggaaacctgtgacatcacttagccccttgccttccttgatcccttttcaaaaacctgtgtttgtgcacacacccctt

SEQ ID NO: 111068 - DNA, 1081 bp, Homo sapiens
attgtcagagagcataaacaagtgtgtaaccctagtagggaaaatgattcgagtttgctgcagtttctctaagaagggtgtggaatgccactagccagatggccttgaacttagagggtagcataggtgtgggtgtccccgcccccagccctgctttgctaggcctcagtttggaaacttgtcaggcttctgcttggttgttacctttgcacctgtccttattgacatgcaaaatcaattgcttcacttggtctttccgaagtacagggtgtgggcagaatcttatctgaagccatgtcctgtttggacaagttggacttgccttggcaactctccatagggtggagcagatgggtggaggcaggaaagtaaaattgggtggcttgttagcagagagaggagagagggtgggttgtttgctcactggatcattatatttcatctgaaatgaaataattaacttctttcccatttataatacacattaatgcaaaataactaattcatgaggggcgaagatttagaaacaccccatggaatttttctccttttcaaaccagtcatagaagagtaggacaggtgaaaatcacagagtggcatgaaaatttccaagaatgtctaggtaggaaattccaggtaggtgccagtgcttagctttgtttcagggagcctccagcttaaaaatgcctgctgacatctgttgcctgtcccctgtatttctggctagggcaactgtccttaaataatacttgagccattgggggattttgaagaatttgggtaaagaaacgaagagagaaaagtttctctggaaaggaagtttagctacagggatgttgcttgcctgcccagttttcctagccaagaattacacacacacatgcacacaccgccttttttttttttctttttttgccttaagttcctttggggagtaagggtaggggaagataacatgttttctctttgaaaaatccaaaaacttagaagagttgaaagggaggcttagcgatggtgtgttagtgtattgctccgtatgcctagccgaggtcagctgggagacggaagtttgcttggagga

SEQ ID NO: 111069 - DNA, 1101 bp, Homo sapiens
aaagaacaatagtgatttaaataatgtcttaatgataaaaagatgtagcacattaatgtgtaattcatttctaaaaggattcagtagtcgttgctgtgggcattagacaaagtcattgaaagctatgtgagctaaatggtagacttagaatttgaacgaaaaggaactccagagcccatcatcttaatttattctgctgtgctgcaattagtggtcgtaaagcgtgcaggatgacatgaagtggggagatgctggcctcgctcagaagctgttgttgcagtggtacagttgtgaagtgacaaggccttatatgagacctcatacaggatgtaggcagctgttaactttgaaactgaatctagtcagagttttatttaagggtgggggatagacctctaaggctagtgtatgttagcaaagaggcaaacgccagacatttttgctccggaagttggaaccaacacatttagtgttgtgtgtacagaatatacatccagattttatgtgcatatggatataaatgagggcaaaaggagtgtgtgtgtgtgtgtgtgtgtgtgtgtgtgtgtgtgttttaatctcacttgatagacctaaatccttgagaagcagatagggagccatgctctgcattttacaaatgatcactcttgccccatggctgcgttagtttgcagcctgcttgagtctcaaaaccatggctccttccttatacacctgagaatgtgaatgctttaatttagaagcatttgcatcaagatactctctagtgggatagatgagtctggaagagtgaattcagtgtaaaaagctgggggtgaggaggtgggaggctgccacagggtgaccagccgtgagtcagggctgctaaatgatctgacctcattgatgtaagcaggagatctcacatcttttgtttatggtccactgtgaggcactggacaacaattcttagaaccatgttcatccgtacagctgctagtctgggaactgcttaataatagatcccaagacacaaaagcgttttcatccctcattacgaaatcatctatttttcactggctgttgcggttagttcttgctggaatacataagagggta

SEQ ID NO: 111070 - DNA, 1081 bp, Homo sapiens
acgtaggaaaccagctagccaggaaagaatcacttgaaactaggcacccagtaccactgcagtgaggcagccccaataatatttgccttaagaaacgcttcctttccagaggcagacttaaaagtacagctttgaaatccatttgctcgattgtggtgtggcaactttaggattatttataaaggcactcaaaggtacatcaaattctatttgttacagatttacaaaaagatttctttgttctaaatatacaaaactatatttagaacaaaaagcataaggatcagatttccctattgagttgtgtatgcgaattatagcaaacttaagaggggctgtctcagctcaaaacagtggacaagatatcttatatgtattagctctgtaacttcttggttataataatcccaaaccatctctttgaaaatgggagtggagaccaaaaagtgtgagatcccaagactcttcatctagccttggcctgaaccaacatcagcgtcttcagagatgcggcaggttaactgtgctcagaatgtttgagggacacagctcaagcagagatatcctggtttggggacatcctcaaaaaactcatgaaattaaacaaccatagggtacaaagttacaaatagactattttgaacctgaaaatattcatggctaccatttatagctttatcttgggaacagacattgttccgagatataaccttctgagataacattattatcatccccagtttacagagaggaaactaagacacagagagggcgagatcttggcccaggatcacagagactgtcagtgacagagctggatttgtaactggagcccacagcctttcggtgcacctttatgtgtaaaataaacaactggaaagggcagtcagaattactgcacagaaacgattagattcccaacccataaaatccaataattgggagagatttctaaagttatctgaaaaagatagtctcccagtatcccaaagacatataaaagttttatagttaataattaaatttctaccccagcactttatttcctgaatttcttttaatggaaatgaaatattttcat

SEQ ID NO: 111071 - DNA, 1095 bp, Homo sapiens
taaaattctcctcccgtttttttggcagagagccaatgaaacattacggtattagttcattttcttcttgcttgtcttgcagtagtttataatgcactgtgttattgaagaacaaatgtatgaacatatcttggaaataatatttgtcaagcattaactcaaagatctttactacctttacagaaaaaaaaaatagctcttttctttttccttttgcaggagaaaaaccctacaaatgtacatgggaagggtgcacatggaagtttgctcggtctgatgaactaacaagacatttccgaaaacatactggaatcaaacctttccagtgcccggactgtgaccgcagcttctcccgttctgaccatcttgccctccataggaaacgccacatgctagtctgattgcctctgtgtcctgcctcagcgtgactccccactcacctggctctctctctgtcctgcctcccattatctaacacattttttacatgtacattttaatttgattcagctggtctgaatctctgaatttatatcatccaaaacttccatatggtcagtagtagatgttctctaatcctccctctccttaccacgggtcagacctaaagaatgtgaacacttttttttttttttctggggatgctaagcaaacccttcttacagatacgtttaatgtaataagaacaagggaacatgtaaactaacataaccaattgtcagttctccatgtattcctcaaaagaatgtcagagtaaatgtattagaaatacagtatccagactgctagtccttgccagagacattcttacctctgccctgtgataatattttatgcttgacagtgaaaacaagtgtggccccttgcaccggttagctagaagtacagccagatttcaagctagtgcagtcacctcttccgtcattcttcacaaatcttgtcaacctggatcttagacttcatctgaatcgagttctttgccctcctttgtgcctgcagctcatatggaggtctttgccaccaatgggagatgagcccaaactttcgatctaggtgggtgatgtgtagcagttcaagggaagggtgctgtgtttt

SEQ ID NO: 111072 - DNA, 1032 bp, Homo sapiens
tcatttgtattcatgacacataccataaagcatctgctaatgctttaatggattgattcaattaagacctgagtgacactatttgtaaatataactagttgtgaagcacacatacctttattttgggaatttatgagaaaatatagaaaaccacagatcagggattcatatatgtagctcaaaaattcccaaaagtttactgttagagttggcaatttcctatcactatttcagtgtcagaacaaactgaaaataatggctcgtgtttatgttgaagataaatagcaccattattgggggaagttattcaaaagcaggcttttgagcaccatagtctaaatgccaataaaaataattcatacatagaaatgtcattggtcctgaatttgaagaaagtgagcaacagtagttaaatgtgggtgcatataaccaaattccccttcatcaagaatggaggagaagagagaagaatgaaatcctgaagattcatcccagccgcaactcaggatccaacacaactttaactgggaggaatacattgtttgatcatttttaaaacatctgtgaatgagtgattccggaggcctgtgaattgtgtggggagcttgctttgatggcactgtgttaataaaagttgtagggactgtgcacctaagaggctaagaggtcccactcatccgccctgtgaaccagctgtaaagaaatgtagttaagaaatgcaaagaaatgtgttatcttggcacttgggtttgattttcctttttttaaagcactgcaaaacttctttaggatactaaaacatcctaattgggctgtttttttgttttgttttgtttttcagctaaaggcaaagataatttttttttcagctgaagtttttcttttttgcaactatgacatgaattgagtgataaaatggctctttgaaaagtagatattgtctgtattgtaaatgcttagtcatattcatggcaaagtgttcatttcttgagatggttctttcacaacacacaagaatcaagatggaacgca

SEQ ID NO: 111073 - DNA, 1094 bp, Homo sapiens
aaaactggaaaatctagattacggtaatttaaaaagaaaaaaaatattttaaatgcatcagagggctgggcgaagcaaaaaggattagaaagggccccactctggagagaggagaactgcagagaggtgagttgctaactagcagccacttatcccctgggggcccctcatcctgccactgggcagaggaaaagtcacttcctgggatgaccgcatctaaggccagctttcctcttttattcttcatcacaactgtctcagggcttgcactgcaatttgtcattaaatgtcagcttcattgcatttttatttgtctctctgcgtatgctataaccttcatgtgggcaggaagagtctgtccatcttgttcgttgttgcattcccaggcctggtatacggtagatgcttagtaaatatgtgttgggttggattggaatgaatggaatggaatatgaacagtgaaagctttccagctctttcagatttcctggattctagaggccccttttctccccagaggctctgttcccttaaggctttgtcaataggaccaaacctaagctccttgctgatagaatggcatcctctgagtcctgctctaacacctccagggcttggaagtaggtggggttgcgagccttatcagcaaccctctaatctcccaggccacacccaaactagcacctccaggcccttctctccctaaccacagaatgccttgcagctctaacagaaaaagtgtaagaactcctgttttgagggcctacctggcatccagtttctgtttaactcaaccccatttctcaatctctccaaagccctgcaagttcctcaagtccacgtgctctcaaacccctgccccagattctaaaaccaggcctgtccactctcagtcttattgcctggcctctgggcccaccttccccattctcactagaccctggaccacccaccctctctggggtcccatccagggggagcccacaccccatgagtgaagaccgtatagagagaaaaaatctaaatggaagtccgcagttgctgggtactttaaaaatgtctttctaaggccgggcgcggtggctcatgtctgt

SEQ ID NO: 111074 - DNA, 1035 bp, Homo sapiens
cgtccagccttgggcacgtgagtggacttctggactccctggtatatacagagatttcctcagccttttttctcccacatatctttctccatatatctttgcatatttcccagactttttgatgtgtctgctgcttgccccctctgttagcccttgctcaggtggctgcagctagtatgtttgcctttaattgtttacagcaaacaccagccagaaggctgttccagccctgagaaagttctaaggtgtacaaaacaaaggcaagcccctgagtgtgaatccctcaggcagcaaccagacaggtcaaaacacacaaccacaattctttgataacaaggcctatattgccccttctggcatgagcaagctatataactggttataaaaagtattacattaaattatggggacagaaatgactctactagtgaatgaagaaatcatttagattttatggttagtaagtggaggtttgagagtaaccatccgatctttattaatcttagtgtatattatatttctagaatttggactcatatcaagatgctctgaagaagaacaaccctttaggatagccactgcaacatcatgaccaaagacaaagaacctattgttaaaagcttccattttgtttgccttatgatcataatagttggaaccagaatccagttctccgacggaaatgaatttgcagtagacaagtcaaaaagaggtcttattcatgttccaaaagacctaccgctgaaaaccaaagtcttagatatgtctcagaactacatcgctgagcttcaggtctctgacatgagctttctatcagagttgacagttttgagactttcccataacagaatccagctacttgatttaagtgttttcaagttcaaccaggatttagaatatttggatttatctcataatcagttgcaaaagatatcctgccatcctattgtgagtttcaggcatttagatctctcattcaatgatttcaaggccctgcccatctgtaaggaatttggcaacttatcacaactgaat

SEQ ID NO: 111075 - DNA, 1015 bp, Homo sapiens
gaaaagtgcccccaatggctcggggccaagtcagaggtgggctgcagggtcccccagcccgggcacgaagggagcaggtccctgtaagacagaggcctcgtcccagggtgcgcctgccctcggccttggcacagggagctcaggccttgacctccccgctcccctcgccttactcctcccccaacagccgacccacgccctgcctgctcttccagtccagccaacactctaagcaggcaccgcctccactcgcagcccccgggatgggtcccactccctaccgcagatccccaggccccctccacccagtcggctagccctcgcctctgccatccggtgagtatttccaggcacctcagaccaggcgcctgaacgtcactgccttttcttaagtaggaagacatctctctatgggctgtgagagcattacctatgccctactgatcccatcatttcccatcctaaacatcttgaaggacacaggcaggtggcttcttaaatcagtgtgctctgaactccctgtgacctcagccaacctgtgacaactgagaatgagacaggctctatcctcagagcctctttttgccctctctgcagcctagtggctccttccctaccccacccataggcctgcgtccccgccctcctttcttccatcaagcctgagcttgggaaagaatctgataaacttcttacattgtaacctttaagtgaaggaatgagacgttagggatggatttgaggcacaagtgagacagtgcagaaggaatttgagggttggagggggctttcttgaatctgagcgattcagaccataaaagtaaacttgtctttgtttatttgaccaggcttacatcaaacatggtttctcttttattaatatcaaacacaatgtatttcaattcagtaaatatctgagggacagaaaccaacctaggtgctgttggtcacagtcttggaggacagaatggcagaagtaaatactccataaatacatggaatagaaatctgtgca

SEQ ID NO: 111076 - DNA, 1224 bp, Homo sapiens
cagcacctcagactgtgaccttatttggagatagggttgttgctggtgtgataagttaggatgaggtcatattggtcacgcgctaaccaaataggcctggtgtccttataagcagagggaaatctggacacagacatgcatggagggaaggtgatgtggagacacagggagaaagcagccatgtcaagacacagagagagactggagttttgcagccacaaggcaaggaacacttggggctaccagaagctggaagaagcaagaaagaatcctagaggctttggagagatcaaggccctgataccaccatgctttcagatgtctagcctccagaaccacgagaaaataacccagtttatggtactttgttagagcagccctaggaaactaatatacttgaaaccaagaaaacaacctaattagaataagaagtaaacctgctgtttctcatggagaacatcattagactttgcatccagtgttttaaagagaaaaaacaggaaggtgaaagggaatattttccacttttctctgcgcctactaaggtgaagctaaataacatgactgatttccaaagaaaataaccagaggccatacctccaagtaaatgctgagcctttcagacttgttaccctgttaatagaaacacttgagccaatcagtaacatttttttcttttggttaaagtcaagtgccacaatgaagcaaagaaaactcttatctctgccaggcgcggtggctcatgcctgtaatccagcagtttgggaggccgaggccggtggatcactaggtcaggagtttaagaccagcctggccaacatggtgaaaccccgtctctactaaaaatacataagttagctgggcgtggtggcgtgtgcctgtaatcccagctactttggaggctgaggcaggagaatcgcttcaacccaggaggtggaggctgcggtgagccgatattgtgccactgcactccaggctgggcgacagggcgagactcagtctcaaaaaaaaaaaaaaaaaaaaaatgaaaactcttatcttgcatggcttataaagtaggctctgagggcaacagtgaatattcaaaattaataattttaccagagattctgaagtacatacatcacagatattaagtaataaaaggaaccttcatctgacactttaaaaaaaacaaacaggccaggcgcggtggctcacgcctgtaatcccagcactttgcag

SEQ ID NO: 111077 - DNA, 1053 bp, Homo sapiens
accctgaaaaataattgcttttataaaaaattaaatcatttgaagtcatgtattatgatcaaccccatctgttcaacacacacacacacacacacacacacgtttttaggaaagatgagaaattaaatgttcatttcaaattgttgctaaattgctttcctgagatgttatatcctggacctccgggatggctatgattggaatctgtctgcctttatttctaacatgaaaacaccatggcccgcctgtgcagaaggtgacttcccaggtatctgagcaccttggggaagctaatttctacaaaccgcaaaggaactctcttatttccctattcaggcccctaccttgtattcagcactttacttcagcctgccgaaggctgaacttccttcaacccctttgagccctcatctgaggtccatagttccttagctggtattgctgaggctgtagcacatcctcactcacccctgccagggcctcagctcatcacactgctcatttagctatgagcttgatgtgcagcccagggtgacactcagagaaaacagagccttctcttcttggttgggtataatatttaagctaaggcctatgctttaagatttgggactcaattttgccctttcgatctgtctatatcaatacctgaaagcagtttttcttgaactcattttactttgattttgagatccgcttttgatgcttcttatttaataaggcacaggcacaggcctacattcattatttagactagaactgattttgcacttgatgttaagagaaaaaactggcacgcttgttcagggtaattgcatagaatgaaatgaatgcaatttatgtaaagcattattgaaggaataaaaaacttccaaggtaagcctgttaaatcattcatttagtaactgactgacatttgcacagatctggatcctgcgctttgccagattttaaagcaaagcaaagaaacaattacctaaaagtggtggtgaaaaacagtattgtaagaaatcctggaaggtggatctattttaagtgattattctctcttaa

SEQ ID NO: 111078 - DNA, 1037 bp, Homo sapiens
aactacattttttttttctacccgtgttactgcatctccagagaaccatgctgacacatttttcccgtacattctcactgctgcctataatccatcactacaaagagaggccttaaaaactgcactcaagggagacatgatttcctttccctttctctgtcagaaaagcaactcataatagggaaggaaaagattgcatttaggttaaaggaatataaataagaaagagtctgcctctttctctctttaagacgctaagcctcaaaagggttcttggttttaaaaaggccatcaccccttgacctacactaaacattaatattatatacctggtaataaagccagaggatttttagtgagagctatgaaagggaaaggatggctaagacaggtttctttggtggatgaaagtcacaggctcataaatacaactttgcgaggttagtcttgtggttagctagtacttaaaatttgtgattccctcgactatatgggttgacgggggaactatagactttttctcagacaagacagcagtgctcaaaattacgacttgaaaacagaaacgaccagaattcctaaggtgaccaaaaagccccacagaactgtgttaaaactgtcctcatatttggacacatgtactgagtaagaggggagcccagggaaaaatgccatttttgccttttaaaaattaattttgccattgaaaacaacgttatagcttttaatttattaatcaaataagattttcattgactggacaaaatttccaccaacttaccccacatttaactggtgtcaaatgattatttagctaatgcttattatcagtcatagcttaatactttcactgctaatgctgggtagaaagcctaaatttttaaaatatttgagctccttaggtgcactcaagctagggttccgtgtatctgctaatttaaatggctaacaaaagcccccagtgaacaaagtccccagtgaaatgcggtgcaaatctctatgtcgctactgatgcagctgtagggtgggggactgga

SEQ ID NO: 111079 - DNA, 1060 bp, Homo sapiens
actgagatcatcctgagcaacatgatgaaaccccgtctctactaaaatacaaaaaattaactgggcgtggtggcgcacgcctataatcccagctactccggaggctgaagcaggaaaatcacttgaatctgggaggcagaggttgtagtgagccaagatcacgccactgcactccagcctggtgagagagaaagactccatctcaaaaaaataaatacataaataaataatttcttttcccttgaatctgggaaggtttgtgatttgcttataaccaatcaaaggcagaggaagtgacactgcatgactaagtcagaaaaggcaaagaaattcctgtcttgcttttcagaacactcatactggagccttgaaccactacgtaaaagtccaaaaccttaaggccaccatgatgtgaagacacccagactagcccaggtagaaagaccacataaaggaaacaatcagcagagtgaaaaggcaacctacagaatgagagaaaatattttcaaactgtttatctgataaaaggttaatatccaaaacacatcaggaactcctataactcaattgcaaaaaatatatatatcaaatatttttaaatgggcagaggactttcatagacatttctccaacaaagatatatggcctattgatatatgtgaaaaggtgctcaatattactaatcattaggaaaatgaaagtcaaaactacaatcagaaacacctcgcacctgtcaggatgaccattactaagaaaaaaaaaaaaaagaacaggtgcagtggctcacacctgtaatcccaatacttccggaggccgaggcgggtggatcacatgaggtcaggagtttgagaccagcctggccaacacatggtgaaaccccgtctctactaaaaatacaaaaaaaaaaaaaaaattagctgggcatggtagcaggcgtctgtaatcccagctactcaggaggctgaggcaggagaatcgcttgaaactaggaggcagaggttgcagtgagctgagatcgtgccactgcatttcagctttgacagcagagtgaaactccatc

SEQ ID NO: 111080 - DNA, 1383 bp, Homo sapiens
taaatttttgtagagatggggcctcactatattacccaggctggtctcaaacccctggcctcaagcaatcatcccacctcaacctcccaaagcgctgagattataggcatgaacaccacacctggcctccccgccccagttttgacaaacaaaagaaaaaaaatgtttccagatattgtcagatgtccctggggtgacaaaacagctcccagctgagaaccactgcatgaaacgcttcacttatattagatcatttaaaaaatttttttttatttccatagatttttggggaacaggttatatgagtaagttctttagtggtgatttgtgaaattttggtgcacccatcatctgagcagtaaacactgaacctaatttgtaacatttaattgttgtaaccaccttatgaaatagttactatcattatttccatgttagtcacttcaggccagttctattctaggtaacctaatcagccagaaagtaaacttaaaagacaatccataacctggatcagcctaactacttatctttcttttcttttttttatttttgagacagggtctcgctcttttgcccaggctggagtgcagtggcacaagcaaggctcactgcagcctcaacctcctgggctcaagcaatcctcccaactcggcttcctgagtagctgagactacaggcacacatcaccaggcccagctaatttttgtattttttattttgtatttattttgtatttgtatttgtattttagagaaggggtttcgccatgttggccaggctggtctcaagctcctaggcgcaagtgatccactcagcctcccaaaatgctgggattacaggcgtgagccaccgctcttggcccctaattacccctaattgtgttactggcagataatcatctactttggcaacacagcaattcttagattaacacatttttgtggggaaaaataatctctttttaacaaggtctacctgagtatggagagggtccccggaaattccagtatcctcattcattttgtggtccattcaaaaaatatttacccaacactaacaagacactaggcagcgtcctgaacgctggagatctagcagcaagcacgcaaggttctcacgctcacattctagtgagagcgtacattccaatgagagagagtaattaagtaaataataatttattttcagttattgtgggtgtcctgaaaaaaaaatcgggcaaagtatgagggtgagatgtgccagcagaaagttgggcagggcacatgttggtttaaataaggatgttaatgaaggccttgtcattaatacaacacttgggaaaaggcaaaaccacagagacagaaaatagatcagtggttgccagaggctggagacaga

SEQ ID NO: 111081 - DNA, 1387 bp, Homo sapiens
tgatccacctgcctcagcctcccaaagtgctgggattacaggtgtgaaccaccgcgcctggtgtacattggctcttcagggcttctgtctggaagtgacacttaacttccactgctatttcattggccaaaagtcacttgactacacccaacttcaaggagatggggaaatgcatttctaccatgtgcccagaaagaggagaactggaatagtctgtgaacggtcttaatgactactaaagaggcttcagagtcccatgagctaacacagaatctaaataaatcaaaagccaaatatgtcagtacagtattctatttagaaaatagaaaacagcatttctttgtgtatgtgagtgtgtttaaacagaattatgctaatgagaattatgaagaatgtcttttattagtttgaaatgaaatgcttttgagaacttcacaattaagtttgttattttggccaaatgaatttcattctttttaaattgtatgtccattcaataaacatttgttgaatgtgtataaggggccaggtgtagtggctcaagactgtgcagtcccagcactttgggaggccaaggtgggaggattcttcagtccaggagttttgagaccaatctggacaacgtagtgagaccctatgcctacaaaaaataaataaaattagctgggtgtagtggcatgtgtctccagtccgagcttccttgggggcgggggtagggaggtgagatgattgatcatttgtgcttggcaggtcaaggctgcagtgagccatgatcaggccactgccctccaacctacgggacagcaagaccttgtctcaaaaataaataaataaaaaataaataaataaataaataaatgaaagtgtataaggcactgtgttaggcctgtgaggataaaaagataaatgagggtcgggcatagtggctcacgcttttaatcccagcactttggtaggctcaggtgggcagatcacctgaggtcaggagttcgagaccagcctggccaacatggtgaaaccacatctctactaaaattacaaaaaatattagctgggcatcatggtgcacgcctgtaatcccagctactccagaggctgaggcaggagaatcgcttgaacccgggaagcagaggttgcggtaagctgacatcacgccactgcacttcatcctgggcgacagagtgagactccatcccaaaaataaataaataaataagtggggagtttacaatcacaatagaaaatagctatacttgagttttctctccctttctctttaaggcatcatttacagtatgtaaatgatgtgtatacacacatatataaaatagtgaaaaatactaaatatataaactgttacactttgttcctctctgcctttttggac

SEQ ID NO: 111082 - DNA, 1036 bp, Homo sapiens
aagcctgtcactgttaatgtcacactgacattcatcaattttttttttttttttttgagacagagtctcgctctgttacccaggctggagtgcagtggcgtgatctcggcttactgcaacctctgcctcccgttcaagccattctcctgcctcagcctcccaagtatctgggactacagacatgtgccaccactcccggctaatttttgtatttttagtagagatgctgtttcaccatgttggccaggctggtcttgaactcctgacctcaagtgatccgcccacgtccgcctcccaaagtgctgggattacaggcgtgagccaccacacctggcctcatcaattttttaaatataactttggaacaattctttttcttatataatattttgcaaataatatatagtaaatatatagtaaacattctgagcatactacagattgatatcttaaaatgttagacataatgaagaaatgcatatgatatactaattactcgttttaaccgtcataatatttacatggatttcagaacttaaactgaaattttgagttattagaaaaaggggaagacagctaagtggtcttacatactcagaatctcattaaccatggtggatctggacagtttaaagcaggaattaagggacagcgtatgttggtcatgttttatcaattgtattctaacaaggaaaaatgtctgtctgagtcttagacttctggtaatttctactgccatccacctaagtgatttaaaagtttcttgtcttttaactttgactttgcctctgtagcctagctaccttttctccatgacagtcatctaagtcattactttgctattaaaatacaaacttagtcttcttataacatgaggaattttagaccttaagtaacagagctgtcaccttttatgtgagcaataggatcctaagtccttaattgaggaggaattcataccagggctagcaaaatctatatggcggcccaccatgtaaccatagtataaacatgatttatacttcccttgatttac

SEQ ID NO: 111083 - DNA, 1016 bp, Homo sapiens
tcaaggagttcatgaaccctctgaaggctatctgtatgctgcatccatcaaagttcttagttttaagcaactgaagttgactggatgatttaaacagaaataggaagttattgaatcataatagttcccagaactgctgggaaggctgaagaattggcatacgaaaaggataggtcctacagttacacagttgaccttttaaactccaaattgtttaagcagaaaacctgtctttatgccatttattgctcacattttattttacctgtgtttcacttggaactagagagtgaagttttaagtgtttagaatcagatatattaggcatgaaaacaatggtatgtacatacacacacctcatagttaactacgtaactacataacttgctcatttaactttaggaagtatattagtaaggcataggctaaaatgatataacaaagagattcagaaacacagtggcttaaattagatggaagtttgtttttctatcacctcataggtgggcaagtggcccagggcggataggtagctctgcttcacaagttcattcagagacccaggttcctgttatattgtttctccttcctgtaggatattatcttttctccatgattgaagcttactcagctgtccctcagcatgccaacctgtaggaaggaccgaagagaggaagagaaaacattaagcaagcgacacaagttgcacatatcagttctgcacatattcattggtcacatggccacaactggttacaaaggaggctcagaaatacagtcttaccctaggtagccatgtctccagctaaaagtcatttactgtggtagatataaagaatggatcttgggttataatcaacagagtgcaggaagtgaagatggctgaatagaactcttcagagttctttggatctaatttttaagtgaatttttccctattaacattttatatatatatatatatatatatatatatatatatatatatatacacacacacacacacacacacacac

SEQ ID NO: 111084 - DNA, 1003 bp, Homo sapiens
tgtgatgattaaatcggtacatgtgaagtgcctaacctatggtaggtgctcagagaaggttagcttctttccttgataataaagtcttaactattaaaaaaaaagccatggtatatttatacaccatattttgtctattctaagacatattttaacacctctgaatttccatgcatattacaaccaatggtgacttgtcaaagagatggcagtgatgaaacagttgtcactgccttcatgtgcagtttgttttccttttcatgtatatacagagtgatatatgatacttacatgtgtcatttcaaacatagcatacttttttaatgacacacacattgacagtgtgttttataactgatggcaccttaaattcaatgagataacaacataagaagagcctctttgttctaagcataatggcacatgtcttatttatcatttcatatattctttttgcagactttatgcagttggtggtcgtgatggaagttcttgtctcaaatcagtagaatgttttgatcctcatactaataagtggacactgtgtgcacagatgtcaaaaaggagaggtggcgtaggagtgacgacctggaatggactgctgtatgctataggggggcacgatgctcccgcatccaacttgacttccagactctcagactgtgtggaaaggtaatttcctgggaagaaaaactaggaacaaaaaagatatatataagtctctgatacttacatatatttggagaacgtgttggagaattggaagggaaagtcggcattcaaaaatgcaaagcaacttcactttataacagcctgctctcacaggaagtgatacttccagaaaaataagtttgtattgagcatgcactacatgcaaggcaattttattttatatgggatattggacctaataagaagaggagcttgatgaattttaggcagaatgacttaagggctgtagactaaataaaaagcaaaaaggatagggacatttctatgtgtt

SEQ ID NO: 111085 - DNA, 1840 bp, Homo sapiens
atgacatgtagtctgaaaattgcctaacatgtggcaagtggaacattctgattaagcttatgttcttacatcccaggttttctgatgcttgggaaatgtgcaggattctgaatgatgaggctgcctggaatgagttggccagagcttgtctacatcacatggaagtggagtttgcaatccgtgtttatcggagaattggaaatgttggcatagtgatgtccttggaacaaataaaggtaaacagcatgttatagaattatcaagttaaaatttaaatgctattttaagttaaatgcagtctaaattttttgcatttaatcttacctcttaaacaagtgaatcgatagaacgttaccacttcctactgatcaaagtccttaaaaaaaaaaaaaagttaaactcttgcattttttttctcatcagaattgcttttatttgtagggaatagaggactacaatcttttggcaggacaccttgccatgtttaccaacgattataacctggctcaggacttgtaccttgcatccagctgtcctattgctgccctggaggtatggcagcaagtaagaatggaaattgtgtaagaggtatccagtggggaaatgggggaaaaaaaaatggggccgggtgcagccgctcacgcctctaattccagcactttgggaggccaaggtggatggatcgcctgaggtcagaagtcctagaccagcctgaccaatatgatgaaacctcatctcagctaaaaatacaaaaattagccggacgtggtggcatgtgcctgtaatcccagctactcaggaggctgagacaggagaactgcttgaacctgggaggtggaggttgcagtgagcctgtaatcccagctactgtaatctcctgccccagcaggagaattgcttgaacctaggaggcagagattgcagtgagccaagattgtaccactgcactccagcctgggtgacagagcgagactccgtctcaaaaaaaaaaaaaaggaaagaacataagaatatcaaaggaggatcaccccttctatataattaaaatttctcagcacagacactatatgccttccccctcctaaaattcaaacatgtcagtttaagaacccctgagtactcattaattataatgttaatcattaaaattataattcaaaaatgtttattctgcattttgtggaggtataaaatgcatggtattataacattactaattgaaatctaaatgtgtccaaagagaacagattgtgtaaattacaaaaacatatacaaggaaaaatatcaccatatattgagtgctcatgtgggccaggcatttttctaagcacttatcatgtattaattcatttaaccctcccaacaatcctatgagataggattggttttttctctattttccagatgggaaaaccgaggcacatttatccttattgtgtgaaattctgttgtgtattaaaaggtgagctaaggactagtgtaccatcactggtttcccagaggtgagcattgcaggagagggcctagagcaggatgaagggcctggttagttcaagggcagggaagaagggaaacctggcaatatagactagcaatgaggggcatagacttcacagtcagacatgtctgggttcaaattccagctctgtgtaagcttggacatgttatttaacctttctgaaccctagatcctatttctttaaagtaggaagaataatatctaacccacgggatatttgtaaggatttaaaaatgagaatgaggtcttttagcacagtgcctgatcaatagtaaagacacataattagctattgtaatcattaatattatttcacctaaa

SEQ ID NO: 111086 - DNA, 1002 bp, Homo sapiens
catcctttcaaaactcaggtaaagctttcattgccttctctcgtctccatcctccaactctccctaccccaaccttcaggatgctgtgggtaacccagcagtcgctcttattttaattgtgccttttcagcctatttctctttctagtctggcacttgtcatcccgtccaactctgaatttactttctgtctctcccatcaaatcatgaccttgagggttgaactgtggctcagttctctctgtatcctgagctcctagcacgcatctgacaggaagaaggtgttgttagatcaacgtaagctgaataaagtaatgacttatttgactgcatattttccaaaattgtgtccacatttataaagatttaagaagatcagctcataaaaattaatgaagatatcagactaatcctcttactcactcaataagtattgacagagcacatgtgagcagaaccatcctgaagagtctatcaagcctctgcatattataaagaactaggtctgtaacagcaccgcatcattaccctccatcgcctaatgtctcatattgttaaggccaaacacagggaatggaaagaaaatgccgtgagactgtaggaagggggttgtgggctggaggggtgagaggagacatcattcatgagacagaacctctgaggttgtgggggagaggaaatagcacttgacaagagatggtcttagtctcttacatttatacagtctcctgggatagtacattgtttaacccctctgaaacctagaaatggtcatctctttagtcttttgggttcaaagcaagcctatgttacaaacgtaggggctactctttcctacacagaaaaggggctggggcttgattctgctgcctgcttgggaagtaacacatacgtatcacggacctacctgcagactgctcttctctggcaatgatgatggcagtctgggcagcttctcggtattgcttcagagccatgtacaagcggaacaggtacttggcat

SEQ ID NO: 111087 - DNA, 1052 bp, Homo sapiens
tacatttacatgtttcaaaatcaaaacaatataagaaagctgagcgtggtggctcatgcctgtaatcccagcactttgggaggccaaggcgggcggatcacttgaggtcagaagtttgaaatcagcctggccaacatggtgaaaccccatatctactaaaaatacaaaaaaattaactgggtgtggtggtgtgtgcctgtaatcccagctacttggaaggctgaggcagaagaattgcttgaacctgggaggcagaggttgcagtgagccgaggacgtgccactgcactccagcctgggtaaagagcaagacgtcgtctcaaaaacaaaacaaaacaacccacacactataataagatgcacatgatgaagcctggtccccctcatctccccgtctccctgtccccacactggagtttggtactgtgcctcctgccccgtgcctcattccacacaaagcagcgtattgtagatatgttctgtatcttgttttgttacttaacaatacagacatctagacaatcactcgaatccaatggagaagggcctggagaaaatctcaatgggggacaaacacctggcaggttatgtcccaagtcactccatgggcctcacctttactagtatatagctgtgcagaatcatgaggttggtggccatctcggagggaattttgatcttctgggatttcagttctgcatacatactgaagagaacatcgtgtgcattccggtagttgccttgaaaaaaggtggtaaaacgacattactgcaaagggtgacatctgaggacattctatggacccccatcttactagtggattttgttaatcttgttattagtaatctcttaataatgtcttattcaaagcaactcagcagatttcctatttatctgtctgtctgtctgtcagagatagggtctcgctctgtcaccaaggctggagtgcaagggcacaatctctgttcactgcaacctctgcctctcaagctcaagtgatcctcccatgcctgggtaatttttgtgttttttgtagagacaaggttttcacca

SEQ ID NO: 111088 - DNA, 1049 bp, Homo sapiens
atggatgtcaaagctggaagacggggatctggtctggtggcatcaaggcacggtgacaccagctctggactgtgatgccttgtgtatgagtcaaataaatactgacttgattaagctgctgttaggttttctgatgcttagagctaaatacaatcctaattgatatgcccatctttttttttttttttttgagatggggtctcactctgttgcccaggctggagtgcaatggcacgatctcggctcactgcaacctctgcctcccgggttcaagcaattctcctgccccagcctcctgagtagctgggactacaggtgtgcaccaccacgcccagccaatttttgtatttttagtagagatagggtttcatcatattggccaggctggtcttgaactactgacctcaagtgatttgtccacctcagccttccaaagtgttgggattataggtgtgagccactgcacctggccccccaccgttttcttattgagcttgcacactggcagctacatttttggaaatactttgagaaatacgattagatagcagaaatagccatctctgcctacctgaccattccctcgatcttctttttgtatttggcatctattttgctgcggtattcaggcctcatcaacatagctgcgaagctgaaagcagagttcttcaggcctgccctgtgacactcaatcacagttgacgtcaggatgggtacaatgtctgcaagagaaaaggggagagcagcaacagcacagtgtctgctgtcctcagtgatacaggcgggattccaccctggttctgtaggaaaacagggtcatggtctctgaactttgctttttctgcaaagaaccagatatgatctgtttaatgaggaaagtacgtagctgtggggtcaggctaactgcccatcaagtgcttttcctttgatgacaccatgttctgccttgtaacactaggacctgcaccccttgaggcaacacttccatgagtttcctttcatgcctcttagatattttttgcatctgacaggactgctgataaaagcat

SEQ ID NO: 111089 - DNA, 1110 bp, Homo sapiens
ggagccaccgatgatgtggccttttggagccacttgatggcacatgccatctttgcagcataaaactgtatacttactcttttcgagatccattgagtcacggccattttgttacttacacaccattcagctttagccttcatcttgttaaatgttggcagtttgtagcaccaccatgatttgatctcttaaagttactgatggggtagattatttgtactaggatgagtagcttcctaaacaagctccagtatgagtatgctcatggtgaaggtctaaggcctgtaactcctaagaattatttgcccactctcacagtcccaggtgcctgtggttcttattcctacagccttacagtatacctccaggcatattagaggaagcaggggactgtgggtaggttttatgatgataataactttgtaccacttagtaaggccaaggcctctggcctgttctctggccggccactgggagggaaggacaggtcctgaagctggaggcatcatgcagttgggatacttggatgctatacaacattactggcaccttgggccctagcttaggcccctgggtaccactgtaatgctcaggttgctggggccatactgtaaaataatatcatcggattcattcacagttgactccctgactcatttctgtcagctgctcagactttggtgactggccttggatggcaaggaagcatatactgatgtgggaaaagaagaagaagtatgtactcccttggagcaagagagagtgtgtgtgtgtgtacagatggtgtgtgttgtatgtgtgatatggggaaaaagaaccttcacacagcctcagagaagatgattccaaacaaacaatgtatgttttcaggggaagtcaaatgacttaattttgtgacgggaattctgtagtatgcagtagaatgactcggcagatagatataagctgatagtttcattcattctttacaagattggttttcctaatttttgatgttttgcttctgggctgattgattctgcttaatagctgtgatttgtataaacaacagcttttcatttcaagctttttacaccattcacatctgtgttcaaacttgacaatgtcctt

SEQ ID NO: 111090 - DNA, 1035 bp, Homo sapiens
tttaattgaccgtaatcattagtctttctatgctttaatctacctatgttgtcagtcatttatgttaaagaccatcatatccctcttaagtaattatttgctgtgacgttggcatcggtgaggtaaccggtatgttgagattagttgcttgaggaggctgagttggcgacatgatctccctgagggccataacatgttggatcaaggtgtgtaccgcaatctgttgttttctctgggagaagtttcctgtaccagcagatcagagttatagaaagggtctgactgccctgtaggtaggtatttggtacagtgttgctttatcttccgtagactgtttggaagccaatgactattaaggaagtaactttgtacggaacataaattctggactgcaattgattttttttcaggccatttatgccagtgttcttcctggagagttgatgagggggtacatgacccagtttcccaccttcccaagctggctggggaagcactcgtctacaggcaaacatgatcgtattgttcaggacctggccttgcatatgagtctcaggtaggtgggattactctgtttcgggtattttatcgatttggtgtatttggcctttatccagtaatgatcatgtgagtcaaaagatttgtgttttagtttttattttattggtaactagatgaatgatcctggataagttccttatattttatgggcctgagttttatcatctgtaatcagtataacacttgttttgccacttaaaaggatactttggacaataaaatggtagatgtcataatttaaaattttaaagactgcgtaagtctgaggtggcactgttactgttattgttattatgcctattagtgggaatagcttcgcagcttcagaataattaataggaaaataattgaactatttaaagaaatgaactattttttaccaatttactctagtagtaaactgacctagtcatttgggataggaaataacagtttagcatgtaacaggaggaggctgctcagatcattgaaaat

SEQ ID NO: 111091 - DNA, 1076 bp, Homo sapiens
gtaattataaataaaactgcttgtaaacatcctgtgcagatttttgtgtgaacatagtttcatttgggtgaataccaagaagcgtggttgctggatcgcgtggtaagagtatgtttaattttgtaagaaactaccaaacggtacagttttgcattcccaccagcaatgaatggaattcctcttgttccatatcctcgttagcatttggtgatgttaccgttttgaattttggccattctaataggtgtgtccctctcttttttcagggcccatttgatgttgcccggaaagtgtttgcagctggagaggagactgctcacatgtcacttgtggacaagtcagatctcttttttcatgattattcaatagcacccctcttcgtccaggaaaattacatacacgtgaagcctgtagcagcagggtgagtgtccagagctggtgagaggtgtgcttagtatccagcactgcgaaggctaaatacccgtgaagaagggacctggggtgtggagagtgggataatccagactggttctttcctgcaggggtgacatgaaaaagcacctgatgcttttaagcagagcagcagacagcatatgcgatggtgacctagtggacagccagatccggagtaagcaaaactggagtcttctgcctgcgcaggtgagcagagggctctccctaacatgcaggctctgcttttactaagagaactaaatagcttttagctgctgtacttattttattttattttgtttactttatttttgagatcgagtctcgctctgttgcccgggctggagtgtagtggtatgatctcggctcactggagcctctgcctcccgggttcaagagattctcctgcctcagcctcctgagtagctgggactacaggtgcccgccaccatacccagctaatcctgtagttattttaaataccagataaatgttatggctcttgtggcaaaaatatagtctgttacagattataatactctgtggtaactatcgtctgtttcctaatctggccttatttttcttttttctttctttctttttttttttttttttttgagaca

SEQ ID NO: 111092 - DNA, 2426 bp, Homo sapiens
tcattgtctgttagtatcatactttatactttacctatgggtttttatattaattttgtaccttctttctttcttaactggcctttcttggcgggggtggtggagttaatttgtattgtgccttcagtggtttccaatattttgattaggagttgggatacagctacgtggaactgaatgcaagtgacacccggagtaagagcagtttgaaggcgattgttgctgagtcactgaacaataccagcatcaaaggcttttattcaagtatgtggctttttgacctcctgttgttgttatataagaaaaatatgttcatttcaatgttcagtaaccagtattgaacacaggttgtgtgccaagcaccctactaaattctggggctaacaagagaataagaaagccgtctgacatcactcttatggggcagtacttaccctttcgtaggtcttagaggtttctaagaatgtgataaaaatgtgtacatgcacatattcgtttttcatgattttagaggattcacaggtgaatcctgtaaagagagaaagaaaataaaaaaccatgtgtaatgcagtgtgacttattacctcattaccttattaacctcactctgcatgtatgtaataaagtatgtaatacagagtgaggtaataaggccagcagatgaagaagtaattatgcttggggcattgagttaaaggggtgataattgttttgaaagacctcaaagaatgagaaagaaaactatttggaggtggaagaggtcactgcaggcaaaggtagtaaaagagaagacagtgtgcaaatgcccactgtgtttcaggttgtagctagtggtcctctatggccagagttcatggaaaataagatgctcaagttaaggaccgcacagtgcctatttagagtctatggtgtgttgttttgtcacctgaattcttggtgccttcacattgttcaaaataatttgctcaggaaatgtcactcttagacgtggctggtgggagggtagattggtacaactctggagagagtccagcaatatttctcaaattacacataccgtctagcccagaaattccaattgctggaatttagctattattttatatgtgcaaagtggcatatatatgccatatagataaggatagtcatttagtatgacataatagaaaaaagcttggaagcatcctatatatttcattaatggtgattaagtaaagtgtgtgatacaagtgtagaatggagtattaaattgccttaaaaaatgaagtgttctgtatctgtaagataaagaatgaatcaccaaaatacataaaatgacaaaactggctgggcatgttggctcacgcctgtaatcccagcactttgggaggctgaggcggacagatcacctgaggtcaggagtttgagaccagcctggtcaacatggtgaaacaccgtctctactaaaaatacaaaaattagctgggtgtggtggcgtgcgcctgtaatctcagctacttgggaggctgaggcaaaagaattgcttgaacccgggaggcggaggttgcagtgagccaatatcgtgccattgcactccagcttgggcaacgagtgaaactctgtctcaaaaaaaaaaaaattcaaaactcagttgtatatttttatgcacatatgtgtacaatatctcttaaaggacatataagagactgttgtttgcctctgggaagggaattggggtctgcaggggaaggggtggcagggagagtttctcttctctgcatattctttttttttttttttctttaacaacactctgtagtccagtgctgcatattcttgtagcttttgaagtttaatatctgttacataattttctacagagcagcagtttttgagcaattgttattttgtttttgtctcatcccattgctcctcaacctgggtcagatggagcagcctcttcagtaagcacgaaacatgctctcatcatggatgaagtagatggcatggcaggcaatgaggataggggaggaattcaggtaattcaagtgctgtatttttgcagtttcactgttgataatttagattgttagaacattgtcattctctcatacttagggcagttaaggcatgttgctgaggagatttttagaacctaaaatagcttgtgtggtatttgtcatttttaaaataattatttttgtgttgcaaacttgcctttcaggaattaattggcctgataaaacatactaaaattcccattatttgtatgtgcaatgatagaaatcatcccaagattcgctctctggttcattattgttttgatcttcgttttcaaagacctcgggttgaacagattaaggtatgatgattgaaattttttttccatcacactagcctatttatttaagggtcaatttttaaaagtacctgataaatatttttaa

SEQ ID NO: 111093 - DNA, 1050 bp, Homo sapiens
tctggtgtgtttgttaatttttatagtttagaaggtggtgatttccacaaacaggaaagtctgttgtgaaaagaccagcccaggttgagtagcccacttggatatctctgattgctctctgtagtacgtttagcaggatagaaattctgtatgtttcatcaggtttcttttttcctcatttttccacttcttaagatgaagaaagagtccaaactggagagaacaccccaaaaaaatgtccaaggaaaaagaaaaattagtccatctaaaaaggaatcagaatctaaaaagagcaggccgacttccaaaagggacagtttggcaaagacaataaaaaaggaaacagatgtgttttggaaaagcctggatttcaaggagcaggtggctgaggagacaagtggtgacagcaaggctaggaatttggctgatgacagcagtgaaaacaaagtggaaaatttgctctgggtggataaatataagccaacctcgctcaagaccataattggacagcaaggtgaccagagctgtgccaacaaactcctacgctggctccgaaactggcaaaagagttcttccgaagataaaaaacacggtgattttacaacctcactcatttttgtgtgtgtgtatatcaacatgtgattgctcagtggcacatatatgagaaaatctaacgattcattcatctgtcagcaagcatttattaagagcttgatctgaacccaggtgcagtactagaccctgctggtggtgttgtgaacaaaacagtccctctcaggagctcacaggcagtgggggaggcatatctgaaccagccattaaaatatatttgccaagtactgctagaggggtaagtccagggtgctgtgaggatgaagatgtgtggtcagggccagggtgtgtgtgctcccatcccagaggaagggatggctaagctaagacttggaaacaaagtaggagctagctaggtgaagggagggagagatgagtgttgggtaggaaagagtatgtgtcccaaggtctgaagccatgtgacagcaagacccctga

SEQ ID NO: 111094 - DNA, 1044 bp, Homo sapiens
ttagggaatgtatctgttattttctttcttttcaatgttactttttcaatgaatgtgctattttttgtttttcttttttaattccagtgttatcttaatttacgaatgtggtttttcacctactaataggccctagaatttttttttttgtaagagaagggaatggtaggatgcaggatgcagttttgatggtttacatttttaatcaacaggccgcagccttggggacaaaaattattgatgaagatggcctgttgaatctgattcggactatgccaggcaagaaatccaagtatgaaatagcagttgaaactgaggttcgtataaaatgaatgtgatttaagttggtgtatattaactttttaatttcatagacatatgtcttgggtggatacaggcttgttggctgaaagattaacatccctgtctaccacaaatggaccaccttagttccttttgagctggaagactctgcttcaagatgtctactttgttgtttttccttatctttgtcagggaatatgagtagagaaaggacagtatattgcatataacatatctacttatcaaactttccttattttccatattactattattactactattttttaattttttgagacagagtctagctctgtccctcaggtcggagtgcagtggtgtgatctcggatcactgcaacttctgcctcctgggttcaagcgattctcctgcctcagcctcctgagtagctggaactacagatacctgacaccacgcctgctaatttttatatttttaatagagacggagtttcaccatgttggccaggctggccttgaactcctgacctcaagtgattcacccacttcagcgtcccaaagtgctgggattataggtgtgagccactgttcccggccatattctcacgttgactttatgcaaaggttattgtttaagagttccttaaaggatattttaataggtattagcatgataaatttgttttcaattagaactgtattaggactttttaaattgtgcagacacctagcctgtatt

SEQ ID NO: 111095 - DNA, 2548 bp, Homo sapiens
caccacagtccaagccttccgtatctcatctgaaactgcagtagctttctaagtggtctccctgcattcactttccccgctctgcagtgtgttttccaaatgacaggccttaagttgggtcacaaactattctcagaattctccagtggattcccgttctataataaagactaaaattattcctattgcctagaaagtcctccaggatttggcccctacctctttcacccgaactcttctggcacgcctccgcattgtgctgcagccacattgaactccaggcacacttccgtctcggcttttccatttgtagttttaattgcccagatattcttgcctgaggtatcttcatttcaggcctccgttaaaatgttgtttatcaaagaggcattccctcactaccttatctcaaagagtacccttcatcactctttaattctttcaccctgttttactttttattcatagaacatttaacttgacagtgtatatttgtttatttgtatatctgtttcctcttctagactttaagttccatgagggcagggattttgtcttttttattcactgctgtatcttaagttcctggtacataatgagtgctcagtaaatatttgtgtactcttggtagtaactgggggatatagcgtattacaggcctggcactggtaaatgtggggatgatggttgaattttggagatagggggaaaaagttattagcatctctaagttcttggatgtttattttgtttttgagacagggtctttgttgttcagactggagtgcagtggtgcaatcacagctaactgcagcctcaacctcctgggtttatatcctcttgcctcagcctccctagtagctgggactacaggtgtgtaccaccatgcctggctaattttttgttaatttttttgaagagaaggagtttcatgatgttgcccagactggtctcgaactcctgagcgcaaatgattctcctatcttggtctccaaaagtgctgggattacaagcatgagccaccatgtctagcctcttgtatactttttataaagttggtagaagtgttttctttgtataaccgaattgatgttttataaaaaatatttggttacatttcatttaagatgaagaagatgactttatgtgtaagaaggcggcctctaaatcaaaagagaatggaagatctacaaatagtcatcttggaacatcaaacatgaaaaagaatgaagaaaacactaagaccaagaataagcctttatcaccaataaaacttacacccacatcagtacttgattattttggaactggaagtgtccaaagatctaataagaagatggtggcaagcaaaagaaaagaggtaagtgttctacatataagcaagtatgctcaggatttatacccattcactaatattaacaggagaaactaggatgtagtaaataggcaacatgttttaataattaaaataattttcctatgattatggataaaatgtattgccctcattttaaaggatgaggaagttggaatgttacatatttaattttttaattcttgaaagcgggaaaagatcatttaagccataagaaaaaatgataattattcgaatttaaattgagttctcagaatggaaactcattttactattgacctcaaccagtcaatattagcgataaatttgtttccaaatgagataataaatagattccttataaatagagcatacctatgctacacttgtgaccttctctactttggcagatattggattcatctgtttctggccatttaggaaacagacataccagataaattatggtgaaagtagtcccctgagttaaagaaagcctgccccatagtgtgtgtttgttgattctatcacttcctccatagaacaatgtaatcattctcacatattggtttgccaatgttctgggctacttgtcaagccaagacattaatctacaggattgggtttttttatttttatttttggtacttctcttgaacatatcaatagaactaagtgagacaggtctgtctataggatatttattagggattggatatggtcagggagtagccataaatttgactttctggctggtgtacattgcagctgttactgatagatacacttatctctcactggtgtatttaatcagcaacagtcaagaaaaagtgccttatttttaacttaaggtttatgctgattttgcttgattttctttgaaatatagctttcacaaaatacagatgagtctggattaaatgatgaagccatcgccaagcaattacagcttgatgaagatgcggaggtattggcattttgcttagaatcattagtaacttgatattctgactagctatttagtccagccaggttttgaattgaacctcattggaagttacatgtaaaataagttaaaatctaataaatgaaaatctaaatttctatacaagataaatgatgagaccaggggagaattatttactgaaagatttatttttagagaagattgatcaagtgctgtgagatgatttt

SEQ ID NO: 111096 - DNA, 1931 bp, Homo sapiens
aaatgacttatacttggctttcgtactgagaccagcactgttctctcctcttgtgtggggaagatgtatgtgaatggcagtggggaaattgcatcgattgcagaatcactcccttaactctgtggtcaggcagatttccttatattgcccgttttatgccttagaattgtaagaagctttgggtaatgtacctgtggccaactgcccaggcctttcccccactttttcttatttaggcattccagtggactcggtacctgtgtggtggataacatcacatttcaagccagtacttttttctcttatttatcattactcagctacctcactagaccccacgaattataaaataaggtttattttaaaaatataactgactctgtttgattctaagaggattcatttgtagtgaatcatgagatctctggtttcttgattgaagatgagcagtcttaggggttttattttatgctgatatgtatagaatgtctgatttaccacataaatgggcaaaagtgctatgtttagtttctcttccatccacttaatttaaccagtatttattgaaggcttggcacatacatgaacctttttctgtctctgaaaccaaaatgatggtttagatttttgactcaaggaaatattgaaaagaaactttatagaaaaaggctttaaacaccttgattccttttttagtttttgttgctaaataaattattttaatccccgtaactggatctcttcattaatttgctttttgtgtattctagaccaaagaaaataaaatcacagaattagaattcagagatctgtttggaaaggccagattctcagcagtatgaattccagaattagacttttttcctttttgccttttaaatagatttttatatggacccccacattttttatttctcttttgttattcttctaaataaatgaatgtatctaacacagagtgttaaagcaatcttctctcccaggcaattcctctgctgtgtgtaggataatgtgataatgctagtttgcttggttgttcgtaccacatttgaggttatgttgcctataaataaaaataaatggtgtttttacaagaagacagatatcctagagggaaaatctaagtgttcaattgttcatgattttcaaccagttctcctcaatttgacttagatctgtttatcattattttattgtaagtttctggggagaagagaacatagtttgcctttggcttcctatgaggcggaatccaatttaagcttattagaaaacaagaacaaatgttaaaaaagaacaactacaactttatttggaatgtttcatctctacacactgtgtaggattgtaaaatatttattttacatgaggatcctcacagcaacacctgttaagtcactgtctgttggaagcagctagttgtcttcttggcctgttttgtcttctttccataatatattggtatagcctttaaaatgttaagggcaaaggaactttaagacaactagttcagaagtcatagtagagaaacagtaggactgctcgttcttcaagttttctggtttcatcaaggcaagatgacagtgttttcagatatgcctgtggcttatagggtaccatatttatttataaaataaatatgaaatcccttatatttgtgagaaatatctcaatgcttaggatcatgaatttgctttttttaatgttattctcataactgtaaggagtatggggaaattggcaaatcagggggcactaaataggtattaaagcaagagagccagtccttgagaattaccctccctttttcttttcataactgtgttttactagagttactcgtaccttcctaggggcctagagagctgtttattttgtagttaacagagaaaaggagccttatttgcactttttgtttaacacaatgaaaa

SEQ ID NO: 111097 - DNA, 1322 bp, Homo sapiens
catcatgttgtatactttagatatatacaataaaatttattttaacaacaccgatttcaaagacttcctacacaaaaaaggtaaactaccttgttaattttttattattgatcccattttgaaatgctaataatttggatctattgggttagataaaatatacagttaaaattaatttcacttgtttctttctacttttaaaaatgtggctgtgagaaaatttgaaattttatatgtggcttgcattttacttctattgcatagtgctttataaacaatgaaaaacagatttaggaaaaatgtaggtttcaagtatttttgcttatattattatacagctagctttttagattattgttatacagatttttaggctttccgtttcactccatgagaaatatttttcatcatcactttgattagatctgtcttctactaggatttattgatttttaaaaactaatttaaccacattaatttcccaagttacaggaaaaggaaagaactgcttataaatatctttatagccaactattgactctagtaaaatgttcttcaaggttggtaaaaacccaaatacttgttgtactgggtaaatatatttacttttagctgtttaatgaagtgagagaccttgagtcttgtttggcgaagattgaccttttattacggtttcatcagggcctgttgtttgatcgaaaatggtgggggtttttcctgtcttgaattgtttgactggtaattttaattgtgcatataattctggaggcagttagtactcctgaagttaaaattatttgaggagtgtttaaatgggaaaaaaattggcgatgttgtgttctctaggtgacaggttaccatgtaataagagtgacttgtgactttggaaaatagtagcagaaaatattcttggggatgtgtgtaacattctctttgctaacttttagagacatatagtcttgtgtatcagacaaataggtatatattctgtatatgatagagagcttctcttagatgtttgcagggaaacctagagtgataaaggtagaaaatttccttcaagtgagtattgtatttttttgattatacttgttaaaaaatcaataatttgtacactaaaattctgtataaaagaaactaaatttagaatttttgaagatgagagatttaaattaataattttaaattacctaagtaaatgttacacacacacacacacacacacacacacacacacacacttatttgagtagcatcttattgtaaaatttctacagcttgctttttcttttttttttttttgagacggagtttcgctcttg

SEQ ID NO: 111098 - DNA, 1056 bp, Homo sapiens
tacgggatgctgtacgtgaaagggccagacccagtgcctgacacattgagtagcagtccaaaggaaaaaataaaaagaaaaacaaagtccataggtgaactttgtaggttacgtgaaacatttgttgatgaaactgttcaaaatatcaaagacaaaaagtaagtgatgtgaacatattttttggaaaatttttaccaaacagacgtttctttgttatgggcaggtggctgattgactcttaacctttttgtgctgttgctaaatatctgcccaggcacactgtgtaaacgaactcttaaattaagaggctctcctcttagctctggctacctttgtgaagttttgaatacgtgggaggggagagtaagaacagtatagtgataggtttattatgtaactgaaggtggtgtgatagggctttccagtgacaccctgaaaaacgtcaaagttagtgtgcagccagccatggccttcaactgtggatcagggctgttgttatcttgtgattttaagtaaacaaaaaggtcagacaatttaagctctgatcacagattttctttcacatgggactagttatttcagacaagcaatttttttctttctgtatccagtcatccattaagatgagcagtttttgaatgttgttttgtgaagagatgtccagctttttatctggactttttatgaacgttaggcagtatttgtgtcatttgctggtagcatatacatgtgaaagtaaacattgtcctcatgttttagctaaaaatcttggggtatgatgtacctgtctcagatggtgttcagtattatgcattattctatttttttcttagaattgagatgtagggaagaagcttgctttattattgcctgttttatcttttcatactttattgtttgaaatgataggtgaatgggaggaagataagccctttccttcatacaagagaatgagactattaaaaaaagcccacaataagattggcataataaaatcacaaatgtaagagtttcaaaaaagaaaagtgcagctttttcaaattaatatagtactgg

SEQ ID NO: 111099 - DNA, 1408 bp, Homo sapiens
tttccagaccagcctggccaacatagtaaaaccctgtctctactaaaaatacaaaaattatctgggcgtggtggcacgcgcctgtagtcccagctactcaggagtctgaggcaggagaatcgcttgaacctggaaggcagaggttgcagtgagctgagatcacgccactgcactccacaacagagcgagactccgtctcaaaaaagaaaaaaaaatagggagattatcctggattatttggatgggctcagtgtagtcacaaggaatagggaggtagaaaaagggtttagagagtgagattaactgtggaggaagattagaggatccgggagatggcaacgtgagggctttcgcttgatgttgctggctttgaagatgcaggaagggtctttgagccaagaatgctggcatccactggagactggaaaaggcaaataaaattctttcttagagtattcagaaaggaacatagccctgctggtaccttgactggcccagtgagacccatatttgccatctatctaacctccagaactggaagataataaatttagtggcttagttgttttaagccactaagtttgtggtcatttattatagctggaataggaaactaatacataggcttagcactgagtaaaagtaacctgtgagaattcacagaagacatgtgccttgaaaaagaccttgaggaattggttcaccgtgactactttaaacatgcactatattataatagttcttttcaaagttttgttttatttttctctcacatacagattcagagtcagaggagacgttgcaggtaaaaaatgccaaaaagccaccagaaaaactgccagtatcttctaaacctggtaaaatttcacggcaggatcctgttacatacatttcagaaacaggtaaggttgcattgtggtatatgagatgccgtgtgtgttatgttcttgagttttttgttggtgtctaaatgtacctccttcactttgaatggaatttctactgcctttttgctttgttgagttatatttgtcagggaaggctgggatcatcttttgcatttccagtagattaaggaccaattacagggaaattgctcttggaattttttttaagtgcttgtattgaatcatataagttgaagcttaatcttgaatcacatattaaaatagtattgggttgttttagaactacttttttaatgcaagctttttatctggcaggccaaagtcaataatctaagtgtagagtgattactcatatttgtgatttataatttagcacggatgttgaattccttgtattctctggtgacactacaaatttaagtattgggttttttaaagaagattgttttgtacttaaatttagttctgttacatctgttttaagagtaatgaaagtgcaa

SEQ ID NO: 111100 - DNA, 1995 bp, Homo sapiens
attctttgttgtggaggactgtcctgtgcattgtaggatgtttagtagcatccctgatctacctgttacatgacagtaaacctccctacccccatttgtgataagtaaaaatgtttctagacattgacaaatgccttctggggggcggggatgcaaaattccccctggttaaaacgactgagcccaaatctaacgagaaaaaaggatagccccgtctctactaaaaatacaaaaaattagccaggcattgtggcgggtttctgtggtcccagctactcagaaggctgaggcaggagaatggcgtgaacctgggaggcggagcttgcagtgagccgagatcgtgccactgcgctccagcctggatgacagagtgagactccgtctcaaaaaaaaaaaagatagttatataggcttctttatgttctaattatattgtgatgtttataggtaaatagctcccgtaaagaggatgacttcaaacaaaagcaaccaagcaagaaaaagaggatcatctatgattcaggtaataatttcttctgaggagctttaaaattttaaagttattgtatatcccttagaacagtgctttaaactatgttctaaggatgggtgcggtggctcatgcctgtaatcgcaatcgcagcactttgggaggcaaaggcaggcagatgacttgaggtcaggagttcgagaccagcctggccaacatggtgaaaccccttctctgttaaaaatacaaaaattagctgggcgtggtggcacgcgcctgcaatcccagctactcaggaggctgagatatgagaattgcttgaatcccagaggcagaggttgcagtgagccaagatcgccactgcactccaatctgggtagtgagactttgtctcaagaaaaaacaaaaaaattataaataaataaatcaactatgttctgagatacgtagctctctgagatgttaataagtcctgtgagaagagggctgtatgctcaagtaaaatttcaaacaattttattatagaacttatcagaaccaaaatatgtttgtattaaagattccttcagaaagtgatatagtatgcagcatttgtcaaacttattttgaatgtgatatatgtgtttttatttaatttaattaatttatttagagacagtcttgccctgttgcccaggttggagtgcagtggtgcgatctgggctcactgcaacctctacctcccaggttcaagcgattcttgcgctttggccacctgtagctggaaccacaggcgtgcagcaccacatctagctaatttttataattttagtagagatgaaattttataattttagtagagatggggtttcaccacgtagacaaggctggtctcaaactcctggcctcaaacaattcgccttcctcggcctctcaaagtcttgggattacaggcatgagcctctggccctattattttttaaaatacttgtattaatttcttttccagttgaggttgttggaagttaaatttgaaaaatagtgccttagaatactgtttttaaagcaaagatctaaaatttaatttttgtgctttattgaaagatctggcttttttgggttgcatttaaaaaggaataaacacaatttaaaggcttttctttgaacataattttaaaatagggaacatgaatttttttgcatgccttttatgatgcacaaaatgatggtaaaatggtagaattcagaaagtttcagtttttgcttttgtggacaagatctgctgtattaattctctctttctgttttatttttatctggtgtgaatttttttttttttttgagacggaattttgctctgtcacccaggctggagtgcaatggcatgatcttgggtcagtgtaacctctgtctcctgggttcaagcgattctcctgcctcagcctcccaggtagctgggattacaggtgcccaccaccatgcccagctaatttttgtagcttttagtagaaaaggggtttcaccat

SEQ ID NO: 111101 - DNA, 1106 bp, Homo sapiens
acatgctagaaaatatctagcctctccccagttccaaagtcacttctgtattttaggttttgttttgtttttgtttgtttgtttgttttatagtagtatcccatttcttggtaccaaaatctgtattatacagtcagagttctgtagagaaacagaaccaataggatgtatgtgtgtatacatagagagatttattaccaagaattggtagagctgatgttttagttggagtccaacggcaggaagaaagtgtcccagagatatcccagctctaaggcagtcgggcaggaggaattccctctcattcagcagagggttggcctttgttctttccaggctttcagctgattagatgaggcttaatgccattagggagggcagtctgctttacttagtcaattgatttaaatattaagctcattcaaaaacacccttgtagaaacacctaatatgatgtttgaccaaatatctggacatcttgtggttcagtcaggttcacatatgaaattagcctccacaggtcacatttcctctttgcatgttctagttattttggatttatcttggacattgtgaacgatacagtgtaggaactttggatcctgttattccttcaaagagtgttcttttggtttatcaggcattgatcttggctgtactcaagctccaaactcttgtctcccctgtaatgggcagcagctgaaatctttattcaattcttttaaccttagctaagctataggagttgttccacatatgtataattcaggagatagccagagatttgggtaaagtttacaggcagaatttgggatttctttctgtggctttctcctttacttgataccttcttctcttacttttgaggtgtggttgattctgactctgtccttgatccagtggtatatataaattataattgctcatttgttccattttcttgcaagctagttgattgttcttatgtttttgaagttttattataatggatagaaatagtttctatttctaccttataattgattacaatcagttttttcactgccttcttgatgctttctgagaaaatttgaatatgttagaaatgtgatgtttaactacaaaat

SEQ ID NO: 111102 - DNA, 1281 bp, Homo sapiens
tgattcttcttttatcaccaatttactgttaaggctatctagtgaatttttattttacatattgtattttttaattctagaattttcatttgtttcttttttgtagctttaatttctgtcttttatgtccttgagtgtaattatagtagctgctttagtttttattttgagatggagttttgctctcattgcccaggttggagtgcaatggcacgatctcggctcaccgcaacctctgcctcctgggttcaagcaattctcctgcctcagcctcccaagtagctgggattttaggcatgagcccccatgcccggctaattttgtatttttagtagagttggggtttctccatattggccaggctggtctcaaactcccgatctcaggtgatctacctgcctcggcctcctgaagtgctgggattacaggtgtgagccaccgtgcccggcctagtagctgctttaaaattcttatctgctaattctgacatctgtgttgtatcaaaattggtcttcattaaatgccttttgtcctgattctttgggtcatgtgttagttcaggccaccatgacaaaatactacaaaatagatggtactggctgattaggtgtctggtgagggcctttttcctgctttgtacatggctgccttctcgtgttgtcctcacatagcctcttcttagtgcatatgggtggagagagagattgagcactggtggagaaagagagatagagattgaatgagcactctggtgtctgttcttatagaatgctaatcctgtcagatcagagccccacccttacgaccttatttatccttaattacttgtttagaggttccaactccaaatatagccaccctgagggttagggcttcaacgtgtgaattttggggacacagacattcaggatataacattccatccatggccacccagaatttatgtccttcttgcatgcaaaatacattcattccatcataacagcccccaaagtcttaactcatttcagcatcaagtctgaagtccacagtctcatgtcaatatcatccaaatcagatatgggtgatacttgaggtatgaatcatcctgagggaaaattttcttttgctgtgaacctgtgaaaccagataaggaatgtgcttctaaaatatgatagtagaacagacatataggatagacattaccattccaaagaggagaaatcagaagggagggaggggtgatggatcccaaacaagtccaaaacctagcaaggcaaattcaatcagaacataagcctt

SEQ ID NO: 111103 - DNA, 1053 bp, Homo sapiens
aacctctgcctcctgggttcaagcaattctcctgcctcagactcccaagtagctggaattacaggcacctgccaccatgcccagctaattttttgtatttttagtagaaacggggtttcaccatgttggccaggctggtctcgaactcctgacctcaagtgatccacccacctcggcctcccaaagtggagggattacaggcgtgagccaccgcgcctggccgacaaattattcttaactcaggtaaagttatcagttaacttttgcacatgaaaagaaagctactatattcgtggaactatcttggtatggaaaaattactcagggtaacccagtgtgtacataaagctgtcccatcttacaattgaagttataattttatgcggttaatgtttattcgtgaatctcctgttttttgcttttaggacattcggaaattctttggagtaataccaagtggaaagaaacttgtaagtgaaacagtaaagaagaatgagaaaacaaagtctgatgaagaaactttaaaagcaaagaaaggaataaaggaaatcaaggttagttttctgggtataattttgcattgaatgaaatgtaaaataaactcagttcttataagttttttttttttttttttttttttttttttttcctgagacagagtcttgctctgtcgcccaggctgtagtgcagtggtgcaatctcggcagactgcaagctccgcctcctgggttcatgccattctcctgcctcagtctcccgagtagctgggactacaggcgcccgccaccacacccagctaattttttctattttttagtagagacggggtttcaccgtgttagccaggatggtctcgatctcctgacctcgtgatctgcccgccttggcctcccaaagtgctgagattacaggcgtgagccaccgtgccagccattcactccattctttatgccctagttgtcatatatattacacctacatatgttaatactgcacaattcaatgtaattttactttaaatagatgtgtattttttaaaaaaattaaggcaaa

SEQ ID NO: 111104 - DNA, 1035 bp, Homo sapiens
cacatttccctttcagtttttaagcacttccttattttctggcacaagatgcccaccttcatctcattcttctcctggaaaaagccatttctccaaggagtacaaggtccttttggtggggaataggattttagaaacaagctctgggagctggggttgggattgggatgcatcatctttaactagaaaattaacctcttagcagactaatcatacacacttgctgagattaatgctttctgaaggtttttaacgtaagacatttttatttgatcttgccttgccccatagcaagactgccttttataaacatcctttcaataccatgatgttctgagttttcaaaacattaaaactggccatctaggctaggaggattttactcaaataatgaattatatacggatttaacttcatgctcacatgatcaatgttctcttagtttaatgttctagataactggttggcagatggcaaacgggcagtgatatggttttgtaattaaactatgaaagatgacacacgaaaaaacaattagagggaagatatttaccaaaggttaattatagttttttcctggtgtatttaaattctgtcatgaggggaaaaagaagtactttaaaacaagtacttaacttttactttcccttattaatcttgaatttgggaatgtttttcttaagggctttgttttagtttggactcaagggcctagcaggcaattattgccactagggaaaatgaaacccaagtcatgactacattgtgtttgtatagcgctttagagttcccagagcaccttcccagagtcactgagtcctcacagcacacctgtgaggtgggtgcgattactccgtcactatatagttgccaagcctgagtttcaaaggggcagaactagaacaggagtccagggctctctccttcgtggagagacacagaatgagactctgtcagatccaagtgtcaaccttgggagtttctagggatagtctactgtcctttccacccataacccatttattcatctgttgg

SEQ ID NO: 111105 - DNA, 1032 bp, Homo sapiens
gtgtaccaagccaatttcctgatgcatttgaacagaatcacttcaaaccccaccatatataacctagggtttaaagttaaatgaactggaaaatggcttcccaatgttttctcaaacaacttgttttccaagccaggacctgggtgtggctccttctctgttttctggtctccttgggagatttcaagggctggaataggcctggcgtggtggcctgtaatcccagcactttgggaggcagaggtaggcagatcacttgagcctccatctgccagcgcatgcttgacctaaatgagcttgtttttcacagcccgagtctgtggcttcgtccccacagttcagcgatcctcatctgtacgtgtggaacgccactggcaacagactgttgcaccgagtggaaggggtgaggctgaaaacacgacccgctcaatgcacagattttgtaaacatcaaaaaacaacttgagatgttggcaagaatgaaagtcacccactaccggtttgctctggattgggcctcggtccttcccactggcaacctgtccgcggtgaaccgacaggccctgaggtactacaggtgcgtggtcagtgaggggctgaagcttggcatctccgcgatggtcaccctgtattatccgacccacgcccacctaggcctccccgagcctctgttgcatgccgacgggtggctgaacccatcgacggccgaggccttccaggcctacgctgggctgtgcttccaggagctgggggacctggtgaagctctggatcaccatcaacgagcctaaccggctaagtgacatctacaaccgctctggcaacgacacctacggggcggcgcacaacctgctggtggcccacgccctggcctggcgcctctacgaccggcagttcaggccctcacagcgcggggccgtgtcgctgtcgctgcacgcggactgggcggaacccgccaacccctatgctgactcgcactggagggcggccgagcgcttcctgcagttcgagatcgcctggttcgccgagccgct

SEQ ID NO: 111106 - DNA, 1114 bp, Homo sapiens
ctggccccagctaatttttaagttttttgtagaggcagggtcttgctatgttgtccaggctggtcttgaacttgcaggctcaagcagttcttcccccttggcctcttaaaacatacctggctcggcctcttgatgcattttgattccattggggtggggaggggtgggaagaagggagattcttagtatcaaaataatggctgtccagaaatactctgatactagctatggtcagcaacatttaatgaaaacccttatgttaaaaataaacccctgcctcctggcttcaagcgattctcctgcctcagcctcctgagtagctgggagtataggcacgtaccaccacacccagctaattttttgtatttttactagagatgggtttcacagtgttagccaggatggtttcgatctcctgacctcatgatccgcccgcctcggcctcccaaagtgctgagattacaggcgtgagccactgtgcccggcctcaaaatcttaagaaaaggttcttttggtgcatggagttttacatggaataaattagtgcctctgcaatttaaatattttttacacagatttgatgctgtgcaaatgccctctccccttttaggtgttgcttgttcagtatctcaagcccagaaagatgaattaatccttgaaggaaatgacattgagcttgtttcaaattcaggtttgtatgtttactatgtctaactatgcctacaagattttgtctaaatcttgtttaaaatacagtattttgctaatttttatttgattagctttttaaattgtgaaaataaaaaggtcacattctgaaattttaagtacagcacataatgaaatactttctttttaagatgggttaggctgatgtattaattgctttatcttcactcctatagcggctttgattcagcaagccacaacagttaaaaacaaggatatcaggaaatttttggatggtatctatgtctctgaaaaaggaactgttcagcaggctgatgaataagatctaagaggtaagttcttacagtgtcttaagttttattactgctctagttgaatgaagctcttaatttactaaaagacttaaactgaatttgtagtaata

SEQ ID NO: 111107 - DNA, 2573 bp, Homo sapiens
caagtacgtaatgacgacagacgttctttctttgctgcgtctactgcgaggtaaggatgtttctgtgctcgtgggggtactgggaatctgaaaccatctgctctgggaaaggctgcggcgcggctcccactctcggaaccttgtcctgtttgtcccccagctcggcaagcgccatatgagcctggcggcgccagatgcgaatcctgttgtgggctttttggcctattcccgcccctcagtcttgccgggatggcaccgcccgcataggacttccagggttgggctgagtgggagttcgactgctgggcctcgtaattctcgctttggggctgctccttccaggctgggacacactggggcccgctgtcggtctcccgtcctccgacatcttgtctggaacttccgcctggcagtctccagtaggagtggagctctgtgcggcgtagtttggtggaaaaacgggccttgcgtcggcctcacccccagtgtttgtgtttcagaatgaagactattctcagcaatcagactgtcgacattccagaaaatggtatgagacttgatgtcttttacttacatctttactgcacgttccaagcgttgtgtggcctgacgagtgtgttctctcttctagtcgacattactctgaagggacgcacagttatcgtgaagggccccagaggaaccctgcggagggacttcaatcacatcaatgtagaactcagccttcttggaaagaaaaaaaagagggtgagggtttttcttctgataattcagttgctcgttggaaggtggtttataacagcatcacatttggttgctttaacaattttcgaattaaggttcagtgcttcagctttaaatgttgctgtccagaataccagcctgttcagtgaaattgaaaaaccagattctgaacacagccaattatataaagctcaaatgtaatagtggtcatcagtgacacgtcttaatggtgttagaagtttggtttattttcctagtgattgctttgtaaaaatcacaggaaccggcagtaggtcatttaaacctgatgatttaattttccagaagggaagtttgttgcaacttctacaaagcttaactgttgggaggttttataggtggttggatttttccagttgaaaaccatgtgctttgataagggttaattctagaatcttaaagtaattcggtaagtggtctgttgtcttttaagcctgcatatttctggaaagaatacattttttgttctgttacagctccgggttgacaaatggtggggtaacagaaaggaactggctaccgttcggactatttgtagtcatgtacagaacatgatcaagggtgttacactggtaagcagatgtatcagacttccttgttttggaaagggaggtttctcaaacctgtgctttatacagcgtaagtgtctctttcagagaatgggtcatgtattttatttggtgtaatacgcaagaacttggcaaaaataggcatctgtgggtctttaagcgatagagctgagagcaaagaccagatgggtacaacatgtttgtttttttctgttgttgggttttttttttttttaatcaaggctggggtctcgctattttgtccaggctgagctcaagtgatcctcccaccttggcctcccatagtactgggattgcaggcatgagccaccatgcatggctagatgggtacaacttttaaaaagtaggctaatgatgaattttcataccttccgaattctttaagataggaaatctacagttgcagtactagttggtagtcacatctcaccatcaggaccccttgttgggatagaaaaagatgtagtttctgagttttctgtctgctgccataatgtatgtcattattctttccaacccaccgtctctcccctcaagataaaaagttcatgctgaaatggttttctttgcattataccttctagaatgcacctgataatggcaccctgtacatctattataaatctgttaagattcccccatctacccttgctcttagccttaagttccttgaaggcagggggcctgcctttggcttggtggtctcaattcctgccatgtgctgtaccttagtaactcagtaaatgttagtctaatgtctaagatcagggctttggggttctcattaaaagaaggcagcattgttcattgagggcataagagctagtgaaataaagcctccgcaaggagctttacagtccactgaatagacagaacaatgtttataaggcttggttcaggtgacagttattagaaaatcttggcagtgagtgttacgttttaaaataagtataagcatcttagaaaattttaaaactattaaaaatattcctcagcattgctaatagcttgcttatttatttaacatagggcttccgttacaagatgaggtctgtgtatgctcacttccccatcaacgttgttatccaggagaatgggtctcttgttgaaatccgaaatttcttgggtgaaaaatatatccgcagggttcggatgagaccaggtatgtgcataccctcagacagaattaagaaatttttc

SEQ ID NO: 111108 - DNA, 1014 bp, Homo sapiens
cccagcagtcgaactcccactcagcccaaccctggaagtcctatgcgggcggtgccatcccggcaagactgaggggcgggaataggccaaaaagcccacaacaggattcgcatctggcgccgccaggctcatatggcgcttgccgagctgggggacaaacaggacaaggttccgagagtgggagccgcgccgcagcctttcccagagcagatggtttcagattcccagtacccccacgagcacagaaacatccttacctcgcagtagacgcagcaaagaaagaacgtctgtcgtcattacgtacttgtatcgcgtaaggggcctgcgtattgcgtcatgagtgcgcgacgcacgtaaggctaaagcagccaatcgtggagcagcttggctgcttgtcataaatggagcgacgtaatttcgacctgtcctttcccgggagttagcgatccctcaacccctgcactgcgctagtcctaaagaggaaatgtctctacgctgcggggatgcagcccgcaccctggggccccgggtgagcggcggggcgaacgggtttgggcgtggggtggggggatcctatcccttcagagcgcccatgcccaataataaaggccagtgcatttactgaacatttactactagccaacggcagttttaaacgtttttcgtgtaatctcatgtaattatcccgccagccccatgatatagagtctctggcatcagtttgtttgcaagtctctctgggccagcaccgaggacttattttctgcttagagtggtttgtaccctatatttatggagcactgcagtgagcaccccacatagctattctgtcttggactcttactgtgtgtgagacaccactctagccgcagagaacacaaacctgtccgctaggcttcagcggcagacattgagaagtgcagtagcaatcgtgcaacaccctaacaggcactctttgagttgtcgaaggttcttttgagatacatgtgcagactcgtggattttgtagtgttt

SEQ ID NO: 111109 - DNA, 1030 bp, Homo sapiens
ccaggctcaagtgatcctctctcctcagccttctgagtagctgggagtataggtgcacattaccacgcctgactaactttgattttttgtagaggcaggatttcactatgttgcccagactggttccagactcctgggctcaagcaatcctcctgcctcagcttcccaaagtgctggaattacaggcatgagccagcgcacttggtcttaacagcatttttgaatagtgaatgtcttcaaaaatatgttgtaaacaatgagaagtttaaaatgtctaatcacagtcaccaactgtttagttggtggatattgtcaacctaatggtgttccatttccttttgcatacaggtatgtgaggaagctcgatgtcccaatattggagagtgttggggaggtggagaatatgccaccgccacagccacgatcatggtagggccagcctcaacctctatggctttagtctagaaactgaaagggactattttgtgtcttcctcctaaaaatgtgcattatgaatctctggtcagatttttcattacatttgcatttatgaaaaatattaagaaaaaacctgatggaataatccaacctgttgtaatctcacccttctctgaataaatctattattggttctttcatttatgtgatagttaatcacgtgctgccttgagatacctctcctatcaatgtttggaaacattattcatgattgcttagctttttatgtgttttctgtttaacatattcaacaagaaggagctgtgctttctgtttttacatccatagagacctgtacattgatctgtcatatattttatgtcttttaaaatcatctttttttattattgaatagatataaaagtatcttcataggccgggtgcagtggctcatgcctgtaagctcagcattttgggaggccaaggcaggcagatcatttgaacccaggagttcaagaccagctgggcaacatggtaaaaccttgtccatacaaaaaaaaagtttttaaaaattagctgggcatggtggcac

SEQ ID NO: 111110 - DNA, 1050 bp, Homo sapiens
ctttccagtgaaaattccagaatcatgcatttctttacctaatatgtggcagtgttgtatacttaccagcagagggcagcttagtcttcagaaaagaaatgaacttgaaagtttcaaccctctgacatgtgggttcagcttatttttttctttgttcagtatggagactctcttacttctgctttttttcctttctcttctaatttttcgcttcagaattctggtttctcaatgcataaactgaagtaatttcttccattctacttttctctgccccaggcttgagatagaactagggagcccagtgaggccttttctttcctaaattaacaggcatctgtgcataaatgctacctttgaactatgtgatttaagataatgtgcagaatgtacttctctggtctttcaggttgcttgcataactatgtacttggttgaacttgtaattcttgctgacaacagtcctgctgttttccagtaaggttcgtgatcctcgggccaattttgatcagtccctacgtgtactgaaacatgccaagaaggttcagcctgatgttatttctaaaacatctataatgttgggtttaggcgagaatgatgagcaagtatatgcaacaatgaaaggtaaagaaattgaaaaatgaaaaatctttcccatgtaatttgagtaatagcaggaacccactcactttgaaggcccttctaagaacaaagaaaagtatatggttatagatggcagcatgaaaaggaaaccaacttgcacatgcaccctcaaatctaaaatacaagttaaaaaaaaaaaagcaaaggaaataaattttcttggaatttcatggagtgatatgcatgacgctcaggatacaaaatttatatcccattttattccccatcctttgcatccactgaaagcatgatttcatccacttttctcattctatcattggacacttttggagagccagcctggtaccaggcactgacagttcatagatcaatgagactaatccaggcctctgagaaagagcttacttgtagcattgtcacataaca

SEQ ID NO: 111111 - DNA, 1522 bp, Homo sapiens
tggacaacatgatgaaaccctgtctctactaaaaatataaaaaaagtggtggggtgtggtggcgcatgcctgtagtcccagttacttgggaggctgaggcaggagaatcgcttgaacctgggaggcagaggttgcagtgagccgagattacactactgcactctagcctgggcaaagaacaagactccatctcaaaaaaaaaaaaaagactttaaaacttatttttaaggactataataatatattatgtacaataaagaaagggaataagaaaaggcttacatttcatttcagattgtgaagtcctttaggataaccgtctcattcatttatgtatcttcagggcttagctggaatctgcctgccctagttatccggcatatagatagtagcttcctaacaaaaatttattgaatgagttctctagatgcttcaagctatttcttctgattattatatttataaaatgtattatttctatggaactaacagaggattaaatcagggctactgatgattgttaactccacactttaaccagtagttcagggtatatcttgaaatccctatctcacaggcactctgttctttatcccatatacttacatcaggtgaatactccaacaaaaacctatggaatggggaaaggccgggcagcagatctgaagtatattgaagcttgtgctagacgcattgtgcaaaactcaaatgggtacaaaattgtgactgagaaaagcacagttccagtgcgggcagcagaaagtatccgtcgcatatttgatgcaaacacaaaacccaacttgaatttacaggtataaaaaatgaagcattagaatctggttattcttatgtaaatactgatgtgttaaagttgcccataattaattctagcttaaaactttcctttgcattgggattctaggtgctgtccaaccctgagtttctggcagagggaacagccatcaaggacctaaagaacccagacagagtactgattggaggggatgaaactccagagggccagagagctgtgcaggccctgtgtgctgtatatgagcactgggttcccagagaaaagatcctcaccactaatacttggtcttcagagctttccaaactggttagtatatagcattcaactcttcattaaattaaagccaaatatttatttatttcaagcctgataaactacacagatacttttttaatagtagtaagaggttatgcttttgaagatcatattcttgcacattcaaattatgaaataattttcacaagggagatcatatatgagggtataaaagattctgaaaaattctgaaatcttaaaatagtaatttggtttttatcactctttccctctttaccctttttcttaatcatctgtcctctctaatttaaaacattttccctttctaacccatccattgtctcctcaaattgagctcatcagtatcttatatatctccctcagtaatttgcgtcaacgcaatgaaatataaactagatgtataaaattgct

SEQ ID NO: 111112 - DNA, 1052 bp, Homo sapiens
cctataatcccagcactttgggaagctgagatgggaggattgtttgagcccaggaatgtgagaccagcctggacaacccagtgaaaccccaaaaccccatctctgccaaaaaaagatacaaaaattagccaggcctcatggctcctgtggtcctagctacttgggaggctgagatgggaggatcatttgagcccaggaggcggaggctgcagtgagctgagattgcaccactgcactccagcctgggtgacagagtgagaccctgtccctatttaaaaaatgagatgtgcacttatggcctttggtatatgatccttaacttgtctacaaaggtaatttgagcacaacctagacctttaaattacaatattaccatgccctttaacaaatgtaattctatactattaggttatctcatatcactggcaagctatatgtacaattccttttcttttttctttttagccaggactaaaagaagtggtagaatcctgtcgaggaaaaaatctttttttttctaccaatattgatgatgccatcaaagaagctgatcttgtatttatttctgtaagtattttcctttgttgtgtgaattttaatgtattcttgtctatataaaagtttcatcatactttaatagtaaatccattggtattaagcctcaacattgcttagtatagagttgtccggtgaattttggttgtcactttgtctgacagttcacaaaaccccgtaatcatctagtcaaatatgtcattacaagtcattgaacaagtaaactcaaagttctaatttgagatttagaactaggaaatgggcgggtgcggtggctcacgcctgtaatcccagcattgtgggaggccaaggtgggcagatcacaaggtcaagagattgagaccatcctggccaacatggtgaaaccccgtctctactaagaatacaaaaattagctgggcgtggtggtgtgcacccgcagtcccagctactcaagaggctgaggcaggagaatcgcttgaaccaaggaggcagaggttgcagtgagccgagatcgc

SEQ ID NO: 111113 - DNA, 1145 bp, Homo sapiens
ataatttatttttaaaatgagtgcctcttgggaagcttcttttctgttctaacagttccctgttaaaatgaaaatcttaggccagtgcagtggctcacacctgtaatcccagcactttgggaggctgaggtgggtggatcacttgaggtcaggagttcgagaccagcctggccaacatggtgaaaccctgtctctactaaaaatacagaaaaattagccagggttggtgcatgtgcctgtaatcccagctactcaggaggccaaagcaggagaattgcttgaacccgggaggtggaggttgcagtgaaccaagatcgcaccactgcattccagcctaagcaatagagcgagactccctctcaaaaaaaaaaaaagaagaaaatcttaaagctgtattagggcctgttaggttactgatatttgaatgcctatttacttatttactacattgagtcttttgttatcctctgacctataaaatattttaataaattactggtttacttcaagggaaaagaaggaaaatgagaaacatacatctttttttcactccttatctcattcctgtttggtgatgggatggattggggtaggaaggaatgttaatatgagagaaattttaaaatgtataaaaaagtaaaaggttgtattgttttgctcagtttgaaataaagtgaataccaatagcacttaaaaatgtctgcatgggctgggcacggtggctcacgcctgtaatcccagcactttgggaggccgaggcaggcgaatcacctgaggtcaggagttcgagaccagcctgaccaacatggtgaaaccttatctctactaaaaatgcaaaaattagccaggcatggtggtgtgtgcctataatcccagctactggggaagctgaggcaggaaattgcttgaacctgggagacggaggttgcagtaagctgagatcgtgccactgcactccaatcagggcgacagagcgagactctgtctcaaaataaataaataaataaaaatgtctgcatgacccatatggttatgaagtttttttcctagcaaatgattgcagattatttatgggggctagaagatattttgctatcaatgtaaggatttttttccccttaggtcagtctattcactgtttagat

SEQ ID NO: 111114 - DNA, 1050 bp, Homo sapiens
acatcactgttgtacaaattccctctctcttccattctacagggaaaaatgagacaaatggtggaaaatcacagtgttatttaatctagtgttccctcatgtaaaaacatatgaaaagtccaaataagcatatatttgggatgggatggttgggggcattgctgctcagttgtttctctatgtgttagattggttgcactgggatttaataagtcaatttttaaaaaagtaataaattttaaatttttttgaatttttaaaaagtcaattaaataatttatttctttctaatgccagggacaagatccaccagctcctcctgtggactaactttgtgatatgggaagtgaaaatagttaacaccttgcacgaccaaacgaacgaagatgaccagagtactcttaaccccattagaactgtttttccttttgtatctgcaatatgggatggtattgttttcatgagcttctagaaatttcacttgcaagtttatttttgcttcctgtgttactgccattcctatttacagtatatttgagtgaatgattatatttttaaaaagttacatggggcttttttggttgtcctaaacttacaaacattccactcattctgtttgtaactgtgattataatttttgtgataatttctggcctgattgaaggaaatttgagaggtctgcatttatatattttaaatagatttgataggtttttaaattgctttttttcataaggtatttataaagttatttggggttgtctgggattgtgtgaaagaaaattagaaccacgctgtatttacatttaccttggtagtttatttgtggatggcagttttctgtagttttggggactgtggtagctcttggattgttttgcaaattacagctgaaatctgtgtcatggattaaactggcttatgtggctagaataggaagagagaaaaaatgaaatggttgtttactaattttatactcccattaaaaatctctaatgttaagaaaaccttaaataaacatgattgatcaatatggcagatgatttacag

SEQ ID NO: 111115 - DNA, 1050 bp, Homo sapiens
caattcaagtgattcttaattgagtgggcgagaactgctgtatctccaaagttgtaatagtgccacttgtgaagttgtgatttgttgaatataaataaatgaagacttggtatactctaatccagtggtccccaaccttttttgcaccagggaccattttcatagaagacagttttttcagtgggctggggcaggggtggggggcgtggggagaatggttttgggatgaagctattctacctcagatcatcagacattattttttcataaggatcgtgcagcctagatccctcgcatgcagtcgctccagtgagaatctaatgccaccgctgatctgatagaaggcagagctcaggtggtaatgctcaggtggtaatgcttgctggcccgcacctcacctccttctgctgtgctgccaggttcctaacaggccacagaccagtaccagtccatggcctggaggctggggacccctgcactaatctatacctgatctatacagtggcctctggccatgctgacgtagttgcttctgtatattcctgttgtattctgtggaaaataaacttctgttgtcctttcttgcctgctgtagtctcttccttttgaatagtatgccctctgaaaagggtgtctttaagctttcactttcttgtaaaattataagaatttcagggattggctgggtgcagtggctcacgcctgtcatcccagcactttgggagactgatcaccagaggtcaggagtttgagaccagcctgaccaacatggtgaaaccccgtctctactaaaagtacaaaaattagttggatgtggtggcgcgtgcctgtagtgccaattactcgagagattaaggcagagaatcactggaacccgggaggtggaggttgcagtgagtctagattgcgccactgcactccagcctgggcaacagagcaagactccgtctcaaaaaagaaaaaaaaaattgtaatgatgagtttcagggagttttaatcctgcgtgagtttagatcacagagaattgtgacatcaagggcatgtaatggg

SEQ ID NO: 111116 - DNA, 3243 bp, Homo sapiens
gatatccccggtagtccctgggtggtcctccttgcggccgcccttctgcctgtgaggaagcagcagtgttcccctcctccttccgccgccttcccctcccctcccagagcgctaggatggacggtctcgcgggcgggtggtctggggtggaacatggtttggggaggtgatggacagggggcaactcctcggagggatggaagctcacaagagaacccgaggcggtggccgcagctggaaatgtggctgtggggtggggagggagcaggccgagcctgagaaaacccgggaagtgggttgggggaaggggaaaggtggtaactggatcccaagagcagtgctgctcgaaggcccacacttttgagggtattcggggttattgcctgtcaggccttcactgttcttttcttggggaaggagcagtgagtccttaggtattgattaaaaaggaaggacattcagagttagtccttcttagttgggtgttaggagtcaaagggagacataatagaatactgtcttatttggtggcaggggtaagggaattttcacctgagttagcaagttaattccaaataagataattatctcttttccacttaacccccaaattcctaggcctcatctttattgacatctcaatcttttgagtgggcaaaggcaaggtgtttggtgtattaaagacatgtaaatatttttagttaggaaacaaataatggaatgtatgagtagcttatttcaaaatattgtttacaagttacagatcagagagactgtcttaagacagtgcctctgtgactcgtgttgtgccacgaaacttcattatgatgtccctcatagttaacttgattcttacttttgaaaagcagacctattaaaaatgtgaaatttcaccagattaatacattgtttcatctccttattgagatttatcacgacttaacagattttcaaaaaagttgcctcccgttgctcttaagtcctgcagaatttagatacatttgtactacgtttatttatgtaagatattcacagtgctctagtaatttgactcaaaattatgcaagtattagtacagtttctcataccaagatcaacaagaatgccagattgtcttccccacatgaattaaacaaaaagtaatacagaaaatgattattttcaagattcacataccattattgaatatatcattgctatttgtgtttttcttttacagttagtactttaatagtgtcaataataatttgtgaaattcagcattctaagtatgtgatgagtatacatggagaaaaaattatttaaaattcaaaaatgacaacagacttattgaaagtagtatataagtcatggtcggttttacagagcatgtgtatgaactctgacctctatgtttgttcatatgccaaaactctgaatggaaggatgactttgtattttgtggtacaatgcagaaatagagtcataagtgtctgtactgatacaatgaaacagcaattttaacttatttaatatgaaaatgtattccaggttagttgacatatatactcctaatgaaagcagttgttgttgccaacaactgaaaacatttcttgtttaataaggttgtacaagcctgaaacttaatagacttttaatgctttattttctgttacttacggtaacagaaacagtaagttactgctctggtaattaatgtggtctctttgctttttatgagctgacttttcaccgtggtattcttagtactaagttgaagattaccagaaatacttgtattgctctctagtaatgcatattaaaaaaacactgctctttatacgtaagggatgttgaagccttacttcagataagcatcaaaagtgtttcagaagaagaaaacaggaaatgcaaacagacaggttttttgttgtttttgttgtttgtttgttttgttttgttttgtttagaacagtacctgtataaatatggaaggaaacttctgggaaaataagttggaaagaacatttaggaaagggtcacatcatttaatcttggaataaatataaccaataaatagcttattttcaccagtattttttgatattttagtagccccagttctataagtgtattgttattttcaactcattgaagacttgtagtatagtccatgtgtttcctttttaagggtgtaaatacagtcttttgaatggctgatcaaataaatgtttcatcatgtcacttttttggtaaatcagcactttaccgaagtttatttcatgtgtttgtatgcttgtgtttactaagaacactggttgatttaaggactttttggggtggccttataagagcctttgtaaagatagctgacgcttactggattctggttatgagagattataagtggccgttcttagagtgtgttaaaatacagccaacaagataaatgtgaaaaagcaaggtgcagaatagtgtggaagaggccatttgtgtcaaaaagaagggcatgtgtgtatttgcctgtatgggtaaaaggtttcatgagaaattggtaaaattgattgctttctgtgtagagagttgggtgtctggggtatagatattttttgaattttgtgtcatacaaatgtgatttacttaaaggcatcatttggcctctttcccttaagacagtgtttggaaatttgtcagatgtttctttttattaattaatatttattttctttgttttagatgtttgtttttaaatatgagtgtgaattttaagtagttttaaataatattccaaagttgttaggcatggaatattgatgtaaagtacattttataattagttattttatgagtaggattacataagtaaattattaattgtgaggatataaacccataatcaatgttttattcataagttttattatttactattagttattgctgctgttaataactagctgccatttgtagaatggctagttgttcttagtatcatttgtttttacgttattgctaattcttaagcacagttctttagatgtcctatttcctagatgagaaaatagagatttagagaagttaaattatttgtctgcaatcacagagcctgggatttggatctaggtctgcttgtgttcatattgtcccacgctgtcatgacttgctaaggataggcatgcttttaattaatttaaaaaatcgagcctggtttgtattactggttaaaggatttaaacacagtttaatttgctagtttaaactcat

SEQ ID NO: 111117 - DNA, 1063 bp, Homo sapiens
agttaagactgacctcaaatttcaggagacagtcccaaaggaattctggtaatattgcaattttttttttctgagacagttttgctcttgttgcccaggctggagtgcagtggcacaatctcagctcattgcaacctctgcctcccgggttcaagcgattctcctgcctcagtctcccgagaagctgggattacaggcatgcaccaccacgctcagctaattttgtatttttagtagagaccgggtttctccatggtggtcagtcaggctggtctcgaactccgggactcaggtgatctgccagccttggcctcccgaagtgctgggattgcaggcgtgagccaccgcgcctggccgagattcttaagtaaatgaacttttctttaggcacatgaattggaactatggaacaaagagattattgatacaattattcaagaagcacatttgcatatttagaacagaaaggttgcacagctcttacatactcaaacatagttttagagttagatcatgatcttaactttcttcatggttaccttttggggaggaaaaccaccctttttcatattaaagtaaaatgtgtacgtaataaagtgtgactggcatccaaatcaagaaacagacccttcccagtaccatgggaatctgcctgcctttctagttactttcctgacttctaataaccgattagttttgagtatgtttgagtaaaagaatagatgtgagtatatattatgtattttaagtttgaaagttttcaaaagatgcttttcaaaatctttcttaagaaaaatatagtgtcttagaaaatgtgccaaaatgtattgaatttcagagctgaaacagatctaggccaaacttctcatctataaaatcaggaaattgaggcccaaggaggttgattgtttctcagagaaacagagctggttaatggtgaacccaggctttttgcataccagtttagtcataataagtagttggtttttgggaatatccttttcataaatgatagtataaaagctgactgctaatacaactttacagaaggggataacaatgc

SEQ ID NO: 111118 - DNA, 2454 bp, Homo sapiens
ccgcatcctccgcagctgctggcctgggtgctaagcccctcactgcccagggccagcagggccagtcggccgctcagagtgctgagcccgccaagcccacgcccacctggaaatctagctggcctgcaaacgccgtgcgcagccccggttcccacccgtgcctctcccttcacacctccctgcaggctgagggagctggctccggcctcggccatcccaggaaggggctcccacagtgcagcggtgggctgaagggctcctcaagtgtggccagaatgggcactgaggccgaggaggcaccaagagtgagcaagggctgtgagggctgccagcacgctgtcacctctcattctgacctacctttcctgacctatttcctgttaagtcacagatacacacttgcattcctacacatacctcagactttcagtctccctcaaaccttcagcaatacaaaattgcttgctatttagttgtttcatctgtctggaataagcccttatcttttttctttacctttcgaaacctacttgtcctaaaataccacccctggtaagcctttcttgaagccaaagtttccttctgtttttcattgtcagacttcatgagagcagttatcttactattgataattgtacatatgtccttctactcctggtagattaaactccttgagggctcatattcatttttttctctttagcaccttgtagggttccttgaatgtagaagccttagtaatttaaagcacaccaaaaaagtctttgataggtatctaattttgaggagctgctgctaaaagtgctcttaggacataggtttagggcaggcttccgttacttttagcaaatgtgtgattatggatttttctagtgattagaaatgtaggaccagctagtctatgtactcttttctctcagttaactatgggtgtcttgcttttaggtttctttgtttcaagtgaagcatcttacttggttttgtcatacccaattttgggttgtctgatgctgttgcttctcagcgagctgataataaaacattttatgctttttcttaaatcactgtagtgacttagtttttgttgtatagaatatagcacagtttttgcctcctattagacattcagttatttccagtttcttgatagtgtacatgtgtgagaattttgagtgtatatctctgaaagtgatacatactgagtggtcattgagtgttggatgaaattttaggtgtttatattgttaggtgctttctttccatctgcccataggcactgtgaatgtgagtcattgaaagcagagttctttctcactgatcttccattccccattgcttagcaccattgcctgctaagcaggagatacttgttttcctgaatgagtttaaggatattcctaagctctagagagctcatccccaaccattgtgaaagtttcatcctgattctgggactaggaagagttgaatatattgataaaggtggcctccaggtaaagttggatttctgttgcatgtaagtgttaataatgtagtcaggtcttgaattaggatgatggaatgtccaagcccaaaactgggaaacaagatagtgggaaggtaattttttttttttttctgtagttttcccttttgaagatctcactggcatctatttagtatatatgacatcatctgtggttcaattctttagtgtaactttacattttttatttattcacatatttactgaatgctacctatgttaataaaatggacatgatccttgctgttatggaataaattatggctcagtaaggcagtgagaaattgaacagctaataagtgtgtttgttgactttaagtaaggggacctatggaagttgggtattctagcctcagggaaagagtttcttgggaataaccggtaactgatacttacaggataaattagaatgaccatgatcaactctgtatacgtatagatagttaataatcattttacaatgaataatggaaaaacattttattgtttttttctatgtatatatgtttttatttattagagactaggtctcagtttgttgcccaggctggagtgcagtggtatgatcatagctcactgtaaccctgaactccagggctcaagtgattctcctgcctcagccttccgagtagctagtactacaggtagacaccactgtgcccagttaattatttttaaattatttgtagagactgagttttgccatgttacccaggctggtcttgaactcctggcctcaagtgattttcctgccttggctttctaaaatgctgagattacaggcctgagcccctgcctggccaacttctgtttttctttttttcttttcctgatggactgtcctacgactgtttttatttttttaaccaaaactgcgtcataacctcttcttggtttaagggaggctaggaaatcttctttagttgagc

SEQ ID NO: 111119 - DNA, 2413 bp, Homo sapiens
taaaattttctgccccaacatcattatcaagagtcagcatattacaatgataaatttagcatttactgtgtggcaggcattgttctatatactttattcgttaaattcaccagcgaaccctatgaggaactatcttatccttagttgacagaggatgaaactggagtacaaagtagttaattaacttgttcatagctagtaagttttaaaaaggttaaacaacaatatactttgtatttagtccttaaatgataaaatcttccagtgtttagtttttcccactagaatgtaagctccaagtgggcagggacttaggttttgttcactaacatttgagatagcatatactagaacctagtcattatttgaaagaatttttacagtgatgatggtaacaatgacaatatcatttcactgagagatggccttggaaatacattagaaccgctttgagttcttcactgttggttgttgacaataatgttttttttatctcattcaaattagcttcaacgttatgtgctattttgcatgcttcatgtatatcttaataaaatagttgatttgaaaattgctaacttctatagcttcttccctcttttttttttttttttttttggtgacagagtcttgcttcgtagcccaggctggagtgcagtggtgtgatcttggttcactgcaacctctgcctcccgggttcaagcaattctcatgcctcagcctcctgagtagctgggattacagacatgtgctaccatgcccagttaatttttgtatttgtagtagagacagggttttgccatatgggccaggctggtctcaagtttcttgcctcaaatgattcatctgcctcggcctcctagagtactggaattacaggggtgaaacatcctgcctggcctagctgctatagcttttatatatctctgttccttttgtgcattagaaatgccttgaagcccccagggaacatcaggaaaaaaaaaaaaaaaaaaaaaaacaaccagaggtcccgctatgtgtttagctgagttgggagaagaaagtttagaaaagcaatctttgacctatccttatgaaaaatttacagtgataacacaattcttcagaatttcacccaaaagctacagctgccttggttgttgcagtcattgaagtgaataacacattattttattatttatttttagatactacatttttttcttagactgtggaaacaggactgtgaaattaattttgtaaaatcgggctttaatttttttttttttttttttgagacagaatctcggtctatcatccaggctgcatgtagtggtgcaatctcggctcactgcaacctccacctcccaagttcaagccattcttctgcctcagtctcccgagtagctgggactacaggtgcctgtcagcacacctggctaatttttgtatttttagtagagatggggtttcaccatgttggccaagctagtctcaaactcctgacctcaaatgatccacccgccttggcctcccaaagtgttgggattacagtcgtgagccactgcacccagccaaattaaaggttttatagttaatgttgttagggaaaggggaactatgctgcttacttctatccaagaaacttaattctgaaagtattctcattttacagtaataaaattgagagttaggtgttaagtgttatacctgaatgaataccacaagtaagcgacagaactaggattcagcacacatatgtcttactccaaaggccatgacttttgtaatactgtcatctttcaccattctccatgtcttgcttatagttcctgactcttaaagtaagactttaagttcgcttgtgggagcagggggattggagttttagattgtgaaataactggatgtttgaattaaactgtggtggtataaagaataattgttgcttgatggaaaattgagctgtgaaaaatttttggcttaactttgttttctttttatctttagttctgtgcaaataaagaccctattctaagccctctagaattttttttttttttttttgagacagagtctcactgtgttacccaaactggagtgcaatggcgaaatctcggctcactccaacctccacaccctggattcaaacgattctcgtgcctcaacctcccaagtagcggggactacaggcacacaccaccatgcccggctaatttttccggatttcaccatgttggcctcaaactcttgactcagtgatctgccttggcctcccaaactgttgggattacaggcacgagccaccgcatgcacctgaccagaatgctttttcataatgtaattcatcatgatgatggtattttcttgagcttatttagtacattttttcatacaataataatgttctttctatagagtgaaaaaaaga

SEQ ID NO: 111120 - DNA, 4060 bp, Homo sapiens
actaaaagctttcctgaataaagaaaataaacatttggactacagcctgtatgaagacatgagtgaatgaaatgctgaatgacagaaagaagaactttaaaaacaaaagcaacattttaccaatgagatatttaaggcaaggtctgttttagataccatatgaagggtaactgagtgtctacagtccatatgatttagaggtttaccatgccagatcttttattctattaaattctaacctataatacctgtaacaaagctctgctaaaactgttttatggaaagaaaaaaattagctaaaattcagtaagaaataccagtctatattcagtatctaaatttagtattttttaaattgctgtttatctaaaccaaatgaagttaccctccatataatttatagatgtttaagattattctgattaaatgtttcagacaagttctaatacgcacaatattttgatacagaaaaaagtacttgccttcatatggtgtgtctggaggtcctgctatttctcctcttaattctgtaaaattctcatctacaagatctactttaatttgatttttgctcgtcttaaaaataaacagaaaataaatgttagttatgtcagcaagaaaaacgcctaaagtattacctataaaaaatcttgaaaccccctctttcataagcttgattatctgctctagtaaaataagtctcggcttttctaggacttaattatccagttttaagaatatttaaaacaaactaataaattctaacttcattgttttaaacgaaataacaccactatgaacaacaatacaatggcttcttgactttctaggaatgttattagggaaaaatagtataaaagctattttatgtttgccaattccatgtatatcaggcccaaagcgataaatctaatcatccacagatgaacactaagatattatattctgcactatacccccacgatacatgggttctgcttaaacagaaaattcagggtcattaaaagccatttaggccataaactctcacttgaactaaccataacaactttaaatgtttagtttaactgactgaaatagtacactatccaccagaatggtgaaagctctagctacctaacagattctcctttccatgaaaaattccagaggactaaatgcctcaaaagaaaaggccttcttcaatttgtttttctgcttagtttattaaaacggcaactacctacttcaaaaaaccagatttctactttaaatttatctacattgacttattttgcactttaaactactccaagtactttcctatctatagcattactgagtctcttaaccttatgacagtccattctcagagccatgataaccttaaatgattcagaaaaccatccagtgggactcacattaacattcgtaagtgcctgccagcaaatgggctctccacttatattctcaaacctatgttaaaaatacagtaaatcctctcgattttttaaaccaaaatccctaaagaacaggttacatcttcctttttttgagacggagtcttgctcttgctgcccaggctggagtgcgatggcacgatctcggctcactgcaacctccacctcctgggttcaagtgactctcctgcttcagcctcctgagtagctgggattacaggcacccactaccatgctcagctaatttttgttatttttagtcaagacggggtttcgccacgttggccaggcttgtctcgaactcctgacctcgcgatacgcccgccttggcctcccaaagtgctgggattatagacgtgaggcaccgtgcccggcctatatcttcattttttttggttagaattccatattgttacctgattgacacaacatatctactcttatgttttttgcttttagactgactttcttaaacttgattactagatgaaacagtgtaagaattactgtctttggcttcctcctccaacccaaaaaaaaaaaccacaatttttactctttttctatgttaaatattttttagtacagaacgtttagttcataaacaatacatgacttaaaacccatatttttcaaagttcacatcactccaaattaatcctgttttttaataaaaacataggatttaaaaacttactttctaattagtacttttttttacatttttctgaaaatattttttatccaaaaactaaatttaactataaatatgtacaataagaaactacttcttatgccctaaaaaatcattaacaactttggtatttgtggtagaggagaaaatgtacattttagcaacagtaaaactactctgatggccgggcgcggtggctcatgcctgtaatcccagcactttgggaggctgaggcgggcagatcacgaggtcaggagatcgagaccatcctggctaacacggtgaaaccctgtctctactaaaaatacaaaaaaattagccaggtgtggtggcgggcacctgcagtcccagctactcgggaggctgaggcaggagaatggtgtgaaaccaggaggcggagcttgcagtgagccgagatcacgccactgcactccagcctgggtgacagaacgagactccgtctcaaaaaaaccaaaaacacaaaaatttagttgggcatggtggtgcacacctgtagtcctgctactcgggaagctgaggcaggagaatcacttgaaccagggagacggaggttgcaatgagccaagatcgtgccactgcactatggcctgggtgaaagagcgagactccatctcaaaataaataaataaataaaaataaaaaattgtctagtatctatgcataatgttaaaagaaaattggaggcatccaactttcactgaccaatttaagaagccagtgttaacttacacttgcatttctcctcttaaggcttcttacaggaataatcatcttgctaatcatcaatgctttcaaagatctcgatagctttccacaatcccccctccaaaaagtagtatgtaaataacccaaagatgataggatactaaaggatctgattaaagttttttgggaaaggagagggagattagaaaagctgctttttgggactgcccaaatctctggctagtaaaatgctaaataattattccttttcatacctctgtccttatttctgtctacatcacccccaaattattattatttgtttaagacacggtctcactcccatcaccctggctggaatgcagcagtgcgatctcagctcactgcacctcaacttcccaagctcaggtgattctcccacctcggcctaaccagtcgctgggacgagaggtgtgcaccaccatgcctggctaaagttttaaatttttagtagagagggggttttgccatgtttctcaggctggtcttgaactcctgggctcaagtgatccaccacctttggcctcctgccttggcctccaaaagtgctgcgattacaggtgtgaggtaccgcatccagcccccaaattataagtcagaaaaaaattgctctttttttcactctatagaaagaacattattattgtatgaaaaaatgtactaaataagctcaagaaaataccatcatcatgatgaattacattatgaaaaagcattctggtcaggtgcatgcggtggctcgtgcctgtaatcccaacagtttgggaggccaaggcagatcactgagtcaagagtttgaggccaacatggtgaaatccggaaaaattagccgggcatggtggtgtgtgcctgtagtccccgctacttgggaggttgaggcacgagaatcgtttgaatccagggtgtggaggttggagtgagccgagatttcgccattgcactccagtttgggtaacacagtgagactctgtctcaaaaaaaaaaaaaaaaaattctagagggcttagaatagggtctttatttgcacagaactaaagataaaaagaaaacaaagttaagccaaaaatttttcacagctcaattttccatcaagcaacaattattctttataccaccacagtttaattcaaacatccagttatttcacaatctaaaactccaa

SEQ ID NO: 111121 - DNA, 1033 bp, Homo sapiens
cgaaaccccgtcttgactaaaaataacaaaaattagctgagcatggtagtgggtgcctgtaatcccagctactcaggaggctgaagcaggagagtcacttgaacccaggaggtggaggttgcagtgagccgagatcgtgccatcgcactccagcctgggcagcaagagcaagactccgtctcaaaaaaaggaagatgtaacctgttctttagggattttggtttaaaaaatcgagaggatttactgtatttttaacataggtttgagaatataagtggagagcccatttgctggcaggcacttacgaatgttaatgtgagtcccactggatggttttctgaatcatttaaggttatcatggctctgagaatggactgtcataaggttaagagactcagtaatgctatagataggaaagtacttggagtagtttaaagtgcaaaataagtcaatgtagataaatttaaagtagaaatctggttttttgaagtaggtagttgccgttttaataaactaagcagaaaaacaaattgaagaaggccttttcttttgaggcatttagtcctctggaatttttcatggaaaggagaatctgttaggtagctagagctttcaccattctggtggatagtgtactatttcagtcagttaaactaaacatttaaagttgttatggttagttcaagtgagagtttatggcctaaatggcttttaatgaccctgaattttctgtttaagcagaacccatgtatcgtgggggtatagtgcagaatataatatcttagtgttcatctgtggatgattagatttatcgctttgggcctgatatacatggaattggcaaacataaaatagcttttatactatttttccctaataacattcctagaaagtcaagaagccattgtattgttgttcatagtggtgttatttcgtttaaaacaatgaagttagaatttattagtttgttttaaatattcttaaaactggataattaagtcctagaaaagccgagacttattttactagagca

SEQ ID NO: 111122 - DNA, 1355 bp, Homo sapiens
tttaatcagaataatcttaaacatctataaattatatggagggtaacttcatttggtttagataaacagcaatttaaaaaatactaaatttagatactgaatatagactggtatttcttactgaattttagctaatttttttctttccataaaacagttttagcagagctttgttacaggtattataggttagaatttaatagaataaaagatctggcatggtaaacctctaaatcatatggactgtagacactcagttacccttcatatggtatctaaaacagaccttgccttaaatatctcattggtaaaatgttgcttttgtttttaaagttcttctttctgtcattcagcatttcattcactcatgtcttcatacaggctgtagtccaaatgtttattttctttattcaggaaagcttttagtgattatttcaagccatagaaaggaggtggctttgctgaacttggtgttcacaaattaagtctgtagctactttagaccatggaatcgggtggtaagatacagaaataaaccttatagcattttactttcttattaggtgagtcttcattaattaatattactgtaaatttagattatatagcatataaccaaggctcttgcattaataactattcaaatatttgtttattagaaaacatataacaatatatggtaaccctaattatacagtctttacatgtattttctcatttaatcctttcagcaaatcttactaggtaaatacaacgattgctgtttcatagatgaagaaacaagttaagagaagtaacttgtttaaggtcaaccatctaagtagcacaactgatagcctttgtcttcaaagcctgtgcttttaatcactttatgtaaatcagaattgacttaatattggaagtggtggtgatgtctgttttgttttatctatttttttatatgcaaagttttactgttacccaagctggagagcagtggcatggtcatagctcattataaatttgaattcctaggctcaggtaatcctccagcttcctcagtagctagtactacaggtgcatgccaccatatccagttaaatactttgtgtgtgttttttgttgttcattttttgattgtttgttttttgagactgagtctctctgtcacccagcctggagtgcggtggtgaaatcttggctcactgcatcctccatctcccagaatcaagtgattctcctgccttagcctcctgagtagctgggattacaggcgcaccaccatgccggctaatttttgtatttttagtagagacagggtttcacaataacggccaggctggtcttgaacttctgaccttaggtgatccgcctgt

SEQ ID NO: 111123 - DNA, 1297 bp, Homo sapiens
gataccaactagagataaaaataccagaaacatacccatttaatccccctaaggtattgtaagcctatttttgtgcatgaagttacaaaatattttatatttctgacctcattttattaatatatattttagggcttattaaagtcacagctttatgaattgcttactgtgtaaacttgatgtggacaggattttagataatggcaggtggctggcttctgaaattagaatgaaaagcaaactcacccaaaggcagccagtaatggctcaaaactggaataggatgtacatctgacaatggctcatatactagatctagaaatacgtggcagtgttcccaaatttagagagcccttttacacatagacagaggttcttacttgactcaaagaagtatgtgttttaggagagtaccttctacattcagtcattatttgagtactttgtgccaagaactatagcagtaactaagacttatactgttcctgctttcatagagctcacattatagtggggaaaaaaaactgagcatggaattgcaactgtgataaatgttgaaagggagtatggaataccctaagatcatgtataacagggggacccaacctaaacttatttttggattgaaccactttctttatgtctctgcttttactgtcatcagcactttaggcattcaactttattccctgttttgtctattatttaatcacccttccatcttttccatttctactcattctctgcactgttggtctagaaatcttcctagagttcagttttgatcatgctgcttttctttccctgaataaagtctaaactccatggcttggcacttgaaacctagaacctgaccccagtcttgtttcccactctaatcttctaccacttccacccacaatgtgggtctcattttccatcttagattgtttatttgtaggtgatgcttattcttccacagctttctatcagtttcacttaaatctttgtccctattatttaaaattctagttttctatgaggcccgagtatcactttcttcattaagctgagttcatcaaatgtttctccctctcctctctcagtagcattttatacaatttatatagtggcaacacaaatatagttccaactcatgtattattttggatatgtatctttctctagcttttatgctcctgagtcatataggtcttttacacctatatattatcagtaattcccaatagtatagtgtcccttgggcatatgatagcagtcactcagaatgttctagaatttgttcattcaacctatt

SEQ ID NO: 111124 - DNA, 1061 bp, Homo sapiens
aatatgaaaattagccaggagtgatggcgcacgcctgtagtcccaactactcaggaggctgaggcagaagaattgagctcaggagctcgaggatgcagtgagccgagattgcgccactgcacttcagccaaggtgacagagtaagaccctgtctcaaaaataaataaaaaaggccacgcgcagtggctcatgcctgtaatcctagcattttgggaggctgaggcgggcggatcactgggaattccagaccagcctggccaacatggtgaaaccctgtcactactaaaaaatagaaaaattagtcgggtgtggtggcgcacacacgtagtcccagctactggggagactgaggcgggagagtcacttcggcccgggagacagaggttgcagtgaaccgagatcgcaccaccgcactccagcccaggcaaccaagtgagactctgtctcaataaaagtaaaaaaataagattaaaacaaaaggcaaaatacacttcacatatcttcagctcacttgactgaaccgtaatccttctgacatcttcaatagtgttttaaaattatattttctaatcttgttgaaaatactaaaccacatggggttttttgtatgtgtttgttttgttttgtttttgagacggagtctcgctctgtcccccaggctggagtgcagtggcacgatctcagctcactgcaagctccatctccctttacgccattctcctgcctcagccatccgagtagttgggactgcagtagctgggactacaggcgcccgccatcacgcctggctaatttttttttttttctttttttttctttttttttttttttttttgagacggcgtctggctctgtcgcccaggctggagtgcagtggcacaatctcggctcactgcaagctccgcttcccaggttcacgccattctcctgcctcagcctcccgagtagctgggactacaggcgcccgccaccgcgcccggctaattttttgtatttttagtagagacggggtttcaccgtgttagccaggatggtctcaatctcctgaccttgtgatccac

SEQ ID NO: 111125 - DNA, 1086 bp, Homo sapiens
ggctcagtggctcacgcctataatcctagtactttgggagcctatgtcgggtggatctcttaagcccaggagttcaagaccagcctgggtaatatggtgaaacccccaacactattagaaataaaagaattggctgggtgtggtggtgtgtgcctatagtcacagctacttttaagatggatcacctgagtctgggaagttgaggttgcagtgagccacagcagtgagaccttctctgggggggaaaaaagggagaaatgtttgttgtacataagccctatattactgtcttacttagcttgcattgtatttgatatttagccttataataacatttttgccgtaatattaagtgcacattcattccatgtgagtcgcttacatctggagatgctttattaagtaggatggatacagtgtcttttagggaagaccggacaaacaaggcagaaatcacagaagtgtaattaatatactatgacaaaggaaactgcaggtgtgtggaatagatcaggaagaagtgatatggaaagtgaaacttgaagagtaggaattagttgggagaagagggcacagaggtatgttattgagaaaacaaatatgtatgaaggcccagaacaggggaaaagtttaatatgactttttgagcaggagagtggagtgtgggatagaggtaaaaattgagatttcaggagtagtctaaggccaggttaagagtgtgggcttggccgggcatgatggctccatgcctctaatcccagcacttagggaggccgaggcgggtggatcacctgaggtcaggagtttgagaccagcctggccaacatggcgaaaccccatcttgccatgttggcgctccaagatcgcgccactgcactccagactccagcctgagcgacagcgcgagactccttctcaaaaaaaaagagagagagagtgggcccacatgaagggaatgagaggtcattaatggtccttaaagcagcatagtgatgcaaatcagatttgttttaaagggctctctttagttttggtgcggaaaataaattggagggaacagaagggaaggcagtaaagtcaggagac

SEQ ID NO: 111126 - DNA, 1029 bp, Homo sapiens
ccacttactatttgtgcttccattcactggttttacttacttttttcctcaaacctattctgcaccctgcctcacatgaagaaaagtgccatttactatttatgtttttattttatgtactattttatttaccaaaatggattttattctctgttgtattctcatagcatctaccattattctaggtaaattgtaagctcctagtaattgttgggtttgtttaaaggcggaacatttattaaagagtttgaaaacaacatatgttagtgacaacattcagcttactggatcctttgtcttctacaccccttctttcacctaggcaaaatgatgtaatagatatagggacctttctttttttagtttgaagatttcattttcttgtagttctacttaaactgttttatttctgttactgaaaaactcaagtgtgctttatattctaggtccggtttatcactaaaatatggcatcctaatattagttccgtcacaggggctatttgtttggatatcctgaaagatcaatggtaagagattttgaattcaccttctctccttctcatatgaataccaagactgtaagagtgttaaatgtgtaattgcctcaaaacatatattatactttatcttgtttgggcagtaactttaaaagtctcttaagtgcataactgaaaatgcattataattgagatcacaatccatatttaaatagaaacttgttagataatgttagatgctagctttacactttgaaaagccttggatttcatttgttattttggtaaatttgattctttgctatcttaagaagatatttgtgaaagactaaaaaagtagaaagtaagtattgaagtagtcatatcccccttagatggaatgtaagttacaaaattgttgcaggttgtgttaattgagcacagttaagattttggtttatgaattctaacaaggagcacctttgtaggtgatgtcttcatttggatagcggtattgtgctttcactttttttgtctgatttgctctgcac

SEQ ID NO: 111127 - DNA, 1027 bp, Homo sapiens
ggtggtttttcatgcctgtaatcccagcacattgggaggccaaggcgggcggattacgaggtcaggagatcgagaccatcctggctaacactgtgaaaccccgtctctactaaaaaaaaaaatacaaaaaattagctgggcgttaaggcgggcccctgtagtctcagctactctgaaggctgaggcaggagaatggcgtgaacccgggaggcggagcttgcagtgaaccgagactataccactgcactccagcctgggcgacagagccagactccgtctcaggggaaaaaaagaaaaaagaaataggcaaattgtaaagtaaggaagaaaatatatgataggcagatacataattataaatgtctatgacttaactatataattaagataaagatctaagtaacttttagctctacaattttttaatttttattaagaaaatactttgcttttgcctgcagagccctcttaattgggatattttcatgttttgcattttagggcagctgcaatgactctccgcacggtattattgtcattgcaagcactattggcagctgcagagccagatgatccacaggatgctgtagtagcaaatcaggtaagatggccgcttttgaaagactttcttatattatgtatgagtctctagccacttcagtggtttgcacattaacacatgagcatactctattgaaactaaattttgaaatggttttctttcttgtggtaggattattttgtcaggtgtaatagtgaaaatagacttttaacatcctagtttaattggatatagatgctgttttcctaacatgagtattttcaaacacataaagtcaaaagaattacatagtgaacacccatattcctaccatctagattctatgattaatgctcgtgtatgtgtccatctttttatccttcctttcagtgatgatccctccctgctaataattttaatcacctcctatcatgggacttatgtgacatggcacagtttccaatgaccttgtaatttgttgaacag

SEQ ID NO: 111128 - DNA, 2338 bp, Homo sapiens
cttttaaaagaaatattaaagtgaattgaatagttagtaatttatactttgctttactaagtaatggtggttccaaagtatttgataaatttacctctttccaatgcatatgggaagtcttttaataaaattactctattgtgagtttataatcatctcaagttatgtaataagttaggactttgcatgtggggtttccataaatcactgtacactaatgcagctgtaagaaaacagaagaatctagttgtattctagcctgggctgtgggtaatacaaaagctggttacatcgtaaaaaattattctaatgtccacatatttttataagctagtaatctgtgttcagttgtataatgtttgctgctttccagtgtttggaacatctcttaatacctcacttaacctaattttagtcttgctagttatatttgttgaatttggagattaaagtagattaatgttacttgtctttattattgtcaacacaaattgtgagtcgaagcttcaggttaagtggtcttttctcgagtgacataggttgtctataatgcaaagtgaatcacattttaaatgtagatttgttttatttggaaaagtaggattgtaggcgattaagagctgaaatatatcaaatattataactgtaatgtcatgtcaatcaatttttccccccatatagtacaaacaaaatcccgaaatgttcaaacagacagctcgactttgggcacatgtgtatgctggagcaccagtttctagtccagaatacaccaaaaaaatagaaaacctatgtgctatgggctttgatagggtaagtacataagggcatgttgattttgatatattgattgattttaaattattgcaaattcttggctgacaaaagtggtttagaaaataagagaaattcgcagcctgggcaacatggcgaaacccatctctacaaaaattagctggacatggtagtgagtgcctgtaattccagctactctgaaggctgaggtgagagaatcccttgggcccaggaggtcgaggctgcagtgagcgatagtcatgccactgcactccagccttggtgatagagcaagaccctgtctcaaaaaaaaaaaaaaaaaaaaaaaaaaggaaaataagagaaaatctagttttggtaaacatattttctgttttcaaagtcagtgatttttttatttttactaattactgtcattgattttagaagctttccatgcactgcaaatgtaaatcaacttacagaaaagaaacaaggtgttaattcccagtataaagagtgaatgattcagtattgtttaaatgtttccttgagatttaatttcctgtccccttttcttctctacagaatgcagtaatagtggccttgtcttcaaaatcatgggatgtagagactgcaacagaattgcttctgagtaactgaggcatagagagctgctgatatagtcaagcttgcctcttcttgaggagcaccaacatctgttatttttaggattctgcatagatttcttttaaactggcattcttgcctaatgatgttatctaggcaccattggagactgaaaaaaaaaaatccctgctctgtaaataaagctaattaaacgtctgtgtaaatttaaaaaggggaaatactttaattttttttcttaatagtgtaaaaattccctgagctaagctaaaaccatggaagaaacatgctactttagtgtttagcagtgtaccaagactagcaagagtttgcttcaggattttgttgaataattaagataatattttgagtgtgtcagggccattcaaattgttggtgttgcatcacagctaccttaactgtttttaacatggatcctctgtgcctgtgaatttacttgcatgcttgtacttgacttcttaggatgggtagctgaaaagaccaccattttaagcatttgagaattcttaaatatgaaatttattcagaattgaagatggtgacctattcagagcctttttgtccttgtcaacagactgggacagtgtctgattcccccttcaccccccccacccccgccttgccacacacagctaatattctaatggtaaatttctctgtatcaggtggggaaatgtgctgaaggacagtatgtatcccttgcttcatttttaggtcgtaggtttggaatgtcttgtcccagttcttcaaacactcttaaatttttcttaagtaatgtaaaaatggaactgccaattttatttctcttgcaaaaatagtaaatacttgatgttacattattcccaggtttaatgaaagaacccaacttagtttttcagtgaatttgacacctattttt

SEQ ID NO: 111129 - DNA, 1028 bp, Homo sapiens
tatcttaaattataatcgttaaatgtttggaagataatttttgaatcataacgtcagcataacttcatttgacttctcaataatcttgatactagaagcaataaaagaaccattattaaatatattgtaatgttaaagatgtgaaggttcttccaaaaatttgtaaggctttcctaattaacagtaaactcttatagctgatattattacatactaaacacaagttgctgttttttccccatatgtttgcttacgcatgtctttatacaatcacctctttttattgctgtagtttattttctaaagatgccaaaggaaacaagatttttctttatttattttaaatacctgaaacctcgtactttatattttgaagtaaggtgggattgtgtgaaaatgtggatggtttttctccagtgttggttagaactactttttttaagtggagggcaacttggtagtattagtagaatttgggtttaaaaatatcagacacatctacccagtttattttttgcctgtattatcagggtatatttaattgtcctgtggttaaacaaaggtgagagagctcagaggtttctaaaggtcaagcattttacatatatacatacatacatgctcttggaggcagctatatcctgctttgatttttatgcacatgagccctatagggttatatactcatctaactacacttcagcatccccagtgcccaagaaattggaaagtacaatatttggtttgagacattcttcataaaagattctttattataaaaatttacctcatttacatttaatgtgatgatcttttttttcctttctggtatatttcccactgtactgtttggtttttgttattctcttgtctgtgggtagatttagttacccaaacatagaaactaaagcaattgcttttttcctctggtcttaaatatgtttggacaaaaagacactaaaaggtcaggcctaggggaaaagtaccctggtggaaattatttttgtaattcttaatatttttgagtt

SEQ ID NO: 111130 - DNA, 1028 bp, Homo sapiens
ttgatttaaaaattacgtttccattctttttagtatcagtttaaagtaaatgcttaccatcagccagttgctgtcactgggaagaaggcaacttgaagtatttactgataaaatagcctttattcccaagtgtgacttttcttcagtgtctacatattatgtcacacgttctatttgcactgctgcaatatagatcaaagatcttgtggcataggggtaggggagtgttagtatctcccttgtcccatttgttctgttactgcttcattggactgatacaccctcatgaacttgcaatcacctaaatggaagtcttgaatgtgtcaccttttgcttggttatttcaaccatgctgctatatataatcaggtgtggcacagtttgtcagtttgattataggtgtgagtggatagaaatcattacactgtgctgttaacgatccttgtctgcttgctgttacctactttttacaggcatcataataaaagctagactatttctttggggggaaagagacttatttaatgtaatttaaaaaacttttccaatagaaaatgaaatattattgaaaataatatctattttttagctttcagcaattgatggtgctttgttgtggtgtctgctggaagtctactgccattatagggaaccttgcttgttagcttctctagatctctattctaaacaatctgttagtgatgataaattctgtaggagggtctattctgagccgttaacttcctgtaaggggaaaatgggtgggttaccagaaataccattgaagcagggtgggctgtggggtggaaggttggggtatttgtcttgagaattaaaaactacgaaacacttttgtacacaactgattttttaaaaaataaacacatttttaaagatgttgaatttttccccccttattgggaattcttaaaaataaatgcatgcatgttttcccctgaaaatggtttatatcttatttctgggtgctcatctgtggacaagcaattaagtcttactctaaataagaa

SEQ ID NO: 111131 - DNA, 3452 bp, Homo sapiens
ataatgagatcccgtctgtacaaataatttaaaaattagccagccatggtggtgtgcgcctatagttctagctatttgggaggctcaggctggacgctgagcctggaggaccacttgaacccaggagttggggctgagtgagccatgatcgtgccactgtacttcagcctgagtgacagagtgagatcctgatgcttaagtttaaaaaaaaaaaaaaagattttagataacaactatggaaatgaaatcattttcgtttggtttatatcttctccacatcttttctaactttgcgttctattcttaaccctaaggtaaaaatgcatttgcaaagggagaaaatgaaggccaaacagaagcaggctccagcttctgcaaaaacttggattcacaaatgtccctgaacagaaaatgaagctcacttcagaacacacactctctgccttgaaaactaaagagactattacttccttttcacatgaccacaagtcctctgatggaaatgtacagcagaaactcttgagagagaggctaaaagcaactctgttctcccccttcccctagacttttcttacgaaaagtcaataattaagcaaattgcttaacacttggttccagttcctgcctatctggagtttaaatgcgtaatacaccattaatttccacgctgcagtttttattttaaagaaagtaacaagatgtctttacactgacactgaaaattcatccattttagagccaggaattcccatgttacacaggaaaaaatagaagtctactgaattaattttttaaaagaaaagagatcagattaaatatttctttgtttttccttttggaaacttttatgtataattctttctgcctgcctacttttctgcaaaaatgagatgtacagatttcggttccctgctatgaaaagtgatgtggtagcaattttataaatgttgctttctgatttttatcagagtgagaaaattaaaattattgatttgcaagtagtaaacagttcatattttgatttcccctcattttagtttaatataatttgcaataaatgtacatattgttgtttgtttcataaagcatatcactttaaaatggtttttactcctgtgattatgttggaatatttggaattttaaaggagtaaagactgtccagcatttggttttataatgtttgtcaccagatttttattaatgtaaaaaaaatcaatttttaaaaaatagttggactttggcagcttttaaggaaagttggaggtgttttaggattgctatcaattttcagcattgtgctatttggaaataagtgttttgcttttgtctgatggtctgggctcatttttatgtttattttagaaaactgttgcatcaatatattatgtttcttggcattgttcagcataggtaatgtgtgcactttatgtgtacacataatcatatttaagttttttgcataaaataaatgcttctagatgtcatggcagtctttttaatctttttatcatatgctttcttgtgaattttttcatgttaaagagctaaagtcataacatgattacagtcaactctccattatctatataaaatagtgactaagcctcaggtttttaattttgtgataacaaaataacgaaggcatgtaagacctgattctggaggaacatgaaatttgtcttttctcatgtccagagttctatcctgcccccactgtccactgtagggtcatccgcaaagccctagcagaatgtgctcactccatttccttacacgtttctagcatgggtcagaggaaacaacatttgtgttataacttcgtcttgataggctgtagtgtacatgggatgtaaaacaaacaagtgtatcaaaggtggatgattctgttagagtgaagtttgagagtaaatgtcacttacgtttctcatagataatcaagagttggctgtgtattgactgaaagatgggtaattattttaaatatgcatttacacacatttaggtatcagaagatgcttagggaacaatggataccaatgatagaaaatgatacctttacaggggcagaaaaatccccactcttccttattgcctcttcagaaccctttagaaagtataaaatattgcctccaacatgctgaaaaagagtatctatgcataagtatcagagaagtccctcaagcaatcagtaggtgtgttctatttagagagagtttaaagttctcttagcatcagacaacttgattcctaaggtttccagtgtgtcaccaacaaaaagtgcattgatagggacctttgtctcttcctccctttgattaattgcccggcatcacagtttactagattaccaagtgttacatcatattaaataaaatgtagcagaaccatctgcatcaatatattcctgtttagatttttgcaggagagaagttaaaaggatttgctccttgtatgatgtaagtggcccaccccaattttgtaacatgatgcaagtgtctggcactaagggaagcaagagtagggttgtggaaagaccaagctgatggggagggacttgtttacgggaatttttttagttttccttttcaaaggaaaacattaaaatcccttaggaatttggtattcacatctcagagaactacaacacaaaagtgcagacttatatttgagaattaatgttaaccctttgtgtctagtttgaagcttcttgtatttgtctaaaacaacaagccagaattttgtatctcctttgataaaaagtgtgtataatgtaaagtagttttgcatattcttgtgctgcacatgggctgaatttttaaattttttttaaaaacttgaagcagaaccttgtaatttgtgtaaatgacaagtgtaaaatcctaccataaaatgctaaaaatatgcactgtttcaaataaaaccaagaaatgcagcattatatagtagtgtggagccctgaatattcatgtacccctggtatgtcacaagttgataaaatgtctctgcatattttctgttgagatgctggagtctgaatatcctaattagaaatcaaaagccaccttcaaacttcctggctgggtactctgaggtagcttacagtggctaaggaagaacatagtggatgataaattctgaggcacattcggaatttccaaacgaggtttgttttagggggtggctttttttttgaaatgagatcttaccctgttgcccaggctggagtgcaatgacatgatcatggctcactgtagcaatcctcctgccccaggctcctagaaaagtgctgggattacaggcctgagccaccagacctggccaagaagttatttttttaacctaagaatttaatagcagcctttgattcatattagtctatggttcatccattcattgcaagttctgcactcacatatttagttccataacaaattcaagagagcaagcaga

SEQ ID NO: 111132 - DNA, 1006 bp, Homo sapiens
tacaggcacaagccaccatgcccggctaattttttaaattatttgtagagatgggatctcactatgttgccggggattgtttggaactcctgggctcaagcgatcctcccgctttagcctcctaaagtgctgcgattacaggcgtgagccactgttcccagcctttgctttttaatgagcatttattgagcacattatatatgctatacaccatggtaggtaccaggcacagtcactctcctcaaggagcttactttcctaatgtgatgtaagcagttaactggaagccctcaaatccagactcctttaaaatactttcaaaacactcttttctaatagagatcattaatatttaaggaatttgtgtttatagaattgttttgtgcttttttaggaaattaattctgatcaggctacccagggcaacatcagcagtgaccgaggaaagaaaagaacagtaacagcagctggtgcagagaatatccaacaaaaaacagatgagaaagtagatgaatcgggacctcccgccccttccaaacccaggagaggacgtcgacccaagtctgaatctcagggcaatgctaccaaaaatgatgatctaaataaacctattaacaagggaaggaagagagctgcagtgggtcaggagagccctgggggtttggaagcaggtaatgccaaagcacccaaactgcaagatttagccaaaaaggcagcaccagcagaaagacaaattgacttacaaaggtaatgtacgccattcttcctcaagtgggaatttagacattttgttttattcgtagtatattcttagtgccagtcaccccaaacacctaagcatttgagagagaaacctgcatctggttttcctgggtccgtttataatagcatctgttattatctcataacttccagttttaaggcacaaatttgaagaaaaatcttttttctttgtgtaatttttatttaggatatggtattttgatatttctatttttattaacaa

SEQ ID NO: 111133 - DNA, 1080 bp, Homo sapiens
ttaaaccacttttagcaaaaatgaagcccaagatatgaaatcagttaacatggtttaaagaatagtggggcctcaaatacctaccaaatagcctcttctgacagccccctttttagtagaacactatggaaatgacaactatactatggtctgtagttttatttttgttttaggattttctattcccaaaagataaagcttacagtggttgtgttattttgtctcttgacaattaacccttttgtcaagtagtcttaggcagtcatttctgtcttaatgttattaaggcaaaatggaaattgataccactttatcaaagctaaatggaaaatgatatttttaaagcaatagtctataactacagagtatccgaatcttgctattgttgcttcaattgtcaaggtttcgaaaccagcctaagcctttctttattggtacggtgagagagtgaactttctcttcatggaaatatgaagtcttggtttatttgttttaaacagggaacagagttcagaggcagcagaaactggagttagtgaaaatgaagagaaccctgtgaggattatttcagtcacacctgtaaagaatattgacccagtaaagaataaggtaaattttaaaatttaacaagtggattttttccatggagattattacagtttttccgtagggataagaaatctacagccaacacttcaatgcacatgctacattttaaacttgtgtgtattaccacacaccttctccccgcttcccgcaccccggctatacttcccaaaaatgattctgcttacctccacccactttataagaatttatgtggtctggctgggcacagtggcttacacctgtaatcatctctactaaaaataaaaaaattaccggggcgtggtggttggcaccaaaatcccagctactcaggaggctgaggcaggagaattgcttgaacccaggaggtggaggttgcagtgagctgagataacgccattgtactcaagcctgggtgacagaggcagactctgcctccaaaaaaaaaaaaaaaatttgtgtggtcacctacccgtagtggtatccttttcc

SEQ ID NO: 111134 - DNA, 2150 bp, Homo sapiens
cgggttcgaacttctgacctcaggtgatccacccactttggcctcccaaagtgctgggatgaggctcacaggcatgagtcaccacacccggcccgaatttatgatgtggtggaattcagtgaataaatttaatgaataaactgcattgaaccgtatgaaaacatgtgtgtgctttatttatggtgtgatttaggaaatttatctttgacatttgcctaagtctgcgtgccatcagtttaatttaaagctagacttatggtatggctttgattgttttgattgtttgataaattggtatatgtgttagcacaagtgtatttattattgcaaggcacaatacctaaaaagccttattgagataattaaaatactcatgttcctttgattggtgtttcttttttctttttcttttttttttttaataggacttctgtaacgataagagttatatttcagaagagacaagagtacttctgttaacaggaaaggtattatttacttaataattttgagatctttgtttcatgtgtatcttgcttctgctattcctagaaatacctttaaatgaccactagattgtatagttcctgattcttagggatcacattatggatttaaagcatctaaagcagccatgcttttagaatttttctgccagcaaccactcctctgaaatgccactgtgtgttctcatcagtaatgttaagcacagtttatttacaattcacaaagaagactttcctgggaaatggtataaccaacttaggtatataagataaaagaaataattttatactactaatgaattagacaattcatgttctatgtaagtaatatggtgacacctaaaacagcaaaaggaaatttagttttttgtaaatagttcctaaactattactatatatatatccaatagtttatttataggagcatttattatgtatgtattttgctatattttaggggaactttgtattttgattgaataataaaggatacattaatattacctagttattattaagtagagatatgcttatgacttttgattgtattaaggcaaccaaacacaattttacagaatgatctttttttttcttgagacagtctcattttgtcacccaggctggagtacaatgttgcgatctcagctcactgcaaccttcacctcctgggttcaggcaattctcatgcctcagtctatcgagtagatgggactaccggcttataccaccacacctggctaatttttgtatttttggtagaggttgggtttcactcttttggccagagtggtcttgaactcatggcctcaagtgatccacctcccaaagtgctgggatttgcagtcaggagccagtatgcctggcccagaatgaacatttctggtaaatttaactaattagcacttaacaatatctcttacttgtgtctaaatttacatgtatacatggtaaggtataaacgtgtgtgtttttggggggttttttgtttttgtttttagccaaagcctgctggagtactaggtgcagtaaataagcctttatcagcaacgggaaggaaaccctatgttagaagcactggcactgagactggaagcaatattaatgtaaattcagagctgaacccttcaaccggaaatcgatcaaggcaacttttctctccaattattttgttactagcactcactacttggtttatcttttattcctaaagtgctgtctcataaaatggtcttctgtcattagcggtgttctggtacaaaataatattgatgaattttagtattttcttttctgggtttttttttgttttttttttttttttgagacaaagtctcgctcttgtccccgcccaggctagagtgcaatggcgcaatcttggttcactgcaacctctgcctcccgggttcaagcaattctcctgcctcagcctcccgagtagctggaattacaggcgcctgccaccacgccccgctaatttttgtatttttagtagagacggtgtttcaccatgttggccaggctggtctcgaactcctgacctgaggtgatccgcctgcctcagcctcccaaagtgttgggattacaggcgtaagccaccgcacccagccagtattttcttttttttcttaattttatgtaattttt

SEQ ID NO: 111135 - DNA, 1720 bp, Homo sapiens
aacacccagctaatttttgtatttttagtagagacggggtttcaccatgttagccaggatggtctcgatctcctgacctcttgatctgcccacctcggcctcccaaagtgctaggattacaggcatgagccaccgcgcccagcctcgaatttctgggttcaggcaatctacccaccttagccacccaaagtgctgaggttataggcacgagccaccatatccagctagggtgaatctttatatgccttatgaaactgtcagactttctcatattaagctatgttttcattttttatatgttattttatgctttaattttccatttgaatagaatattattaggataataacatatattagtcattaaggttgatcattttattttattttattcagacaacagaaattcccagctaacatatttattgctttaagctaaagcatctatctacgtctagtctctttaatatgtttacatttaggtgcctatggttcatgcttgaagttttaatgacaaagaatgaaaacaatagccatgcctttatgaagaagatggcagagaacatcaagttaaccagagatgcccagtctccagatgaatccaagacaaatgaagtaagatgagtgttaggccagtgggtgttaagatgtaatagaaaaatatattgtcccacttggttttttttttttttttttggccatacgtagtaatttaaattttagaatgtttacaaaagtaaatgtgtagtcagtttttattgcacttcattacaagtgaattttatttcaggaatctttagtactctgaaaagacattataaccttagagcaagaggataagaataaaatgtacaactatggtatattacgaacttacagtaagagttacagacaaatgcttattctttttgtgtgctttctttgggttggttcatttgtttgttattttccatgcatattggcatccatgttaaattcatatagagggatttttatttatcagaaggctgcataaacagtgctgaacagaaatatggaatgttcaaggaataaataacaaccacagtatccttcttttaactctaaattatacatttagtggaattggtaattatgattattttgcaatactaaaagttatatatgattcgttttcctccctagaaactgtatacagtatgtgatgtggctctctgtgttataaatagtaaaagtgctttgtgcaatgcagattcaccaaaggacccagtcctcccaatgaaattttttacacaacctgaaaaggtaattttcttcctctcatttttcctaccacactaaactgatttcaatgtcaattaccatcaaccattgtggcaaatattgaattgtcttgaccacagagtaaagaaaaaatctgggtttatcaaagagtgggaaattgtcttacacagccctgaacattattctgacttgaacagaagactacacatactgttgatcttatgtttattctaggaatttctagtattaaagttttcagatttttaaaattattttaatctcattttattgaaacatgggtagtatttttgcagataagaaaaattttaaatctttggcacagtgtaaggagggacaggttctctcctctaagcctccatttcttcatctttataatgcagatgttaataatacatatggacaattgctaatatctaggtttatatgaagagtttat

SEQ ID NO: 111136 - DNA, 2838 bp, Homo sapiens
ttatatttcatatcctttaggtatttgtctgatacttcttcactcttaactgcagccctgccatttcagcaggcattaaactagattcctgttacatgtttatatgcaggaaatagattttaaatgatgataggtgattttttttttaattctttgtggtttttttaatcaagtttttttgttttttgttttttgttttttgttttttttgagacagagtcttactctgttgccagggtagagtgcagtggtgcgaccttggctcactgcaacctccacctctcaggttcaagcagttctcctgcctgagtctcccaagtagctgggactacaagtgcgtgccaccacacccagctaattttttgtatttttagtagaaacagggtttcaccatgttggccaggatggtctcaatctcttgacctcgtgatccgtccacctcggcctcccaatgtgctgggattacaggtgtgagccaccatgcctggccactttaatcaagttttctacaatcaatatgtatttctcttaaaatgagggatacagctcctgatgtaaagagtttttcctagccttgcaattactatggttgcaagaataagcagagtttttgggttgtggtgaagtatctaagctagagtttgactagaaatgaaggcaggtaaatttgtaatcagaaagtcacaatgatttgatttgattgtgaaagtcacaatcccctgtgttaagttcatggactcaaagtagctttcccatatttgtacgtcattttaaacataaattatgctctaaggaccttacattcaaaaagggacgaaagcatttttatgaatgatagtggttataggaaatgtttatttcttttttgtttgtttatagtaaatctgatatgtctcgcttgcgattagctgctggtagtgccataatgaagcttgctcaggaaccttgttaccatgaaattattaccccagaacagtttcagctctgtgcacttgttattaatgtaagtaacaatcttatttttgtcaattacttatcttcaaagttgaatacattacttttctatggatacaaatccatttataatgtgaatatatgcacaaaagtcactactattattacctgtttaactgtcttccaattattacattatttattctcccatataattatcttctttttaattgaagacactaaaaatacttaaactgctgttttttatttaataaatggttgccaatttaagtttttctgtgctgctgtaggatgagtgttaccaagtaaggcagatatttgctcagaagctgcataaggcacttgtgaagttactgctcccattggagtatatggcgatctttgccttgtgtgccaaagatcctgtgaaggagagaagagcacacgcacgacaatgtttactgaaaaatatcagtatacgcagggaatacattaagcagaatcctatggctactggtaagtaactcagagttctccgtgtgcaaatatattttgtcaatgtatccatttttaggttttttttttcttgtcatgtgtttctattatagtttataataaaactgggagttttatagaatgctgtcattgtagttatgatgtacttaaaaactgaactcctgagtcctatttatgctgcattaactctggcaaactgcatttttcctatgggatcaggagtgtagtttaatttgaacatattgctcggatgtcagactaaataattttttcctagctttgccagggacctgttgtttaatgggtttaatatctgatacctttgacttcagtatctttcaaaagtgaaatacaactgcataccaggtaccagaaaaagaaattgaaaagtgaagtgtaaagtattttagtatccaggtatcatgttgtgcctaatttagaaataactgagggaaaaaatgaaaacttaagtggttagaactcagtccactaaggcattttataaaggttgtttttaataatgtttttacttcagagaaattattatcactgttgcctgaatatgtagttccatacatgattcacctgctagcccatgatccagattttacaagatcacaagatgttgatcagcttcgtgatatcaaagagtaagtcttgttgtttttcaagaactctaaaaattatgtttagttttcaaaaaatggtaaattttttgtttattatttttatttattatttacattagaattagaatctccttatggttttattcatttattataaatttccagtttcgtctttcaaaaattttcccatctaccaggttttggttgttcattttctgtttgtttgcagctagttaagctatctaagtctttgaaataggttagtttggttatcttagttattatatttgatttttactatttatattgagagggtttgaatatgggaagagtactgaagtatgtgaaataattggagttggaactgaaaacagtggagcatattttttattctttgttctctctagcatgcaacactttcaaatatcttttaaaaaattttgatacataataattgtatacatttatgaggtacacgtaatattttggtacatgcatacaatgtgtaatgagaaaatcagagtaattaagatatccatttcctcttcatcccaggcaattggagctgcaatgagctatgattaagccactgcatgccagcctgggtgatagaacgagaccctgtctctgaaaaataatagtaacaataaaatttttaaaatacaaataaattattgttaactatagtcaccctaccatggtatcaaatgtcagaacttattccttgtatctaagtgta

SEQ ID NO: 111137 - DNA, 1754 bp, Homo sapiens
tggtttttttatgaaacagagttttgctctgtcacccaggctggagtgcagtggcacaatctcagctcactgcaacctctgcctcccgggttcaagcaattctcatgcctcagcctcctgagtagctgggactacaggcgtgtgccaccatgcctgactaatttttttttttttttttttttagtagagacggggttttttagtatagacacggtttcaccatgttggctaggctggtctcaaacgcctgacctcaagtgatccacctgccttggcctcccaaagtgctgggattacaggcgtgagtcaccacccccggcctgtatagtttaaattgttgtttttaaagtatatgttttcaaatagtttcaaaatcttgcacaaacatctaagtatgagaagcctaaattctggaaccagacttttaagcaagttatctatgataataatgtgtctcaattgccttatctgttggaaaaaaaaaaatcttcctcataagaattttttgggagattaaataagttaatacatttacagatctaagaaaagtgcctggcactggttaagcacagagtaaatattagttcgtattgttgctgttattatcccatagacttatttaataaaatgtctgctgatggagatgagtaatctcattaatctaattaaattaattttccctttaattggaattttaagttgctttctttttttagcatgttaatattttataggtacaggcaattaaacttctggtaaggtggctgttgggtatgaaaaacaaccagtctaaatctgccaattcaacccttcggttattatcagcgatgttggttagtgagggtgacctgacagagcaaaagaggatcaggtgagatttttctttctttccagttttcttagtgctgaaattttggtggaatttacataggaattatttacctaatgaatactgaatggtgtaattacaccatgatcttcagggtcagatcttatgtactcatttagggtttgtctgtctgtcagtattgttattttaatagtgccaatatatttttcttcattcctaaagaagaggaactttttccagtaaatacataatcataatcactatattgtactattacagttagcatcaacatttggttcaattaaacaagtatttgttaaacttctacttcataaaacactgtgaaaagcattgcagcaaaaataagtaggaaaagtccctgccttcaaagagcatccctgtattaaagcgattaaataagtggagtgacttgagtcccatgaaagtaataaaaatttaagtggcagccaggcgcggtggcctatgcctgtaatcccagcattttgggaggccgagacgggcagatcacgaggtcaggagttcaagaccagcctggccaatatggtgaaaccccgtctctactaaaacaaaaaacaaaaattagccaggcatggtggcacatgcctgtaatcccagctactcaggaggctgaggcaggagaatcgcttgaaaccagaaggcagaggttgcagtgagctgagatcgtgccaccgcactccagcctgggcaacagagcgagagcctgtctcaaaataaataaataaataaaaataaaaattgcaatggcaactcaagggagagttgaagccttcttgttgttctacagatttgggtgtgtacacttgtatgtgcacacagagattgtttacattgttacacattttcacttttaatctctaaaatt

SEQ ID NO: 111138 - DNA, 1008 bp, Homo sapiens
cctgtagatcagattatatgttcaaacacctcatattgaagggttttgtggtttttgttttttagtttgtttttgagataaagtttcactttctcaccagtgctggagtacagtgatgcaatctctgctcactgcagccccgaattcctaggttcaagcagtccttctgcctcagcctcccaagtagctgagagtacaggcaccaccaccatgcctagctaatttttggatttttttatagagatggggttttgccatgttgcccaggctggtctcaaactcctggactgaagcgatccacccacttcagtctttcaaagtgctaggattacacacatgagccaccacacctagccttatgtgtttatgttagaacattttacttaattttagccttattggttcagtggtgcatttatcctcggaaagtattagtagataattttgaacaatccagtttaaagtacctaagaaccctacctgaaaattaatcctgtttcccttttttttacatataatgactggcctcattttactattagaaatgtattcctattatcataaattggagatagtgtgaccaaaacccagtgaactcttactttgtatgatttaaggtcatttaaaatgcttccacagggtaagaaaaccactggtatagcaaatccattgttgtagattagtcaaaaataatgctgatttgatgaagcaaaaatgtttttctttaaacttctttttgttggattttattttttcttttatcttttttctacattctttcaatcttgctaaattttagtaggtgaattaagaaccaggtgtcttaacatggttgaagttagttatgatcgtattagagaagattggtttgggcatggtaaattcaggaggactcaggaaaatgtactgtttcagtagagtgtctagatatttatcaaacaaattggtaattttgtctgttttatttttatagccactcagtaggagtctgaatgctgatgtgccaga

SEQ ID NO: 111139 - DNA, 1065 bp, Homo sapiens
gaatgttcatctactagatgtgtttgtctattttttataagttcatatatgcacactattttcttcattctacctaatgctttttcatgtcatcaacatttaatttttgaagaatgctttatgtttttctgtcatcctaaaagaagactgttttagtttactcttcattgtcagtgtagaggttaagtatgtggattttgaaagaaatgctaattttcaaatcccaactcccagtttcctagcttcgtcatcttaggaggcttaaataacatctttgtgctttaattttctcatctgtgtaatgactatgatagtcttctttgggtggatgtgaacattagttgaattaatccatgcggaaatacctagaatggtgcctggcacataatagttagatatttttattgccattctactgatatatatgtagctgtatctttgcatactttctttcactagtattatttcagctgtttaatacaacttggccttttgctactctctttctgtagctactttgaaataactgaaggggattataaaagggaattgaaaaattagcaatattgctacttagaaggtaaatgcaaaaatatgtcatggggtaagctttagattatgaattaagggttgcttgttattttgcatatttgtgaggtaactttaaaataaaaattgtctcctgaagtaggctttttcttgaggcattgtatttcttggtttatacttgggggcagagatggagcttttttacaactttctttagatcagataatttttaagagagccttctctactagcatccatccatataggggaagtggaagtcaaccaaaggaatacttgttggtttatgggtttaagaaaaaaaaacaactatattattttttgcaggaccttaattcccattttacatcaaaaagcaaagaggggtactccacaccaagcaaaacaggctgtgcactgtatacacgccatattcacaaataaagaagtccagcttgcacagatttttgaggtatatctaatatataggttgtgtttatattggtctttattttttaa

SEQ ID NO: 111140 - DNA, 1138 bp, Homo sapiens
caaatagttcactttggcatcttaaaaaggttaaggtgaaacttgtgctgagatgttatatttagacttaaaatatgcagaagacatcttttgaaggaaacaatacattgcaaatggcagttgaatcatatgttcagggtattggcaattagttcagagtatattcaactacataccattttcctcacatgataatcatagaacaagcagtctcctgaagtttttattaaatttgtgagctaatagtttaacttgtgaaataattcagtgtccattgtacattctcttcattctccgcattgttctggctaataataaaaagttaccacaattagtccctgccctcaaggagtttatagactagaaataataaattttatacattattagaaaaagatcactgacacaataggatagtttttgatgagtttttcaagggaggaaatcctatacattttttcaaggcaaagaaactattcttagaggaattctaccccaaaggacacagttgaaaatgagcataggtggaagagttaactttggatgtgaggaataaaataccttattcataagaccaatggagaagaaaggagataatcactggaaagcagaaaagcacaatgctaaagacctcaataacaactctgatggcatcactagattatactgctctagaaaaaacaagaagaaaggttaaagttgactttctgtattattttatttggctaataataataatacatttaacaacagtttgattgaaactatcttcctttgtcattcaccagtgttataagaaatctcagtctggtaaatggaatggtgaaagactaaacagataggagagaggaaagacatcttccatttagaagcatagtcaatactcagtcaaggaagtctgtttggtcatggacatccctatctcataattccaaagtccatagaggcaaacttcaggcatatttatacatgtcaaatcagattcataccaactagcatatgttcccatttttggttaaagtgcatggcctggagcctgcagtataggtttcatatgtagccttccattatcataagagggcattgtcacccttgcatttgatgccactaactttataaaataggctcttctctaata

SEQ ID NO: 111141 - DNA, 1515 bp, Homo sapiens
cccaacacaaagaaatgataagtgtttaagataatggatgtgttaattatcctgatctgatcaccatgcattatatgtctggaaacatcactgtgtaccccatgaatatttataatttttgttaattttttataagtgaaaagaatttcaacatctgcatcctatgcatatttggtacttaaattttttttaatgaatactttgacataacaccaaaggaaaaaaaaattagccaaaatcttgttttgaacatttgtaataataattgaatgttctcataatagggtaatatcttcttcagtttactgatctcaaaaccagaagtcacatttgtttttacttaaaatagtaccatgttgctacatcatctgatttttattgaccagataatattctatttcctggtggtaggtattttgaaaaactaattccttaatttttgacaattaaattgttcctaattaatgaatctttataaatacagcatgatgcttccaatgacttgcttctttgctgtaagtttatagaaataaagttactgattcagtaaattatcagtgattaattcatttgtccatgtgtatgtttattatttgtatttttttgagtcagttgtcattgctcacttagcaactactatattattatttttcttaaaactgaaaatgatctctgtatatatggaaatgaatattaaattacttatgtgaatatattaccagagtgctgtgtcatttaattttagttttgttattttttagaagagttactcttatacattaagttttttagggggataaactaagtagaagtttagttatcaagtagaggacaaggttgaacttttttcccccacagaaactcctttgaatttaatattttaaggttctatatatgttctgtcacagtgtgattaggatatagttactactacagtggttactgatttatattttcttctttttatagtgcactagtgaaattgatgaataagtcaatagaggggacagcagatgatgaagaggagggtgtaagtccagatacagctatccgttcaggacttgaacttcttaaggtatttttgaaacagttttgttgccatgtatttccgtggggtcataatttgccttcccttcaggatatgcaagagtcaggcttatttcacaggaaactatttgaaagatttaaaacttgtgttggaaattagatgatgtaaaagtaatgtttttacaacataatataataatgtaattattttacattataaattaatatttgtttcactgtttatcatttccatgccttctatgcttggtagtgattactgtacaatctattcttaacttagtaatagcaagatgtgactttagactttgtggacagggtatgtgactaaatctagaggagggaatatcatcattaaagggagtatttcttggtatatttgtgggattcttgggagactggcatgactagaaaaaaggggtgctttggggaatgatgggagacaaggtt

SEQ ID NO: 111142 - DNA, 1029 bp, Homo sapiens
atcattctaaatataatcaatttcccccctatacatatgtccatacaccttgacatatgtgtgctacagttagttaatggtctataggaagtagatgaaaatgaagtagtcattgtaatgatggctggaacccaggtgaaagtaaaattttaaaaaggaaaaggttgaggactgaatcgtgagggaaattagcaattaagaggctggcagaagataacggacttaaattttctttttaagttttgagcagacatagtcaaaagcagaaaattgggaaagagtgttatcacagaaaccaaagaggggctaaggaggggtcagatgatatccagaagttgattaaatactaagaatcatcgaatggattaggaaatgggaaaaaatcacaatgaacagagcagtttctgtgcggtagcaaggacaaagccagaatgccatggattcagaaaggcataggacagtcctttccaacatgtacatcgtggtacacagagaaggtgatcagtattacttaggcagagaagactactgagtctgttttttactggcccagctcaatagaaagccactaggtaccacttggctacactgaggcttgagcatgttaaagggatacatagccttgtcacccttctaaaccctgcttaggagataaattgacagcaccagtggggacaatcagtgtagacagcgccaatcttggataaaaagcaaaggaggccaggcatggtggctcatgcgtgtaatcccagcactttgggaggccgaggcgggcagatcacgaggtcaggagtttgagactagcctgaccaacatggtgaaaccccgtccctactaaaaatgcaaaaattagcctgacgtggtggcacgcaactgtaatcccagctactcaggaggctgaggctggagaatcacttgaacctaggaggcggaggttgcagtgacccaagatcacattattgcactccagcctgggtgacagagcgagactcaaaaaaaaaaaagcaaaggagaaggctgggtgtggtg

SEQ ID NO: 111143 - DNA, 1004 bp, Homo sapiens
ccagctactctggagcctgaggcaggagaatcatttgaacccaggaggtggaggttgcagtgagccgagatcgtgccactgcactgtagcctggtgacagagttagactcgtctcaaaaaaaaaaaagttgctatatcaaccaataatttcatcaaagaattgtgaggcaaggctgtgttcactcagaaaccacatcatccacttcttttctctgctgtccagatttttcagtcattgctcggggtgtaaaaattttagtcagggtctagagcagacaattcttaaccacttatgctggttttgaatatttcagttccttagtcatttttcttttcaaaaatatgaaagcaaatcacgtttttggtaaaactcctttctttctatagagagaaatagcccggaaacttgcaaatcctaagcaaccaacaaatccttttctagagatggtcaaatttctgttggaaagaatcgcacctgtgcacattgattcagaagccataaggtaagccaagaagtatattcgctcaaaaataaataataatctgcaacgacaatgttgttaatttaaattctgggctcctaaagatacctgaaaacctctgtatgtctctttttaatcacagggttgtacatcattcaagttgaagggaaagccttctcattttatgatctttggctttatataatgctttctgtttttaaagagttcttatgtttatttttagcttatgcgttctcattaaagaaaacttagaacaaagagaaagacagaaaaaggaatattttagatctgtgtggctgttgaccaacctctgagttttcttaagcattttaatggccctgtaatattctgtagtacatattataccactgttcatttgatgtgtgagaacagaatggtatgttggaaagaggagaggattatctttaggcaaatttggtttcaaaacataagtctactttgtggctttggattgtctttgaattttcatttattttcaac

SEQ ID NO: 111144 - DNA, 1061 bp, Homo sapiens
ggctaactgttctgccatgtttggaaaactgatgaccatagcaagtgagtatgtttatttactcactaaacatgtagtaaacgtaaatgcagacaaagtatttacccagtgggactactgatttaatgttaagtaaaagaaaataatctttatcttaattttgtttctaagaaccagctaggctgattttcttttagtggctccgcaatattttgatggcacctgtttttagcttagtagaatagttttttttttttccttctctaatattgattctcttttaattttatagagaatttgcctgaccccgggaaagcacaagattttgtgaagaaatttaaccaggttctcggcgatgatgagaaacttcggtctcagttggagttattaattagcccaacctgttcttgcaaacaagcagatatttgtgtggttagtaaatcatacttcacactttttctctagctttacttacagaaatatgtattttattaaagcctgttttacatacagtgatttgtgtaaatgtaacaatattgtgagctctgaattactttggagtatatctattgtcaagttaattctctatttaccattcactctcagccacattccaggaaaataactaaagaactaagccagggagattggtcttaggaattttacaagataaagtactttgaacttagtagacattcattgagtaatgataagtattttctgaatgcttgtgtacatgtgcattttcttctttcatgtattagaatggaaataatcgtcaataaattagtagtagtaacattgccatatatctggtttcatttacagataaagtaaattcctatctagacttttgtcttcattcttctcttgaactcatttaaaaccaatattcttaaagctatcaggagggaaaacttatgcattcatttattcagctttttttttttttttcctgagatagtcttgcttttgtcacccaggctggagttcagtggcacaatcatagttcactacagcgttaaagtcctgtgctcatgtgatcctataccccagccttc

SEQ ID NO: 111145 - DNA, 1064 bp, Homo sapiens
tcttgaatctgcatcatttttgatacttcatttttcaaaatagtctatagtgcttcatgtatatgccttagcctttttaataaggccttcatgatttgatctgtgtctgtggaatgctccagcttccttatgctccacacacatgccttgtgctccaagcgtatacatgtttttcagtttgttttatgtcccttgcactttgagattttctttccttgtaccaaaactttctagctacctgtatttagtacatctttcaatccctgtattacttattaatctttctaaacctctcaaatattttctctcataagaaggcttatatttaccatttgtactaaattgttttaaatcctaataaatatatttcccggtatttaaacttttaggtagatgtagaagaatggtgtatatacagcatgcaacaagaaaggttgtaaagctgaataatttccagtattgttatgtaatgtgtgttttcatattcataactttacagagctctcaacgaaatgtggaagtgtcagaacatgcttcggagccatgtacgcgaactattggatttgcacaagcagcctacagtaggttcatgatttgtttaaattcatagtttattatagtcactgttcagattttctgtagttctacgtaatgaagcagggaaaaagtatctcagttgttttattttccaaatgtcagttaaatataatttctgtagttgtccaagctaaatttccatttaaaataaatataacaaactcttattttctagtgtgagcaaagaaatggtgttttctagtttatataaagttttcagacactaagagtttatagttaatcaattttcaaataattagaattaaattttgagataaaattacattaaacatcatatttctttttcactgcatgattcatggtctctcagtgtagagtgaatatcagatatcaatcctataaatatgccaatggcaaactaaaaaagaaatgccattaaatttttgcaaggttggggaaaaaaactttacatttttacgtgtgttcactagaataggtgttcttaa

SEQ ID NO: 111146 - DNA, 1050 bp, Homo sapiens
gggccgaggcgggcggatcatgaggtcaggagatcgagaccatcctggctaacagggtgaaaccccgtctctactaaaaataaaaaattagccgggcgtgcgggcgcctgtagtcccagctacttgggaggctgaggcaggagaatggtgtgaacctgggaggcggagcttgcagtgagccaagatcctgccactgcactccagcctaggcgacagagtgagactccgtctcaaaaaaaaaataaaattgtttgtaaagcctcttttgaagagaaatagtgtgccagtttataaaggcacacataagactgtacaacctaatgaagccaaggcagtctttggagattagtacagagttttgttatcttgctcatctaataaattttatgctttttagtggcgagtaagaaaagaagctatgatgggtctggctcagctttataagaaatactgtcttcatggtgaagcaggaaaggaagctgcagagaaagtcagctggataaaggacaaacttctgcatatttattatcagaacagcattgacgacaagtgagtttaatatgttggtagaatggttgagtgtaaaactactttttacttaaaaaatgtctatttaatattttagtaatttcttatttttatgtatttacttcataaataaaattaagtttattcaacttgattaatcatttatttctaagtttagagatagctttttacatatttttatgtactgtgtttaaacaagactgtccacgattataaggtagccttataatatgaaataggcatgaactttggagttagagaccaaatgttcactctgccctttattagatgtgtattcttacataggttcattaaggtcttgtgcgcttcagttttatataaaaaggaaaaataatagtgcctttcccacaggattatcatgtagattaaataaaataatgaatataaagcatcctagcccaatgtgtggcaagagagcactattgagttaactgctagttactttcctttttacaccactaccaatagaggaattactaa

SEQ ID NO: 111147 - DNA, 1035 bp, Homo sapiens
cccaagtagctggcactgcaggggcgggccactacacttctggctaatgagtttttttatttggtaattttcgtagagacggggttttgccatgttgcctaagctggtatgaactcttgagcttgtgcgacctgcctgcctgcctcagcctcccaaagtgctggtattacagttgtgggccatcacacctggccaacttgggagtttaaagtgcagttttgtgattacagtagagtactgctgctgtaaaaataacatgatttaatttcatgccatattttacaaacattgctttagtatggacaaaaacttaacatatttctgttcttgccattctaaatcatgacaaattacatagctaacatttagcctaagttttttttctcttattacagaatatttaaaggttagatcacatgatccagaagaagctattcgtcatgatgtcattgttactataataacagctgccaagagggacctggccttagtaaatgatcagctgcttggctttgtaagggaaagaacactggataaacgggtaaaatctgaggcattttattcttctgtaatttactgtttaaattgctaaatacaattgggtatcattttctgttacatttaatgtctttctgtgtgaaaatcaaattaataacaatgataaagagctcctaatttgtatgtttcctgcatatcttttaattatccttatgaataaatacaatggattctataccttttgagatcttaagcatgggtttcttttctatcataccttcataagagaaccactaagttaatcaaaattttacctttttatttacatgatgagtttcaaaagaatagtgattgatcgtctattcttatagttaacattttcacatatgactttcttgaataacttagctgggtctgccattcattgaactttacttcctaagaaagtgacgtttacatattgatgtgccaagctaaggacaataatgatggttatatgtttagttatttttcctgtgattttctccatttgatgca

SEQ ID NO: 111148 - DNA, 1112 bp, Homo sapiens
actcctggccacaagcaatccacctgtctccgcctcccaaagtgcagtgattacaggtgtcagccaccgtgcctggaatctcctataaacttattcttcaaactgattttgtgtgttttgaatattttttactttgtagcataatattaagctctcagattttaactccataaagtgtatagtttgggttgaaggatgtgtttgtttatactgttttttgttagttagttttagcatggtaaagaaattctgtttgtgaatatgtttttgtgaaattgtatcctttcaccttatagtgtactttatattcttccttcagaataccttagctcataacaaattttctaatcagtaactattgttgcgtataagtattttcatgttagatatacctgatttgagagtgattattttgccttacaattaatgtttagcaatctttttctgtgtagatttaatgatattcatgttcctgtgagattagaaagtgtgaaatttgccagtcattgtttaatgaatcacccagatttagcgaaggatctcacaggtaagctagctggtttattacacatattagcataaccatacaactatattgtagatatgacttgtgacctaacttcactttccaagtaggttttaactctggtatggtctcgtgttttcatttgttgtgcactaagaaatgatttcatgttcatgtaataaaattacatttaaaatctctttatttgtttgtttgtttattttaagagaaaggctttcactcctgggctcaagtgacctctcactttgagatcccgagtattacaggcgggtgctacaatgcccagcttaaaatcttcatattttaatcctttgaaattttttgaaaatcataatttaaggaagtagtgtatttcttaagacattggatttgggtagaaatcattatgtctatttaattaaatatagtggcatttaataataagtgggaacatgattatcttctgcactagactagaatttttcattcttttgaatctagagcatttaaatctacctttttggtagcagcacataagtggtttttatcagcaggctgttatttaccaaaaagaacaggggaaaca

SEQ ID NO: 111149 - DNA, 1599 bp, Homo sapiens
gattcttgcattgctattaaaatgagtttccatgaatcatgaaattctgtagtgtcgtattctccagtcgtaggggatccttcattaaaactttgtgtatcagccaggtgcggtggttcatgcccataatcccagcactttgggaggccgaggtggttgggtcacgagatcaggagttcgagaccagcctggccaagatggtgaaaccccatctctactaaaaatgtgaaaattagcctggtgcggtggtgggcgcctgtaatcccagctactcgagaggctgaggcaggagaatctcttgaacccgggaggcagaggttgcagtgagctgagatcgtgccactgcactctagcttgggaaaacagtgcaagactcctcaaaaaaaaaaaaaaaaaaacaaatttgtatatcaaaactttaattgatgtgtgtttatgttggaacgtaaattgcagatttcctataaagtaagcttattagggtggtaactgtaactttgtccttcatagatgtttttatagggttcttaatgttagaagtgaattgtatgtctcatatttgtacagtgtccataaccaatgtatagaatgcaattaatcagtgaagtagacataaattagcagttgggagggtgtgaaataagagcaaaaacccagatgatctaacatgaaattaaatcaatttctgcatagtaagtgaggacatatgatattttaaacttctcacagttataagcagaaatatgaaatagtatcttcttgagaatgtttcaagatattttctgtaatctggtgaataaagcttaggcttcactttctgttttcccttcttagagcaatgatggagaagagcgattagctgttgttcgacttctagctaaattgtttggctccaaagattctgatttggcaacacagaatcgtcctctttggcaatgttttcttggacggtaagagaacatataattctgatgtttatattttagaaaatagtcagtagggtgcagtccacttgattaaaactatacatatcaaaactttcattaatagatgttggtttcattgtcatctgtgtttccatccttcttatggaataaattgtatgaaaaattttttatgaagaaagcttagtattttatctgtgtaactctttttaacttctttgtgttaaaataatgtcatggccagccgtggtggctcatgcctgtaatcccagcactttgggaggctgaggtgggcggatcacttgaggtcaggagttcaggagaccagcctgaccaacatggtgtctctactaaaaatacaaaaattaaccaggggtggtgaccggcacctggaaccgcaactacgcaagaggctgaggcgggagaatccttgaacccgggaggcagagtttgtactgagttgagttcaagccactgcattccagccggagtgacagagtgagactctgtctaaaaaaaaaaaaaaagaaagtcattagaataaataaacagcattgcagtatattctaagtcttaagatctttaaatcatgaaactgaatacatactgatccaaatttaagaacctgtgccatttgtcagcctaccaacttttt

SEQ ID NO: 111150 - DNA, 1015 bp, Homo sapiens
tctcataaaaagaaaaaaaaaatcaaagattgagactttgtaatttttctctgctacaaggaaatttttctaaaatcctttgtaatgaactacacagactgtctaaattgttttaatgaaaacaaagattcctagaaatgtccttatttgaaatacacccaacaaaccaatttttttttgcttttctccttgtaacattcatgatttgatattattaggaaattatttcttctgctgtttagatgactgtcctattatatattagtaatcacacacctgtttgtatcacctccttcaattgtatatgtaatacctaattaaattatttataaaaaatgtttattaaaaatgtatccatgtttttaaatgaactggatgttttctttttgtttttaatatctcttacagtttttcaatcaagtcctggtgctgggaagatcatcagtaagtgatttgtcagaacatgtatttgatctgattcaggaactttttgctatagatcctcatttattattatccgtcatgccacagcttgaattcaaactaaaggtaagattgaccagttttctttttttttttttaatttttttgtttctagagcaggcacaatgtaaaattgaccaattttcatgccctttaaactttccaggaaaaatgtataccgcataatttttctgtaactgtagaagaataaagtgtgacttcaatttatctttttttttctttttttgagacggagttttgctgttattgctcaggctggagtgcaatggcgcagtctcggctcactgcaacctttgccccccaggttcaagcgattcttctgcctcagcctcccgagtagctgggactacaggtgcaaaccaccatgcccatataatttttctatttttagtagagatggggattctccatgttggccaggctggtctcaatctcttgaccttgtgatctgcccacctcggctgcccaaagtgctgggattacaagcgtgagccaccacgcctggccacaa

SEQ ID NO: 111151 - DNA, 1344 bp, Homo sapiens
agcatttcaaaaatacaattgatcaagaacgctttttatttgaaacgcttaccaggtctactcttctccagagcacgcattgattaaacaatgaaataattgagcatgttgtgttagatcagggagtgtatgtgtttaagatacgtgggtgtagttgtcagtttacattggttaacagataaaaccaaaaagcattaggtctgttttgagtttaataaaacaatatagtgttgtgcttttgctaactaacccattttagtttttgattaataaattagttcgatttgcaacgtctgcatttaagatcacttgactagaggatatttggcaaaaccttgaagagaactcagttatttttatttttgcttcatattttagtgaagcaaaattcatattttattacagatttgaagactacagtattctaatgttactatctcataaattaacatttatttgtaactttccatgtttttattatttttcagaacttaaataaacagtcctttgaccttgcaaaagtgctattgaaaagaacagtccagactattgaggcatgcattgctaatgtatgtatttctttctatgtttattctatattttgtaattcttaatccattgtattaatttattagaacctcttacataaaagtttatttagcttataaatataaaataacttatgtccagatgtgaccagggttagagaaatgcagcataagtttcatgacgtttttaaagggtggatattactataagaaaagtcgtctgcaactcccatccccttatctgcatttgtatttatgtttatttcattgtctcccagatatgctgatctctttcatattttccttgggtctctgtgtctctctctatatatttttttctttgtttcttttgggtcattcttctgaagtcctgtaatgtttcttccttttttttttattttatttttttaagattacagagatttatttagaaaatggtttggttgttttgcctgttgtttttggcaaagatttaaatacttttcagtaatgaaagattgtgatagttgctacatagtaatagttaaaaaaaggtttactgaggaatttgttctgggtttgtttttcctaaaaaaatcaataatttggaaaaaaaagtttgcaatctcactaccttatagcaactaattccattgttcatttgctcatatttataactattttcccacatactttatgaaaaaaaaattttttttgagacggagtctcactctgtctctgaagctggagtgcagtggtgcattctcggctcattgcaagctccgcctcccgggttgacgccattctgctgcctcag

SEQ ID NO: 111152 - DNA, 1037 bp, Homo sapiens
gaattccaggtgcccgccaccacgcttcactaatttttgtatttttgtaaagacggggtttcaccatgttggccaggctggtcttgaactcctgatgtcaggtgatccacctgcctcagcctcccaaagtgctgggattacaggtccgagccactgtgcccggcctttttcttttctttttaaaaaaaagtgaatggaagaaaatgtagtttattagaaattaggtttgtctttgtttttataaaatacaacagtaccttacaactgttgtaatagtcaacaaaaggagaaagaaaatagagcagccaaaatttctctgccattattggcactgtccctcaagtgaaaatcctttacatgtgagattgttgttttaaactaggacgtttaatttcctattagaagcttgaattctcttcttttcctcctcctactacttattcttttttttttttttttatagcaatagccacaataagaaggtacaaatgcacatgctagatttgatgagttctatcatcatggaaggtgatggagttactcaagaattattggactccattcttattaacctcattcctgcacataaggtctgtaaagtatgaagatattcaaggttaatgtttaacagtcacgccacacataagaatgaacagttgttttatggccatttgcaatcccatgtaattgttctcatgaccgttctccacctcaaataaaataacatgcattagtcttgtggctattatttttacaaaatatattgattaacatatcatgtaggagtttcattcatttaagtgctgttttctggaaactgaaaatgttttgtattcacacaaataatctgagaattgtaaggggttaggggtgttgccttttggttaactttgtttggaaaagaaatgtatttcctcctttttaacatagatgtgaaacataggagtttggatttcttttcagaatccgtatcgtacctttttcttaggtactctcagaaaaagatttgggcagaagctatatggttaatgttaaga

SEQ ID NO: 111153 - DNA, 1260 bp, Homo sapiens
tattctgatggaaaaactgtagattatttgaaactatatcttttgtttgtatctatttctttctttttttttttttgagacgtagtttcactcttgttgccaagactggagtgcaatggcgtgatctcagctcaccacaacctccgcctcccaggttcaagcaattcttctgcctcagcctcccgagtagctgagattacaggcatacaccaccacgcacggctaattttgtatttttagtagagacggggtttctccatgttgaggctggtctcaaactcctgacctcaggtgatccgcccaccttggcctcccaaagtgctgggattacaggcgtgagccaccgggcccggcctctatctttttatttttatttttttctattctaaaaacagatttttactgcttcttaaattttgtatggaaatatatctaccaacttaaaaatattgagtatttttcagtttgagaaaattgatgccatcaggtatatatctttttcaaggtcagaatatgtgattaacacttaaaattttatatgttgagtctttatagactttaatatgtttctaactctaaaaattaattttttactgagttttttattatataactattctgtatatatgtataattcaataattatttttatttatttaagaatttagcttgggttaaatcatataacatctgctttgaattggaagattgcaatgaaatttttattcagctttttagaactctcttctcagtgatcaagtaagttattttttaagcatttctgtttgtctctttttcttgattatgtattcagatgttgtatactctacatgtacactaagatatttcagagttataaggaattgttttccttagaaaacttaacataaaggggaaagtaaaaattctgttgtccgaacactgcctttgaccttatactacgaattttaaattatggtaccaatttactggttggctcttcagtcgcccaggctgtcctggaggccatggaccagtagagaagtataaagtggtgctcttgttttgaagggacttactatctaatagaggcaaccacatatggttgtaaagcaaatcgtctgaaaccttacgttaatacaatgaagtattaaattatgaggtagaaattatgcatattgtatgtaccattagttctgggagacgtaatagctcagtctttaagctcactaactttgacaacttcttattctagacctagaaaaaaatcttaaacattgc

SEQ ID NO: 111154 - DNA, 1092 bp, Homo sapiens
gtagtgaaaacctttatggatatggatcaggactcagaagatgaaaaacagcagtatctcccactagccttgcatcttgcatctgaattcttcctcaggaaccccaataaagatgtgcgtctccttgtagcatgttgtttggctgatatctttcgtatctatgccccagaagctccatatacttcccatgataaacttaaggtaaatacagcctttttcactttattgtatttttcattcaccactgttcagaaggtatacttttatttttatattttacctttatgaacataggtttcatattagtctcttcatcttaagaatatattgtaagttgcaaaattattcattcagttagtatttccacaaatgactgggttgcttggttgtttgatttgaagcatagaaaggtatagttcaaaactagtccctgtatgctcaaatccaattttctggctaattcatcacaaaagcccagatagctatgttccagggataaatagcagattaatgatactttttaaaataatagcataccagaatttacatattcatatgactattttcccctataagttattcagcatgcaaaactatatgctcatcttggttgttctgcctttgttcaagtgtttgtggaactcttaacattgatctcttggggagattttgtattttgaataatttcattcttggcaaattttaatcctgtagactgctttctttaaaaatagtcctaaaatcattttgtattatattgatactactgtgagttaaaatttctaaagaaagcttattaagaaatgaaagactaccatcatgaatcatagaaccattggactagtctgttgccttttttcacacacaacttcgtaatcatacatcaacttcaaaacattggctaaaaattactatttacttgtaggtaatagtaatggaaatactcatatccaactccttaaaatgaagatagtttttgccccgatgcaaggtggagatagtgagtaaagtgaaagcacgatagtagaagaaattataatgagatatagagcctgtggtccgctctgaaagagaaagcctaaagatttatag

SEQ ID NO: 111155 - DNA, 1031 bp, Homo sapiens
ttgacagaaggtacagacttttcataattcaggcttaaagtaagatgatttaagtctatacgttcaaaggagtttaagagtattatggccctttttatgaggtgtcagctaattttgtttaagcatggcagtcctaaggttaaggttttaaatttcaacctcatgtttgttagtttttttggtttctgttccactgacatagattgtggccagaatcttaacaaataagtaatattcttcttgtaggaacagcttgaagcagtggttctgagtcagggcaactttgacctccaggagatgtttggcaatgctggagacattttggttgtcacaattggtgctagattggagtaggggaagaccagaggcagtgagtccggctaggaaactgtaaacagtagtctaggtgaaagacgttgaaatcttcaggtagggctatggcattggtaatagtgactaggaaatgatttaacaacttttcagagttagaatcaatcagaattggtgggaggtgagggaagcaacattgttgacaatgtttccaccttgggccacttggccaaatgtattttagggaatgagcttggcctcttgctcttggagcccagtaaatgtacctaatgttgcattttaatgagtacagtatttaaaatattcctgtggtttagttttcagactcttaatttggttctgcaatttgttgcctttttggaaggaataagacaacagttcctttcattaaaacaaatctgtgtgcggcggcgggatctcagctcactgcaacctccacttcccaggttcaagctattctgcctcagcctcccaagtagctgggactaccagcgtgtgccaccacacccggctaaattttttttttttttttttttttgagacggagtcttgctctgtcacctaggctggagtgcagtggcgcgtctcggcccactgcaacctccacctcccgggttcaagcaattctgcctcagcctctctagtagctgggattacaggtgcctgccaccacgcccagc

SEQ ID NO: 111156 - DNA, 1034 bp, Homo sapiens
gactaccccgggtccgaggctcggctgggcaagggcgttttgttcccggcagccgccgctgcgcgtgggtccgctgggtccctagttttgcggcctaagccgagccctataggcctcgggtctggtttcccggaggggactggccgggcgggactgggtgcttccccaccgccgagcgggggccttggggtccttgccggcctcccggggccgccaaacttcggaccctggtgctcgggggtggatttcattgtgaaaggcggaatgggaaactcctggcgctgttcggcggccacggcggctggtgcggaggagccccgtgagcctggggctggcagggccgggttggcggggccggcggggttcgatccctgggaaagagcgggtggcgaggccgctgccgggtccccggcctctggggagacagggccttttccagattagagagatttgaaatgaaaaaagaggttacaaagtcgcccctttcccgctgaactttggttttctgaccgatagaggccggtagaggactgtgaaccaaaagttgtcccccaggatggacttcaccgcgcagcccaagcctgccactgccctctgtggcgtcgtgagtgccgacgggaagatcgcttaccctccgggggtaaaagagatcaccgacaagatcaccacggacgagatgatcaaacgcctgaaggtaagtgtctggacggattttgatgtctttggtagaaggcgctttctcctgtgatactgctaccctgctcagtctggcctttaaagttccaagttttttagatctcttaccccctctgaaaggtactgttgtatctcagataacatctttgagtgagttttgtagggatataaccattgtgggaaatttaaaaggagtgtgatttttcaaaaacttactggttttcaagcataagaatttgtgtttttagagttttttctggaggtatttaatgagaatactgttcagagtggcttgcaaacttaggtgtaggcagtaatttgcctaagaagtttactat

SEQ ID NO: 111157 - DNA, 1112 bp, Homo sapiens
tctttatcgttttattgatttatttatttttaattaaattaattaattaattaatttttttgagacggagttttgctcttgttgcccaggctggagtgcaatggtgtgatctcggcttactacaacctccacctcccgtgttcaagcgattctcctgtctcagcctcccgagtagctgggattacaggtgtgcatcaccacacctagctaattttttgtctttttagtagagacagggtttcaccatgttggccaggttggtcttgaactcctgacctcagatgatcctcctgcatcagcctcccaaagtgctgggattacaggtgtgagccaccgtgctggccaattttatttatttatttagagagattggtggggcggcaggggggggtctcactatgttgcctaggctggtctcgaactcctgagctcaagtgatcctcctgcttcagcctcccaaggtgctgggaccacatgtgaaccactatgcctggcctcatccactgtaattcttaaccacctttctgattatgaatttattttcattggtactttatttgtggtaaagagatgccctgtactatggacctgtgtattccaggtacgaaaatggtaagtccaacattttaaagaagttggccttttggcttatgctagcttataacaagtacttatttattgattgatttatttgagacagagtctcgctctgttgtccaggctggagtgcaatggtgtgatcttgactcactgcaacctctgcctcttgggttcaagtgattctcctgcctcagcctcctgagtagctgggactgtaagcgcgcaccaccacgcctggctaatttttgtatttttagtagagacggggttttgccatgttggtcaggctggtctcaaactcccgaccttgtgatccgcctgcctcggcctcccaaagtgctggggttacaggcgtgagccaccgcgcccggcaataacaagtatttattgagctcttgtttgctaaataaaacacttatctgcaagatgcttacagactagtagtctcaacaagtaaatacaaaggtgctaagatagatgtctagggtgcattgggagctgtggctaaatca

SEQ ID NO: 111158 - DNA, 1005 bp, Homo sapiens
cctaatgattttagcattcattgatgattcttgattagctatttaattattggttaaaaaatggtaattagttttgggttctgttgttccttatacatttagtagctagccaccttctataaagataaggtttctctcatcaactaaggctattttgttacctggaattagtgttctacttaaaggcagaatagatgcttagttactttcttttatacagactttttcagagtgcaatagtcacctccagtggcaataagtgcagtctttcttgtcttttctcttttgtcactttctttttggaatatcatatatattataaatattatagacatttttgactttgatttcttttgtgattatagtttgatgtgaatttgactttaatatataactttcctttcatagtaagaagacatgttggataacaagaagaggtgtagagtttgcatatatcaactgtggccttaatgagcatgttgacagcatcgatgctagacagacagtaagtgttattaaagttgtagagtatgaatattttacacataagatttttttttttttttaaattgagtcttgctgtatcacctaagctgaagtacagtggcgcaatcttgactcacttcagcctcaaactgctaggctcaagcgattctctcacctcagcctcccgagtagctgggactacaggtgcatgccaccacacccagctaatttttgtattttttggtagagatggtttttgtttttgttttgtttttttgaggtggagtttcattcttgttgcccaggctgtagtgcaatggcatgatctcagctcactgcaacctctgcttcccaggtttaagcgattctcctgcctcagcctcccaagtagctgggattacaggcgcatgccaccacatccagctaattttttatttttagtagagacaagttttctccatgttggtcaggctggtctcaaactcccaacctcaggtgatccgcccgcctcagcctccc

SEQ ID NO: 111159 - DNA, 1033 bp, Homo sapiens
tgagatcatgccactgcagctcagcctgggtgacagagggagactgtctcaaaaacaaaaacaaaaatctagagttgataagacctctgcttaccatgttggaatattatgatgataatcagtgagcaagtattgattagattttacatcaggttaaaattatataatagaggtagaagaatttgaaaaatgcatatattcatggtattgttaataattatttgttttgaggatgggagggggggatatatttgtttttacattgttcatttgagccagtccattcacatttctccataatatatcaaactttacttatgcattcttattttctatatccttttcaaatacaatctctgtttaggtcaggtatgtatatgaagatgctatacaaggttgtttaaactaatgtattaataaggaggctctcatgaaaaaaggaagatacgtaagattagatgataaaatagttaaacctgagcatcacttacagtagaatatgtgggattgagataaactggattataagtagaacaggtgattgggagatagtgtgagctgtatatatatatatatacacacacacatatatatgtatatatataattttttttttttgaggtggagtcttgctctgttgccaggctggagtgcagtggcaccatctcggtcactgcaaccactgtcttctaggttcaagcaattcccctgcctctgtctgggactacaggtacgtgccaccacgcccagctaattttttgtattttagtaaagacagggtttcaccatgttggccaggctggtctcgatctcctgatctagtgacctgcccgcctcggcctcccaaagtgctgggattacaggcgtgaaccaccgtgcctggcctatatatgtttttatacatcagaattttcttatttatttatttatttgttgagatggaatctcgcccggctggagtgcagtggcgtgatcttggctcactgcaagctccgcctcctgggttcacgccattctgctgcctcagcctccc

SEQ ID NO: 111160 - DNA, 1050 bp, Homo sapiens
tccacccacctcggcctcccaaagtgctgcaattacaggtgtgagccaccgcgcccagctaatttttgtacttttagtagagatggggttttaccatattgcccaggatggtcttgatctcctgagctcagagtggtctgcccacctcagcctcccagggtgctgggattacaatccaggtaggcgtgagccaccacacctggcctacaaattttgatatggtatattttcattggcattcaatttattatattttaaaaattttttcgagacttcatcattgacccatggattatttagatgtatattgcttggaaatttttatgttactgatttctagtttgattccattgtggttggaaaacatacctgtgtgatatcaattgttttaaatttgttgtggtttggttttagcttaggatatgatctatcttggtatgtgttctgttaatacttgaaaagagtgtgtattttgctgttgttgggtggagtgttctgtaagtgttgattagatccttaattattggtgttgttgagttctatatatttgctgatttactgtctagtttattctgtctgttgttgatagagtggtgttgaagtctccacctataattgtgaatttgtctatttctcctttcagttttagcttcacttattttgtagctctttttagtgcatatacatttagggttgctatatcttttttatttttatttatttatttatttttgagatggagtttcgctcttgttgcccaggctggagtgcaatggtgtgatctcagctcaatgcaacctctgcctcatgggttcaagcaattctgccttagcctctcgagtagctgggattacaggcatgcaccatcttgcctggctaattttgtatttttagtggagatggggtttctccatgttggtcaggctggtctcaaactcctgactttaggtgatctgcccacctcgacctcccaaaacgctgggattacaggtgtgagccaccgcgagtgcagtggcgtgatcttggctcactgcacctctgtctcctggg

SEQ ID NO: 111161 - DNA, 1661 bp, Homo sapiens
ttgtccaacgtgctgggattacagtcgcgagcccctgagtctggccagggttactatatctttttttttttgagatggagttttgctcttgttgcccaggctggagtgtaatggcgctatcttggctcactgcaacctctgcctcccaggttcaagcaattctgcttcagcctcctgagtagctgggattacaggcccatgccaccacgcctggctaatttttgtattttagtagagacagaatttcaccattgttggccaggcccgtctcaaactcctgacctcaggtgatccacccaccttggcctcccaaagtgctgggattacaggcgtgagccataacgcccagcccgctatatctttttgatggcctgatcctttatcattacacagtgcctttctttgtctgtgataattttctttgctctgaattctgcttatgtctgatattaatatataaatgtacttttatttaattgtaattaatttaaatttaaataggaacatatggctggtggctgccatattgacaatgcagttctggaaggtggagagagctatgatacaaatttaattaaaaggtaaattttataacacaatagaagatgataagggcaatggatagttagcaggaaaggggagattggggcagagggagcagggtatatgattttcagttggataatcaatagagaaatcattgaatgtgacacttgaacaaaaatttgaaggagtacaggagttagccgtgcagatatcttgaggaagagtatatcaagggctagcagagagatacgtcattgtaagaactttagttttttctctgagtgatatggagaacatataggggtttagatcagaccctttttacatcgtataaagctcagtctggctggtatattgaaaatagactatagggggacaaagttgcaaacagggagaacaggtaggaggttggaatatggttgaaagatgacaggtgtcagacccaatgattagagcagattttgggaaatatattagacatttagttttggatatgttaagtttgaaatgtttattagatatattcaagcagagaaaacaagtagactgcctgtagttctattccaggtatgagtccctgcccttgtggagcttacactttattggaatatgggtggtaaatacaatacgtatgtaaaacatatgctatgtaagaaaacaataagtcctatggagaaaattcaagtaggaaagtgggataaatggtgttggggctctgaggtcctgagaaggtaacatttgaataatgataagaaggtgataaggagatacttggagaaaagtggttcagtagagggaaccaaggtgtaaaggttcccaggggagaacattgctggtgtgtttgaagaagagtgaggagacttaagtgtggctaagggaaaggacagtacagaggtaaccagtgtccaggttatgggccattttaagggctctggcttttgtcctgagttagggagctagtggatagtttagtagaagaaaggcatgatccaccatgtggtttaattgagtcacgctggctttggtgctaaatagactgaagcggcaagggtggaaaccaagagataggagacttatagtaattcaggcaagaggctgtggtagctaagtctagg

SEQ ID NO: 111162 - DNA, 1136 bp, Homo sapiens
tttaaaaatgaaaaaatgtattgaaatagtgtattcattgttctgaaatacatattgttaacatcttaatttttaacatgttcaatcctggcaaaacctgcatattttgaagagagagaaattgactactttttagctctgctgttagagttggtggtactttcttagagctaaataaagatgtcattccgattttagaaatggaaatatatatagtctgagtgtttttaattgctttctattttaggtctttttactgctggattgtgcaagatatttaaccctattttgtttgaattatgacttaaatgtcaaacatcttaactaagaaaagggaaacattttagttttggaagtcagaatgccaaggagaaggaaaaatcttgggggaaatccttttcggaagactgcaaaccctaaggaagttgtcgtatccagtgttgctagtcgtgaggagccaaccactactctaccttccatgggtgagacaaaagttgatcaggaagaactcttcaccagtatctcagagatattttctgatctggatcctgatgtagtgtatttgatgctttctgaatgtgatttcaaaggtgagaaaaagtttagtttgaaccctgtccatcttataagaagactttgtgtactatgccatgattaatagtaatatagaaaaatgtcttgtttctattttattcataatttattaatcatctgctgttggcaagttactaaggttggtatttgagttggtatttgggatatgaagaataaaacatattttctgctcttgagaaatgtgcagttctaggtgtaaggtatttgtatagatagcatattctgtctctttcatcttcactctagaacagactggcactgttgacacttcaggctacataatcctttattttgagtggctctcctatgcattgtaggtttagcagcgtccctggcctgtacacgctagatgccaatagctccttaccacccagttgtgacaataaaaaatgtctccatgtattgtcatttgtcccctgggaggcaaaattgtacctcgttgagaaccactctcctagaatgtaagctccataaagacagagtttttaaaaactttgttttactcctgtatcttcagcccg

SEQ ID NO: 111163 - DNA, 1343 bp, Homo sapiens
gctggtctcgaactcctgacctcaggtgatccacacgcctcagcctcccaaaatgctaggattacaggcgtgagccactgcacccggcccatgttttaagattttaataggaataaaattgcatttttcctaatttgtgtttttttaataaagaggaatgttgaacatttttgtacatgtttgtttattcttgtattcttgtgtaaattgttcattcattgaaaaaaaatttttttataccatggttttaatttttcccagcaatctgtataaggactttttttaatgtgataagtacctatccattttgatctttaatttacttagtgtaatttttcattgtatagacattaagtttttagttgatcttttctggttttactgtcatgtagatttttttcatagaaatactccttacgtttgctttcttttttttcccccgtccctgcccacccccgccacctttttttttcttccatttttaggttttctgtcctttgtagtattgctatgatctcctaattggtctctgccaggcttgccccctccaatccctctttgtttttcttcttaagggaacttaattgggtgcttactaggtgccagttcttgtgcacagcactttttcatggattatctcatttaatcctcacagcaacctatgaggtaggtgcttttattatccccatattacaaatgagaaaatcgaggtttaggaaagttaacttgttgaaagtgtcatagccagcagtagagatttaaatgttggtgttctgactccagaccagagctgttacctactctgctgtgctgtttccagacttatctttcttaaaacagcaagacaaaacacaaaataaacaacccctccctccaaacttcagatgcttaaaaattcttattttgtttttttttttggtttccttttttttttgagatagggcctcactcagtcgcccaggctggagcgcagtaatcactttcactagaggctcactgtagcctcgacctcatgggctgaagtgattctcctacctcagcctcctatgtggctggtactatacgcacatgctaccacactggttaatttttgtagagacagggtttttccatgttgcccaggctggtctcgaactcctgggctcaagcgatctacctgcctcagcctcccaaaatgttaggattataggcatgagctgccacacctggccttaaaatttctaatggctccctatttgtgttataacagaacgagctcagcattggagtcagatataccagtcctggctctgtcactgactatctgtgtgacttgggtcaagttaatgtactttttaacttca

SEQ ID NO: 111164 - DNA, 1009 bp, Homo sapiens
tcactaccacctctgcctcccgggttcaagagattctcccacctcaggctcctgagtagctgggattacaggcatgcgccgccactatgcccagctaatttttatatttttagtagagatggggtttcgccacgttggctaggctggtctctaactcctgacctcaggtgatccacccgcctcagcctcccaaagtgctgggattacaggcatgagcaaccacgccaaaaagtgtgcattatttaatctgtattatattacagtgtaattgtctctaatataattgttttaaatctctattagattgcaaagttctttgagcatattaaagatttttttttacaaaatatttctgatatgcagtacatgctcaaatattctttgtagtaagtgaaattcatagcgtggatcatgtaaataagttagatttactaagagaatacataaaatacttaatatttaaaagtttgcatgcaataggtaagtatttgttaaacaacaggctttaggacttttataaataagcctaatatgtccaattacagatatttatgtatttactcaattcagcaaataatatttatttgatgatagtttattagcttggtttattactgttttcctgaaagaataggattgcatgtctccatcattcagactttttgctactacagactttggtatgttaataaaatattaattttttaaaaataacatgaatattgtacatttatattctgttcaatgcaaaatccaatataattttagctggattttaataaaattattaaatctgttttctctgtctatatttttgttgttgttattattcttgttgttgtacagttgaaaatgctatggattgtctattagaattatctgccactgataccaagatagaagaatcatcttcacaaagtttcgttgcttctgagaaccaagtaggtgcagcagaaagtaaaataatggaaaaacgtcctgaagaagagagtgaagattcaaaaatgga

SEQ ID NO: 111165 - DNA, 1025 bp, Homo sapiens
aaatctactcgggtctctgatgtgtttctaccttccgaagggttcaacttcaagccacacaaacatcctgaactgccaactaaggggaaggatgtgagttactgcccggtacttgctcctctcccattgctgttgcctcctccgccacctccaccgatgtggaatccaatgattcctgcttttgacctcttccaaggaaaccatggctttgtagctcctgttgtaaccacagctgcacactggagatctgtcaactacacatttccaccctcagttatttctcacacttccccaacaaaagtatggagaaataaagatggaacaagtgcttatcaagtacaagaaaccccagtttctcaggttgtaagaaagaagacatcttacgttggactagttcttgttcttctcagaggtcttccgggatctggaaaatcttttttggcaaggtatgaggtttgattgggtttttaaaaaatagtataatgtctgaatttgaacacaagtatgaataaataggcaaaatgctttgcttagtagagatctttagtaacccctaaaatgttttctttttactaaggtttcctaactttgtgtagctaataacactgttttctgtggaagtttattgaaaccgttcatcttggaatatctctttgaaagacagaagaaaaaattaaagacaatttcaaaattgtgagctattgatgtagtagtagaagagagctaatttgagtgggagaaagatgagttcagctttgatcacagagttaaagagatataattgatcttgatttcatggaatggaagacttaaatacattaattttactggtagttggaaattcaggattatagagtgttgttaaataatgcttttagaaatgtgtgatttgaaggaagagagtataggatgacaactggtagtcagagaacttcaagttttcagggacttttctgttccaaaatagagtaccatcagttatttgatctcatatatacacctttatcccttctgtagttaaggta

SEQ ID NO: 111166 - DNA, 1040 bp, Homo sapiens
aatatgttcttttatttatctctttgtgtttaattttttttcttttttgagagagggtcttattctgactccagtgcagtggtgcaaccttggctcactgtaacctaaaccccctgggttcaagtgatcctctcaacttagcttcccaagcagctgggactataggtgcacactaccacacctgcctaatttttgtcttttttgtatagttgggttcttgctatgttgccgaggctgatttttactcttttattttatttatttatttttttgagatacagtcttgctctgtctcccaggctggagtacggtggcgcaatctcagctcactgcaacctctgcctcctgggttctagcaattctcatgcctcagcctccctagtagctgggactataggcgcatgccaccgtacctggctaatttttgtatgtttagtagagatgggatttcaccatgttggccaggctggccttgaactcctggcctcaagtgatccacaaaatgatagtacttgaataatttattttgtttatgactttggaaaaattaggagagaaaatttagaagaaaaggtaatgaaaattatttcatttatctttcacaggactttgcaagaggataatccaagtggagtcattcttagtactgatgattatttttatataaatggacagtaccagtttgatgtaaagtacttaggagaagcacatgaatggaaccagaatcgtggtaagaacagataatcagattctgggtaacgttatgagtaatacaaagaaaaaattcacttagtatttgtttgtgtgtttgtttttgttttttgagacagggtctcgctgtgttgcacaggctagagtgcagtggcatgatcttggctcactgcagccttgacttctgggttcaggtgatcctcccaccttagcctcccaagtagctgggaccacagatgtgccaccatgcctggctaatttttgtattttttgttgtccagcctggtcttgaactcctgggctcaagcaatctgcctctcttagcctcc

SEQ ID NO: 111167 - DNA, 1229 bp, Homo sapiens
agcttttataattttaatgtaatttatttataaaattttcagaataactgttaagtgccctgtcaattaatgcttctttaaatcatagtattgatggcagcattaagagactttctcatgatactctttaaaataatcttacagcccaagagacgatgaagatattatctctgaaaaagaagaaaatattttatctttatctttgaagcatctagagttcactgaagagaagaatcttgatgtaaccaaagaaacaatgttacctgagaatgttgcatatctctctaatgcagatttaaacaaaagaagaaaagaaataagtgatatgaatcctagcattcaaagtgctttaattctggaaactccacacatgtatttttctgactctgaaagcaaactacaggcaacagacaaaagtgaaaacgagcaaatagaaatggtggctgtaaaagggtatagtaaaactgacacagatagttctatggagagagtatcacctagtacttgctgtagtgaaaataatcaagaagactgtgatcttgcaaatagtggaccacttcaaaatgaaaaatcctcacctggtgaaatagtggaagaaagagcaacagtaacgaaaaaagcctttgggaaacaaaaaagcaaatcgactttggaaaagttcccaagacatgagctatcaaattttgttggtgactggccagttgataagactattggtcagaggacaaaaaggaacagaaaaactgaaaaaacttcatccgtacaaagcgacaaaaagtataattaccctcagtcacacaaattagttaacagtgtatctgtgaatacagattgtgtccagcaacgaggatctccacatgaaagtgtagaggatggcagaaagtcacagtgtgatgatgcttcagagccactcaatagctataaatatgatgcttataaaaatattgacaaaaactcattcaacattatgggtgactggccttcatctgattctttagctcagagggaacacagatcaagaatgccaaagactggtttaagtgagcccaacctagaaattggaacaaatgacaaaatgaatgaaatatccttatctacagcacatgaggcctgttggggcacaagctctcaaaaactaaagacattgggtagctccaatctaggaagttctgaaatgctgctcagtgaaatgacctgtgagagtcagacttgtctaagtaaaaagagtc

SEQ ID NO: 111168 - DNA, 1148 bp, Homo sapiens
ttccaaaaatcgtgtgatggatcacaaattgggcctttttctctggggttgaatttgaaagaaattattagccaaagaggaactttagagaattctaattctcctgtgccagagtttagccatgggattggtattagtaacgctgactcacagtctacttgtgatgcagaaagaggaaactcagagcaggcggaaatgagagctgtcactcctgaaaaccatgaatcgatgacaagtatatttcccagtgctgctgtgggtctaaagaataataatgacatacttcctaacagccaggaagaacttttatatagcagtaagcagtcctttccaggtattctaaaagctactactcctaaagatatgagtgaaacagaaaaaaacctagtagtcacagagactggagacaacatacattctccttcacatttctctgatatttttaactttgtatctagtacttcaaatcttgaattaaatgaagaaatttattttactgattctcttgaaataaagagaaatgaaaattttccaaaggattatgtgaaattttcagatgaagaagaatttatgaatgaagatgagaaggaaatgaaggaaattctaatggcaggaagtagtttatcagctggagttagtggggaagataaaaccgagatattgaatcccactccagcgatggccaaatctctgaccatagactgtctggaattggcattaccccctgaactggcttttcaacttaatgaattatttggtcctgttggtattgattcaggtaaggaaaaagtaaatgaccatgtgtgtgtctttgtgtgactagactacagagggttctattttgtattttttttttttctgagatggagtctcgctctgttgcccaggctggagtgcagtgcctcaatcttggctcactgcaacctctgcctcccaggttcaagtgattctcctgcctcagcctccagagtagctgggattataggcatgtgccaccgtacctggctagagagttctattttgattgtaaaattatattctatgttaactgaaatgcaaaagtaattttatgttgcctaacttcacatagtgccttatttttgacacatttctggaggactttaaaaaatacaataggaagaaataga

SEQ ID NO: 111169 - DNA, 1050 bp, Homo sapiens
tgtggaacacctagggtatgctctcaaagcatttcctgttgaggttttgctctgcatgaaagaaaacttttggtttgagagcaacagagtgttcatgtgtttgatcaagaacatcattgaaatattacttggttattcaaagtttttattgatgtcagtattgttagaccacaaaacccagcctgctttttggtacatcctgccaacttgaaaatatttgattccagatgacttctcttagatagtgttgtcttcagtgactgttgcagggtggcagacctgttattaagcatcctccttttgtgcctgagttcctccacatgcctctgttgtccagtccacactgggaccaaggcaaggagtttcaccttgaagattcttaggatccactttggtccagacctgtgctcatgtcatagcctcaagagctacagctgatgtagggatagaggtgcccaaaggatggtgtgcaaatgccagtgtctattgtttcttcactctctaggacagcagaggaatgtatcagaatgtgttgatactcctctgagaagttgaaatgttacacattaaattctgttgttgtgaacttcctagaatgttcagttccttattttgaatatcatttgcccactctttattgtgtgccttcactgagttacaggtttgccaaagtaatcgatcttcttggtccttagaatgggtggccagagcagactgtagctgttatggttgctcacttccagctggctacaacttcctctatttaccagtgtcctgtatacatgtcactatgttttgggttgatatgatatgaaaaagagtgggaagcattgagtcagtttaaaattatacacagcctggccgggtgcggtggctcacgcctgtaatcccagcacgttgggaggccaaggcgggcggatcacctgaggtcaggagttcaagaccagcctggccaacatggtgaaacccccgtctctactaaaaatacaaaaactagccaggcatggtggcgggcgcctgtaatcccagctacttcggaggctgaggcag

SEQ ID NO: 111170 - DNA, 3795 bp, Homo sapiens
ttcaattatgaaacaaaaaaattatgatgtttttcaaaatgcaagtgaggtttgattttttactgaatcaaatgcaaatgttacctgttaaagatattacagagaaattttattgattacaaaatatgtaagaaaattatcagctacagttttaaagtttaaaatgctctgattgtttctcagaaaaggttacctttgtattaattgttgtatgacatttagtaatgtcctaaaagtcttttgtgagaggtatttaaagtgctttgagacctgattcatgccccccaaagggtggtattaaaagaggaaaaaggacatagtagtggtagtaaagaaaaaaaggagatctaacaaaaacacttgaatattttttattttcaaaactaaacacataaaatgcttttattttgccatatcctacaggaaggaagacatgcttttgccctttcttctgctttgtatatgaccttgatcttttaccttttgttctgttcttctgtgtgcattttatggaaagaaagttgggtctgagattatattgtaattttatactttctatagacagaaaggttttcagagaaaaagaaatggttaaatatcttccagatgttgctgccttatcgaaatgcttctagaactgtctgtataagtcgtatttcagacagtactaaatacttatattttatttttgaggcatgtaattttaaaactgcagtaggttaaaattctattaaacaaatatagaaaatattttgtttataattggcctggtgtggtggcccacgcctgtaatcccagcactttgggaggccgaggtaggtggatcgcctgaggtcagaagttcaagaccagcctggccaacatggtgaatccccgtctctattaaaaatacaaaaattagctgggtgtggtggcgtgtgcctgtaatcccagctacttgggaggctgaggcaggagaaccgcttaaacctgggaggtggaggttgcagtgacccgagatcgagatcacaccactgcactcagcctgggtgacagagcaagactccgtctccaaaaaaaaaaaagaaaaaaaagagaaaatattttggttataatcataagaagaatccttacaatttaaaatattttcacttttattttgaaaaagagccaactttctcaaaggaagctgtcattaacttctgttgtttggttagctaataaattctgttagtatgcaagttaaacctgtgtaaaggaggttataatgtggtaaggtataattttccaatatgagacaatggcttaaatttgcctttggagatggagaatattttcaacatacataattttaacaaatagttttgttgctttttgttaagcttaaaaaaaaatttggatcagaaattataggattgagctggtaccaaaagaatcctaaagtacagaatggttttccaaaagagcagacatttcaatgaaaataaaaccccaaaacattttttttatatatcatgattgcatgcttttaaaataaggaggcttatcattgaattttagttccataaaaatgaaaatacatgtttattatttagaaatggttagtgactggtattgaagtattattcacacttatgtttgtaataatttatttaaagaatgccaacagtttagcacacttttgtaatctctagaacagttctatacattaaaaataaacattaaaaataaagcagttcctttaaacaacttactatgaaactataattgttaatgaaataagatattcctatgtatacattagtatgatttaagggtatgaaaaacagtgctaaaatgtggagttaattggaatgtgtgcagctgcatactcactttctgtgtttttatatttccttacctagttttaaaaatcatcacttttcggcacttcagctagacttatttcaatattataattatgattaatgaaggagcagtcagaagtagaggtgtggtattccgtgggcagaagtcaaatgaaaaaagctatattgtttacttgtttactatatcaatgttaatattatgccttattttgataaatcaaatagtatatcttaatcattgttgataaatatacaggcaaagtttgagcatcatatgtatttttatgaagctgcttaattccaaattgcctcccaccccactatctagcatagtttaagcaacacataattttgaaagaaaagtttgtaatccctcctttcttttttttgcccatttctaaatcctgtatgcccgcagtaaagatagtttggggattttaaaagttttctctattacccatttctaaatcctgtatgtcaaagatagtttggagattataaaaattttcatgtattggtgtaggttgagtatccctaatgagaaaattcaaaatctgaaatgcttcaaaatctgaaatttttcgagcacagacatgatgctcaaaggaaatactcacagagcattttacatttgtaggttagcgatactcaacaagtaaatataatgcacatgttctaaaatatccccccaaaccccagcaatccaaaacacttctggtcctaagcattttgagtaggggatactcactcaacctgtatatttgtgctaatacatgactcattagaatgattctttgtaaacttaatattttaaaagtacagcacttctgtagtatggaaggtttcagtaataattatattcattcagtagtctcttaccattatctcccagatggaaaaagaggactaatgtggaaaccccagagggtgtccagttggaccagggagatattagacacttaacagtattttcagtctgtccatctctttattccaatgtgagaaatggaagtgtttttttttttacgtttattggctcttcatatttctctacattatttttaatgtgcagtttcttcaattggttagtatttccatactatttgcaactttatggcctttaaatataggacatattatatagcagaaattttgactttaaatcctcttgagtagtatattttgagaagaaaagctatactgctcttctggatggtttccatcctttatttaggtcttttctttttgaattcaagtgttttgtatgcttagaaagtagacatgtataatattgagatcggttatttctgagctggaaattggaaactttggaaactcaggaaattgctctgacaatgttttaactgctctcaatttaagaaaatgacgaaatgtataaaaaagacaaaaataacgtgtgctgttttttccaagtgctttttctaagtgcttttccattgtgcaatgaggtgaagtttggtaatttttcggtgtagtagttaaatattgctcaatttttatttacatgtaaagaaaacagatttaaatgtttatgtggccaaaaggtgtcatttaaaaggtaaaataagtttatgtagaatgtatgttcatggtgcttatttttaaaatgtaattcaagtttacagtattacttaatgcttctttacagaatttaatagagaaacaaggctagaacacatctacatcctgaagagccgtttataacttcatattatatgatgacaaagttcattattttccttaaagttgagcaattgacttttatggtccaatgatgaacttattattaataaatgattgagttaactgtgaggcttctcattaaaatacaatattgcagctatcagttggagaatatattataaaattttcagacagtatatcagaaaaatgtttttatttgtactgtatagaaaatgtaattttg

SEQ ID NO: 111171 - DNA, 1136 bp, Homo sapiens
ctaatttattgctttttttgtagagacacagtctcactatgttgcccaggctggtcatgaactcctggcctcagggatcctcctgcctcagcctcccaaagtgttgggattacaggtgtgagccaccgcgtccggctgccaagacatttttatcctcgtcaacccactgtccctgttgtttaattatacctaatagcttttgcaaatgagttagccatataaataattcacatgatacatattcatgtttttaaacacatgtaagccaggtgaccttggccaaattacttaacctctctgaaccttggttttctcataaaaatgaaaataagaaaaggactttcctcatgtgatcactgtaaggattcagaatgtggagagtctgatttagcacaaaacctggcatctgggaattataggaagccatcgagttatccatttcactactatctgaaatgccaaatcctgaatgtccatagcggagggaccactttgccaaatgtttacctggactctttctccagactcacaccaggttactgtcacacaccgtggtcatggaccccatttgagactagacctttgaggaaggactccttgagggctccataggcttccgttaaactttagatccttagaccaagaggcaacttaaatatatgcatttgtgacttagtccagagccaagacctcttaagacatttctatgttttatttttttaatttaatttaattatcttattttttataaatagagtgggggtctcattatattgttcaggctggtctcaaactcctgagctcaagcagtcctcccacctcagcctcccaaagtgctgggattacaggcatgagctactgcacctggccttaagttttatttgaccccagtgtagcagggccagaattaggaaaaatgtacatgcttcggacatttatttatttatttattttaattttatttttttgaaatggagttttgctctgttgcccaggctggagtgcagtggctcgatctcggctcactgcaacctctgcctcctgggtttaagcaattctcatgcctcagcctcccgagcagctgggactacaggcatgcactatcatacccagctaatttttgtatttttagtaca

SEQ ID NO: 111172 - DNA, 1037 bp, Homo sapiens
ctggtctggaaatcctgacctcaggtgatctgctcgcttcagcctcccaaaacgctgggattacaggcatgagccaccacacccagcagcctttaaacttccatcacagaaacctgaaacgaataggcagagtccaaagctccatgttagaggctggaagttctgaggcctgcaggaacaagtgagagcccttgggagccaaagcctggccctcaagtcccgacttgcccaaagccatctgtgtgtcttgggcaaagaggagagtcagtttcttcatctgtaagatgataggattgggctaaatcctccctgaggtccccttcaactccaaaaaatgggagtccagtaaataacagagaagccggggaaaatgttctgccatgttgatttaggtttgagctcaatgaaaggatctacactaacaagagattaaaaaaaaattgtatgggtttgcatgcagtatccagagaagtaaggtaaatacagtttgaggcctggatttatggattatttccttctttctgacttttccatttgttaaacagagatagcatcaatatctgtttactcaatgaatgcctagcagacaaccacacagtaagtgggttcagttaaaaaaatatgctctgacaataagggtgaaaatagtgacagccaaggcttggatggaagacctcacttctggtcagtgagtgcatgtgtgtggcctggatgagccatgtcaccctcctggacctcatctcttacactaacacctcacagggtcatccagagcatcagatgaaagcatcatcgaatggaaaaaagggagtttggagcaagagatctaagtacaaatcctgattctgccaagcattagttacatggtcacagatgagtcatttagcattcctgaaccttagcttccttgcctgcaaaatgagtcaagtaataataacccacagcattgctgtgatgtcataggagacagtgtacacaaagtactttataacctctagagtgctgaccaaatgctggcaattgttataataagacaa

SEQ ID NO: 111173 - DNA, 1158 bp, Homo sapiens
gtcccctcctccccagattcccaatcccaccgcaatgtttggcaagcctaggactgataagtagctctgatagaggagctggtggcttttatacttcttcctgggtttttgttggggtttgttgtttcgttgttttttgtttttttttttgtttggttggggaagtattgtcttctacgtgtgctattttcagtagcagagtaagcacaaggttttaatcgagttgcataagacacctttgcatagctatttaattgcccaatgtaaaactttaatgccatttctaatgcttttattcatttttgaagtatgagtttgtagggacaaagaatgtatgttatcgtagacaagacccccagagactcttttcagcagaaagttatgcttctagttgccttaccatgtttcttgcaaaactgtccatggtcctcaagggtgttggaaacattatgtttattaaatgggcctctcttcctttgctgtgcacttgatgggtgaactggattggggtgtgcacatccaggaggaggaggagagacctgtagaagtttaaagatagtttgtaaatatcttctaatgcttgtttttagtccttttatgttggagaagttcatggtatgtagtttaatgcaaaatgaaaccattttatttcaatgttattaaaaaggtttgttttattaggaagttaatgtattgttgcagtgttttgtgcctgtttaaaggcttttgtttagcagagtgaatgtaaaatacagtaaaatgttaagattgtcatctactttttaaaaaaaaatatcaacttggaattgttttttaaaggctcaatcaaggaagtgaggtgtgcaataaggtagcaagtaaaacgcagttgcgtttttatgtcatgttagagatccatacaattttccactcacgggatttttgttgatggctgaattcttgtggattcataagaggatcatgcccttagcaagtacttttgttttgttttaaattaagagattcccaaatgcctttttccccctcatcttgaaatgagatgagtttttatgtgtaagcaatatttatttaactattctataaaattattgagtgcctactgaggcctttaagcaccgctaacattcctttccatcattcttttaaatgacataaaat

SEQ ID NO: 111174 - DNA, 1034 bp, Homo sapiens
agcctggatatgggagtcgtcgcttctacttgttgagaagggaactccctttggcaagttacggtagcttaaggtttaacaagagaaaagaactgttaaataatctttaactatgtaaagttgtgtcctggagcctgaggtagaaattcctgtgggctgatagccagaacaattcatttacttcatacaaccccttgtagcttaaactcacaaccctctctgggccccatcgattggcgtctatttctgatcatccagaaaatgagaacattgtattttaggagaggcaccagggtggtggtgaagtatctgggcacaagaccagtggaagatatggttggaaaggcaggtaaaagatttgattaaggttttaggtatattttatcgaatggctgtaccattgtttagcttacaatcatttgtctctttacctttgattgagtctgtcctatttagaataaatgtacctacagttggagaaaaccagaaatagaaagattctttgtgtacacatttcatatttttgtttgtcctttcaacacacacacacacacacacacacacacacacacacacccccgccccacacacacacactcacacaaaagggctgatatcttttccttttgatctcttcttactgtaccttgacattcaatagctgctgtttgaatctctggttgaaatcataattttggactttacttgcagaaattctttgaattgggaggtcccactaaaagccaatcactccacatcttcactactttgcgtgggcatgaggaaactggggaatgtgctatttttttttaccatgtgtttttccttgaatcggtaatgttgaaatctgaaatacagggtggggaggatgtacacaggtctgagttctcagaatgaaaccctcaacagcacctgtttcttaaatagtggtgaaagtgaaaaaaaggcagtgcggctggtaatgagtgaggtgagtaggaaggaacaggcaggcccaactctcacaggcagtaggcttcaagcctctgatctca

SEQ ID NO: 111175 - DNA, 1095 bp, Homo sapiens
aatgaggaaggtggaccagcaaatccccttccaaagctaactttaaaaaaaattatttaatagtatatatatatgtattatatatatatatatgtattttatatatatatatgtattttatatatatatatatgtattttatatatatatatatatatattttttttttttttttttgagacagggtctcaccatgctccccaggctggtcttgaacccctgggctcaagccatcctctcgcctcagcctcccaaagtgctgggattacaggcataagacaccacacctggccacagttttttttttggcgggggggagggggtggtgggtagtctatgaatgtttttctttactgaaattgcagatacaatcctagaaactcaccctgcaagtttgcctcttgtactaagaagacatgcttaggatgcaaatctaggctgaaatagaatgttggaagcatctttaccagcctattaaagagcaaaggtgtagccacctgcaattaagactggggcagttaaatgccgagaaccgagggctgaggtctgcctccagcaccgtcactgttggttgctgatcatcttttgtgttgttattacaagcaggcagcataagaggccgagggcgaggtgcagctggcaacagagccccagggcctaggggttcctacctcgggggatattctgctggtcgtggtatatatagccgatatcatgaagggaaaggaaagcagcaagaaaaaggatatgaactggtgccgaatttggaaatccctaccgtcaacccagttgccattaaacctggtacaggtcagtatgaagcagattgagaatgctcccattcagcataaaccccagcccttctgtttgaagtgaatccaagcgtttttcaggctctcacatctgcacaggggttcctcttctcctaggcagctagagacaaggcaaaaataaagtgaccccctggacctccttatctagaacttcaggggatggtgtagctttgactatgttcaaatcaaacttgcctgagtaaggtttttttttgtttgtttgtttgtttgtttttttttttttttgagacagagtctcgct

SEQ ID NO: 111176 - DNA, 1068 bp, Homo sapiens
gacatcatggcatccacaggtgcatgcctgagctttgttccttggaaacaatgatcggaacaggagaggtgtcatgggagcctttgaaatgtgcccttctgaagtggagggtaataagtggcagcatctgccatacttctcccactctcgcaaagtgtgacttcattatttttttcttttctttacttttttttggacacagggtctcgctctgtcacccaggctggagtgcagtggcacaatcactgcagcctcaacctcgggggctcaagtgattctcccacctcagcctccgaagtagctgggactacaggcgcatacccccaggcctggctatgtttttgtatttttcatagagatgaggtttcgccatgttgcccaggctggtctcgaactcctgagctcaagtgatctgcctatctctgcctcccaaagtgctgggattacaggcgtgagccaccgtgcctagccttttttcagttcaggttttaaaccagaacctttatggcatgactaatcactgaaattcgtgagataagctggatgttgcaatagctgccttcttgggtttatgtgttgttctttcacagaatccatgcctgaatctgcagtgtgcaatttttaggcgccccatatgatcagtcctggtggtgtttcaacttttagccttgatacttcagttacactttctcttgcacttggcaatgtagccacatttgccacaggttgacttctgaaggtggtaggcttcagagccacagcggtggcacatcgtgtgcatcttattgcgatgctttccagacgatgacgttctctttgtcatttggcttctgcagctgagaccaaagagtgtgtgtagctttagagaaatgtctgttcagactctttacctatctttaagttgggttatttgtcttattcattattgagttgtaggagttctttatatattctagatacaaggctattatcaaatatacatctgcaaatattttctctcattttgtaagttgtctttcctttcttaatggtgtcctttgagaaataaagcttcccattttgacaaag

SEQ ID NO: 111177 - DNA, 1021 bp, Homo sapiens
tccttaccagagagatgggaaaaacactgtcttagctggggaagcatttctcagcagcattcagggagttcagtccacttcctccttcatgcttgacttcccttcaattcagaccaggctatattcatcaaatgacgttctggactccattttttgaacagaataacaaggacacatcaaacaaatttgctgtgggaaatgtgtcaacatgaaaacaatataacaggtgatttgtccaatgtgacgtacccacccttctcatccaagaagtgaggcagtccaacctgctttagacatatgtcagaaacagttacaaaatgctcaagcttggcctctgtaaattcattctattgagctgactggcttgtatggaggttctagaccatgttagtgttcaagtctacatggatggaaaccttcaagcaggccaagcaggagacaggtggaagaagatgtgtgcatttgagggcctcgctgtggggcttgtggtggtgttgagtgggtaattaatgtcagcatcagaaagggaattctgcctctggagaagaagaactaaaagactgaaaatagggccactattttctgagtttctgagctttatttcactcttatctgagcatctgttgactcttgagaaaagttgatcacacatttctaatagtgtattaaagtgtattggaagcttctgctcaccattgcaatggaaaaggcattagttagattagcttctccaccagagtgggtgcagcatttctaagacttactgatctaactctgccccaaatctctcattcttctgtccaggagctaccctgtgaacacagacatgtgttgtccaatatggtagcccatagctgcatgcagtgcagttatttaaatttgtttaaaattaaatgaaataattccttgtttgcactacacacatgccaaggactttgtggcacatgcgtatcagtggcttttgtattagacggtgcagacgcagagtgtttccatcattacagaaagctctgttggatgg

SEQ ID NO: 111178 - DNA, 1064 bp, Homo sapiens
caacctcagcttcccagattcaagcaattctcctgcttcagcctcccaagtagctgggctacaggcacgcgccaccacacctggctaatttttgtatttttagtagagacagggtttcaccatgttggccaggctggtctcgaactcctgacctcaggtgatccgcccaccttggcctaccaaagtgctgggattacaggcgtgagccactgcgcctggccgaaaacatattattttaaatattcattgaagtgtataacataaaggcagtaaactgcacgactgttaggtacacagcttgatgaatttttatatgtgtatgtacctgtggaaccaccacccagattaaggcacaaaatattttcagcatctcagtatcgtcgtgcctctcctcccattatcccctcaacccaaggtaaccaccattctgacttgtatcaccatagattacctttggctattcttacttcattaagatggaatcagacagtatgtactcttttgtatctggcctctcactcaaccctttatcggtgacgctcatccacatagtttcatgtagttataatttatcctgttgttgctgcatagtattcctttgtaagaacagaccacaacgcagagcattttcaggaattaaaaacatgactatatgagctgaaaatcattccctatctgtgccagctctttaaagttaagtgatatcttaaggtgggatggaaatattatgacctgaaagggtggaaggaaagaggtctgtttctgggagtgtatttgctaagtgctctatgttggctgtttaactgcagtaattaccctagaaggtgactgctgctgttttgtacatgaggaaactaagcatcagaaaagttttatgactttacagtgaggctgaacaaaacgtgaaaattgttagttacaccagagggcagtcccgtcctggcaaagacaatgccagaacgctgttgaggctccgccacctccgatttctgaggctcaggttttacgtactgcagacttttcttttctttttgagatgggatttcgctcttgttgcccaggct

SEQ ID NO: 111179 - DNA, 1072 bp, Homo sapiens
actctgtgatctgcaaccctgcctcctgggttcaagcgattctcgtgcctcagcttcccaagtagctgggactacaggtgtgctaatagtcgtattttgtactaataaaatagctggctaattttcgtatttttagtagagacagggtttcgccatgttggccaggctggtttcaaactcctggcctcaagcaatctgcgcaccttggcctcccaaagtgctgggattacagacctgagccatcatgcctggccatgtttatcactttctacatttcattatagcaagcggtaactaggggaggtcccctagttgggtgcaagcagattcatttttgtatttgcaaatcatgtaacacagtgaaattcatagccttacccccatactggatcataaaaatattttactttccctattttgtttactatcaagcctgagctcattaaatatatccagtggcctggatcaggatcatgtgaaaaacaggaccttggcttgcttacaacgtttgcatttgttttggttggtacagattcatttggataaattcccagcttattctcaaagaagattctagcgcagtaccgggctcccagtggcttttcattcatagtaatgagcattagccgagcgtggtgacgtgcgcctgtagtcctagctactcaggaggctgaagcaggaggattgcttgagcccaggaggtcaaggctgcagtgagctgagcggtgtctgtgcaccattgctgcattctagaattcccagcccagaactatgctgttgtcatgcctaggaaagcatccatgagaaaatccttttctgagtccgaatgccaattccagttctggttagaattccttgacacacacggcacttccagccttggttttcacggttgctgtgatagcagaacacacagctgtgaaacagagagaagatgagcaacagaaatggatgtgctaaaatgtgagatgaaaatatgcagaaaagccaaccatctttagaaatctcatttattcagggttcagtgtaagcctaataggtacaagctgagattttggagtctggtgggttc

SEQ ID NO: 111180 - DNA, 1077 bp, Homo sapiens
gatcacttgagctcaggagttcaagaccaacctgggcaacataatgagacctgtctctacaaaaatttaaaaattgtcatcccattctctactggaaaataaaaaattagctgggtatgctggcacgcacccatagtcccagctacttgggaggctgcagtgagagaattgcttaggcctgggaggttgaggctacagtgagccaagattgcatcactgcagtctagccagggcaacagagcaagaccctatctcgaaaaaataaataaataaaaacaagaggacctaacataatctgagtcaggaggtgactattgggaaggttgcttggagtttgaatggcattctaactgagacctggaggataggcagagggggattggagacaggcggcagtggctacattaaacagcctttgcaggggcccagtatggagagagtgttggggtcaaggaatagcatgagctatggggggaaagggaaagggagagggagaggcttcagagaacaggtgtctcttgtaaaatgaaaacttagtcaaatttctggaagaatctttaaaacctcttaaagagattgatttcagactgatgatcagatttttttgtttttgtggttcagacagaaatcttaccttgtgtatcagcattattccctagagttagagcccaagtattgctcccctgctaatcctttgaattctccccaaatctatgttcttaatttacctcacctacctccccaaggaaggtaatcagcttctagtaagaggtggttttcacagacaatgtgtccacatttctttgtctctgcatccttgatggcatccaggaaaggtgatcatcgacatagtcaatgtatgtgtacgattctcccaccaagggcaggatttaaaaaataatgctttaaatagaatgaacagaggcagctacttgaaccagctacttgactctacttgtgctttgaacgtgtgagattctcaggtttcaaaccttagtgctctgtgttgacattttctttttctttttctttttttttttgagacagagttttgctcttgttgcccaagttggagtg

SEQ ID NO: 111181 - DNA, 1082 bp, Homo sapiens
gtccctttgatcttggtaccatattcatgtttcttaagcagctaacatttagtcagaatgccaggtagaacttaggtgcttttcagtttggaaatccataccctttttcattctatcactccaaaaactgatgtgtgggctgcagactttatttgccaagggttaggtggacaggagaggtaaaagctgtataatgacatggcaccacctccatttgctgtaagcaaacagccaggtcctttattacccttgaaacaggcactcgtgacacaggttggactcaccgaagcaagtcaaatgccaggtttctgtgggtcaaagttccttccagcactgtatgttaatcagaagctcaaccttagttaatttggccattgcattgggaagaactttggaacaaatgattactgagctggactgcaggagttagcatagcccagtattttcttatccaagaggtacgttgtagtctttcttggaggggatcgcaggaatgagacatttgtcacagctttatttattcttggtggaacagtagtataataaaatcttctacactgaacctagctaatcaaaagtatttacttgctgtaatcccagcactttgggaggctgaggcgggtggatcacatgaggtcaggagttcaagaccagcctgaccaacatggtgaaaccccatctctactacaaatacaaaattagcccggagtggtggtgcatgcctgtaatcccagctacttgggaggctaaggtgggagaatcacttgaacccgggaggcggaggttgcagtgagctgagatcatgccactgcactccagcctgggtgacaagagggaaactccatctggaaaaaaaaaaagtatttacttaaaaatatgaaactgaattgttagagaatattatttgtgtataggcagaaaagccagctgtagagggcttccaaggtgaaggaacatttaaaactaacacaactcatagtgatttaaatgattttgaatttaatgtgcctctgcagaaagaattttaaatgaacataataatcatagccgcccttcattgaacattttctctgtgtgctagg

SEQ ID NO: 111182 - DNA, 1049 bp, Homo sapiens
tgatagggtgatttccatttcttttgcaaaaacaaatcataacttttccctgtttcttttcttttctatccttttctctttttttgagatagtcttgctctgtcgcccaggctggaatgcagtggtgcaatctcggctcactgcaacctccacctcccgggttcaagcagttgtcttgcctcagcctcccgagtagctggaattacaggcacctgccaccaagcctggctaatttttgtatttttggtagagatgggtttcaccttgttggtcaggctggtctcgaactcatgacctcaagtgatctgctgcctcagcctcccaaagtgctgggaatacaggcatgagccaccatgcccagcccttccttgtttctttaatgatggctattcccccttcccaggccagaattatggagataattgtctcaactgattatttcctcctccaagaaaagctgaagaatgcatagtgttaagcacacggggtgcttgatagcatagtggtaaggttcaagagctttgaagccaagcagtccatctgttagctacgagaccttggagctctcttagcaaagaagagaggaatgtctattgcgtggcaatctgtggtgcctgccaaaaaagatagaatacaaagattaatcatacagtaatactcagtcttcaacctcgaggtgctcttaaaggagcccatgaaataaaataataaaccatagaaaatgataagtactactaggtaaaaaatcaaggtagagagtgatagtacttacaaaagagatacagaaagaaattggagtggaaaggagggagacagtcaggagggcttcttgaaggaggtggccgggagaaacaaggatttgggtccatggaattcagagcaagaatattctgggctatgaggatagcatgagcaaaggcattgagactgatatatcaggttgcatatagggaacagagacaagagagtggctcggtttgaccacgaatgaagtgaaatagagggagagaagagaatatagggttgaggtccggttaggcgaggccttg

SEQ ID NO: 111183 - DNA, 1049 bp, Homo sapiens
ccaaagtgctggggttacaggcgtgagccaccacgcccgacccagagagatttcttaatttcccctaaattgaagggctagtaagtggctgaactgaaacaatttcctttaaggcctgttcttttcaccacaacttggggccacctggggttggcagttggactcgtagtttccaggaacagagagcagaggaaggaggccagtgcgggaagagtggcaaacagtatacatgataaatccacaatggaagccttgtaactaattacgtcaagccaacaaacaagcaagcgaagcttttttggcatgccagtttaaatccattgttcttttgctgcttttctgcttaaataattaaggctcttaagtacaaattaacctcaagctaacaaaaagagaatgccattgacttgattgagatgtcattgaaatcttttccgttgcgttcaggtagttttctgcacacatgaactttccatgagtggtcatggaatgatccagcatgtttttatctggacagggccagcggggctttctggtttgacacaccatccaatgtagaaatgcctctccaacattagcgatagtcatgatctgacaagcatgtgcaccaagaacttcccttgggccaggcactcatttatagttctctgagattgctgttaccagtgtctctattttacagttgagcaagtagactcagaaaggctaagcaacttgccctaaaacacacagctaattatagcaaagcagatccagattcaggtcttcctgatttggtatttggagggttcagttgctatgcttcttcattgcttccgtcctggccttgaattcttacggtgatggttacatcatcatttccgtgaggcacttgaggctgtgactggaaaggcttactaggaagatcttttttatgttcttctttctttttttttttttttttgagacggagtttcactcttgttgcctaggctagagtgcagtggcgcgatcttggcttaccgcaaactccgcctcccgggttcaagcgattctcctccctcagcctc

SEQ ID NO: 111184 - DNA, 1044 bp, Homo sapiens
caaagcctcctctttggcaatctttttgtgatttacatctaaatgtgtagccctctgtttgaaccattttgtgaatcgcatgccctacagataattacacttgactgacttatgttactatattgtttatcaccttttctactgtcatttaattataattaatgattttctgaaagtaactgtcaagacaaattttcttaactatctcttttcacctttgaggtttccacaagtgccaattgctgctacaggattccatttagattgttctcagctgcagagctcaattaggtatttttgtcttgacctggcatgaaacggaagtgctagagtcattgtttgagtctttaatttttccccagaacctttgtacaaatacttgatcttgcctttacaaagtggcaaaacaattctctgatctgtcatgtttgtttgctagccctggcttcgttctctcctttggacaattacctaggtttggcaaaattgcttttcgtggcctttggaggcacagttccctctctgcgttcatttgccttgtttagatccataattcactgaaaaaggcttcctcagttgctgttagaatcctgtggctactaggcttggggaccctaaaaccatcttgaaggtagtacagactccaggaaggttctttgcagtaaaaaaaaggcaatagtacataaagtctgctgagggtagatgaagagcctggatttagttatttctgactattgtcagtcatggtttgtggctgatttagaattatttggattttgggttttttttttttgtttgtttccttctaaattgatttggaagacatcatcacaatttgttgaggagttcaaaaaatacacagacaaattatgcctaataaacaaagagctaatgttcatagttctttctgcaaatcatcttatttcttatcatatgcactgaatgggacattagaaatgaataggggggccgggtgcagtggctcacgcctgtaatcccagcactttgggagactgaggtgggtggattgcttgagcccaggag

SEQ ID NO: 111185 - DNA, 1299 bp, Homo sapiens
tatattggaaatctctaccagaactccctcttcattttttaaggcatacatttgcttgttttcaagatcaagaattctgagctagctttaagtagcaaactgatttatatgtgcaattataggatgcattaagatgaatgatagcctttacatattgaaaactttgcagacgttttgttttgaaaatggcattgtatagtaaatgcaaattaattttgtaaaattatgttaaagagtatgttcagacactttctgccatggccaaaaagtatgtatgaaagtatgtgtgtatttgtttgtaaaaggatgccaatgttttacctgatatcttagtgacacttcagttatctatgcattctttagatctgtgattcggtaaacaggcagccatgttcacgatgccttctatgtcttaccatatttttaattaacctgttaaatacagcttaaaatatttttattttatttattctatttttactgaaatatactgcattattgtgttaatgtattatctttcctggatattatctcccagtgtatccagatctaagtaatctcagtgaactatacattgcctaaaaagtggttttgtaatgatttgtagtcacatttctattgggatatgtagaagaaaaggcaaaatgcttaaagttccttttattttttaaaagcagctagatagacacagacttgccacctcatacatctgctccttggcaacatcaaggggaacgactagccaacatgcctatggctaaaaactttcctttgcagactaaagcactgcttggtgcttcgtttttctacccttcacaacatgtgtgatttcatctaagagatatatacatgtacacatgccctttgtttccacctggatacaagatcactcatagctaattaggaccattgttttttgttcatctgtcttgttgcatgaagggacattagacccatttccattaaaataagttcttggtgataaactgtggcactgctacttctttttaaatccactttatgatttcaagatggacacttgtaagatgactcgacacaaggccattgcctggaagccccagagctttcctctgtttgtatggcccgttcatgtcccaggcattgcaacacaaactcctcaagatttcaccacaacatgacaagcattttcctaactgatattagcacaatttaactaataagccccttcgctctctagttggccaggcttaacctaatacacatctaacgtgtgtgccacacggccagtagaaagtttaacttcagcttcagggcaaa

SEQ ID NO: 111186 - DNA, 1058 bp, Homo sapiens
tattttatcacaaaagtcaaatgtgcttattgtataattttcaaagagataaagtaaaatcctccataatcctctttccatattacagttgacagttcgggtattatattccaagttttttactgtgtatatattaaaatacacatgcaaacattttgttgtttttataagaccatgcttgttttataaaaacagcttggctttgtttttgctccacttactagtgtgccatggtcattgttccgcctcagggtgagcagctcttcctttccacttaatgactttgtggttcactgtctggtgcacttggcgtttcatgccatgattttagctccatccctgcagggccctgctggccgctccatgaccctggccatagagtgcccgagagaacgggtttctgtaaacattgggtttcttcctttcctcctcgttatctatccagtgctccatgctcttcggtctagttgctctgtgtacggtgcatgcaaatcggctgtgacaatgccagaaaggaatggtgtgagcaccatgggtcaggggattaagtgacttcattagggtcccaggcagctcaggacagctctgggtagctcagggagggaactccaagagtgtggccccaaccagacttgcactgtgttcctctctccgttccattcctctctttcctgggacgtctctgatctctcccccattgagctgtcatctcctgtctctcccacttcccacccgcccttgacctgtgctgcctccctccctccctgttgccctgtaaggatgcatctcaggaaaagtgcctggattccagtgatgtggctctgttaatagagtgtcaggaatgtcggtaaaacaggtaaggctatgtccatgccgttgtttctgtatgttttttattgggagcaggtggaactggaaaatgaagacacgtcctctgccagtgtttactgcaaacagtttcctgtatttgactgtgatattttaagcttgattacctcccccagttgatatgttgcctctgtaaattcagctggcatctcttggcttcatcataatgt

SEQ ID NO: 111187 - DNA, 1063 bp, Homo sapiens
tacacttctaagtgctggaagtctaactttcccatcatggcgctgctgggcaggacagtgaggtgggaggggagcttgctttggaaaggaaggcacacttggtcagagacggttgttcatgtcaccggttgatcctgggaaggatagaacctttccctgagatgaattctctaaatatcagccagaaatcagatggtaaatttgcataaattcagtattcatttcagttcagaggcctttcacctgcggcatgtagattctaaagggacctgggattgagtttcaagaatcactgaactgttccagctctgcccccttccaaaattgtgtataaaattgtgagtctgtgcacttttttttttttttttttttttggagtgttttcatccgagggccttgatccaaaacaggtcaggaacctttcctttctcctcgtggagctccccttccctctctcacatagtgattggcctggcctgcactgtaaggccatactcaagccgccatcctgtaggagctttatatggattaaataatggaattttatggcactctcaggacctgaaggcctctatgattcccatttcacagatgaagaaactgaaaaacaaagaggctaagggccctgaccaagggcagacagctgataaatgacacacacacacacacacacacacacacacaccccactcacacccacccacccacccacccacacccacctacccacccctgaagctggagggaaaaaataaactgtcagactcaggagctggtgcaagaattttcatgatgtaaagttttgcagtgtttacttcattgtcctgtggataatggtgtgatgtgtgctcaaaaggctagagagatggccagtgatgaaagacaaacatcaaaaagaagcatgcaacagagacttctgcaaaaatggagtgagaagtctactggcaagtccttgcctcgcgtgctcagtttgtgaaaagtggacagttgtgcgcagcatgagaagtaggtggctgtgccagggaacaggagatggcgtcctcttccaaaaagctggaataga

SEQ ID NO: 111188 - DNA, 1045 bp, Homo sapiens
ttacaggcgcccgccaccacacatggctaatttttttgtatttttagtagagacagggtttcgccatgttggccaggctggtcttaaactcctggcattagcttatctgtccatctcggcctcccaaagtgctgggattacaggcgtgagccaccgcgccaggcctaggaaatgaatttcattctgtaccactggctgagcaaagctttacatctgtccaggctcccgagtgttaagagatgacttaactgtgtccctatttactctccatatacgtttcatgggtttttgggagtaaactgatggcatataacctcttatctaggttttcacaaatctctaggatcacagaaaaacatactaagtagtagtgtaacttgtctttttaaagagcttgtgttgaacacagaatatgacatatttgaggagttcttagacttttggattcctcgggccctaacatagtacctagtataggatgccctccataaataacccagttgatgaatgggcagatgaatgaatgtagatgaaaatacttcattgtctacttttagggtttaattttgaccatccatgtgcttaatatttatagtctaatggttaatatgctgttcggcagataaggagcatccatgtgtcaggcaccttgtgaggcagcatgaaggactgagacagatgaggtccctgtttgaagaggcaggagataagccggaaaaacaattcaggaagcaagatgatacaggttatgccgagtgtcttgaagaccatcaacagcgtgatgcaacagagtagctcagaggggaaaggggccatcaggaggcagcctgtcctaggaggcaacatttgagctgggcttgaaggctgagaagaagccagccatgtagggagtgaatagaaagcactgaggaacagctgggtgtggtggctcatatctgtaatcccagcactttgggaggtcgaggcaggtggatcacctgaggttaggagttcaaaaccagcctgaccaacatggtgaaaccctgtctctactaaaaatacaaaa

SEQ ID NO: 111189 - DNA, 1024 bp, Homo sapiens
tctcgcccaggctggagtgcagtggcacaatctcggctcactgcaacttctgccgcacaggttcaagtgattctcctgcctcagcctcccaagtagctgggattgtaggtgcctgccaccacgcctggctaatttttgtagttttagtagacacagggtttcaccatcttgaccaggctggtcttgaactgctgacctcgtaatccacccggcttggcctcccgaagttctgggattacaggcgtgagccgcggtgcccggctaggacccgcccggcaccatcattttaactgttatgatgcacgttatagtttgagaccactaacctgggtgctgctttgaaatcctctgattatgcaagtgtcatacaaatggatgttaaaatagtctcaaatatttaaggaatccttcagggattcccttatcctcaattcaggagattttgaagtggcttccacattcagagctgcttttatctttggctgaggcaatataaggatctttgtggatggtatttaaggatagttcaaattcatatctatgtattttagtagcatgttctctaggagcaaattataatgctttgttctataatgagttaatagcgtgaacattgtcctaacagtcctgtgactttcttgtttaatgtttatactcatgtaatcaaacaaattgaaattggattatggctgttgcacgttatatcagttattatccagtttaaatgcaggtctgaaggaagtaaaattgatttttctatgctacttggggacatcataggttattggtatcctggttgaattttcagttaggtttctatgaaagaaagatgagtggttaggtttgttgaattttttttctttcacagtattttgtaaataaactgggatatttcattctaattaggaagtcagatgccttttaaaagttgggtgatcagtttccatatttttatttaaagcatgtctggctttttaaagtgtatcataatcctgagtaacatttttatttttagaaagaaaaa

SEQ ID NO: 111190 - DNA, 1095 bp, Homo sapiens
atcgaggtaacacatgtataagaaataaatattattgatcttttagtagttcgtaagcatggtgattggcttttcatgtgcatgtgtgaaatgtgccttccacaaaccttgttacaaagttggcacactaccattgatgtgaaagaaaaaagttattaaaataagaggtccttgatggcaaaaataataaaatggctctttggtggttaaaaggaccaatttggtccaatctcaactctttaaataaaaaggaattttgcttgaggtaagtaatttagttcctttgtggaaagttctttgacttctaagatgattcagagtttggaattactgatttagtcttctgactgtatcaggagtctttaaatatacattttcaattcaattaataagtcatgagttcagttaatttatcatcagtgcaatcagaaaccatcaaagtagactgagttgccagcctttacttctggctaatcctgacacatttcacatgtcatggattcctgaaattctgaagctgagattgctaatggttcagattggttactggatcattgtgttcctaaagaaaaattatacagctcgcttcaatgatgcagtttcccctcttttcctcaaaaaattttctatatgagagaagaaagcagaatctatggtccagtaaagcagtgatgctcaaatccaagtgcatgtcagaatccactgtgggtctttttcaaacaaagctggctttgccccagcctcagtggttctgattaattcagtaggtctggggtggagcctgagaatttgcatttctactaagttcccaagtgacactaattctgtctgtggaccatactttaaaaaccagctgggtgtggtggctcaccctgtaatgccaacacttggggaggctgacatgggaggattgcttgaggccagaatttcaagaccagcctgggcagcatagcaagaccccatctctaaaaaaaaaaaatagccaggcacggtatacctgtagacctaactactcaggaggctgaaaatttagagcccctttcaagaccctaggaggagggctagcaattagatcacatggtttatataaaatga

SEQ ID NO: 111191 - DNA, 1054 bp, Homo sapiens
gatgacatctagtaggggattctctgagccagtcagtaatgaaagactgatggaattccaagatctgctgatgaaagtttaatctatggtatgtgctgtcttgcctcagggagaaaagtcttcaggaaggaacaataattctctccctacactatagtattgtcttgacctctggagttaatttctctttaatgcagctccatgataagcagaggcatcacgatttacttgaccgttttgctgacttacactgtggttctattttatctctttaaaagtggcttctctgccttccattaatcatgatgggatgcttgcaatactttcagcacagaataacctttaaggaaagacatcgtaagtgattgtccaagaacagtttcccttagaggaaagtgggagggcattttcagacagatcgttcatggcggtcctgtccctgttcatgaatctatgaaggcgacagtttctcctgagaaatacctcgtccattttggtaactctggctcaaagcatggttcaggatttcttgtgagcatgtttcagtagcagccagtgacgtgtgggggcttgaggctgttgtgtcaagagagagcagaaaagtctgatgatgatcttcgaacagcttccatctcgcacttcccctgagtcctgagccagacaaaggatgggcctttctggatgcagagcgagggagatctatcatgtttgattctctgtgtccatcctcaaagtgccgtgatcttctttgaatacttggagcatcccaggaaaagaagagtcatttgagtaaagaaatagcctaacaacccatgtaaacatggatgaatgtctttgagaacagaggaagtcataaccatgataacccagaacttatgcagatgttcagtgcatggtttggtgcttgaagaattgctaaaagcctcttgttgcaaaggaaggtgcagtcaccacttttcatacacgagttgtcacctggaacctttttactcaaatgtcatcatcctgagatttttggtttcctggggagtccagtgactatgaatttagtgca

SEQ ID NO: 111192 - DNA, 1055 bp, Homo sapiens
ctgtgctaacttccggcctcagcgttcttcttattcactcagaccctggcgagcaccttcctccttattcttttacagaagtaccaaagccaagcaaacataatttcttttgttttttttttctctttttgagatggagtttcactgttgttccccaggctggagtgcaatggtgcaatctcaattcactgcaacctttgccccccggtttcaagcggttcttctgcctcagcctcccaagtagctgggactacaggcgcccgccaccacgcccggccaattttttgtatttttagtagagacagggtttcaccatgttggccaggctggtcttgaactcctgacctcaggtgctctacatgcctcggcctcccaaagtgccgggattacaggcgtgggccactgcgcccagccaaaacataatttctgaacacagggaacttggaacagggactcccctcttgcctcgtggttgatggaggcttatcttctgggtaggggcacagagatccttgtgtacttcgccaatgagccctatagtctgctcatctcagccatttcccacaagaaaggaaaatggatattgtcagagggtttcagaccccgtaaatgggatgtttccaagaggcttccctatcagtgattaatccacggttttcccttgagaaaaaaaaaaagattctatagtcacttgggaaactgagttaaaccaagtacactgggccctctcagaggttttcctacgctgagatgcactaggactctgcaagaaagcgtttcccaggcttggctggaccgtttcctcggtggaaacacaatcacatggaacacacttcaggaaatattgctgtcattagtaaactcattcatttaaattcgtggcaacactaaactgctatttttgattattaagaaaaattggaattacttttaatgaatattataagtggagaccccattgggcctgctctaatgaagataaaatttcttcataatgaatggcaactatgagaaacacactcacccatccaaaccccaagaatggacttagaggc

SEQ ID NO: 111193 - DNA, 1047 bp, Homo sapiens
ttaaattcctgatcatttcctatgtagagccatttaaccggtttcctcatccactaaccaaaagaggattgtgatgctaactagaaagctttcgctagccctgattcacgtacacacatacaatacgtgttgatgtcttgacggtgagcactctgctgtctaacctccttggaactcttttaaagtacagtaaatccttacttaacattattagtgagttcttagaaactccagctttaagagaaatgatgtgtaaggaaaccagatttttttctcatcaacattatagcaaaacaacattgaaagaagttgaacaaaaccttattcgaggtaggtcattttgcttaaagtcacagttttcaagaacctatcaatgatgttaagtgaagatatactgtactttgtatttttacagcttttagaaaactggtgagagctttggaccatctttccatcacacacacacacacacacacacacacacacacataattttggatatattttcagggtgtttagaacttcctgaagctcatccatggatctcccaggtccgtggacccttaataaaatccctgaagtgtggccgagcgcggtggctcacgcctgtaatcccagcactttgggaggctgagctggggtaagcggatcacttgaggtcaggagttcgagaccagcctggccaacatggtgaaaccccatctctactaaaaatacaaaaattagctgggcatggtgatgggcgcctgtaatcccagctgctcaggaggctgaggcacaagaatcgcttgagcctgggaggcggaggttgcagtgagccgagatcgtgccagtgcactccagcctggcagacagcgagactcagtctcaaaaacaaaaaacaacaacaaaaaaaaccctgaagtcagctgatgagtcagcctgcccttctgaagaggacagagcaccccccacccccaccaggctctgcatctctccctgtcccccaccacctaggggtatctttattgatgctcagtcattaattgtaaaaacaaaactagattg

SEQ ID NO: 111194 - DNA, 1290 bp, Homo sapiens
cacttagctcaacctcagctaggaacatgtgcattgggcaactcaagtgttttgccaccctgtacatgtccacaaatgaccgcaaaagcaccaggagtatggactttggggttacaaataaactttagcaagtaggtgaacttgcagatatggaatctgcacatgatggggatggagtgtatttgcacttgagctattcggaggaaggactttattcaaggctcagtggcattattccgagtggactcatgtgcaaaggcacattttagggtagagagtaccaaactagttctgaattgcctcagattccgcctagggagcatgcttacggcaaacagttgttaaaaaccatacacttgtttatttatttgagaattacattttccatattgcaaatatacctgttactatttgagactgaactgtgtaacttcaccattggcccacagcgtcccagctctgaccccccagactggcgggtacagcctgactgctgactgcaggctgtctctgctcctttcttaggatcagcgtttcccctagagctcacgtggcctagagctcatttcccagcgaaatgcaatgttccacttcatgtgcacagtttggtgtgcattccgattttcctctgtgcttactctgcaaataacgtttctcagctttgcagcagcagaaacgtaatctgtagtgtaaatcagccatgcggacctcaggacttgctttccaatcttttccaagactcctgcaggggaaaactaaaataccactcacactttcagggagtaagaatggtttcccagtagcgcagacatctgctgcgtatcagcaggaatagaagcgggattctgccagccgagcttcttggcctcgacttccatgggcccttactcagactccgagaaggtgggatgtgaatctcatgtttactgccacacactcagatttgcttggcatttgagcatctccagcagcagatttgatgaagttcccttttgtgtaacgtgttcactgttcctccaggggaatttccacagtcactctcagagcattcttagagatacttttgcaataactgagctgtcctttttttttttttttatgagaaggaatcttgctctgtcagccaggctggagtgcagtggcacgatctcagctcactgcaacctgtgcctcccaggttcaagcagttctcctgctgcagcctcctgagtatctgggattacaggcgcctgccaccacacccagctgatttttgtatttttagtagagacggagttacaccatgttggc

SEQ ID NO: 111195 - DNA, 1191 bp, Homo sapiens
gatgaaaaatacttgaatattcactaggcctagtagaaagaaaagacattttctcattgtctgaggtggatggagcagttgtttagatttggaaatcagttattgcaagagctctcgcaacaaagccaggcttcatgccttgcactataattacgtttagaaaatcatttcatgatcaagtattaatttgtgaagaagcttttgaagcaaaaaaaaaaaagtagagcttttatgaattagagaaatttatgttagactgtttagagttgttttttgttaggttaaatttccgccaagtgttgatgtcagtctgtgttcttcactaaccctctctccccatcattctcctttttttcttttaagtgaaaatatcttgacccccaacttttggggccctcagccatgggcattccctagtttccaaacaaacacggtacccgtccctcattccacccccaccaccagaaaacagttctgtttggtttatagggaggaaaatgattattatggaattaggtatgctagttattgaatacttggaattatattgtttgcttttaaaattaccttaaggaaataacttcactgtctgcttctaataatgtttagtcatttatttggtaagtaattaaagcaccatcactctcctgccctcgtcttcaggtgataatctagacatagagggagtgagccaacaagttgctgttagagttaacttgttccctaacccatcttgtgaatatcaatgctaacaacagtgtcttgtgttttttttttttcttttcttttctttttctttaaatcaatgtgcttttttcctatgtgaataattatatgtctagaaacagccatggagtgattttgctgttctgaatgggggaaagattaatagtgacatttggaaggcaagtatattgtcagatcttagatcatttaatattttatcctttctgcatggctgtggctgtatatttttcttctttgtgaatatcatgcattctgcagggacacagtgatcgggcttcttgctaggggcattcagctcacactcctgttgcctttttttggtgtctcccattgtgaatgccctaggttccccgttgttttgtaagaacaggagtttgcaccagtcagcattcaacagtccttgcatgcctttctctgcctaagctcacgtacactctctgcctc

SEQ ID NO: 111196 - DNA, 1056 bp, Homo sapiens
ttcgtagagattttcttagcattgtagagaaagtcccctggtagggacatacccagcccctgagacttagtctttaagagcactctgttgatattgtcaaagaatcaactccattgttggcctttttccagctgaaagataatgcgtcatttttgtttgctatgtggaattgctttccaagaccccagaagagaaacatggaagaagaaaactctcagtagtcaaggttatatgatcggattccctccttactgggtccagcctcacacagcttccgtgtggtgctcaagggttttgaggagtgccataccccgggcattgggtcagtccccctagacacactgtctctgaggagctaaggctccaaggctctcccagaactgagcaggatcaagtaatcagagaaagggaggttgcagcctggacaaggtcaggacaagcaccaggagggtgtcccagctatgactgtggtaccagaatgtcactcagctgtgcaaggctttagctgcattgcctggagggttaccaggctcatggaagcttgttgctcatagaagatggtccctgttggtccgttaccacctctttccccatctttgtgtttgtcttacctgaggcatattgtccaacttgctttttccccttttaatgtttttctctttgtctctcctcttcctccttcatctctcccacccctacgggggtggatacagactttctgtagaaccaaagaatctctgttgggttgtgcttttttaaaaatttgttaactaaaaattattagcaaaacttattagccaaatatagaaaatattctctcttcttaattaaaaaagttagatgaatagaccatgtaattcttaaaatttaagacaaagtgactttgtctttcattgactttaattttttaaaaaagaaaaattatggtcacttatacattggagaaagtttgtcatatttgatgtaaatgaatagttgtaaatataggaggggaaaaaagatctttggcccagtcataacacatataatgccagtttccatttccttactgagttt

SEQ ID NO: 111197 - DNA, 1081 bp, Homo sapiens
agagaaatcaaatatttacagtccagcctaatgccttaactctttactccccataaaacccttatgtggtcaggtgctgcagctcacgcctgtaatcccagctctttgggaggcctaggcaggagaatcacttgagaccaggagttgaggagcagcctggacaacatagcaagaccccatctctacaaaaaaaaaaagattttaaattagccaggtgtggtggtatgtgcctgtagcccaagctacttaggaggctgaggcaggaagatcacttgaacccagaaatttgaggctgcaggtgagctatgatcacaccatagcactccagcctggataacagggtaaaaccctgtctcttaaaacaaacaaacaaacaaaaaacacaccaaaatccttatgtatctggtactatagttgtctttctcattttacatttgacactgagagacagagaggttgaggagtttgggcaagacacacagctaatacatggtagagtcaagcttgagttcaggtctcctggcccctatttccaccccgaacttcacaatatcatatgtctgggaggcttggagactcttgaatccctttaactcaccctaagggaggctatgtcacatatggagccttctagaaaatgacctttcttaatatcattgtctcaggtgctaatgacagttgaagagaaatgattatttttctaacaccatttctttggttcctaaatagaatctatttcaaccaatttcaaagcatgagaagagagcaaaatcttaagggacagaagaagcttgtaatatgttgtgttagaaatgcatattttattcagcttttttctgagctggcttcaaaaaaaaaaaaagaatcaaataactaagtgctaaatctgttgactaggcttcacaaaagtttagaactgaaggcttccttacagtttgaaaattttacatttcacattccaaagttcacttgggaggtgttaagcgcagtggataatgtttccgctgcatatgccagcagtatttttgaaagtttataaactggccaggaagcatttgctgctgaaatttagcacgtggtg

SEQ ID NO: 111198 - DNA, 1031 bp, Homo sapiens
atacagcactcatttacagaaagcattttaggaaaattaagagttatagctgggaatgacatgatgccaaccaataaatcttaataattgacaaaagcattcagtacactgtgtataactatgtgaattttgtttgggaaattgattctggtttggagctttagcttgttcatagggttcttagagctataggatgacttgatagtgaggattttgtgtccctgttctcaggtgttagccttcctttccaattcttatacttgtttccatattacctgttttaccaagtacagccacacacatcagtatggatggatttcacaaacataccaggaagaactaatcatttggactatggacacgtctgcctttggggttcacctgacgaatagtgctgacattcttttaataaaattctctctttctccccccgccccgccccccaatttttcagcagatatatggagtgatcactcatttcagactgatccagatttgccgcctggctggaaaagagtcagtgacattgccgggacctattattggcacatcccaacaggaacgactcagtgggaacggcccgtctccatcccagcagatctccagggttctaggaaagggtcacttagttctgtaacgccatctcccaccccagagaacgaggtaaaacggagtgtctttttaccagcttagtagaatagatgtaacttgtggtttctctttacactggttgcttctgccccaacaggtcatcaaggtaagctttttgattattgtgcatgttgcatttgaaatctcagtaatgcttcctcttagtaaatagtgttaatatccatctttcagggatgtttttattttttaatggcttttggtctcttgaaacagcattccaggtacagaaagcaagaggggctgattaatgagaagtggttaagattccctagggctcactgaggcagtactttactctgcaggtaccattgcatggtgctggctccataaaatatttacacacagaagaacatctcttg

SEQ ID NO: 111199 - DNA, 1029 bp, Homo sapiens
ttgaactcctgacttcaggtgatccaccctccttgacctcccaaagtgctggaattacaggcgtgaaccactgcacctggcctaaaatccatttttatatgaggacatagtttacctttttggctgtaaacccatctgctgtcctctctgagccctagaaatggggataaagatagtgcctccttcatagggcagctatgacaaaccacaagctcctgcaacgaaggacacagggcgcgtgatacagcacctagtggcgtcagtgtccttgcagttgttgctgttactgttactagcttttataacatcccagcgggaagatagcacttgcattcaagacctgaaggacctggattccacccttgacttctagctgggattgatgtgagcattaaatgcagcgatatgtatgaaaacatgctttgttttatggatggggaacttttttccaaataaaggcctcacacccagtcagggggaagctcagaatcatgtacaaatgcaaagcaagtttattcatttggggttggtttatgtttgagagaaacctagaagtttcacaagtctacttaaaaatggagaatgagggcatcaatctttattttaaaaattatgaaatatttaaattaaaaattatgaaatatttttgcttcctcattaattgagagagaagagagatatttggagaaagagaagatgtcttgtcacagtagaggcgtcaccagccaggggcatacacggtgtataataaggaagacagtcagcaaggcaggtggggtagaatctggacttgccggacctcctcagatcctggaagtccggccctgctgagggagcctaactgaccttcttctcctatgaaagtcaccataaaatgatcttttgtcctttttttttttttttttttttgagacagagtctcgctctgtcacccaggctggaatgcagtggtgcaatctcggctcactgcaacctccacctcctgggttcaagtgattctcctgcctcagcctccttagtagctgggat

SEQ ID NO: 111200 - DNA, 1048 bp, Homo sapiens
ttttgagaagcgttaaaaaaaatggcagtttctatacatgcatccctggcagatgggatccacaaatacccctgcctcctttctgtcaatagcccctgcatctttgaaaaactcagagctctgcatatcactttttcattgctgggaaagaaaaaccaagctattccacaggtgtgtggcagctaattggttttgccattttgttaaccctctagagaacgtttgctttcctctcttgacctagaattggagggtcttgaggaggagaatggcatagatcaaaaattgaaaaccttgagtcagattaatgactggatgttgcttgtggttggctgaatcctgcaggtatttcttgaagtttgtgaaaaaataagcccaatgcagtgtctgcatttggtctgcatttgtctgcatttttgacaatacttggaaatgaggttaagatgcttggattggtgggtggtggaaaatgaatgaatcataaccgatgaagttatattccaacaatatgatgtttcagaaggagtcttgggccagatgagaatcaggaaactggtttctttttttttttttttttttttttttttttttttacatcttttttttttctttcattattatactttaagttttagggtacatgtgcacattgtgcaggttagttacatatgcatacatgtgccacgctggtgcgctgcacccactaactcgacatctagcattaggtatatctcccaatgctatccctcccccctccccccaccccacaacagtccccagagtgtgatattccccttcctgtgtccatgtgatctcattgttcaattcccacctatgagtgagaatatgcggtgtttggttttttgttcttgcgatagtttactgagaatgatgatttccaatttcttaacccaactctataatttagatgtctatatgtttgtgtttgaataggagattgcaaagctaatccattagaagctgtttctttcctagactaggcctggaatttagttttttgctgtgagatgaatgaaataggatgaat

SEQ ID NO: 111201 - DNA, 1062 bp, Homo sapiens
ctcactgcaacctccacctcccgagttcaagcaattttcttgcctcagcctcccaagtagctgggactacaggcacgtgccaccacgcccagctaattttttatatttttagtagagacggggtttcactgtgttagccaggatggtctcgatctcctgacctcgtgatctgcccgccttggcctcccaaagtgctaagattacaggtgtgagccaccactaccggctactattctaatgtgtttaatgggtaactttttgttcaaaactatacttgcaatgtgcattgttgtgtgtgtgtgtgtgtgtgtgtttattcaatgggtattttcccccgtgtactgtgttttggagatgtatccataggctatgtgtacatgggctgcattgtttccagtggctggatggtgctccattctgtgaatccaacacattttacctttcccctggtagagtgatagacttgcaggttgcccccattttcccagtaccacagggagcaccccgcacattcctctaattgaactgcatgagaaggcatgtggcatacactctcgatattgctgggccatagggtgtatgtcgtttacttcttttggggaaaaaaatgatttgtttatcttatttttattgatgaatgtatggatataattttacgtggttttgctcagtgaaaaacacagcattgcaattgttggttgaatcagatgacaggtaggtgaatcagttatggactgtttttttagggatagcttactagttcaatgcttgtaggtgtatttctcaaacagacccagtggccacaaaagagggtcaagcttttccagggtgaccagttgaaatctgggccaagtacaagtgtatgtagcctttagtcacagtaagaaaatcttcagttcttgttctatcagcagagcagaatttattttttttttaaatgagttagtcatggaagcagaaagttggtggggggttggagggataaaaaaaggtattacccttaacaaaaagaaagcccatggaaaattcatgatgaaactgcattcttgcttttaaaagtaa

SEQ ID NO: 111202 - DNA, 1144 bp, Homo sapiens
aaaattgagcagtaaaaatagtctataatttatctaagtgtggatttttatttgtgggaattttattttttgttgagagcacttttgttcgatgttagagattgaaaccaaatattatattttagttttctctggtcactcttcttatgaattaattgtcccgtaaggatacgcgctaaagttgaagctcaaatctgaacatgaaaggattcattatgcactataggcttttcatacctattaataagtcaatggtttgaatgtagatcaagaatttaagggattactttcactaattttaatgttaaagcaaaatatctgccacctggtgtcagattaagactcaaaaggtgtcaaaagaaggggatatatgataggttttctttctctacttttgaaacattttctagtactaaattagagatattaactccttcaggcctcttaagttctattgctaaatagagatcagtgctcctttgatgaccatataaggaaaacgtttctgggaaaaatattgcagaagccatgagcggttatgttatctaatagcctcagaatgggaaaatttaaagagaatggaaagcagctgacataaccattttcccagagaaagctcctcctgcttctgcataaagatgtataatgtaatccttagagatctcacttcaattattgtgtcctttattcgaatgaataagtagagaatttagtttttgcacttgtcagtactataacatgccttctcagcttaaaagtaatggaggaaattacttgtaaaaaaattaatgaaagagatgaaagataagagaattcaggtttaaaaagtcactggtttgtttctcagtatgtttaaattttaggattaattttttttcttcctcctagagttcgagtctcataagaaagaatcgtgttaatagcccccgttatgttttgctggagtttatcagtcggtagaaatctactgagcaataagaagatgtttcatagccttggtataggaatcattgcgagcttgaaggttcacccatactaggaacttctaaggttacaagtatgtatgaaggaaaatgcttcttctcttgagacataaactgtaaataaatggcacagtcagaaggggactgtttagttattggac

SEQ ID NO: 111203 - DNA, 1052 bp, Homo sapiens
gcatggccctgccaacaccttgattttagactttttgccttcaaaactatggaacgatagatttctgttgttttaaaccactcagtttgtgatactttggtacagcagccctaggaaataaatacaactgtaatacatttctgtgtgaatcagagacctggtgggaaataggtgatgactccagtgagacacaggggtgagagcacacttaagaaaaacttccaaggtatggggaaggcttctagggttggcagcggcaggttttcattagcacgtccaggcctgaagggctaagtcaagagaaagttcttggaacccaggtagagctagattgacacctgtgaatttgagaagatggcctgactagtccaggctaacttgtgccatggtagagaggaagctggggtgttaatatcctgaccttcttttcccaggctctctgatcacttgctgagcctcttattggtcgaacctgccaagagagctcattgatgtagtccatagagtttacctcaggatacacagcagggtggaaaagagggagggtcgatctggaagggaaattggagaatattctgcacatttgggataaaaggggtatgtatatgtcattcaaatatatgtttatgggaaggaaagaatctaatgtgtaagacagtgtttattgtacataccactggttctcaacaaatacttctgattaaggatataaaatatctagaaatgtttatgttgcagtctaagattcaaggctgtggaattcatttagcaaattcttattaagcactcactgtagtgccaaatcttagacaggccctggggataagtactgagcaaaattgactctatcctttgccttcattgagctaatagtctaatgtcaccaactgtattcactagggttaaaacttcatgggattcgttacttctctcatgacacacaatgtaactggaaattactaactggattccactcttcacctgtggactgcaagctttgtgaagtcagcagtgtggttgcctctgtttacttctaacacctagttcaatgc

SEQ ID NO: 111204 - DNA, 1054 bp, Homo sapiens
ataaaaatattaatttctagagatctcaaattaattgtacagattctattatacagcttttttgagacatgttgttaagcagaaaaaagtatatagccttccttccagattcttaaactagagagtgttagaaaaactcagagctcatcaagttacccgaactcattgtgcagatgagaaaccatctcagtggaagaaacttcccaaggtcatggagccaggaaaggctgagaatcctttggctccagtattagggccttttctatcattacttttcctgtgtatctcatagttttcttttaaaaaaaaaatcatgagttccaagtactcttattaatctgcagttcattgactttaatgagcaattttttttgtttcccgtaattgtattgaattagaacatttttcatctaatgtgtatacgaattagttactaactgaaatggaatcttggagaaaatgagcttttgcttgtttatttgtaagtataaaatcttcataattttcatgatgactcatatggtcaaggaactgtggaactgaggatagggataggaaggaaccacagaaagcttatatgatccagctaccttgcaaaaaacccttttcgtgattgacggttggattgacatttgttaagtaattttccacgcttttttttcccaaggaaaatattcaggaatgcttgatttaaaaaaaatactaatttaattataaatatgattgaatatttttctctttttttctagagtaaaatcttgttgataagacagtgtttttctctagtggtttgtattcaggcttcctcttcagtctcactaaatggcctcacaggtgggtagatgcatttgtcttgaaaggtgactgttaccaaatacaaatcttgtagatgcacatttatcttgaaaagtgactgttaccaaataaaaatttaagttatatctcagcatggagaccacggctctggtcaggtaggagccaaatgtccttagcctgaatgtgtgactagaagaatatgtgacttagtccagtttcatagctgcctgatttgggg

SEQ ID NO: 111205 - DNA, 2578 bp, Homo sapiens
ctgttagtgtttaaaataatcatgatcagtctaaattaaacattgtatgtttcacttgtaatgataaagttagtgtttattatgtatgttttatatagtatatacatgtgtatgtgtatatatataaaataaacacaaataccaacagttgaaagaaaagagaaaacgagagcaaatatcttgtgacatcttagtatgccatgccatagtacatgtataaaaagggtatagttgtctgttgacttgctgtgtgttaaatacatagtcatcacagtggtgtgtgttttatgactaaatcatgatgcaattatctttggatcgtagactgcactttggggagcctagaaaaatagactcatttctacctcaggggcatcctttccaagttagaatgctatttatacaataaaatgcaatggctaacctagagactgactactttctattttcctttactactgaatcgccccctccagctgtttagtaacttctttttgtacaatcaatcatgtatacaatatgtggctgcccttttcctcctctgtagtctgtcctttaagaaaacaagaggctatttgaaaaaggaaaagcatctgtgaaatgactattttcataggagtttagaaaagttaaagagtgccttggccctgattctaaaagaaaggttgtatcttgctactgcaaagtgagaactttgaatctagttagggtttttttcaaagatacagttccctcagtggccccaggtagtaagcatgatggctcagataaataaatacctgttggtcacactgtatatagtctctctgttaatcacttagtgtttcatgtttgctttatgaaaacgttgaaaagatgcatcattttgaaccttcctgggtacaggtttcagtggtacccacatgtaattttatgtttagtttgggatttaataaaattgaagacacagagtatgaaactagatggatcttgtgtagtaactgtttcaaaatcagattcattgctaaagtgtacaaaagcagaattatacacagagaaaaccaagtcccaagtctagatgggtgtggcaatgcgcctcatgatccattaacttatcattaagagcataggctctagagtgagcttcctgagttcaaatcccagctctgctatatctaggcagttctcatagcctctcatctataaaatggggataagagtgttttggcatagacctgctgtgaagattaagcgagagcatcttcaaagagcttttaggagcagtatctggcatatagcaagagctcaatgaatattcatgattattatattagagacagtatcagtacagtggtgtgttataaaagtttgcttttctcttaattatgaattacctatattttggactctgagttacgactttctggaccttaagagcaagggttggttcatcttcatctttgtattttcagtgcctggaatatggcaagtgagcttaataaataaataatgacacactgaatgaaaatgggagccatctgcatatcccaaaatgaactttatgtgttgaataagacactcgatgttatatcttaatcaatgcctggttttggcattggctacatattttataacttcattgatcctgttgcctcacagtaggtgaagctgaataacccgagttactggggaaggcacactgagattctgtgggtttacaatgtgccaaaccctgttggtggtactttctcactctcaggtggccatgctgagacttgaacctaggttttccgacacagctccagtgttttaccacagaggctaaatatatcagatttcatctggttcaactggaggcatatagtagtatcttgagaatccggaaagtggaaaattatattttaggggatctttccattcctctaagcaactgaggtttagatcaaatgccacttccactatgaaacctttctagaccctccgagctgtataaagtccttataaagtcctttctctgtattcccaaagaaatgtttctaagtttctgctatcatgtttatcttagtggctttcggcattactcaaaagtttccatttagacttagagctccatgaaagcagcagccacgtcttcattatgtgtgtatatgaacttcttcacacggtatgtggcacatagtaaaaggctccataaagttactcatttgctggttggatggatagattcacgatcattaatgcatgctctctgatgtttgctacatcaatatgcttgtagaaatagaaaaagtaataacaatttgtataaaatagttgtttagaacactcagatagggtgattcttatttatgttctaggctcctggaaagaatgaagaattggggccactaattcagtcttccacaaacattcttttattctattcgagtctataggtctatatgttgggagggccagtgccaaggaaaagggccattttggtttcagttgacctcacgctttgccttggattgagattgatccatggttgtcatagattgttttctgttgctataacgaaatacctgagactggataatttataatgaacagaaatata

SEQ ID NO: 111206 - DNA, 2105 bp, Homo sapiens
aggtgtctaatgactttttttttccccagctgactcaggtgttgacaccttggcagtgtttatggccagcagcggaactacagacgtcacaaatcggaacagcccagccacaccaccaaacacccttaacctccgatcctcccacaatgaactgttgaacgctgaaataaaacacacagaaaccaagaacagcacacctcccaaatgcaggaaaaaatatgcactaactaacatccaggcggccatgggcctctcggatccagctgcacagcccctgctgggaaatggctctgccaacatcaagctggtgaaaaatggggagaaccagctccgtaaggctgcagagcaagggcagcaggaccccaacaaaaacctgagccccactgcagtcatcaacataacttctgagaagttagagggtaaagagccccacccacaggattcctcgagctgtgagattttaccctcccagcccaggagaactaagagcttcctaaattactatgcagatctggaaacctcagccagagaactagagcagaaccgaggcaatcaccatgggactgcggaagagaaatcccagccagtccagggccaggcctccaccatcattgggaatggcgatttgctgctgcagaaaccaaacagaccccagtccagccctgaagacggccaagtagccacagtgtcatccagcccagaaaccaagaaggatcatccgaaaacaggggccaaaaccgactgtgcactgcaccggatccagaacctggcaccgagcgatgaggagtccagctggacaacgttgtcccaagacagtgcctcacccagctccccggatgaaacaggtacccctggggaaggcgtagcctcagctggcacttttttttttttatcttttcaactattggagtaaatctctagactgaccaaaaatgtccattatgcagagaggaacgtgagcctcttgcggtaaaattgggcaatttatttgcaaaatattactgcattcctcaaccatattttaggtcagtttcattttggatcgtgcataaagttgtttgttctgggaagcatttttgtaaaataaacagatccttggtgttaagtacagtaaaatatcatatatttagaaattacacttccagtgcataggtagatcatttctatatgctatctagaaatactgggttttggtaagcaaaataataaaagaaacaaagttgttgggggaaggatataacccaattaagagaactattttaaagtcctcaaaataacttatttatggtgaagcgcataaaaagttaaaacattagccatctgttcattaaaggcatttctctttttgacatttactgaggagtgttttattagccttaagtaatatttaaaagtgggaaaatcgtatttcttgaaaaatatattcagaagtttagacttttaactagtctaattgagaccagtctttctggacttttgtctatatttgtaatattttggatttgtcggaggtgttaaaatggtgacagaaatgaacaggatcctaaaagtcagctactttaaatatcattttcttatagctcccactatactgattctaagattgaaaaatgtggagaaccttattgtatctgaattcagcgtaaacaagcactcagaaaggctaattttttaaaagtagtccagcagttcccctagtgggtcccagggctgtgttaatatagatataacaaagaaaatagatagaaccaccagggaaggaaatcacatttttacaatcgataaggtagataaattacaaggactaaagataaggaaaagaggagttaagacattaacttgtttaagaagaaaaaaaaagtagcgtttttgaagtgccctttaaaaatcccagtactttcaatgatgcatactactgtggaatgtggcagtagggaggttgagatgaggccatttcatctcataactgtctggccctgcacattattggaatcataattatgttcagtaatgtccctgagttcacagctctctatcctttttacccatttagagaattcatatcctgaagctgatagacattgtcacctgctggagtttgaatc

SEQ ID NO: 111207 - DNA, 1086 bp, Homo sapiens
cttgaggtcaggagttcaagaccaacctggtcaacatggtgaaacgctgtttctactaaaaatacaaaaattagttgggcgtggtgatgcgcgcctgtaatcccaactactcgggaggctgaggcaggagaatagcttcaacccgggaggtggaggttgcagtgaaccgagattgcgctattgccctccagcctgggtgacagagccagactccgttgcaaaaaaacaaaaaaccaacaaccccttttatataggctcttgtagatccacttcatttttcctaagggcagcatggtacttcattgtatgggtgtattatcatctaatgaaccagctgtgcactgaagaacatctaggtggttactggtcttttgacttcagaagaatagaatccacgttagcttgtctgtgaaacaaattatcagaagtggaattgccgagcagtgggatccatgcattcaaaacttgctcagatatttgtaaatggctctccaaagaattttgccagcttttactctcaccagcaaggtttgaaacttcctgtttccagtgtcctgtccttagattgtggtattatctggcttattaatctttccagtctgatataggaaatccagttagacattgttatttaaattggtattttcttaagttttgagtgaagctagtgatttatgtttattcaacattggtgtttctcttgggacttgtttcttttcttattctcctacagacttgttcatatttttcttaatggttttaaggaactctttctatataaaggaaattagcccttttatgtcatctgtggtggtaattttttcttcagtctgttttttgcttttatcgtgtttatagtcactttttttctaaacagatggttttaatttttacgtggcaaaatgtaccaatttttttttttctgtagtggtgctgaattgtgtgtgtgtgtgtgtgtgtgtgtgtgtgtgtgtgtgatgagaaaaagcattggaaacttgagacagaaaggtaggtaaggcctaccatgaaaaaaatcctcaataaatgtttgtgggaaatgtgacaaagtaggaattcaagttt

SEQ ID NO: 111208 - DNA, 1025 bp, Homo sapiens
attgcattgagtttctagggaagtagctatttgaaggtaaagaggataaatgagagattctagaatcagttgggtcttagattgtcagtggttgaaagaacttaattctggagattttagataaggtggtgattgtgaccagagcagtgtttatctggcattgtagatctgcgatagatccgggacaatgtatggggaggaattagactggctgtcaggggaggagttatgggactgtgcaggactgttttaaaaatgggttggacaaagagctaggcacattgagaaggaggaattggtcagacttgtttggcagtatttggggaacataggtaaaatgtaattgtttgtctgatttttatttaaatctttcattcctctttagaattatttaaaggtacatagcatcttttactgaatcaaatgacaagagggcattttatttatttatctatttatttatttatttatttatctgtttgcttaatggtgcttttgtgatttggggttgcaagctctctctgtggtcctgttggatatttattgatccctagtagcattatcataaggcatatcagcattaagaattttcattaacgggacatgtggaaacactgctagaaggaaactattgttgctagactgtttcacctaggtagctttatgctttgccccaaaatcacaactgtattctcagtgtagaacttgtagtggcctgccattagtccccaacaactctaaactccgtatgtcatttttatggaaacaaggactctcctctcaatgctgacaaaatttctagcatgcagcacactggctaatttttgtattttttgtagagatggggtttcacatgttggccaggctggtcttgaactcttaacctcgtaatccacccgcctcagccacccaaagtgctggggttacaggtatgagccatcgcacccagcctagggtaaagttttgaatttgtctacattctctagatcaggacttcgccagtagaaatagaatgcaagccacat

SEQ ID NO: 111209 - DNA, 1015 bp, Homo sapiens
acccagtagatgaaaatgaaattaaataattggaatgtcactgttttccaacccctgtggatttagtggatttaggcattgaataacaatggctgctaacattagaaatgaatgaaaaccagataccatgtgcttcctgatgaaagatcataccaccacagactgaatttcaatctgttcaagcctctgaatctagctccaatttgcaggcaattcagaggttggagaaacgagttaaacatgcaccaccaaaattcatactgtggaaactccataactcagacagcccagactctttcaacaaataagttgtaaggaaaagaaaaggatagaggcgatgtagattaaataacttaaaagacatcaaaattttaaaaatagacagcactaatggtgactaggattatacactcgggtaacagaatcataaagaaatgccaggaactgattaccataaattcaagagtttgtttactttggaggaagggaagggcatggagggccttctagggtaacaagcaaaagctgtgttttgattaagatggtagttatgggtgttttctttgtagtaagctatttgttttgtgtggttttcttcatctgtgttttattttaccataaaaagattttaaaatatttttatgaaagaatgacactatacatactgcctttctcccaacttttattatgagaagtttcaaacagaaaaattgaaagcattgtgtaggcaatacctatatactcatcatactgttttacagttagtttttttcatttagtgttatttagtaaatatctttctgtgcaattaaatatagaagcagcctcacttttaagtgatgcatagtattccattgtaggatgtgatcctttatttaatcagtttcctaatgatggacatttaacttgtttttgatttttttctaatagaaataatactgcttatttgtccttatgataaatacctaaaatttgctttgtcacagcatattctaatatgcaaagtataaatgct

SEQ ID NO: 111210 - DNA, 1072 bp, Homo sapiens
taagagcctatcagtgaagtgagattttgttttggtatgtatgtatgtatgtatgtatgtatgtatgtatttttgtacagacaaggtcttgctatgttgcccaggctgatctccaactcctgtcctccagtgatcctccttcctcagcctctaaacgtgctgggattacaggcatgacctaccatgcctggcccaagtgagattttatttggtaaccagtgaaaagctttaagaatattcatgttggtgacagttaacacttacacagcaattactgtgtgccatcaccattctgagtgctttacacacactctcctatttaattcccacaacagacatttggtatagatattctcattatctccattttacagtggaggaaacggaggttagctgacttacctaaagagacactcaaaggaagcagtggagatggaattcaaaccggggtggcccagctccagggtcctggctgttgatagcttggagcgtgtatatgtggtggtgataaaggtggtagatgctcttaggaaggcagctctgcgggagagtacagttggattggcatgagggcagacaggtaatgagaatatcgactgtaggccttcgggacggttaataagagcctggcctagaggcgaccgtggaaatgaaaggatgagaattcacatgttactagcttcagaggatggattagtgccaggtttctgactggtcatggggcaaggaagggatggagtcagaaatgtctgggatattgcttgaatgtccacctaacccagttagggaagttgagagaagatttggtgggagagtgatgatttatttttacagagccctgttttcctactttgtgaccaactagtgcagtggttcttaacctgggactctggggaaaactgtctagaaaagagatccatgtaagtgtgtcctaacagatttctgtgagtttttggagtctgccaagctcacatgttgttttagcatggccttgggcccacagaaggtctccagtgttttgaggcagtttgtggctgaggcacttagaattctatggtggcttgtccccttc

SEQ ID NO: 111211 - DNA, 1102 bp, Homo sapiens
gtagagagggggtttcaccattttggccaggctggtcttgaactcctgacctgaggtgatctgcccgcctcagcctcccaaagtgctgggattacaggcttgagacaccgtgccctgcctgaatattttatagatgatgctttgttaaaggaatatctagactttttagtctgtcttttttgattttatggaaaatacttaagtccatgggattccatttgttttctcccctgaattcctccctaggagtgtccaatttttgggaaagttgatccccctctcccagagtacaagaaaattccacaaagagcttatgttacatattagttatttggaactcaataccaataaatccaacatgacttggctaactctggaaatcaggcatacctgctgccatcctatccttgtgtcttgggcttagttaggggtaaagaggattcctgttgtttttgaacaagagatagtagctttttgttttgaaatcactgatcctcacaccgcaggatccagtttaagcaagtaagcggggtgcagtttataaagacgcttcccttttttgagggaaaaggtacagttaagaggagatagggtgaccagtgccaattaataggtagagactgtgtttgctatactccgaatactgtgttgacttctctggggtattgagaagagttacatattgccctcaattcttatatctcatctgtggatgtgaccaaaggtggtaactgtgtcatttagaatcagtttatgtgatgaagcagtttagaggaggggaaggctggtaaagatgtgtgcagtcagtaaagcccaggagaacacaatttccagatcatcttcctccaacaggacacaatggtctggggaggaatgcaattcagatcaagttgttggcagatcaggcatgggaatgcaggtctcctgggtgggatttgaaggacacattaaatggtacattacggagggatctgatgaactgggatcaaatgagaagggcctaggggagtgcatatgccaataagaacaaagagtatattcttaataagaagttacatttattttacttattttattttttatatttatttatttatttatt

SEQ ID NO: 111212 - DNA, 1027 bp, Homo sapiens
tatttggatgccatacctctaggtgggagccgtttaaattttgatttcttgttggtgagatatgaccctttgttctccagggttcatcaggatctcagcccctacacactaagcctgtctcatgttctgatagccttttacatcttcagagctttaactttctctcatctgactttaagttctatctttggttctggcccagggatttatttcttgtgattttgatttttttcttagtattttcttagttgttaatgatctctccctcagtttttccacgtgtttgaaacaggcagagcccttccctgtcacctcagctcaccatgttgattggaaactttattaccaccatcctattaaagaattttaagatatttttgtcaccaaattgcaatccctgatttctgcagaactttagatgttaagtattaattcagtgaatgggtgctctgcacatccctctactgagatgccatgaacctgagtaaccacatttttgtagtgtagcatagtcttatccgtggctacctccttacttgtagataactttctgtgcatgtctcagagtccgtcagttagattctagatttttacatggcatgtgaacccaacctgtaaaattggtgatctgaggcctgttgaccgccattattttcagatactcataaatacagaccttgttttcacatacctagtacataatcttacatcttgatgttgagactagtaaagaaaggttacttctatgtatttatctttcactgaagaaagaaatgaaatttcaatagtccaaattaagtcccttctttgtaacttgctcttgctttttttttttttaaacctctcttgtaattcgctacttccagggtagagatttgcagtcttattttgttgtaataaaagagtgtcctttttgtttggatgctctggatctatcactttcccttttccagcaaatagagtgggactaagaagccctgtgacaagtcttcaccaggaggaatcggatgccctggaaagaagccta

SEQ ID NO: 111213 - DNA, 1037 bp, Homo sapiens
agagacgttgccaactattttctagaaacattgatgcaatttggtctattgcctccaaatcccaatactattcattatgaacttactatagccagatttatctttcctgtagcccccacttacccagtttcatttctgtgattgcagtttcccatagtacagtacactaagatagttatgagaaatagagaccacattcacttgctctattttattattgggtatcattgttaatctcttactgtgcctaatttagaaattaaactttatcatcggtacatatgtataggaaaaaacatagtataggtagatagggcttggttctatccatgatttcaggcatccactggggatcctggaatgcatcccccatggacaaaggggagctactgtactttccttctaatatccgaggattgtggactcccctcttcttcgaggtcagtcccttcatctgtactcctgaccctttggcccacctcttttgagatctcaggccatctttacctcttcccccttagactttcagcctctccccctgaactgagtccttcagcctgtagccatgcgctgtgagcacttagtctcttccagcagccacgcattccctttcctgggctcttccacttgctctgtttattctgttatctctgcctccaccacttcactaaaacagctctccatcaaggtggacagtgacttcttaaatgtcaaatccaaaggtatacttttcattttttatctttattcatctctttctatcccgtggtacctctctaccattcttcctgggtcttcttcaaaagatggttttcctctgcacattctgttatgtgtgttctccaggattctgcactgatcctgtaatgttctccttctgtctatgttcctgcagtgacgtcactcactgacacaatctctgctcctttctatgttgtaatcacttttatgcctttatgtttttctcaagctgcttctccaggctttacgctcaagaatatctcagtatctccccctgaatcttccacgcttcaatt

SEQ ID NO: 111214 - DNA, 1049 bp, Homo sapiens
tttcattgcacaccctgctaagcattgctgccagcactgtggggaccagctctttggggactctgctttcccattttcctttccatccctcatctggaaacatgtccttaattccctagagaagatagaagttgagtttatgacttaaaaataaaacaaaacctgctagttatggcaggcctagacccattcctcactgggccctctaccaggctgcctctctggtttagaccatccaatccctacttcagaagtgactgtcagcacagctagatatagaatctaagcatcaaagaggatgaggccctggaagagggagggtttcctccttccttctcccaagtctttccttgctagtttccatttcttatctcaggatctgcttcttcccaggataattgaaaatgggaaatccacctctcacagcgcagatcctaacccctttccacagggctgcgatggcaatagccacagctgtcaaaaagtctagtatcagtacagaagctccccatataatcctaggaagttcctttgctagggcaggggtgagttgataaaccatagtgggtgtatattgatgtggtcaagagtctttgagaaaccactttgtggtgaccttttcaccaacagactaaggtaatactcctgacctttagctcaggagttcgattagagaagatagaggaacacaggaagcctgagtttacaatcatggttgtaccacctccttatgtgaccttggagacatcaagtacctcttctgcagttctcattttcttatccattaaatggtttcacatgtaacatgatttttaaggtccttgtcaatcacgaattctatatatctataataactcctaaaagtacctcatacaagttttgaatagattcagcttgtctgtatctgaaggtgacggttaccattcttaacaccgacttggtttgtgactgcggctgttttgtggaggcccacgcatctattgctggaaaaggctatccccccattatttggtattataccgctgtcttggtatgcttttgaaatacaa

SEQ ID NO: 111215 - DNA, 1567 bp, Homo sapiens
caaaaacaaacaaaaaacaaaacaaccaaaaattagctgggcgtggtggcacgcccctgtagtaccagctacttgggaggctgaggcaggagaattgcttgaacccgggaggtggaagttgcagtgagccaagatggcgtcactgcactccagcctggcgacagagcaagactccgtctaaaaaaaaaagaaaattatagtgatttttttctttttttagtgtagagagatagggtcttgccctgtcgcctaggctggagtgcagtggcacaattgtagcccattgcagcctagaacttctggcctcaaaggatcccccacctcagcctcttagagtgtcgggattacagcgagaaccatggtgcgggacctgtagtgctttttaaagtgaaataacatagcaaagcactggcttgcagtggatgtggaatcaatgctgtgtggcaaagatatttaaaaagtgccaagtgagcaccatagatggaaaattgaggaataacagagaaaaagagagagtattttgacttggagtgtgcgaggccatgtggcctgtgtggccttgaggatgctgatgaggcagagaaggtatgaagaatgggccagtgggaagagaagcaaaagaggaagctgcagttttgagactggatagaccaagaaaagagataggagaaacaaggggttgggtttgttggggtgatgtctgtcttagacatgtcaggtttcagggactgctgaaggctgtaggcctgggtgcgtgtgtcagacactgcccttgatgcaggctcagccaggggtgggtgaggaatgaggtccttggccctccctgggcagggtgtttggtcagtgtaaatctggaaaagggaatctttctgacttgttggaaatgtccgcacctgcacagcgtttctcaccaggatgggaaacacaggctgaatgttttaaaccttgaagacctacctcttcttcagacttgggtagaggagaactgaacttttctgtgtaatttttacccactgtcatcctcttccacgggtctctttttttttcttctcaacgttcttcctcccaactgagaaccattaattgcttcagaaaagaaatagaattggatttcttttttttttaagaaatggactaaatgctctaacactgaagaactatattcctatgtgcgtcagtttcttttcaaccattagctcctttatgatctctttatacagggtgggtatagcccacaagtaactatggttactagtttttataggttgtgaccagtctgctgtataaggtgttaacattttgcccaatctgccttatctccatctcttctgtttttttgtgtctgtgtctctttacacgcacacacttaaaacatgtttgctgaaccatctgagttagttgtagagattatgaccttttcaacatgtatttctcaagcacaaggatattttcccacatagcctataataagatgatcaccaataaatattatctgatatataaataatacttgaatacatgttcagatttcacctgttaccctaatactgtcttttatacccgcctc

SEQ ID NO: 111216 - DNA, 1016 bp, Homo sapiens
gaatttcatacagaatttcacagtttttctttaaggaaaaacatcaggtaggactgtgggcagaactatagtatgaaaacccatatcctgcagtgagaaactcttacctggaagcgggaaaggagtagaacgcagagtgtgcagggcgctgccaggcctgctataaccaggagtgccctgcataggccatgggatggttgggtgccttctttttggccctgcctgtatcccagatacttgtggccaagcaagtccctggaattgttgcaggcattgcagtgggagtgaaatgcccaccagctgggctacatcttccacgactgagggaatataacttggtattcattggaactccactgaagagaggtcgggtgctttgggagtgttttcttgcaaatatgtgccctctaattgccttttcctaatgatctctcctcattctgctttggaggtggggtttctccaaggatcatttcttttccacctcacctgcaggtgcacagtgaatgatgctttaatttatttcatttcaccttgctgtggaactcagcccatcccacctctgctgtgagaaaagcatttccatctgtttcaactttcctgtggttctgttgacccacttggaagagctccagtgtagtgcctgctggtttttttctatctgcccttaatttggtttgccttttattgtattccaactgaacggattctttctctttcttttaagggaaaggacctgagaaaaacaatacttgtaatggcgactgcttgttaagggtaattgctgtttcatgttaatttgcatgttaaaatgagaatatagggaattgctaaattcaccaacctgttctatcccaaggctagtccttttaagtatatttgttgcttaaataaagatggagctatgcagaatggaaatgtccaaatatgcagttttttttgtgcatgtatatatagagagagcatttaaaatttttatttccatcagcaagagtcattatacaatacatggaaat

SEQ ID NO: 111217 - DNA, 1062 bp, Homo sapiens
gtaatagccaagctcctcccactcctaggcctgaggggtgagggaggaagcagtttccaggggaccctatatagagagccacctgacaggacccagggaatatggtgggaaaggatttggctgaaccaaaatgggagccagtgggcaagacagcctgttgttaaatgggtcagcttcccagaacacacaacacggtggcagagtagagggcaggtggaggatttccatcctaggggacacctcaggagtcttagctgcatcccaactctgtcgctttccctcactcccaccaccagccacaccacagatgcgcacgcatgagcgtgtacacacgcacgctcccaagtaccctctggtattcttccattgcttttctgaccaggacagaggaactatttattaattgtgaaatttgaggacatttctcattatttttgtggtatttgatgctataatatttgcaagacaaggaacatgtgggtagctctacgcattccattttccattcctgataaaaattcaaagcacgtatgttactgatgctagagttaaacattttattttttaaaagtatcatttctaattggctgcagaaggaaaaatacagtaagcaggacattaaaaatcttggggaactatattcagttttggctattctggttacaaacaaagcaagcattgaattttagccacttcaaacagttttcgttttccaccgttgagcatgttaaaactgtgaagacacagaagtaccattcagtaaactgcttctttcagcagcttctgtgatatcccagtactttggaagccttccattttctttcaggtacaagaagttaacaccctgaattagtcactatctgtgtatataaagccaggagctttatattttgtactgaggcagagctgaagtttttagataatttgatcttttaaaaatatttgacttttcacttgatttaggttctgagaatcaaaggttctactaacaaaatggtcaacttggcaaagagaaatatgcagaagtcaattttaggctgtattttgcaagagcgcggtgcc

SEQ ID NO: 111218 - DNA, 1060 bp, Homo sapiens
attcatttattcaacaaatatttagtgagtgccggctgtctgcttgccactgttcagccagtgacgatgaatggtgagcctaacaaaagcccctccttggggaccctacattctcataggaggagatggatcgtaagcactggggggaagaagcaccaggaagaaaagacaaagggggagagagagagagagagagctggggcaagagagggctgctggagatgtggtgctgggccaaggcttttggccacaagaatcaggtgagtaggaatttgtgacatgaagactcaggaggtggcattccaggtggagggaactgcaggggcataggcccccaggtggagccagtgcggcgtgtttgaagaatgggaatgctgttctggaggccagggcagaggtgaggacagaaaaatattggtggggcgagggacaggtttcggagggcatggcacggcagggcagaataaggacttaaaacatttttaattctgggagagacgaaaaggctttgagcaaagaactaacttgatctggtaatgttttttaaaaaaatcactgaaattacaagatatatcctctgccttgtggtttattgcagataatggcattttgtggattaaaagaaagaaaaaccctttcagttcaccagccacaacagttagctttaagagtgttataaaagtaggatcaaaacaataggaattacaggccaggatcttcttaggggagtgttcaaagcttcaggtatccatatcagtccaggtcccataagaaaacaggtggcatatggtaggtaatgggaagacaatggactctagtgtggagggaatgccactcctaccttggtgcttcaggacaattaatctgctagtgttgtttagaatggattgaagaacagaggggaagaaggtagggagaccaaattgtttcattaaattatataaaaaattttcaaaaaaagtcagcttctattgtggaggaaaactattgtacagaccccagtcagaacagtgaagatacttgtactgtcctcaagtgtcattgtacttgttgattaaca

SEQ ID NO: 111219 - DNA, 1056 bp, Homo sapiens
gaagtactctcattctctattttgtatctagggccacatagatgtgtttgatgtgaatcacacctcttcattatgtgtggccgactcttctgagtaataccatgaaaagtgcttcttcaaattccatatcttcacatattgctgttatgtaagaggaatgagactattataattgagtgaaatttaaaatcttgtgctttaagttatgaaataacatgcttttggctatgccatcctgcaacctggccttttcagcaaattttgtagcttgtggggacagatgaccctgaattccagcagcacctgcaatcaaaatagttctcattccagggcccacacaacagggtgtgtttgaaagtacttaaaaggaaagtgtaggcaacgcattgtacccttagtcataaaacattatcctggaatttgccttgccccaaagcttgggaagccacccttttctccctatcccaaagtttcattgtaattcccatttctgaaaagaaagaaagagtacgatggaatttcttcactaggatggcagattgaaggtacttaggtgaggaaagagacgctaacagagcttgtgtgacaagatgaccaaaatctgggtggaaggatagtcttagaagagtgattaagtgatgtttatttacccaaataaactatttttccagccaattataacaaatgcatttattccatgtttaatcagttgtagaatatccagcagattcatggggtagaatgtattttatcaagacaaaaatagccagcttgagaaatgatttaaaccagagatcagcaaactacagcttggaggccaaatccagcttgccacctgttttttttatatggcccatgagcctagaatggtttttacatttttaaatgcttgaagaggccaggcgcggtggctcacgcctgtaatcccagcactttgggatttggggaggcgggcggatcacgacgtcaagagatcgagaccatcctggctaacacggtctctactaaaaatacaaaaaattagccgggcatggtggtgggcgcctacagtcccag

SEQ ID NO: 111220 - DNA, 1061 bp, Homo sapiens
agtggggtggcagggatggtttcaggatgatctaagcacgttacatttattgtacactttatttctattattattactacattgtggtctataatgaaataattttgcaactcattgtaatgtagaatcagtgggagccctgagcttgtgttcctgcaactaggtggtcccatctggggatgatgggagacagtggcagatcatgaggcattacattctcataggaagcatgcaacctagatccctggcacgtgcagttcacaatagcatttgcgttcctatgagaatctaatgctgccactgatctgtcagggggcagagcccaggaggtaacgtgagcgatggagaccggctgtaaatacaaatgaagctgtgctcattagcccactgctcacctcctgctatgcagcctggttcctaacaggccacagactggtaccaggggcccctggtgtaggggataggccagataagtattcacatgactgacatgcagtgtgacaatgtatctctagaggtaagaacaaagttttgtgggaacagagatggaattaggaattctgttgggtggtagactagcagggagggcgattatttaacaaggtagaagaggattaagtcttaggaacattaaaaaacattaaaaagatttaaaaaatagatttaattcaattacttgctttttgagtctaaaagaagggaaggctttccagagcatatagttaaagtaaattgcagataatgaagataatttcagaggttagtaatggtagaatcttgtttatttactctgaatacaattgtttaaggcctagccaaatgagaggctatcagaaagctgtctggagttagttttaacacgacaaggtaacagctgctgttctcaccagaacctcagtcagctttctgttttaaggagaattaaatgaatttaaagacttatttcctctttttaatgatagagttttcattaatattatattttgtaattacactgttttttgggggaaattttgcagcaagtacagaaagtttccatgtgacttctactgccagtttcc

SEQ ID NO: 111221 - DNA, 1051 bp, Homo sapiens
tgccaaggccccagtgtaaagattccaccattgtgtcttgtgtttttcaggatgccaagagcatcagaaatgagtgtgccaggagtcattaagggccctgctcctgtgagtaggtaacaccaggaggcattcttttatttatttaatttatttgtgtatttgaaacaaggtctcactctgtctcccagactggagtatagtgacgtgaacatggctcactgcagccccgacttcccaggctgtagtgaccttcccacctcagcctcctaaatagctgggcccacaggcatgtcccaacatgcccggctaattttttaaatttttgtagagacaaggcctctctttgttgcccaggctggtcttgaacgtctgggctcaagtgatcctctggccttagcctcccaaattgctgggattacaggccataagccaccatgcccagcccgttcttttaacttagtgacagttttatggcatggccagtgatagagaaatttggatgcgataggtgagggagggaaacaactatggttctctgtctgtggcaagtttgcagagtaaaaaagaattttttatttctaggaaagtgttgttcatcactggaagtgttactggacacttgggttttgaacgtgtaaattaagaacttctgtgatcagataaatacttcttcatttgttagctctgttcagataagaggcagaccgaagatcaggctaatatagcatagataccccatttctgatttgtattcctgcagtcttaaaccccttatttaaaaattctcttaaaatacatgttaattgtagaaaatttggaaaatactagaaagaaaatacaaatagctttccattccataacccaaaagtgctgttgttcatacttaggtgtctttagattatatgcactcagtttgtagaacaaaattgggatcataccatacatatataacttgatattttgctttttttctgctgttcctttcgagatgatttttgggactgaggtttcaactgaaggtagagattaatgtaatgttatgcttagcaca

SEQ ID NO: 111222 - DNA, 1046 bp, Homo sapiens
tgatctcccttttggttctgattgagttggaccttgtgggaggagaaacatagatgttgatacatgagcacatatgttggagagagaaagttttatcttggcataggacttttaaaacacaaggtaatttttaatcagttttgggaccaaaaaacactcaatatgggaaaaatccaaattctgccaaaatgtctaaagaggtttattctgaaccagtataagtgactgtggtctaggttacacaatttcaagagatcctgataaagcgtgcatgagagagttgggctacagcttggttttacacatttcagggagacaggaattgtagggtaaaattatggcacaggacttttaaaatgaagctgtgaaagtttacagtccatagagaataaaaatctagaagtttaaaagaaatgattggtagtttctttactcgttcagaaaaacaatgccatatttcccaaaattcctggttatggaaacgcaaccaggaaatggacttccttaaggcaaggacgaccatcctttgttggagacatttgattggttgtactattgccaggtgcatttgtgttattttacaaattctagtagaagcgggtataatggtaggagctgggcagagaagtgtttccagtcatttttcctattagaagccatctctattggaggaaaaaaacaaggcctgctgcctccaaaggttaatcagtaatgacataattcaaacagctggagaactggggagaaattggagtttagcaaatgatttcttgcatgtgcgattgtgttccatttctctccattcatttatggagagaatgataaatgtatcaagggtggtgaagtatataaagagcattgttttttaaatctcagtaatttatggacctctatttagaggaaacatttctcacaaatcctcagtaataaatatttttattatgaaggagcttcaatataaactaggtataaactccttacgcgtctagctcttacttaactgtaaagcagtgatagatttatagagcaaattcaaacaaaactac

SEQ ID NO: 111223 - DNA, 1067 bp, Homo sapiens
aactatagggataatttttcttttccttaagaaagtaatcttctttctctgaaagctgaaaatcagcttatattatcttttactcctcctgcctcctggccccaggtattcagttgataaaccatgtcacttccttctttctttggtcattcttgttgacctagtgcagggacccatcaggtggattattgaaatccaaactggaatcctcacttctaatacactcactaatgctttagaatacagatccagggctattcccctattcaaaaatgcgtgatgattctcaaatctctcagcagatatgtggtctatcattaccatactctttccccccagatcttttacccacctgtgctgctgctgttttaaaatctgccggaatcatccctgccttgtggcattacccaagctgtcctctatgtcacattgcatgttgctccatctgggcccaaactgccattttcaaagtctagcctaggtcttaccttatcctggaaattcttctagagtcctcttaagtagttctcacttatcttccttgaattaacattatagagcttatcacctttcttggattgtgtcttcccagagataaagaccatatcttattcaccttgttattccacacaccttgcccttattgatactcagtggatatttgctgaattgaatcaacaattaaataaaatttattatttattttaacagagtcttactctgttgcccaggctagagtgaagtggtgtgatcagagctcattgtagcctcaaactcctgggatccagcaagccgtcctcccacctcagcctcctgagtgctgggaccgcaggtgtatgccaccttgcccggctaattttgtttatttttttgtagagacatggtcttgccatgttgcccaggctggtctcaaactccagggctcaagcagtcttcccaccacagcctcccaaagtactaggattacaggcaggagccactgtgccttgcctgttctcttaaattattttatgatgagcatgtatgtgtgtctatgtagagggtgagatagagagagaaagaatgca

SEQ ID NO: 111224 - DNA, 1038 bp, Homo sapiens
ggtacttctctgaagtatagttttctgcctaagaactaacacactcttgaattctccagtttctcccctggccgataggaatctgtctagttatctctgaagaaatctccgtatttggttccttcatcctttgcctgagaatattgcctgggtccaggagaatttagctgctgttacagtgtaacacaccctgaaaaaatcagtttgggtatttcaggcccccatttttatgttaactaacttatgattttaaatggtaatccttctgtgaacagggactacttaggatagctgcgatttagcttgcttttattagttcatacctgagataaaagcgagtttttcatgttttttaagcaaatgaaattttagctacagttgaactttgttcccatggaagttattagtagagtctttggtgttggagaaagagtctgaatttccttgtagtggtaataaccagaattttgaaagagaagatgacagcgaggctgcagagggaagtgaaaatgtactaatgatgagtatagatttatttcagagtaaaaaaagtgtagtgtgttaattttagaagcatttcctttcttgatgttttaccttgcaacttgaagtttttcaatatcctaaaatgagctgatttgacagtcaaaaagtatccttgaaaaaaatgacagcttggcatcttttgcctggctgacttttcccccttccatcaggtggaaagaaaaagcagtggtaaatttcaggcatagtcagagggaagccatttttacataattttagtagctcttacttgagtgcttactgtgtccatactatttcaagcatatggatttcatttcaagctgaggatgtgggcagagcccactcccattgcgtgaagtgcaaagtactgtaccaggcattggcgtatgagagtttgtaaaccacacttagttcctgccctctggatgctcctaatctagtgggggagaccaagagcctaacaaatcatcatttgaaatggtggtagtttctatgaagagtaattatagagtg

SEQ ID NO: 111225 - DNA, 1825 bp, Homo sapiens
taagctgtcttgtgttattttccctcattgcattagcttttcatttgttttgcttctttttcttaaaactttgatcctaaactatgggccagtgtagataagctacaaaatgtctgagttcagaattgaactaaacccatggttttggattactttggtttacggccagaattactgacattttttgtagtgatagtaagagaaaatgttttgcagtgtctcataagggactttttatatattactttttgattctgcttttgttttttgacctttgggctggtaggtgggggccaagcaggattgggagggggaagaagctggaagtatgctttctgtctaatgtaacccagcttgtcctctgagggctctggtttaatttggttaatgctgtaaactgctaaaaaaaaatacattctttatgggaattgggtgtagatataatgttactaggaaagagacaataagcttgcagttttacagatggtctcattttctttatttggttagaatctctttttggactctttatgctttctgtgattggtgtgagtctttctgtttttattttgtccgtgttttattaccaactggttatatttcagtaacagagccagggggaccagaatctcttaaatattctgtacagaattttgtgtttagagtgtagaccctcttatctgggaatatcatgaccagcagctggttagttatttaaggtggagaaatgtgaaaaatgttacattcatgtcttaaacattttatttcaaacatgtttgctaatttctgatatggggccaagtcctgataagtggcttccatgttggttttgtacataaacttcacctatgatgcatgatctacacagttttcagtttaggttgctttaaagtaagaactttaaaatacttgtgaatatcttgagtgtagaatcctagatttttatgatttgccttccagtcttttgctgttttcttcctcacatctaatatcatggcatttattttagtgtttaacttttattgaattattccaaatcattcaaacattcaacttcattttcgttgaaacattaatttatctgaataaaaaaattaaaaaacattcatttctctgaatattgtgtttatatacaatttactatgtgtttatatatttaaattgtaagaacaactggtgtaaataggaataaacatatctgaccatagggaatgatacagcttgattggtgggagcagatcactactttttaatctgtatgtgatgaaaatctagtcttttttatttccaatcttttgtggacctgtacttttacttaaaaaacaaacaaacaaaatacaagccttattttttaaatttatttttaaaaacgacagaaataaagttacattttaataaatgtagttggaaaaaacagaatatagggaagaatttctaaatgtgtactttgaaagtgtacatgtcttggcaattcacaaagaattactgttactcttgttaatttttattccatttataactaagcaaaaagttatgagtgaaataatgattcttcatattaaattcctctgtatatactttgaccaaactctatgtatatcaatatttagagtttttaatgtcacaaatgaattcccatcttgcttgttaacctatctaactaggctgggttggtgacaagcttgtcttgaggctaatgtctatccaaactatttctagttttccttaaataatactcatggtagaggaactgatcttatagagggatgtggatgataatgaatgaaaaaagacattttaaaggaattctggaacgctcaggata

SEQ ID NO: 111226 - DNA, 1166 bp, Homo sapiens
atcaagtagttgggactacacgcatgtaccaccactatgactggctaattcaatttaatttaatttttgtttgtttgtttgtttttttgcagaaacaaggtctagctaagttttacaggctggtcttgaacttctagactcaggcagtcctcccgtctccccctcccatggggctgggattactgacgtgagccactgtgtccagccaagtttactcttaaggaccctgaatcaagcacacataaccccaccttcatgcaggtttactttgatttattcgggattcacaggaccatggtgtttaaaagcatttgtgtccttgtaagagatagcgaggagggggtcaggcatgctgccttacactgatggaagctcttcactaacccaaacctttgcccacagagacaaatgatttctcaggtttgtgtccattctgagagctgttttgttcctgtactttccctttttgtcttatctgatgttggtctcttaaattcagcattgaaatttaagtatgaaagaaagagaaggattagttggatgttgtttgtattaaattctctaatgagttaacacgttatcaagtaccattttgtttgctttccctgaggttttaaaatattatttccaagataagattcccaggcagctgtcttccttacttctgaatttatatataatctagtgttattaaccctttgtagttcttttttatgccagtatgtgtctgttttgggaatttttaaataaagccagctgtgttaaatattcacagaatcgattttcacttgcttaaagtctttagtgatttatcttcagggagtattaatacggcagtaattctgcattacatttcttgtaccagcatttaattgatgctatatttcatgaggattattgcaggtttattgctgttatatttagagttgtggttctgggctggtaatctagaagcgtgagattcccaaatctgttgttccattttaattgtgtgttcttttgagctgacaagtttgagaagggctgttaactatttaacagacctgatagataaaaactattttagtagagtagacctggggatactttacctgtgtatgttgtgtgaatctatttttttacatgacggtagatgaattgaatctatacatatttttaaattgata

SEQ ID NO: 111227 - DNA, 1091 bp, Homo sapiens
gacagggttgctccatgttggtcaggctggtctcgaactcctgacctcaggtgatccactctcctcggcctcccaaagtgctggaattataggcgtgagccactgtgcccggccatgctagtccctttcgagcaagttctagctcctttcttcctaacaggatagtatattaatactgagttcttaaggagtaagagtgtgttaggcttacatagaattagtcatgaagtcataagggaagaaatatttgacctaaaaggatgtttactgcgattcacttgcatgaataaagaaaatgaagaaattatacataattagctcttgggataatttacatccaaaaacaattttaagcacgtttcaatttcttctttcacgtgtcttaaaatcaagagttataagcaaagtataattaacccacttgagtttcatcgtctcccattatccaaggtaagggagcggaagacccaaaaaggcaaccgaaagagtagcgtgaaacaaaagggcccttgagttgtagccttgcccctggcaacttccccaactccccacaatggcttggtgaaacagtttaggaaaaactctgtgcctgcttggaattgaatgtgggtgaaggtgtgaacttaagctttcagaaaacctgtgcaatttcataatcaaaggagatattaaatgtttagtttctacaaggccatattagctcttaaaaagattttttaaatgtaattgatgggattaaatttgatcactgacgttcctgctcttttgaagagagcacctattctgttaacccataggattcatttgatcaaatgtgatttttttttagatgaaagggacttctttcaggggttcattcttctccactgagttcacagagggaaaaaaggaaggaagtagaattaaactatacaatgaaaacagctttggatttaatacaggagaagcttttcttaatgaggcctcttgaggatggtcatagtgtaggatttgtaaatcattcccttgtagacaatcaaggtaaagtgatcaggagtccttgaaggtgggaggtcattctggtccactggaagacacaagaaaacatgtgc

SEQ ID NO: 111228 - DNA, 1021 bp, Homo sapiens
tgtaagggttgacacattgtatttttgaacttcttggaatctgcttaatggcaaacaggttgctgagaaccgaaggtcttagctgcaaagtgagcatacatacacagccctgcaaagctaggtgcataccagacaagtgaataacatactaattattatcctaccttggtagtaatagaattgtagcttcaggcactatgtaagacctagctttttgagctggcaaaatagtgattactatttttagttcaatttctgctctttaaaaaaacatagtatactacttgctactcctggatggttttatgtattttaattaatgttatcttattgcatttgtaccctgaggctgctttagtgaaagatataatttcagaaggctgatgaaattagataggtctgactaggaagactctgttattcatatttatggttataaaatatttcgggtacatctgtgtaagacattcttgtgctataaacatacagacactgttgtgaatcaatttgccttagagtgtggtagagtagttacagaccagtatagtagctctagtgtgggggtgatttgttgtttttgttgggggtgtttttggtattaaacatgactttacatttttcacttgaaatctcatcgtgcagtgctgtgtaaagaaatgaaagtgattctaaaccaaacacacacaacactcctcagctctattactttatagtcaggcttaacacattctgatggaattggcatgaagtacgtgaccaggtagaaatcagctttatttggtctaaatgactagccggttatagggcatggaaaatctattttaaatcactttccagagccaaatgcaattaagatgttgcaataaagtgaaggccaattctctgagaaagaaagaaatactattttgaatgaaaaaaatactattttatttgacatagtcaataaagaagaaaagctataataaactatttataatgataatgtgcagagcagagttttctttgaaatgggagttaagaa

SEQ ID NO: 111229 - DNA, 1717 bp, Homo sapiens
atcattactatagtgaaccaaattaacatatccatcatctcacagttccccattttttttgttttgtttttgtgccaagagcagctaaaatctgttcatttatcaggaatcccaaatatagtacagttcgttagattcctagtcttgttcatcctacatatctgctactttgtatcctctgaacctatatttccccacctcccccattccattccactgttttattctctatctctgtatgtttgatattaaatttttttttaagattccacatataagtgagatcatgtggtgtttttctttccgtgtctggtataataccacttagcataatatcttctaggttcgtccatgttgtggccaatggcaagatccccttttttaaggcagaataatattctgttgcatgaatatatcacagtttctttatctgttcctttgtagatggacacttaggttgtttccgtatcttggctattgtaagtaatcctacaatgaacatggcactgcagatatcttaatgagatggtgatttcatttcctttgggtatatgcccagaagagggattgctggctcctatagtagttctgttttgagtttctttggtaacctccatactgttttccataatgactacaccagtctatattcccaccaacagtgtacaaacgttcccttttctccacaccttcaacaacatttgttatctcttgacttttttgacaacagcattcctaatgggtgtgaggtggtacctcatagtgcttttaatttcaatttgcatttccttgatgattaattgatgttgagtttcttttcatatatctgttggccatttttatgtcttctttaggaaaaatgtctatccaggtgacttattcattttttatcaggttatttatttttctactattgagttgtatgagttctttataaattttggatcgtgaccgccatattaggtatatggtttgcaaatgctttttcccagtctcataggttgccatttcattttgttgattgttttctttgctgtgcagaaaaggttttgatgtagtttgatgtagtcccatttattaatttttgcttttatgacccaggcttttggcgtcatatccaaaaaatcattgccaaggccagtgttaaggaacttttcccttatgttctcttctgggagtctttatggtttcgggtattatgtttaggtcttttatccattttgagttgatttttatgtatggtataagataagggtccagttttgtccttttgtgtgtggaaatccagttttcctagtactgtttattgaggagactatcctttccccattgtgtcttcttagtgtgcttgtgaaatattagttgactctatagaaccatcttctttcacacttggatttttaaaggagggttgggggagaaataaaaataaatgaatgcgtagaaataaactttaaaaagatttgatagctgttgatgttgtcagtggacaccaggttgggcaggggaattagattgttgcagattgttcataacctagccacgtggttcgattatgttaagcacataggcattaataagggggagagaaggctgtttattggttaaagtggacaaaggaggaaaatacatgtggtagaagttgtccaccctcctcatcctccccactccagtcctctggtcccatgagtgaaatattttatcagtctgagcgttc

SEQ ID NO: 111230 - DNA, 1038 bp, Homo sapiens
cctcatggtgccacagttgactcatctgtaaaataggactaaaaagaacaccatcttcctatagttgttttgaggataaaacaatatatgtatagcactttgaacagtgcttgctgctattatatttcaaaaaccaattgtttcaaagctaaaaggaaatgatttttgataattctacaaatatctcctgaacttcctctttaatgacaggccatatgctagccagtaagtgtacatgttggcccaggcagacaggatccctgctttcctagatccatcaggcgcttattcctccattaacatgaagaagaaggacatgttccttgtggtagcattatgggcaagagctgggtgtagcctttcctgtggacctcagagacatgtattagggaggtggtgaatatggagccagactgcttgggtttaaattctagttcttatcagctctggccttggggagtgatagaatttttgaattatttctctacctccacatctgcaaaatggagacaataatagcgcctttctcagtagggttattgtaaggattaaatgagttaaaatacttaaagtacctagaatagtcagcacgtaatgaatattgttatattatcaaatgaaaccagaaaggcctcaaatttgtaaattcattcttttgcattttattaagtgtagggagttaatgcataaatcagatggagctcttttccacatagagctcatagtcaaatgggggagacttattcgtctacatgttagtgaaatagcatatgaacaaagaatatgggggtagaaagaagagtgtgattaaatctcctaggagtatcaggaaaagttgttttaagacgggttttgaaggttaagtaggagtttgccaggcaacaaaggcagaatagagcttagaggatgtgggaggaagcatctctaaagacgttggcaggtacagcagacacccagcagtcacagtgctacaagagtatagactctggagccaggattgaaattctgccagttactgttgtatgaccttgagtcact

SEQ ID NO: 111231 - DNA, 1518 bp, Homo sapiens
gcttgagtttagagtatccagggcagttgagcttgtagccctacctgtaagtatgctttggtgtaggaaatggccatagtttttgtgtttttctagttcctttttgtccgttggctttatttcccattgtctcatctcttgagatttttaatagctttgcctttcatcccttttttcccagggacccaaatttatgcccttaatgagcttttccctagagggctgagaattatatttatgattttccttagctctgtctattttgggaatggtgagaaaatgggaagcgggtcaggggagatgttgcattacttcctgattgccatagctcccttctctgtaaaatcccgtgaaggattgagaggcaggtggtagtgcttgcttagtaactcttccctttacacccaccagctccactcccaagttgggtgcctactacttccaaaataccccgtaattgggtcacaacattatctgcctgcttggaatcatatttaaaaatcaaagcaaagatgcagactatgtcagcaggatttgaaatgtttccatcctctgctttgaggctttgcagaattattctgaaaacaaaagaaggtaaacttgttatcccaatgaggtggcagtttctatgtggcctagaattatgcctaatttttgcttgtaaaagggctcaaaccatgatcctttctgactttccacagggatgtgagcttttgtggacatcactcaacagatcagatttactgttgaattttcataacataattgacttggaaagcatttcattcagtgttttgaatggtgactagagagaaattaagaagctcagttgttatatctttcgaattcctttcccatgacacagtcatctctcccctgaatgagagcagtggcctcctggcttatccagctctgttcactcagtttggcttcccaagtgctgggcactgttccagatgccacacgtggacactgaccaggatggccactgcctctacctgctcggagctctgggtctatagagaaaggctgacagctaaggaatgaatgacggtactatgtgatacgtattactgggagaaatactcagtgcttcccagacgagcacttatcctgcttgggtgtggggagtgtgtggggcaaagcttccaggagaagggatgctaagtctattccacagtgcacctggacctctatcttatggttccttaaggcaccctgactctagctcccgcatggagcctgctgtttctgaatgcgtgcctccaccttccctcccacctcggttgcttctcaccttggaggctgcacttgcctttttcctggtctctttctgtttctactgtacactgcctccaaggtgatcttctgaaatcttctgcagatctgggcatatcatcccaactcttcaggggctccttgctgccctcaggatgaagtctaagctttttgatgaggcaccgaacatatttcatgatctgctttccatctcgttcttacgacatgccagattttctc

SEQ ID NO: 111232 - DNA, 1975 bp, Homo sapiens
tctgcggggagactttctgctcttgagcacacagatagtctgagaaagaaacctctacctaggctgcaggggagggggtcctgtgctttgcttcccaggcccacccttgtgaaattttggcaagcctttcctgtgtcccagcctttgtctcctcgcctcgatgagaaatgcagcccttggtctctggaatacgactttcactctcatttgacgttagccctgtcactgtgttggacagatgcctgtgattggctgctgcagtagcaggagtggtggctggtgaaatgtgtctactcagtgtcattagcaggatcatgagcttttttttcttttttcttggcaagctgcgatggggcagagagcaaaggaaaccaatcccatttggtgtttttagtgcattttgctttcaagaggctcacaaaactcagcctcattaacctttaagtgagtcagtgaggagttgttatcccattgaaataatttttaataaagggagagtgactctagttcctctaataaccaggctccagggttcctggacccctgttaggagtgggtcattaactccagacattagatgagagctgggagagaggaagggcatagagggtggaaggtcaagtcacacaactgggcaggaagtaagaagcttgatcagtttaaaggtattagagctctttgtgtgtagagttacaggagatattccctttctatataatttatttccatggtgtttgaatcttatcttgttttctgtaatggacgtatatttattttataatcagagaaaaatcccaatatataatttattgatatataaaatgtacagattcacatggacaaatacgagaagagaacatggaaagaaatgaatggtatagaaaaggatggattaaagcttttctttgttgttggttaatgacttgacagtggttataaacaaagtttaccagttctaccctctcttttcctcttgtggaaatcttgcaaactttgtttgctaggtaataactgaagttcccgaagtgtaactcattggcaagtatgcttcaggaatgcttagagtgggaggaagagtgtcgttttttttaagttgatgaaaaagaatgcagaaaccgggagcagtggctcatgcctgtaatcctagcactttcggaggccaaggcaggtggctcacttgaggtcgggagtttgagaccagcctggccaacatggtgaaaccccgtctctgctaaaaatacaaaaattagccgggcatggtggcacacgcctgtaatttcagctactcaggaggctgaggcaggagaatcgcttgaacccaggaggtggaggttgctgtgagctgagaccgcgccactgcactccagcctgggtgaaagggcgagactctgtctcaaaaaaaagaatgcagaatattggaatcgaggtagaaggaaaaacgtgtgtttaagagggtgagatagattggagagactttgcggaattccagagggtaaagggaaatgccattgttgaagaaggaaggcctggcattactggaggtatgggatgtgtccctgtcgtgtaagtcagagctcagtttccacacaatataaaagtaaatgagtatctcctatatgcagagcataatgttagccccacaggtcatttattgttggttagtggttttcactgttcttatcacaatgatgataatgatgtagtgaatatgtcataattgttcaaataagaagatatgtccttttctctgatactatgcctttctcatttttgggtaagattcttttatgatttgataggaatatttttatctagccgctgaatggtccatgaaattggtaagtctgggaatctgggcctgagatgcagggaggcctgcccttgggattgagttgagtcatggaggccaggccaacatgtggagtttgtgggtcagctgatggggcccctgggctttccaggaatatagagtcac

SEQ ID NO: 111233 - DNA, 1382 bp, Homo sapiens
ctggagtgtagtggcgcgatcttggctcactgtaacctccacctcccaggttcaagtaattctcctgcctcagcctcctgagtagctgggattccaggtgcccgccaccacgcctggctaatttttgtaattttagtagaaatggggtttcaccatgttggccaggctggtctccaagtcctgacctcaggaggtccaccagtctcggtctcccaaagtgctgggattacaggcgtgagccatcacgcctggtctgttcagtgctttttatgtgtcctattatcctattaaggttttgtatatatcatcttatgctgtaagcatctatgcataaatgtcagctgtctaagaaaacccctctgaaaaggtagatgctcgtgatttcacagcaatagagctttaaacttttatcttatatgaaaatatctttaattgattccattattattcagtaagcattctcttttaaagcatctttgatttgttatttagaattaaatttgattggaactgcatatcttcagaatgatttgaatgttttcaagaaggttctatccagattttaaaactgttttgtgttcatttattttcaataatgttgcactaccaacaaatgaaattagatgtcagaagataaacccagattagccattttgattttaatgtgttattagtgcatattctgcatgctgatatgtgttgacggcatttctctcagccgaaatggtttgtcagaggcagagtaacagactctccataataaagggtctggggggatttggaggaaagactactaaccagggaccccaaagacttgcctttggggctggcttgtcccttacttcaattcactgtgttacctggaaaaagtcagttatgtctctgggcctgttttcccatctgtaaaatgagagagctgcagtcaccctctggttgtctatcgggtccttcttgtcccagtctagagatctgtgatgcagccattcgaggagagaggtcttcgtttaagagcaggggtccccagccccctgcttcggacctgaactggtcagtggcctattaggaaccgggccatagagcaggaggtgagcggcgggcaagtgacctttaccacctgagctccacctctgtcagatcagtggtggcatttgattctcacaggactgtgaaccctgttgtgaactgcacatgtgtgggatcttggttgtgcactccctatgagaatctactgcttgttgatctgagttggaacagtttcatcccaatccccaaccccatccgtggaaaaattgtcttccatgaacgctgtctggagaccactggtttagagcattatttggaggtgattttgtgtttccctgtctggtttgtcactgctttgt

SEQ ID NO: 111234 - DNA, 1064 bp, Homo sapiens
tgatcatagggcggaaggtggtggggtacaagtacaagatttcaattgctgttctttcgttgtccatgtactgtatgaccccgaagtcaccgacagtcttcgtaaactggatgtaaccacgtctctagatatttgctgagagcctttgagagacgactctaaagttgagatcctttccacagaaggtttttaggtcctatgcttttattccctcttctaatggatacttttaactgaataaattcaccttcaaggagccaatgtgaactggctttctgaaatttttataaagtggtaattgaaaagctggatggtgaggtgggaggattgcttgagcctaggagtttgaggctgtagtgagctatgatcacgccactgcactccagcctgggcaacagagtgagatcctgtttctgaaaaaaagaaagcttgatgagctaaagtgcaaaatactggtgtttacacttagctggagtaatgtgaatactgactccaaaattacttgggaaaaaactattgcatatattgtaagaatccacatgtacaaacataaaatatttttaaactggtactttttgtcatgtttcaaccttttgatgactgttttcttttcctgccaccagaaaaacagcatatgaacattgaattcttttatttttctgttaccacaggaatgaatactgaaagccttgtcataatattagaataatgatgtgtgtggactatcctgagtactggatatctaaatttatcttttaagaaaaatggaagggagagcatcaggaagaatagctaatagatactgggcttaatacctaggtgatgggttgatctgtgcatcaaaccaccatagcacatgtttacctgtgtaacaaatctgcacatcctgcacacgtacctggaacttaaaagttgaaggaaaaaataagaaaaatggtatgtcgtgtctctgtacctttttcaatttcattttaaaaatagacaatacctggccgggtacggtggctaacacctataatcacagcactttgggaagctgaggcgggcagatcacttgaggtcag

SEQ ID NO: 111235 - DNA, 1147 bp, Homo sapiens
ggcctggggcgggggagaccgggttggaggcggtgcgcccgggtggggactgcagaggggaaaagtgagggtgggcgcctgcgggaagagcgcacacccccttgtcctggcaccggcctccgctgtgccgctcggctgtctctcctgggcggcagcgcgctcctgccggggagttggagccggggttggcttctccacgaggggttcagaggccagcccatgagacatgaaaggggggaaaagttccttttccccctcggtggcagagagagcgtttaactagaaaatggctgtgcataggggaccgactccaggaaactggccactgggacccgaaagcccctgcgctgcccaccgggcggaatggagggtggtacgctagaaatgacatttgtgcggcgagaacagagctggacggagggaaggatgctgagacccatagaaacaatgaaaggtggtcttcacgtcggtgaagtggtgtagactacgggttcggggcaaacagccgagggagcatgggactagaattcaaaaaaataaattaatttggataaatcatatgtggagttgtcaccgaccgttctgtagtcaagttctgcgcggttttagagccacgactgtcacagacgtttttggatggattgagtggttgaggagggttaaaattgagaggagaataaggtcagtgtcggaagctccaactgggctctcggaggggacagtttgtttaagtccctcagtcactggctttacattgtgtctaattacttacgtgaaatacccaaaggattatcataaaatgatgccatcggtggtgtttgaattccaaggaatgaggaaactttgtgaggttggcatgggtttatcatttgttttaatatttcactgatttaaaaaaaacaaacacaatggcagtttgatctgttgtttctggagtttactctcttaaatcttgctttttttttttttcttgtcatggtttcagatttaaaatcttgtccccaaatggccataataatgcagagtattagaatttgtgtggctggccttttaggaacagatggaatccttgaaaggggatttcttcatgaacttaggtagcaaccttctcgttttcaacttgtagcttgtaagcaatatttgttca

SEQ ID NO: 111236 - DNA, 2702 bp, Homo sapiens
cggggggttcgtacccatctggccgcgaccgtccgtttccccctcgcttggttctgcccctgctccccctgcacaggcctcacagtgcgtctggccggcgctttatagctgcagcctgggcggctccgctagctgtttttcgtcttccctaggctatttctgccgggcgctccgcgaagatgcagctcaagccgatggagatcaaccccgaggtgagcgccaggtgcaccgctacccggagagcgcgaggccgagggagggggagccgagtcgctgatcggttcggttttgcctttttctttgcatttgcctttcagatgctgaacaaagtgagtggcgtctcgcgccgtctctggccccctcccccgcgagcgccgaggcgggggcgcccaccggttccggctgctggcagggaccaagccgcccgctgcgagcaccggagacggccgggctggggcgtgggctgggcgcctttcctgggcccctgcatttagcgggtgactctacgaaaccggtcacggggagacggagggggctgcgccccgtggcgagcgagcgccaggcggagctcccgagggcgtggcgcgggcagcacagactcggctgcacgggcttcgcgggcgccacgtgtgggccgcgctttgtgctgtgtcattgcgccggcccgggtgggggtggcagggcgggactggggctcctcccaggctcgggtgcgggcgcggagggcgcgcgcctcctggccccgccccctggcaggtgcccgcgacccgcgtgtccccgtgcgcctggccgccttgtctcctctccgcaggtgctgtcccggctgggggtcgccggccagtggcgcttcgtggacgtgctggggctggaagaggagtctctgggctcggtgccagcgcctgcctgcgcgctgctgctgctgtttcccctcacggcccaggtagggcgtggggcccaggatgcgccggccgccggcagtgcacgccgctccccagcttgagtcctcgggggctccccgccccgccccctcccctgtaggtgatgcggggcgcgcctacaaggaagggaggagcctgcattttcgtggtacctactccctgggctcctgttccagcggtgcctgtcgccttcttgcccatccgtccacaattgccttaaatttggaagagaggcagtatctcagttccatctatcccgttatccagggaaatcattcatcctactcatgagttccctcgaacttgggctttttcgagcctccggttccggggaatggctgctggtttccctttaagggctataacctgtcaactcattgtttgcttctcagactcccacctagctgtagaatggagggggaagggctgacctaaatcgcagggaaacaattaggttcgctaattctccgcctccattacttgggtttctgatggtcttaaggggttcttctctcttctccactcccaccacttgcacacttggtttttagcctcttgaatgtatttcttaaagcttaatcattttgtgtatggtttctgtgtgggaacctccttcctcttcacttatccttgttcatctctgaccttgtagctaactgaaatagggggttattagctcagttttgaaagcacctttgcatttcccttgaaatgattttcctcctacaagtgtgcatggatagatgtatctgaaagacagcgtcagatttttttttttaaaggatagctaggatatttgcagtcttgtgatgtatggaatcccagtcattagcgcatggcattgtcttatctcctattgctgtcacttgaccgctgatgtgggagtgactgaaattagctttagcaaaacttggggcatcactctaaagagtgaggttaactgaagcaccgtcctaaggctaggtgttctggaagcatctgtagccaaaatcaagagtatgggaagttccaagccttcctcctagtaagtaagctaagtattgtgggtaaaaacacttatttacagctaataagatgatctcactgacatgtttttattgctaaagtcttttacttgggctaaaaggaagatgccaaattgttggaagtcgaattagcttcctggttgaccaaatcagtctcctgtctccagttgagcatcacacagaggttttttattagagcaaccatgatgactcggaggttttgagcagcattcagaggcaaggcctctgggaggcagtggtgcagcatgtttgcctttaaaagctgactgttctccttttgctgaatcttgtttagagaacattctagtttgtgttatgtttgaaagagctcgatactttgtcctttagtttcaattcaacctatcagatttatcgagcgcctattctgctacacagaatgcctactggacaaaacactgaagccgattgaaagaaaagttgaggttttataggttgactccaaagatgctaatgttaatttggaaggcatttaatttttgactaagggaatgttatgaccccctacatggaccacttctgaaacattaagtgctagtagactatttacagaatgatttccatggaagagctcaagcagccctaaaggatggtgctatcccattttaacatttcatctaattagcctagaaaatgaaaaacacttactggtcaatgaatactaagttgaggatccagttagatagaagcgaaaaagttc

SEQ ID NO: 111237 - DNA, 1496 bp, Homo sapiens
gtacacaccaccacacctactaatttttatattttttgtagagatggggtttcaccatgttgttcaggctggtcttgaactcttgtgagctcaagtgatctgcctgcctcagcctcccaaagtgctagtattgcaggtgtgagccaccgtgcctagccagatctcagtgtctttataactacaactggctgccactttctagcattgaccttggttgagatagttagcctctctaagcctcaattttctcctcagtaaaaatcctgtagtaatagcatcctcatagagttgttctgacagttaacagtatatttaccttagtgggcttagaatagggcttaatgtaagacatacattaaatattagctataatttctaaaaatcaagtcagttcaagcacatttcacttgaattgcaagataatttttaaaatacagcttacactcattttcaaaaatttcttgactttctttaggtagatgacaaggtgaatttccattttattctgtttaacaacgtggatggccacctctatgaacttggtatgttttactccatttttggaacccagtgtagtttcatgtgttctttcagactgaatttctcttgatatattgtgtgactttatggcacttggcatatcattgtttataaagccacaataacaaagtattctcatgagggcacttaaccccttatcatccccagagcaacttcctcaggcaactgactagcatcccctagtatcatcctttctgggcaaagagtacgtctgaaaaaggatcagtgcctgaatatgaccttacttgtctaaaaagaatctgaacatgttggaataacttctattaactagtttatggcatcaagaaagacgacccaccttgtaagattcattccttttgtattaatggagaaagacttgtaactcttgtctcaagccaagatacgacctacaggcttacaaaggcaaaggaatagtgaaggcaatctacagtcattggagggcagataaaatctcaggcgtctcctcctctcgcctccatcttccctatccccagagactgcatctgacttttgttctgtggccctttccaagggttggggcacaggcccctctattagggtagctgacttgagcttgtgcgatcttgtcaattgtagactagaattgcctgggatggatgcctagggacacttgaacctcatttgcagcctcttgcttcataaccaggcttccttctgtgggtttggcagtggtttttggaagaatctaaaacttccatctaggctaggtaagcacggtagccagaaaacatgcagagaaaattgacatgcctggcttctttgttacagatggacgaatgccttttccggtgaaccatggcgccagttcagaggacaccctgctgaaggtcatctttggaatgcatctcttcttaatgtgcctcacaattctttggctaaattttctattctaaagtgctaacactcttcca

SEQ ID NO: 111238 - DNA, 1213 bp, Homo sapiens
actcacaaaacagcagcctttcataatccctctaagacaacgggatttgggtcagtcttggaggtagtgtactatagattctagttaggtggttaaatttaggagtttttccttcccacatggtctactgttacaagaacaaaataagcagatttaaaatccacctgacaaaaactgttaatatccaggatcactttgtaaccatcctggacagaaaagtgattctgggcaaaggttggtagacgaccctaggcctcttcactaaaaaatgagcctctagagttgaatcaatttgctattataaaggaaaattgcttaattatgatacacaaaatactgtttttagcttgctgtgctgaagaaaaatatacaaactgctattaagatataactatacttaatttgagtagtaatagtataaaatctttgcagaacttactgtgtgcagaccaggactcagcaagcattttctataaagagccaaacaaaatattttaggctttgtatggcatatggctctgttgcaagtattcagttctgctgttacaactcagcagcccatagacactctctaaatgaatgtatgtagctgttttccaccagcacaggctgggttgggcccacatgctgcagtttactgacccctcttcttaggtgctgttctaggtgatctacgtcttttatagaaatcctttaatgacacagtgaggtaggtattatccccatctcagagctgacaaaactcaagagtttaaggcctgaggtcaaggacttacatggcaaactgtgattcaaacctagatagtctggcaaggtgcagtggctcatgcctataatcccagcacttgggaggctgacgcgggaggattgcttgagctcaggagttcaagaccagcctgggcaaaatggtgaaaccccatctctactaaaaatataaaaattagccagacctggtggtgcattcctgtagtcccagctgcttgggaggctgaggcacaagaatcacttgttacctgggaggtggaggttgcagtgagccgagattgcaccactgtactccagtctgggcaacagagcaagactctgtctcagaagaaaaaaaagaaaagttagtccgcatctagagtctgtgttcttagccattgtacaataccaatatgacctttctttagaaaagacctctctttggaacttcacagacctgatagcccta

SEQ ID NO: 111239 - DNA, 1386 bp, Homo sapiens
cagcctcccaaagtgctgggattacaggcgtgagccactgcgcccggccacgttaaggctgttttttaaaatgtttatttgaaagacaattttctttattccaggaatttctgagttacaacttttcacttatgccaccttatggaagaaagatcaatttccaatctttagatttgaggaaaataacgttcatagttgtgtttttgttgttgggtttttttgtttttgttttttttaacttttccaaaaccaggtacaaagtgagagaagcacaaaaccatttggtggaagtgataagtcaaatccatgatgtaaccttgtctttcccatcacctgattttttgctttaagccctggttttcaaattaatgatggaattaaagttgatgagggtgaactttgagcattaatagaccttggagcctttccctatgtgactttcattttgagctcttgctgtttggattttaatgacatttctcctttccaggacgctgccaaggtctgcagagaattcaccgagcgtgagcaaggagaagtccgcttctctgccgtggctctctgcaaggcagcctaatgctctgtgggagggactttgctgatttcccctcttcccttcaacatgaaaatatatacccccccatgcagtctaaaatgcttcagtacttgtgaaacacagctgttcttctgttctgcagacacgccttcccctcagccacacccaggcacttaagcacaagcagagtgcacagctgtccactgggccattgtggtgtgagcttcagatggtgaagcattctccccagtgtatgtcttgtatccgatatctaacgctttaaatggctactttggtttctgtctgtaagttaagaccttggatgtggtttaattgtttgtcctcaaaaggaataaaacttttctgctgataagatagccacagctgattctcattttcttttaccctctcctcaatatgtcaggttattttggtagtaatatatgaatgtcttccacataagtaactcatacagtgctgccaagaattaccataaaagcattggtttgatgtgtctttggatttttttttgcatttgtattccctatgtatacctgtagaaactaatttttaaagatttttaaataggcaaattttgtagcacaattttagacttataaaaatattgaagacaaaaagaaaatactggacattgtagaagtcccataaacccaccacccagtttcctctattgtattaagcggggttttctagaggacagaactaataggatatatgtatgtataaaggggagtttattaaggagtgttgacccacacgatcacaaggtaaagtcccatggtaggccctctgcaagctgaggagcaagg

SEQ ID NO: 111240 - DNA, 1051 bp, Homo sapiens
gtttagaagagacaggactataacagataagtgcttactatatcttaactgccttacatgttctacttagtcatcacatgatgttggtattattcccattttgcagatagaaaactaaggcatggcgaagcttaagcaacttgcctaaggtcgttaggttaataactgatgttcctgagattctaacccaagccaattggctctaagagtccatagtatttaataattcttccgggggcagggacagacctaacttaaaaggaatgaagtttaacctttatagctccacactttaatggccccttctaatagtctggcttgtgtgtccttgtaaaatttgcaacaataggatattattgtatttttattctcaaaaacatggttctacacctgtgtctgggtgttaagattatgggtgatttaactttatattctaattttataagctttctaaaattacattattttttataataaaaaagcttaagtttttcccctaagacagaattctgccataaactcctgctggttaattctagcttacttccatgtttctttaatttataactgaagtcagtgcaacttacagatttagttgcctgtcttctaagacgtttttcaacaggctctgtattagtccgttctcatcctgctaataaagatatacctgagactgggtaattaataaaggaaagaggtttaattgaatcacagttccacatggctgtggaggcctcacaatcatggcagaaggcaaaggagaagccaagtcacatcttacgtggatggcagcaggcaagaggacatgtgcagcggaactcccctttacaaaaccatcagatctcgtgagacttattcactgtcacaagaacagcacaggaaagatccacccccatgattcaattacctcccactgggtccctcccatgacatgtgagaattacgggagctacaattcaagatgagatttgggtggggacacagccaacacttatcaggctccattatagggctactttatttgtttttaaaaattttttaattttcagag

SEQ ID NO: 111241 - DNA, 1079 bp, Homo sapiens
tgaaaaattttttttacaatgagcatgtattattttatatttaatgaaataaagcaataaatgatcattcactttggaactatccattttcttaaaaagaagtagccaagaaatgaaatgttaacataactgaaatgttaatgtaattatttgtcattttggcaatgaaagttgtttaattcgagctaaaatagtgcatttgaaacaaaagagagctgcccctacccactacttttcttgttttctgggtctcagcaattcacttgcatttgactttcatttatcatatttgtgaggataggtgaagttttagcgaataagtcatgtagtattaaatctcagtgactgtaaaaaagactacagctttccagccagaaatgcctctttccataagggaacaaattctctgactttcaaaaatttaatataacaaaagactctattctagattgtatggaagttgtaaattttaattacatctgcgtttttctccattcacctggtgtgaagagggagggactcaacctgggtgagcagctatttaagcatctggcacaggaatcttggtcagccacatgcatgtacaggactataaaaaagtccaggtttgcgttgggagtccatcactaagtgtttatgtgccagtgaagtcaccaggccttcaacacccacagccaagagctgtgccgagagaagcaggctgccgctcctgcagtctggttgacaagcctccgtgcccggcacctgcgccttgttgcctgtgggattccaactctgattgttgcctcagaaactgttgttaccacagaactttctcacactcactggcccagacgtttgcagaattccagggctagtgtgtggttaggcagccaaattccaattttagaatgctgcttgtgaccatgaaactctgttaactcaggcttttaaagggctgacacggtgagagatagagagagagagagagagaaactgtgttggggaggaaacagtatgaagatgaacaaacaagcaattgtttattgttctcaactagagaacaaacatatattttgatctccataggatatgagtgt

SEQ ID NO: 111242 - DNA, 1028 bp, Homo sapiens
tcttgtaagattccaggtgattcttagttcttttcatggtctgtatatgagaagtgtttttctacatctttctttatgatagtaatagatgtttgtaacagtatagacatttcacaggagactttagttaaatttaggaatcatgactttatcctggcaattttactttagaaatattatatgcttagagtaattcagataactcagtcctttgaaggttctctacatattactgcctttcatatttgaagatagatttggaaatgattgtcctctgggtgtaaagagtccaatatatactgctgttgtttccacacagcattgtcatttcctaccagggactctcccttttaaacttaagagttggcacggaaacattattgctcaaaagagccacccattcccgagtgtgtttgacaggtctttgtaaacaaacttcttcagccttgctgaaattagtggaaaaatctaggctctcatgtttacagttgacgtgggttttcctttcacctaaaataaccattacaagtaagatactaagtaaaaaacatactcatttctacttggtatatgaaaataatatatgtttgatgtattcagtgaaattccagttaactcataactctttgaggccatggatggagaggtggcattattagtctctacctccagtgcctcacacaattcctgggcacagaaagagacatacaattcatgttgggtcaatcaaagaatgattgatcattggcacctcctgattctatttggtggtcagagaaagtggcaggacttaagttattttacatataaacatttcttgcaaaatttggagaggatgttttgatggcttgagatcttttaatttctttgagttactttcattgtccttcccaccccttccctctctccactctgaactgcatagggcctgcctgcagtgaactactcacttcttctgactccaaggaaggccatatcatgtgttttaagtaccccataaaatttatcttcaaagtaaagcttccttt

SEQ ID NO: 111243 - DNA, 1056 bp, Homo sapiens
ctattatccttttttgtaaacaatgtttattttatttttaattgacaagtaataattatatatatttctgggatacaaggtgatgaggtgatgttatgatgtctatacaatgtggaatgatcaaatcaggctaattaactgtcagcttgctgacttatttctttgtggtgagaacatttaaaatctactcttcacacaattttgacatatacattattatcagctatagtcgctgtgctgtctaatagatcactggaacatactcctcctgtctaactggaatttcgtgtgctttgactaacatgtcacctttcttcacccacctgttacctcctccttagcctccggtaacccccattctactctctacctctatgagtttggcttttttagattccaagtataagtgagatcatgtggtatctgtcttcctgtgctttttattcttaaagatattaactgcagaggcccagcttcatcccctgtcttagccacttcccagcccaaggtgaccttgggctaataatttaagtttcgcattttttcatctgtaaaatgatgattaactatagtattgaccttataagaccatagtaaggattaaatgagctaatatataataaaatatacagatattataaatatatacatatataatatatacagatataaatatatacatatataatatatgtatgttatatatacatatataatagtatacacatatatacatatataatatatacataaataatatataaaaatataaaaatataaacatacatataatatacatatattataaataaatacaatataatatacattataaatacatataatgttttatgatatataatttgtgtgtgtgtatatatatatatatatatatatatatatatataaacagtgagtacattacctagtgcatggtatgtgctcagaaaaagatgactatagtaatggtgctggcaggtgttaatgtcattcatatttttccctaaacctctattttcccatctattaaatagcatagtaatagtacctaactca

SEQ ID NO: 111244 - DNA, 1935 bp, Homo sapiens
tctttaatcccaactggctttatgtgatgttttactcagctctgagacctacctattcggatttgagattttttgctaagaataggcatatggatctcttgagagcaattagtttttgtttaatgttcttttaaaatagatgaagccaatattgcaagtgttaaaggaacacagacaattgtagttgaatttctgttaagattattttttctaattaattagtctttgcatttttttaaaatgtcagctgatatttttctatttatttctgtttaagtacttcttgtgctttccacatgaaaactataaggtgtttggacttctcattaagcatatacatgaaacatgtaattgccttagagttttcacctaatgatctaaaaaaacaaatggaggaagattaaaatattttgagtagacataaaaaccacacagtcttgatgcttaaaaacatgatttgcaggcatagcttacagtatttttctttttaaatttagcaattcatgatgaccaataaactggacacggcaatgtggctttctcgcttgttcacagtttactgctctgctctgtttgttctgcctcttcttgggtatgtattatacatattgctgcctttgatattcaattgttgagtcagtttatatggagtgccttttaggtgtaagacttattaacctgtaaagggtttagggacaaataaaatacaagttccagccttcaggtactaacaacctaataacattatcagaggaatattttatatcttgtgctttgtgaaactaacacattgaaaatccaaggaaaaattgatgtgtgggaatgagataagttcatgtttttttcatttttacttattacttgacaggaaggtcctgctttataaaattcaattttataaattgattataagaaattcagttgggcatatatatgaagtgaagctattaaaacggtagaataagttcatgtaatttttttctattgacaagtgatttaggtgttgtgcaattatgatgcaattcacaaaggaggaagagacactgcagttgtttatgtctcatgataacctctcctctggtaatttgcaggttgcatgaagcagcaagcttttaccaacgtgctttgctggcaaatgctcttaccagtgctctgaggctgcatcaaagattaccacacttccagttaagcagagcattcctggcccaggctttgttagaggacagctgccactacctgttgtattcactcatctttgtaaattcctatccagttacaagtatccttttctaccttgttaacaatgaaattgccaactaagcatataggagatctcttctgattatttcagcaatgaaggcattccatgaagcctgggtttgttctcggcacttcatttgaatgaagatatgtttagtgtaagaatttctgactttaaaatgtgaaatctaaactttgaagagctgatttaggaattttaaactatctttgttcttgcctcttgtaagcttccctattagaatggatattttcaaattccccttcgaagcacaaccttacgcagaacttactttaatatttacatttttttcatttaattcacgtttttggcaaagtgtccagatgtcttgctttaaaaaagagaggtcctcagctctttccatcttaaccccagtgaactagatacaaatggaatttaaccaagaaacaacttatttaagcaggtaatgagataatcaatacaaagaaattaatatttgctgtgtatagagtagaaaataaggacacacatggataatccgtgaagctaatgagaaataattcatttggaatttgtatgttttcacatttcaaaggtgtgttgtgggatgatactgggtagtccataaaggaggggaaaaatggggaagaggttctatagtgaacactaggtta

SEQ ID NO: 111245 - DNA, 1316 bp, Homo sapiens
atgtcccatcataatttgtattggtttatttttaggtaaaactcattaaatgattactatactacaactgtaaatgataatcacatttgtttggcatattattggcttgaccagcctctgttgattgaagtgctttgcagtcaccaatgttaaaattctagcctttctgagctataacgggaagttatgtagagatttttggtcatgccttttagtagcttaaaatttctttggagggagaaatagaaatgacagaaaatgtgtttcaatgtagggtaaactgaatacgtcaataactttgggaacagtgcctcacacagatcaggcactcagtaagttttgttgagtgaatcctgaggtcttgccaaatgagactcatgactggtgaagaaaacctttctgcctttttatacagttggttatttggtagcccctctttcctgggaatgttgaagattaaggatttcatattccttaaattcttacaaagggaatgtagtaaacagtgggaataacataaactagtaattggcagcaaatgctaatctgattattaaagtgatatggtaataaataaaagcgggcccaaagtaatattacagatttgcgttctgatccttcttcttataaaagtgatattttgtccttgcttgattaataacagatagggcatttcacctcttatcttttctaaatacattgtattaatagtttaagagtaatgttgaagactaagattatgaatctcttaccaaggatttgtgaactatagaatgttagacataaaagactcattggcagtttctagctttgatctctgcatactcatttgccagagcatgaaacttgacctaggaaaattaggttagtgacagagtcaggagtggaactcaggtatcttgactcccaattcagggctctattttcactacctgacactgccccttttattgaattcagtctggatatgtgtcaaagtttaaattgaattctttaaggatcgacagagttttatagtgacttttggagagggttgtagcttccatcagtttcaaagtagtctatgattcattaaaaaatttaaaactttttatatacatatatgatctctacttaggaaatggacatttttcttaattcttgttagaggtgggaatgagttggtcaggatattaatttggagaactatattagggagttagggttcttctaatacttggatataggttggtgtcttgcttgtcaattggaaactgggacccttgaattcctaaatgagttatggttataatgaatttgatactcagattatgtta

SEQ ID NO: 111246 - DNA, 1048 bp, Homo sapiens
tataatcccagctactcgggaggctgaggcaggagaatcacttgaacccaggaggtggaggttgcagtgagccaagattacgccattgcactccagcctgggggagaagagtgagactttgtctcaaaaaaaaaaaagaactgtgaattttagaaaatgaaatagtttactttcttctttatagtgaacaaaatttgatttggcttaaagtgtatcagtaaaacaagccattccactgaactcattttagcagatgtttcacatctgtatatttggacataatacatagtctgttttgcagaatacttgatgacttttaaatgttttccttaattgttttctttagtgagtatcttcccagtcttgttattctctttgcttcatgctgccacatatacgaaaaaggtccttgacgtaagtaaaactgctctttgtctgacttctgaattacagatcattgacatgaatttgagttctaagacattttggtatttgtcacaaaaagtccctctataccttacaaacttgttatgaattatttagtgatttgaaagttttaagtttaaaagtgtttattgttgaagtttcacaaactagaacattttatagataaaggattgcacttaaaatcaccccccagtctccaggggaatttttcaagtttgaaatagatcagtttttttgaaacctgtgtctctaaagtttgttgagttgtcagatctcttgttctgtcagtgtttaattctggcatacctgataagttgagtgtactgaatgaatctcttgtacactaattttcagaactgctgctttcctgaaattctttcttattgctaggttggagcattaaacctaacttggcaccaggccatttacagcatatactgaaatttgaattaaaatatccaggcacatttaccaagcacatttacagaaatttgaattaaaatagccagatttatgctttgtattggcctttttctttatccctataattctttggtcacagcagtaattacactgctgtataattctaacattagctaag

SEQ ID NO: 111247 - DNA, 1008 bp, Homo sapiens
aaatattctgaaattcattgcttgcaatgaaatattcctgatgcctgcgacagtttttatgctttttaggtaaggaaaaattatatttgttttgggaggctgatgactgaacgtaataaagatagtaactcaagttttattctgtttaaatctgttgaaggtaggtattgacatgtagagctaaatgaatcttagcagttgcctaatctaacctttgtcatttatagtagagaacttgaaatatagtagacctaggaatttgtcttattccttgtgatttatcatttgacattttaaaaattactttcatagttaccacctttgaaagaatcttatgaaatctaatctagtccagtctgtcactattgagatgatgtttcttacactagagaaaaacttttaaaattatgttcttatattaatagtgcctactatcaccttattttgtttgtatcttaattatagaagtaatacatgaataaagaaagccatccttttaaaagtatgaacattaaaatagtattgacctctgcattgaaatttttgcattacattttaaaacaatacaccttgctacccagatgattgctttatcaatttttagttttacaagtaatgagacattacagataaaagctaaaatagcatttgactatatgaattcttgctgcaattttgtcctcttcccaaaggtgtaaggagtttaatatgtgtctatgtatgtagtcctttaaaaatacttatacaaatttgtagaacatatatattatggatgtggagttttgtttgttaatttgtttagttcttattttacatcaaagatgttattctggctgggcacagtggctcatgcctgtaatcccagcattttgggaggccaaagtgggcagatcacttgaggtcaggagttcaagaccagcctgaccaacatagtgaaaccctgtctctgttaaaaatacaaaaattagccaggcatggtggtgcacacctgtaatcccagctactcgg

SEQ ID NO: 111248 - DNA, 1010 bp, Homo sapiens
gtttagatttactgatgagccagtgtaatttttttggtggaggggagtgtttgtttctttttatatatataaaataagtcacttttcatttgcatattttatgaagctttacaacttgatttcatcaattagtaattacggaattatttaacattttctgatttatttagtattttaaaaaatttcaaaagtaatacagataagaatacatttataaaaaaattaaacaacattttactctttaccaatcatgtacattcttttatatccttttttaaggataacttggatttagacatgatagatttcactatgaccatttgatgaatgaagatacacatattctccagttgaattgcttttaagttttgagagtatacacatgaattgaaatgtatatttatcacgcttgtatttgtttatttcagtggtcaaggaagtttgctccaaccttttatatactatagatttcttacccttcgatattcgtctcgaagaaacccatattgtcggtaagctgatgattattttaggcatgttttatttgttgagagtattgtgaatatatagtattcgcaattcttaagagttacttagctaatgtgttagactttagaagcaagcagtgtttttgtaaatttaagttctaggccttagaatgtactggggttggtgaggaagtggttgtatttgttcttagaaactgagactgcagttatctacgccacctctaaagcactgctaaaacttagcaaattttaaaatgtataagacatagattccactctcaactttcctagttgaagaaacaaaacacgtgtcaattagataaacaatggttaggatacagaattcacaagccaatagataatgaatgccatatgtttgctttattatatcagtactgcagtccacagaagggagagatcattgggccagaagatagatgagcccaggaaggtttcacaaaattgagattgtgggaggagtaaagcttttgaatagggaaa

SEQ ID NO: 111249 - DNA, 3458 bp, Homo sapiens
gttttcatctaaagtaacagacatgggaggcctcctttcacctgagcacttagaggccattacagggttattaattggcctaatttcagtattgtgtctcaaagaataggtaggtctgaggagagggaaagagaccaatcaggaatggccttcatgaactgcttcatcttatatttgtgcagtttgtggtgccccaaaacagttacaatagtaacaccaaagagatcaccgtaacagaacagatcacagatcaccataatagattaataatgaaaacatttgaaatagtggaagaattggcaaagtgtgacgcagagacatgaagtgagcacatgctgttggaaagtggcactgatagtcttgctgtatgcggtgttgcaacaaaccttcaatttgtaaaaaatgaaatatctatggagtacaataaaatgaggtaagcctgtgtattgctttttccttgtgtttctcaaagaaaactattttgtcttgcaggaccttatttaatgaactgaggattgttgttgaacacataataatgaaacctgcttgcccactgtttgtgagaagactttgtctccagagcattgcctttataagcagattggcaccaacagttccatagtttaacatctagttaagctacaaatatagtataagcattattagcagctggtacttctgctaggggttgtaaattccaggtgttacactgacctcaatccaatttacataatttacataaatgcatctcggtggaaaaataatcattttcttggcatgttaaatcaagcttaaaaagttttgagaaaattttactgcgctgtgttgctaatggttaaagaagtctgtatctagtgataaatataccagtttttttaaaaagatgctgttgtgcctatatcatgaagtacattaatttctcatgtaaaaaaaatagctctaaaatttgtttcaacctaattggtaacctgagtttatatctggcatgaattcattatggtgatacacatatgtgaattcagtacattttgagacagtattctaccattcagtaattttggttaatgattttaacacttctcagtgtatttaatttcaaattgtttttttaattggttttatgctgctttgttaggacagatgtgttttgaatgtaccattataagaagaattctatgtatcttaaactatgatcttctaaaattttatttccgtaagtacttctgtggccttgagtattttttaaaaggctcaactgtaagcctcttagccagttggataaatatttggggtcacctagccattgaaagcagaaagcagtagtgacacagctttcccttcaaagagccattgagaaacatttctcaaacaggaaatccttcttttactaatgtggacatatagattattcgtattatagtttgtagaactacctagttcagaatcttgactgccagttttcttggtttcttaggcttgaattttcatagacaattgcaacagtttagatgccttttgaaaggaatgtaatgaagattcagcatctgactatatgtgtgtctatcctgaaataataatggagagtatactgtagattacatgtttacccatcaaatctgacttaaaaggttaaatggaaggttttataggtaaggtaattgattgggaatggggtagggggaggagttgtgggggaataatgtgcatttcagtctcaacgcatagataaatttaggggaattggatgtattattcaactttgatttgggttgtaaaatgtgttaaatcctgttcattgaactcccatcaactcttataaaattcatgctgatcttcattaccgttgcatgattggaaatgtttaaaacattgtacagttttagtatagagaaatgtaatggtttttgtgaccagtttctgtctgcatgtaatttggatttctcaaatacattcattagtaatttatcagtaacattagttttatttttgttcatctccttatctataaaaaggggatattcttaggataaatacatgaaaaattatacttgatagcttaactataatcagctatttttgtatttttgtaatatttgtccactaagctggagaagcagcctcatacagttgattttgtgtatgtggctagtcttattgtcactatgtaagtaatccaatggttttagaaactaaactttctagagcaataaaatgactataatgttaagtaaacataatgttgatttctaattatgttttaaaaaatgaagtcttgaattatatcaagaaattttggcagctgaagtcatgtttattttgaagctgttagttttttcctataatttaaaaagatcttttagatttatagaagagtcagaaatgtacaagagagtttttttgttgttgtttttgttttttgagacagagtctgtctctgtcgccaaggctggagtgcagtggcgcaatcctggctcactgtagcctctgcctcctgggttcaagtgcttctcctgcctcagcctcccgagtagctgggactacaggtgcacgccaccacgcctgtagtcccagctgtattgtaaaaatacaaaattttagtatttttagtagagacagggtttcaccatgttggccaggatggtctcgatctcctgacctcgtgatctgcctgcctcggcctcccaaagtgccgggattacaggtgtgagccaccgcgccctgccaagaagagttcttttgcataccctttactcaggtcctctcatgttaacgttttacataactgtagaacatttatctaaagtaagatattagcccagaacaatactactaactgaagtataaaacttatttgaatttcaacagtttttttttcatttcttattttccttttgtgtgctctgtttataccatgatccatgatttttttaaaatcatgattgtcttttaaagatctgtgtgtctctgttttgagtttttcctgtttattttgaaaagtactgttggtcaagataattggtcaataatccatgttggttttaacaaaaagcattttaacattaaaaatattacagtataaaataacactctgtgctttaaattgaggttttatgtcattttagcagaattataatatttctgatatactcatgtttgacaagttgaaacagatttgtttcttaaaggaaggtttaatatacaaaaaaaggtaatcttaaacttacgaaaaagtaaattttacaatttgagcattactagatgtttagtttgcatgaactcatagttagaaattctgcaataggaatatctacaaccggctgatttggaatttgaaattatagtgttacatgtatacctatcaaattaaaattaaggaaatacaatagcaatatatagaatgaatgtagtaacagaaattaactctttactgcatcattgaacttattgttagttacagg

SEQ ID NO: 111250 - DNA, 1154 bp, Homo sapiens
aaatctactttattttagcaaggattctctgtccttttgtatagttggtaccttactaatttaaactctaatatcaatctaaagagaaatttattatgcaatttgtatttaggtttttttttttttttttggaatgaagttcagaggtagatcctcctggaagaaagaaagcaagcgaactttttaaagaaaattagacttgaatatttaagaatgtcccttacagagaaaaggccaactataatactaagctaaaagttatgaaaaattaataggttcttttatagagctaagaatgatgaaaccatcaatacttccttcttcctaaaaatccagatcaaaacttcaggttaggtttctaagtttaggacatgaatattatttttttctggaaaagaagatgagtatatgtgtaataagacaagtagaactgagagatttagttttttttttttttaagttttagttcagaataacattaattttgagagattgaggtaaagaaccttaactaatgctaaggagtttattttgattaacataggttattctgaccaccacctcttccttccttaatctccttagaatctgacagtctcaaagctgtcacacaaattagactaattttgacactttgaaatgaaaacttcaaggaagaagtagccacggacagttatgtttataatcagtaggtggcactctttcctcaggtagccccccattttcacatgatgtgtttgaaggttaaatgccaccaaaagtgctgagtcagctataaaactaagtccctgaattccatggcccttttaaatatgtaatcattcaagattgaaaaaaaaaattaagcattttttgtttgtttgcttgtttgtttttgagacggagtttcactcttgttggccaggctggagtgcaatggcgccatctcagctcactgcaacctctgcctcccggattcaagcaattctccttcagccctccaagtagctggggttacaggtgcccgccaccatgcccagctagtttttgtatttttagtagagatgaggtttcaccatgttggccaggctggtcttgaactcctgacctcgtgatccccccacctcggccttccaaagtgctggattacaggcgtgagccactgtgcctggctt

SEQ ID NO: 111251 - DNA, 1069 bp, Homo sapiens
cccagccctcacaatccttggctatggtcaaatgtgccctaccctcatccctattcactttcctttctcctggtttaaatcatttcatgttattttaaatgacttagtaaaattttaattatgtatctctaacatattaagatgctttttaagatcaatataaaacgttaacgataattatcataggtcttttaggttggatgactggaaatgattaagagtaatgccctgataggaaaaaggcttacgtgattttattgcaatatattatgaagggagggggaaattccaacattttttagtaaagggaagacttgtctccatatattgttgccctcaggaaaatgcagagataaacatctccctcttggggaagttatagaaagagatgttgccattctactctttactctctccctcccagtggagatcgtgtatccaactatttttccctgaaaacctgagtatatgggatttgggttggtgctgtcaccagaaacagaataggaggcagttaagttctgcaaaggaagggagtcctgttaaccaaagaagggggcgggggtaagttggggctatgccactaaattaagacaaatttaatattagtaccattgtcttcattaagttgcccttaaaacaaatattaataaatatcaagtaattagattgtgagtttgtgaatttaatcacagatttactttaaaattttatatactttaaaaaaatagtttgtatcatttttttaaatcctacaaatttggagctttacaaccattattgcctagtgttccaacaataatagaccattccacttaagtaacaaaccaagactctgaagacacagaaataaaacttgtagtaatccagaataaaataggtatttctttttttttgtcattaatttatacaagatacagtcatatacttaggtttctttaaaataatgggtcttgatactatgaattcatagtattgtgtttggcagttcaacttagtaatatccaaagcatgtagttcatcttttgaagtgtttagaaatgggctttaaaaacaaaaacaaaaacac

SEQ ID NO: 111252 - DNA, 1574 bp, Homo sapiens
gcttaccttcgtttttgccgtagcttgacacacattgcttgacactgagaactgataggatctctgagggagaagacagaactaagtccacccttaacctaatccctccattcttgggatgcagagagtatttaccgaaacattcatgttcgaagccaggtgtggtggtgcgctcctgtagtccagctactcgggagactgaggcaggcagatcttttgagcccaatagttctaggctagccttggcaacatagtgagctgtctgtaaaaacataggtttgaaaaaacctgtaacatgttcgtgacctcctgaaagaagtcggaagttgcagtcattcgagattttatgtaatataagctatagtaactatgctgtggatataaattagaatatattcgtatcttttatttgcaataaatgtaaagctgaatcttagaatttcaaacggataaattttaacagcactattcccagggcttttttggtagtgatagaaaagtgtaactgttgagtttttccatattggcaatatactgccaggttcccttatggacagaatgaatcatcggctgggtgcagtggctcatgctgctaatcctcaggaagattgtaaaccttaggacgctgaggtgggtggatcgcttcagcccaggagttccaagaccagcccgggcaacatggcaaaactgcctctctacaaaaaattagcctggtttggtgacgcgcgcctgtaatcctagcctgtactcaggaggctgaggtgggaggatcgcttgagcccaggaaattgaggctgcagtgagccttgagcatgccagtgcactccagcctgggtgacagagtgagacctgtctcaaaaaaaaaaaaagaaaagaaaaagaaaaatgaatcatacgtttatactgtactccagaatccccaagtaagtttctaacacaattgtttctattgaccaagcaattttggcattttacactgaaattacagtggctgttaaatttagtctaaactgccctttaagtgttggcaaaaaggagaagaaacagtgtaatttgtaatccctcttctgtgtagctgtcattatgttgaaaattatgtattctttgtctcatctgtctgtgaaacacagataattattacctaccttagtggtcaaaatgactttgcaaagttgtttggaatgtttattactacaaaaaattaaaattttttttacacttaaaaatgcttagtaggtttttaaaaataactttgtgaaaatttagtttcagtaatgaagcatttcttaaaagggcaaccattattatggcaaaatttaaaaatcatttagaaaaagagtactatttaaattggatgcatgtgagaagactatttgaagaacttttggagaaagaaaatctaaaaacagttgtttttatttgtctagaagtaaggtttagtttatgcttctaaaatgcctgtggctgggaaaagcttataaagcataaggagaggaggaaaccttgagggattgcttgaatacttaaaaatgaggaatgcctttaaaggcaaaatagaaactgtctaaaagaaa

SEQ ID NO: 111253 - DNA, 1002 bp, Homo sapiens
attaattttaatatatcctagaattaattttaataacgaaatttatatattttaataataaaatatataaaatttaatactattttattaagtatattcaaaatatttcaacatgtaatcaatatcaaaattattgaagtattttacatcatctttttgtactgtctttaaaacccagtgagtattttacactttcagcacatcacagttcagactaaccacgttttaagtgctcagtaaacagtgactactcaattagatagtgtagttagagttagtatctaagttataaagaatttttacaaaccagtatacattccagtaggaaaatggacaaaggaattgaatacaaagttcataaagttgttcaagtggccaataaaaatgcaaaaatgttccatactgaaaaacagagactttaaagggttttacttctcactgcctatttcattttggccgaatttttcataatgataataccccatattgagggtgtgggaaaacaggaactctcttaactactgattgaaaacataaacggtttatgccctctgacctaacagtttttactcaaaaggatttactttaaagaaataatcaaaatacatattaaaatgtttgcagaagtttattatagtaataaattggtagttcatagttatggagagtgggaaactgaaatatattatgatacctttattatgggctggtgatgtatacaaccatttttttaaaaaattataattcagggctgggtgtgttggctcatgtctgtaatcccaacactttgggaggccgaggtagggggatcacctgaggtcaggagttcgagaccagcctggccaacatggtgaaaccccatctctaccaaaaatacaaaaactagctgggcatggtggcgggcgcctgtaatcccagctacttgggagactgaggcaggagaatcacttgaacccaggaggtggaggttgcagtgagctgagattgcgccactgcactcca

SEQ ID NO: 111254 - DNA, 1037 bp, Homo sapiens
catcgtctgttaaaatgtcacacatcaggtcgggtgcagtggctcatgcctgtaatctcagcactttgggaggccgaggcaggctgatcacgaggtcatgagatcaagaccatcctggctaacccggtgaaaccccatctctactaaaaatacaaaaaattagccggagccgggcatggtggcacgcacctgtagtcccagctactcgggaggctgaggcaggagaatcgctcgaacccaggagggagaggttgcagtgagctgagatcgcgccactgcactccagcctgggcgacagagcaagactccatctcaaaaaacaaaagatgtcacacatcttaacacaactactatcctacttcaagatatcattatctcttgtctgatttactgtggtagtattctccctgggatctctgcttccattcttgtccttctgtagttcatttttcacgtaacaagtgtggtctttttaaaaacagatcatgtcacttttttaattaaaactctccattggcttctagttacccatagaacaaagccaagactgctagaataaaattaaaatttactattctgactctcaaagttctttctagctgatctggcttccgtattcctctttattttcttctgctactctcttgcttgttcattatgtttcagccaaagcactctccttttggttcggagaaaatggcaagcttgttgttatagggcctttgctctagttgcgttctctttccaaggtgcccttctccacatggctcagcctcttctggtcattcatatctcagtttaaatgtcagctctgcatagagacattttaaaatcactcaacctaaagtagccacccagtaagtctttaatactaccctaatttaatttttggcataggtagcacttactcctgattgatgttttccatattttatttcctcatcacctacatgtttgcaagctccatgacagcatgaacctcagtgtcttgctgatagtagggacataataaatatttataagtgagtgaatgctta

SEQ ID NO: 111255 - DNA, 1051 bp, Homo sapiens
atgtttaaaatactagctgcgtgactttgggagaatttacaaaacctttctatgccccagtttcctcataacaaggaaaactggctctgtgactttgggggaagttataataatctctgtgcctcagttttctcataagatgaagataatagtattttcctcagagcaattttgtgacaattaaatgaaataatttgtaaagtgcataggacagtacatggcacatgttaaatgcttagtatatatagccattcttcataaactctgaaatgttattgaatgaggatataaatataatggaaaatgttttaagggtgagatttttacaatatatttgatacatacaaaaggatattataatacatatgtaagttaacaacataataaaatcaaaccttggaatttactactcaagctaagaacttcactgtcttgatcacatcctcctatctccatttgtcctatgtatccatgtgaaaaaaaagaggaaatagctttatacatttgtatatagccctgattatttacttttgcttgtttgtgaacttcgttgtgatagcttattgtatatattcttttgtgatttacttttttcattaaatttagttgctaagatttatcttattgattggtgtgtgtgtctggttcattaatgttcttggagataattatagcacatactgttcagggatgttgtatgagttaaatgagttgatacatgcttagagtagtacttagcacacagtaaaagctcaaagaaagatggccattattatgtttgttactatgcactgctgtatgaaatgttgtgtgaatataacatggtctatctatctatctatctatctatctatctatctgttctcttgctaatgggcatttgggttgttgccagtttacaacaacagaacagagtcctgctctgaacactcatgtacctctgtccttgtgccctcgtgcaagagtttcttgaagccaaatatattgacctagaagaattgctgggtcataaattatgcttgtgttcaactatagtagataatgccaactt

SEQ ID NO: 111256 - DNA, 1068 bp, Homo sapiens
gagatttcttgggaaataccaaggtatggatatctttgtaataatgtgtgtgtttgtgttgcacagcaaaattctaatatcagtccattgtaaaattctagcatgtctgtgatctcaatctaagattttcttgagtacattgtagttcactgaattatagtcaattcattcatttccgtctgattttcctttttttttttttttgagacagagttttgctcttgttgcccaggctggagtgcagtagtgtaatctcggctcactgcaatctccgcctcccgggtttgagcaattctcctgcctcagcctcccgagcagctgggaccacaggcatgccaccatgcccagttaatttttgtgtttttagtagagacagagtttcaccatgttggctaggtgggtcttgaactcctgacctcaggtgatgcgcctgcctcggcctcccaaagtgttgggattacaagcgtgcccggcctgattttcttgaaatttaaaacatttgtacataagttttctttaaagtcataaccatgttatgaaccttaagcatgtagatatagatgaggaagactttattttcttaggttttagtgagatttatatccgtcatacacactcttaattttctttagcctctctctttctgctcctaactctggttcaacattcagactgccaactctgtgcttgtatccaagaagcttagcccttggagaagaaaattacacagccagtgtgattgttctttcttccttatatgactatacaaaatcaatggatactcaatattatttgacagtcttactaaacttccagagtatgttcaccttcccactctttgaaatagctattgcatatctttttctttcttgccaacagcctcactctttactcttcagctgttgactttgcttcatattttattgaaaaaataggtgtaatttcataaaagtacctcatctttttcatcacctcatcttttcatcaccaaatttactaactcatctacacatgtgacaaaatactctgctttccttcctactagaaggaaattaatattgggacaca

SEQ ID NO: 111257 - DNA, 1730 bp, Homo sapiens
ttttgatagaggaaaatgttctggtctgtcaaagccaccagttacagtgcttctctgcaaaattttggaggtattaaaaaaagtttttgtttttttacagccacgctccagaacagcatcagtgttttttaagggaccaggaaaagtggtgatggttgcaatttgcatgtaagtactgaaaaataagctttgtgaaatagaatatattcttttaaatatgtatatccttaaatatgtaaatttattacatggtagctagctatagagtttgaggtttattttgttttaggaggaaattgaataagtctttattattgtcagtaaagtggtggggaaagagcatgaattcatatagataaccatgctcattctctgtatatttttgatgtagttagatctaagaatagttgctacctgaaaatcctttcttgtttttattggagttgatagaagtcttttttaaagaagttagctaaaccaacctgggttacagctactgaagaatatctttgtgcttattatctttattccacttatcttggaagaacataattatttgttcttgttatttttgcctcctctttttttttttttttgagacagagtcttgctctgtcgccaggctggagtgcagtggctcaatctcagctcactgcaatctctgcctcccgggttcaagccattctcctgcaacagcctcccaagtagctaggattataggtgcgcgccatcatgcccagctaatttttgtatttttagtagagatggggtttcactacgttggccaggatggtctcaatctcctgacctcgtgatctgcccacctcggcctcccaaagtgctgggattacaggtgtgagccactgagcccggccttgccttcccctttttccctctatcttcttgattcctattgttttgttcaccttttgtctgtttttctgactaatctattttaggatggatgaaatcattcaataattcattagttcttttattcttaaatatatatatgtaaaatatgtatcagtgtgataggatatgaaaatataaagatataatacataattctttaaggattggagggacactaaactagaggaagacatttataatacagacaaggaataatgctgtcataactacaatagtggtggtacagatagacgtagacagtttcaacttcttagaaggtatgttcaaggatagtgaccaggtttctggctgtacaattgtgtaaataatgtaccattcactgaggagagtactggaaggaggagcagggtgggagcagagaaaatgatgagttcatttttgagctggtggtatgtttagggcacccaggtggagataagtcaacagggttctttccaccagtaatacagggatagtgattatagcttttctcattggagggatgtatgtgtgaaaagtgcttaacatagtacctgctctaagatatgtacttaagaagtattattgttaatatatattggtctgaagctcaggagagaaatctgagttagaggtttgatagtttttagtatatagatgataactaaagccataaaagtaaagatcacctgaggaatgtatgtatatatagtatcaggaataaaaagtcctcaggaaaaattccttgaagaatgttaacattaagaaaaaggtggaggctttgggagacctcgtgatccgaggtcaggagattgagaccatcctggctaacacgg

SEQ ID NO: 111258 - DNA, 1011 bp, Homo sapiens
gtcattgttagcctgcaccctccacattggctttaccatattatactctccatcttgctaatgattattcacctttttttcttcttcttcatagggtttactagcattgggcatcagtaagtctgttcaaacaccagatccttctcatccgtaaggacattgccttattttgtttttgtttgttttggcgataagtcattgaaataactaaatatcagaaatctcctgcaatttatgtacctgcagtttgttcaagatttggtcatttcttccactgtagtatctaaaatgcagaacttcccactgtgtcaaagtaaattcaaggtataatttgaaaatggagttcaagttatttttatgctttgtagcacggcatggagatcttgttttctccatatttgataataataaagcacatattttgatcttagaggtctgttttatttggtccaaggaaacatatattctagatttagactcataggctgcccaatctaaaattttgatgataacttctattagatacacacttattttaatcctcctgttgtgatttggaaatgtattttgttaatatttcagaattatttatttgtaaaatgagtatactttttagaatgtattattttgaatcatagccattatttgatacagagatttttttctattgcttctattaacataaccatctaacacttttgaattccacaaacatcattttaagactagcttcagtaatataatttgataaatcttaagaccaaaaaaagtgcacttttatttctgtaaaggagtctacctctattctttagaaatgcctttctttacttgaaagcaatactactgttttcccataaataacatatttgaatgttttgtaactgtcaagctagtatagagaatagctctctagtgtgttaattacccatcattacagtgttttaccatcttaagaaaaatttttttttcatggccagttttatgtacaaaagatttaaaaacagaaggtac

SEQ ID NO: 111259 - DNA, 1055 bp, Homo sapiens
atcacatagcctaccctctcagcttctgcatctcatggtgtggtttccagacagtgctgaagttgtcttgcatttggaaagaatgccctttgagcagctgatctccttataaaagactcctagggacctgtgtgttaaaacagacatctttaacacactttctgtgggagtgcaggtttttctctcaagcccaatgatctactctgctgatacagccaatatcagttagtaggcttgcgtatggatgtatcactcaggtatgcatcagacagtttgctgtgatatccaatatcccgggggacacacatcaaggctactgaacaatcttagtagctcaacagctttcaccaaagaaatcttcatttttggcctcctcaatttcagctcttcttatgtggtctagaggatgtggagctagcatgtagtctagtgggtagaggccccaggtttgggctaccttctgtgcaaggcctgaatagatggtataacacctccttttggaatgtggggatacttgtacctattttcttctctattttgagttgtagtcagaactagacagaatcaatctgtctacttttttaatatcctgttatatcatgcaaatctacttaataacaagcacattaaactaggcttatttgttattctctagttttctatagttttgattgactagtttcttaccataatacatttcatataattaaaacaaacaaatgtgtttcctccattctgaaaagatttggccactttatgggtacttcattgttctagcgttcttctaatttgtatagtgtcactttataggggcaaagcactctctgtagttagagattaggtaattagttaaattttcagttgtgtataagttttaaaacttctaaaagctcttgtgtctttcagtaactaaatgggtttccattagactatggccctttttaaaatagtgttggactaggttcaaagttttcagacctctattttaggaaagcctagggttctaaacattgttgaaaattctgtagatgtttggtttgaatttcattaaaata

SEQ ID NO: 111260 - DNA, 2047 bp, Homo sapiens
atcaggattttcttggtattaggcatggaagcaaaatccagaagttacttgagtttgggtgtggatcttactgtatctggtgtctaccactcctgatatcaaatattgtattcatatctcattgtcctcctcatttgagttgtttcccattagtaaccttactgtctggcttaaatttgaattcgtgtttttgttttagacattacggactttatatatgaacaattgtgattggaagtacttaatttatgctttattttaatatttcttttctaggcatattgtattttagcaggatcattagtatctgaaggaggtatgtactgtcacaaagtatgtctctattcttaatttagtaatatatattcagctgtccattattatagtttgctaagttctgttgattaaagaaaagcaagtgtgggaataggcatctaagctttctctacttttagggagtaaagtctttgcataatgtactgtggttgttctgtaatggatagctgtgggggggtgtgtaactgcgccctgccatgggatggcatcctggcaaggcctcatttctctttgtgtcctgagctgctaggataggctcaagtaggtgactatcagatagatggaagacagtaactgatgtggcatgaaagcgcttagcaagcccaccatatttgtggttatttttaaactatgtggtggtaagaggtgttccttacagttttcactttgcaagcattattccttgattgaacccaccaccactactatcgctgttacttgccgattcactaaaaattggataaataattattttacttatttaaaagggaaagtatgtttcatttttgagtatcataccataatactcaaaacatttgaaatggagtataaaaaacataattaaactgaacttttaaaattagagtttaataatattcaccagaagaatattatttactggctcttgtgagacaaatatttcaaagtttttgaaatacacagctatagcagtatgatgacagagaactgctaatatcagtataaaactgcctgattcactgctgtgctcatgtttacttctgaaacattgtaactttctatgtataatgttcccttcatctatttttaaaattaacattttttattgacagatcctaattgtatatgtttatggggcccctcatctttgaaagtctatgaaatggttataacacaacctgcttcaaaagattgggaggctcagaaatgaatgtggttagtgtggtgctgccaaatagcagctcttcaataaactaaagctgttgttattagtaattatatttaattattatggtttagaactatggggttcattttattataatgattaattgataacaactaattaacatagaacttgtccttattgccaaccctagttttaaaatgttgtgcttatttgtttatcttttgagatgccatctttaaagtttggaggcatgaagtttctgtcttgctgatatgaatgcttttcttttagcaacacttcttgttgctgtaaatgaacttcgtaggaatgctcgggctaaaggaatgtcattttacaagtatggtatgtattttagaaaccaagtgtttgtttcacctcccttatttgcttaaaattacttagtactgttattgctttgttcctaatagaaatgtacaaaatatatctgaatatcatccctgtgtggctcttacatatccttcagcccttattaaaaagaaatgtagtatagaaatttgaacatggatactttatatttggatttgacttaagtgaactaaggtatttctttatatggttatataacttgagaaagtaatttgactttatgtatcagttattgttgacatttaagccaagaaattatgtttgcattgagcaaggtttttaaaatcataatctctcatacacttttttatcttaacttatatcttgattttaaatggatacttattaaaatgttacctgatagtatcaagttaagattttagaaattttcttgtcttgtctcttccccaatga

SEQ ID NO: 111261 - DNA, 1104 bp, Homo sapiens
ttaccatcttacagtttctgtgagtcaggaatcagggcacagcttatctgggtcttcgacttcagggtttctcatagactgtaatcaaggtgttgactgggattatagtcatctcctggggaaggggctgcttctaaccttactcacatgattgttcgcaagatttagctccttgccaaatgggcctcttcaacatggcagcttgcttaatcaaagcgtgcaaattgataaggcaatagagagcgagtgtgaacaagacaaaagtcacaggttagtcacctggtcttggaaatgacatctcatcactttgccatatttggtagttatagcccacattcagtgagaggagatcacacaagggcttgcgtataggtggcagggattgatcatatgggagccctccaaacagttttctgtctgtagttagttatatgtaagaacataaggaaaaagtatatctaaatatatttattagttgctactcacataccagccaaataatgaaatgtgtttatactctgtgaagactaaagtagaaatgatttttgaaaatgaataaatatgttctgtgagttaccaggagagaaaaaaaaaagaataaatgatatagccttttgccaatctgaaaaagttttgttttaacttgagcacatgtaactataaatattaaaacattaattcttatttcatccttgatggttgattaaaatatagcttccttatatggataaaaaattttggactcagtgtttagtaacctgctcaggatccctcagaaattagggtctaatgttgtaagaatacttggagtcttacgtaggcttgtttttctagtaaatctccatgtcctcagaattcagagtgttttgttatttcttatatgtgctgtacagaaaagatcttacagtgatcactgtagaaagaagagaatttctcagcagtttctagggaagattgtttactgagggttagagcaggaggggtgaaaagtagttatgcttgagtatctgctttcctgtctgggaggcaaaagggtatgatgcaaataccactgggcttgcatttctgaagagctgggctggggagtcctaatctgctgtttac

SEQ ID NO: 111262 - DNA, 1881 bp, Homo sapiens
tttgcagtgattttgttttcaccacacaaaaatgtgtatttccagtgcttcgcaatgcttggcatgtactagatccttaatgcacttttgtattaacaaacacatgaacaaacttaggaatgtgatactacttattgtactgtttatagtatgtctatttacctattgatcttactttttttcttatgcaactatttctctcattagtatgctatagtgaaatagtttgcaaatgttttcattggctctaatgaccaaaaggaataaaaagaaacaagattttattttgctacaaataatgtggtggtgatttttctttccagaaacgaaatcctgaagttcgacatgtagatttggagatactgtgagtttgatggaatgaatcacctgggtggggaccttggaaacaagtttgtccgtccactctacaaagtttcctcctctcctacactgaaagactcagtgccatgcagaagccttttttttaagatgaaggaaatattttatgtaaagagcaactcagcaggacacagaactaaaactactacttacatctaacagacacactacaagttgaatcaatttgaaaatcatgtttttatgcttccatagggaacattttggttatttaaattgttcataatgtcccatatttcacctgttcagtgtatactgtactttgcaatcatctttccttttttcacattggtaaaaataagtggcatccataggatcatgatttttaatttgttgcctctgaagatttcactccatcaagatctgccaatcttcaatattctggctaaatcttggtatgtggtttttaaacagtcactccgtttcaaagtctgtctttccttatagaatgtggaaattatttctccataccttgtgattttgacctgagtgctaagagaatcactctccttacctagttatctacaaatgttcattccagaaatgtttagttactgaattgaatgaagacatctcagtacactcttttaggtcatagtagttgccattttgtaaaatttcttttttcttctttgcttttttccccttatttggtttaatttttctaatgttaggagatatagtcctagatatttccatgggccagtgtgatgacttttttttaaatgaggttcagtaccataatgtttatttactggaagataatgcatttataagcattttaaaattctgtaaagtgggttagaaatatttataattttacaggcaggacagcatttgacttttatttaaaaggcggcactacttatgtaaatctgagctgtgggatatttcttgctttaagagagagacagaatctctcactgaaactcatggtcatgattttgtataatatagttcatactgtgtctgtgagtttcttcagttacaaatgggcatttagtatagttatattgactataacatgtaagtaaatagctttctactgaccctaagttatcaaggtggaaaaaaaacatgcaattcagtaattgaaaatgtggtgaaaagctgcagctgtcatcatcaaaacaactcataacatactttaaaatgttcaggtagcagtgagcattgttcatatgagaatggcggctgggtgatctctttgctgaattaatgagttcttaacatgtggacccaactgcctgtgtgagatctgtgtcttaaaacttactggaatggaaatctatgaattattgcaaattgtaatgctggaaacaaaaaataaatccttggttaaagggtttgtaatggtgatttttgacccagaaatctcatttactggaaaattgtgagactttacgttggtgtatttttcttttttttttttttactattacagagtattttgcatgctgtaca

SEQ ID NO: 111263 - DNA, 4274 bp, Homo sapiens
tctgacgcaggcactagccgccactgaggccgtgatacagcatcactgtggacactgctggctcctctccttgggacatatccacactgccccttgagcttcacctttaaggctggtatgtacgtaagttcacggtggtcgtctgcatggtctcctcttgtttaaatcaggaccaacaaaggatgttcatttgtattttggcaaggcccattgggcctctgtgtagccaggttaaaagctcactcactaggatcggatgctgtcattgctctgtgagcctttcagttgaaatccttggagacttgaaggtgttgcttattattttgatttgattttctgcatctttatctggcaaatggacagattgctctcacaagaaacttagtcatgtcagcttttagagtccttcttgagtcatgttagcattggtagtgtaaaatagattgagttaaaacagctcaggatgcagctgtgcccccacttaattggtgagaggaggaggtcacggggctggcttgacaacaaagactaaatgtggcttttttgtcggtgactaggtgtggtccataagcagaagagccatacctacaaaaagtgacaactgtcctgtgttttccaaattaaaatcttgttacaaagatcatgccggcttttcgcagtgagttgaagccccaagctcagttccagccaggctcaggatgaccctcaaatgatatgtattggatagtgtaggtcaggagcctgtggaggggaccagtattttgcaagcagttactaaagtcacatttctcactgactcttgacggtgcattgttcaaaatctcatggcttaaccttagtgttaaatgctttcaagaaaaactgtaaccatttcaattttacaagtactttctcattttacttgaacattttacaagtactttctgtatttacttgtaaatatttcctctagcccttgaacccgcgcatcacttttttggttttcctcattccaccacagcatttaggtgaccgttaccatttatgtttcattaagcttcactaggaatgtaaggataatattagagcatttgcagaaaattgttatctccttttgtaggggattcgagacatatttgtagctacttcacggctgtagagttagtgggtgatcgggtattctgcattgttccttatccctttgtcagtgacagacacattgacataagagattcctacaggattataaggagagataaattattaaccatttttttacttgatccaactactccatgtcccatcaactagtggtaactgatgttgataggattttttttaagtccagtaactattcttgcagtatcagatgtttaccccaaattaggcaataacccagacttcgaatctgtaggtttatgattcctacattcccctgccgctctcaatggcttgttgcctcccttctgttgctctcagaaaacagatggagatcaggtaaagatgaaacgtgcactatatgttcagaaaagcaaacatccattgtcctcatttagattccatccttcaatttatgctctagaacctaaacctaatacccattgactacctcctgagtttcttaggtttcaattatttttttgaaatgtcatccatggataatagcttcaattttaggaaagatttaaatgtataactttcctcattcagtgctgtgtcatttcacagtacagatctgcgttaatttttgacagctcatatatacagatttttagaaatgtaatagaaaatgattttgcacatatggtgcaagtcttgctggtgtatgtttaatgtggcaacacgtgccagaactgtttggcaaaacatgtcaaatggagtgcttgagtcagaactctaatgtaaatgtgtctaaacagcagtatgtatcattatgatgtatttttgtaaacatagtgatggctgctttcagtcatgtaagtgctggataaaaataaccacttcagttggagtaatgtaggaaaacgtcacccagcagatgggtagtcctctgcaaagttacactgtcagccagtggcactggttcttttatttatgttgggtttttgttttttttttagaggagagtgaagaattgacatcagacaacatggagtgcaaaaataataacccatcaatatttgccttctaaatgtaaaatgtaaaagtttaactgatctgtgtacacattagagaccactttcacacgccacaatatgttcagttgcaggttaacactgagaggttgagacttccctcatctgatgaccagcttggttaatttgacttctgaaggcactaaattaccaagtatttgcagtaatggggaccggattaattttcctcacaattctctatagctgtctgatataagggctgtgtttttattgaatcacagatcctcaaattacagtgaaagcatgtcttgctagtaagactcatttgaaaacctctttattcttggaataattgggccagtacaagtggccagatgtatcctggccacattggaaaactatttgggcccgttcagaaccacttaactgcaacaacagtagtaactatagttaatatctatctattgagttattgtgtgacagttacttggataagtactttaatgcattctcattttaatcctcacagctaccctatgaggctgttactgttcttatccccattgtattgataaggaaactgcccagggtactcagctaagaagaggattgctttgggcataggaagcagaatgacgagttcagtcttcctcagtagttggagcacagttctcaaagcccatcaacactttggaatggatttgttgttttatttatgccatcaagggagagttgatatttgtgtattgctaaaaactactaaagtatgtcgatgcttaggtaggaacatacaaaccatatatcctctgggatctgcccaggtttctgtataaggcttgacctacgtaagatcctatgatgaagaccagaaaactttttttaaaagtaggtaaattaaaattaaaatcacgagtttgttcacatttgtcccataggttcctagtgcaaaaatgcagggagataaaagcaaacatttgaactcagtgaagtgagagtctttgggaactcctagatgttagaaatagcaccggggcatcaggtagccaacgttcaattcacttttcacgtttgtgtctttgtagctttagagctgatgagtctgattggtttggaagagagagttttaatttatgatgtcactgtgagaactgttgtgaaaattttgtaagaaaatacagtaatctgttgattttttcctgtagttttggctttcacatccctttggctgtgtttaagttcaagagcatgccaaggccatgagggtcctggcttgcacttcttgggaacagggcatgctagaggtgggtcatgaagctttcaaggtcactgttccagcccgaccctgcgcaatttaggcattgcctttatgtctctcctctctggaacttcatgtagcagcctaacaccggggccgagttgcctttactctattttctatgatgaatacttgtggagaaactgtgacaaatccattgatcctgatatttttattgttggagtcttgttgattctctatgaataatttctatttgattgtactgtgtagagttaatacccactagggatatgttaataaagctacaaatgcatagtgtaatatagaatagcaagatttttttgtgaacaatttatatagaagagtaagttgttttttaagtgttaggctcatttcttttagaaacttaaaatgttataaaagttttttaaacattcaatatttttaattataagagacatttgttactagagccaattatttcaggtgttctaattggagtgttgattttattacctcatatacctctagaatgccacgtgttctgttggggataaaattgcacaataaatgtcaagtctctgttaagtgttttaacttggtttttgcatctttctaattcattgtaaatacttttctgtttctttgaatacataacttttctctccctgaagctaagagttttgcttgtctctgaacatcaggaaaatgttacatgcttaatatccaaatacaagatgctcagttttgtcaggaaagtgaccagaaatcatccagaaattcatttgatctaatgaatgaaagggacggccagtgacaagctcagagtgatatgtagtccaagaggattttcatacggtatt

SEQ ID NO: 111264 - DNA, 2414 bp, Homo sapiens
atgccttacaaatcaaatttaccttttatttcaacagcaaatgttccttagagggattaccctctatatctgtgtaattttttttttttacttttgcacatgagaagaaaatttgtatggaataaattgggtctaatgagtgacatcatcatggcattgcgttggatttcccataaagcttttcttatagagcttctgttaaagtttaagcagcctgccctgtcatcttctgcaaaaaccagctgtttttttctctctctctttttgatgttgtatatattcctgcagaattcattaggatgcattgtacctccaaccccgattggtggatgccctcggaagagcagataaacaaagtgttcagcgacgctgtcggtcacgcccgacaggggcgggcggtggggactttcctgcacaacggtggctcattttatgaagggatcgatcaccaggcttctcaggatgaagtcttcaataaaagttcccaggatggatctggggattagtggacagaatcttcctgttgtagcagctggtcctctcaagagttccaattgtgaatgtcctgttcctgtcacctgagagtccaaagcctgtcattctgccatagtctacacattctcagctgccacagtacccaaatagaaatccattttagggttgtttgggaagtctgtggcacctacaacagacttttggaatattatattataaaaagaaaaaactacatctgatttttaaatgattactagctagatcatgagggtgaaaaaataggtgagctcctagttacctttctgaaatcttcaaactctgctacctgggcagagatagtccccaaggtaggctggggtagtgtttctgcccatgggagaaggtggagacatggagttgtgttaagggacaagaagcaaacattctcttaattcaaataagttgtctttatgttttccaaagacttgacttcatatttctcggcaaagacataggatagatgacatcatataccattttgacattaataatgtctattactaaaaggaaaccagagaacagaggcaacatctgcagacagtgattaattacaggtcaactgtttttctgttgtttaaaaaccactgtgttgatcaagaaggcactatttgatctctggagtttacaaacagtagtcatttttcattgttagtcaagaaacatccaaagatccaaaaccattttcaaatgctcagttttgtaggttaataaatccgcagtttccatagccttaaatcaggctttgttgacacaatgccaaagtgatgggtagaacaatgaaaatttaaagcaattagttgtttggtgcactgaagaccaaacaagtggtgtgactgatggtattcgctgaattgactagatgttctggcattgtatacacacagcttcaaggcgattctgacaactatgcaatgggcttgtcagtaattgctctgaaatttgagggtctttctctgctgagctgatctttagaatttgtatgaaacttgtttcccattgtccttgatgaaaacatttcatcccctccgtgcctcctttaccccaatgtaccccttagctatggctaagtcagcactgtgccgctatcccctggttaatttgttgagttccatatgtgaaattagtggtatctttggaaactttccatattggcaaatgctatagaggtgctagagtcatcatttctgagggcttcctgtttggactcaggagaggctttctttaccaaactagtccagattactacattctttgtagagcaaagggctaaatggacagcgtttattgaaggctactaatgtcatctacagacatgaccaagggtttttgaaaattggttggagattcaggttaatgagcatccattgataaagggtttttgggctatttttgtcaacataaactcataaattgtcctttagatttaatatttagtttgtattcactatatacaaagtcctagaaacaggtctttctgtagcttttgtttattagcttttttgtattactagaattcatccattgaaaagtttaatgtttatggaggtggtcatctgtcagatctgctcaatgatgtagtgggcactaatatttcaatcctgttttgagaaaattaactaaaatttgtcatatcattcaatggaatagggagaaccaatattcaattctatttggggcaaattagctaaaatttggaagtaaaagaaatgatatgggcaaatgccatgttcttacggcagccatgagaccagtctctttggctctccaaggaagaaagatacctcttaaagcattttttagaggtccgagaagtcagtgtctgtcttataagattctttgacaacatgacatcttcgctagaagaaaaacaccaccatagc

SEQ ID NO: 111265 - DNA, 1428 bp, Homo sapiens
ccctcagtgcccaccagacaccaagtgttccaaccccattggacagtttgtgaatccctgaacagtcaaacacttccatacttctggccttcctttactccagctattcctttcaacctaagaacatactccttttctctccacttgagaaactcctattcatcctttagtacccagctcaggtgacactgtaacaaatgcttcccacagttcgcaagcaagcacttttcatagcacgtcatgcagattctgttatcgttaccgtgggaaattgttactctatatgcgtctgtgtctcctgatgtcctgatatgaagagaggccatggaggtctttgaggacagagacgcaaagtcatctttgtgtcccctctttcctagcccactgttaggcatgttgtaacatctgcatgtcaattgaattgaattaatggaatgaggatattgacatgaacaaaaatataacaatgcatctgtaggctaatacttaaagctcattgtttatttctagatatttacaattcaggagcttatactttacagagatgatgtgaatagggcacgtaaagatgattaaacacacacatggccatggttatcagaggacagtaaataattcagttgccctatgaaagtgtatgtggagtattttgagatgttttaagtccttgaaaacaactacatagcaagatagattaagtagtgcttgaagggtgaagagagaaactctcatcaagattttaatgcaatgaaaattaggaactagagacccaagcacccttaagatgggcaaaaccagaatctgagcagtttcccccaaggaaaactatttacgaagaccatttcagtagtcttatttaccagctgctcatacaagacagcacagtcaacagagtcaattaagtggcctcaatgaagaattcactagactcccaatcttaaaatgacagtagcttacaataggcaatatttattggatgcccattgctttacatgtattattttaagtaatcctcacaataactgtatacagtaggtcattttcccagtttgtttgtttgtttgttttttgagacgaagtctcgctctgttgcccaggctggagtgcagtggcactatctcggctcactgtaagctccacctcccgggtcatgccattctcctgcctcagcctcccaagtagctgggactacaggcgcccaccaccacacccagctaattttttgtatttttagtagagacggggtttcaccatgttagcccaggatggtctcgatctcctgaccacgtgatctacccgcctcagcatcccaaagtgctgggattacgggcatgagccacggcgcctcgcccattttcccagttgtacaggtgagatcatagaggctgggagaggttaagtaacctgcccaggatcacatggttaata

SEQ ID NO: 111266 - DNA, 1072 bp, Homo sapiens
gagtgacacccaagaatccactttttacttgattagctgtgcattttgggtggaggggtatctgttatcatttgaagaaaagtgcagtacatggtacactggttttgcatagaataaaaatgttttgtcatactgtaaccctcctacataatttgggatggattttccctaagcagtggtctcaacaggaccccatcgttctagaggctagtacatttctgtggaaggacctggggctttcttctagtagaatctacctgtgttgtgggagtcacttttttacagccaagcaggatggatgaatacaaaggagaacgcaacgctcagcagttagcacagaaaataaggttgaaaaggagatgggtcagctactgcaggtcagagcccaggtagcgttcctcggtcatttgtctgcctttccggaggagtgctgttgaggatttttttttttttctgaaataaagcctttatacctgggagcagttcttgaaatgagagttaaaaataaacaagcctatcagtctacaagaaaaaatgatttcacttgggcacctgtcaaggaaaaaggtgaaagaccataccaaaaaaaaaaagaagttgtgggcaggcactatttctggcactactctgagaggggcagtgttacggtattatttataaaatatccaacacagtcttttgatgatcagctacatgcaaggcaggggcttctggaaaattctctctaacttttcagagtcagttgcaggtgtagggaattcaaattttatcccaatgaaatagcattagcacattttcttttgtattagatcaccacactagaaaattagaaagtctgtttagaagttaaattttttgaaaagagtgaaattttataagcaaaaaccacaaaagcagaagacttttggatcaggaatgtgaagggatgagaggtttttaaaagaaggaaaatagtgcatagaacttctcattggacagagtgtcagcttagagtagtcacatttacttaggaagcttagtcaacactaaggagaactcataaaagagggcaaatataaaataccatatttca

SEQ ID NO: 111267 - DNA, 2631 bp, Homo sapiens
tttacatgtatattcttattaaaaagttggaaaagagcacttggacccctctcctctgactatcttagttatttcatgaaaggataataagaaaaaagaacacagtggaacgttgagcactgcatggagttctcctgtagtgtggtttccttggtcttacatcctgggtgtgttctaggggatttcttattgaagctgttctagcttatttttcccatagcagcccttgaacatctcaccattttttattctgaaagttttctttcctccagaaaaaaatgcagctagtcaacattttcagagagagctagtgctagttgcatttttatcttaaacaatagttataggcatctacaatctagaatattttgtttattgccattattctgggaaaggggagaggaaataagagacatcctcatgcttctgtgtcagctctgaaaagtgcccctctctgtatttataatagcccattctaggtggcaatcaggaaagaagcgaatctaccctgtgacatttatatttggggtaaattttcaagacccttcgatatcattaaattacattttctttttacagtgggttgattgcttttgtttgctttttgctttcaatggttgacaatatgctttagaattcatgtacatgggctaacaggcacccatgcctcgtgccattttaggatatttggcaatctactggaagaggttctaagaagtgatactactgattttcaaatgatacacgtcagcctaaacattggccttgacaagaagtccaagttagcaaataaatgaaaagaaggaatagtgaacactgatgttagaagacacatacagttttgtgctcatcctgtgcccataggcctactctttgttttaccttaaatttctagtgagctcttcaaaaagacttatctttcttccccagtttgcatctgggagctatgtactctctgcagggattgtatcagctgattaatagcaagggcatgagggcactccagaaatagaagtaatgattgctttaagccctcctatcaatgaggaattgagtctgcagtggctggctcgattccttagagtaaggatattaatgaaaccaaaggtgtgagttcagacctgtgcagccagttaatgccacagagagggaaatctctatatggtgcccaaagtcacagtccagccgtttcctagagcaagagactgcgtgtgactcagcaagcatcccgcagtcgcagaacaacaggaagctatgcgttctattcacagtggatttattgtgtcatcttggtttatgacagacagtagaaatacatatttttaacatgtttgaatgttaagctgaaaattgaggactttatttatcttttgccgttggctgttggtcactgatgtgtcctttcatttgtttcagagagtcgaatgatcttggatgcctttgcccagcagtgcagtcgagttcttagcctcttaaattgtggaggaaaactcctggactccaaccattctcagtccatgatttcttgcgtaaagcaggaaggctcaagttacaacgaaagacaggagcactgtcacattgggaaaggggtccacagtcagacctcagacaatgtagacatagagatgcagtatatgcaaaggaaacaacaaacttctgcctttttgagggttttcactgactctctacaaaattacctgctctcgggaagctttccaactccaaacccctcgtcagccagtgaatatggccatctggccgacgtggatcctctgtcaacctctcctgtgcatacattaggtggctggacttccccagcaacgtccgaatcccatggccacccatcttcatctacactgccagaagaggaggaggaggaggacgaggaaggctattgtcctcgatgccaagagctggagcaggaggttatttcactgcaacaagaaaatgaagagctcagaaggaaattagagagcatcccaggtatcctgccatattccttgcaagacaactgcaacccttctttctttcacttgtctcatctgtctgtgtatttctgtactcatgtatgtgtatgtgtatatgtatgtgtgggctttttttgttttttggccagtgatgtagaaaagttggaaaaaacagacatgctcaagagcttctcagcccgtccagtgccaaacagaaattttaggaggagccactagcctgtttacttccagccaccgtgttcttgtgtataggcctgaacaccatagtcctattaaaaggtgtgtctgtcaatataaaaataatttcttgatgtgctgctttgacattgaaataggtcaagtgctataagcctgttttcttaaaaggtggtcctcttcctttaaaatgggttttgaatttttaaaaactttgatcctatgcattttattagtcaatgatagaaattaaagtgaaatactttgagaggcaggactcaagtagtactgaacaaatgaaatggtctcttctatttcattaattttccctgcctttcctttgaagtttcaacaagcataacgtctttagcatatacactgtcctaataggtcaaagatagaccagtaattaagccggccccaaaccgtttcttggccctgactaaac

SEQ ID NO: 111268 - DNA, 2241 bp, Homo sapiens
ggattctccagcgccgccgcgcctgggcttccgacggcgcgcgcctaacaggtggctccgcggcttggatcccgcgccgggaagcacggctgtggcagtcggcgaccaggatcgctcgggcgtggtccggagtggggccagacgcccccccgggggatagcggcggccgctcgggaagaagctggagcttctcgggccgccccgctgggacgccctcgtactacttcactttttccgtctgctttttccctttctccttcttcctccatttgtttcttcttctctccacttctcctttgccttctagtgctttcttcgccacctctttgatgcactctcacgctgtcgcagtccatgctggctggctctcagttccgtttttccttctgtctttttttgtgcgcctgtgtttctcgggggcgctctgtctcgctctgtcccttttccttcccaccccttggttgtgagactcggggctcctccgcgtccgccacgccgtggatttcgggcgcggggaaccatcccgcccctccttcctgccccgggagtcgcaggcactctgctcccaccgcccacgtcgtcgtccccgccatcccctcgtccccgtccgtggcacgctgccgcgccgcggggtcctgcccctcccgagcatctcggcccgagccttacagaaacgcctcgtgggaggcacccactctggggtccgcgactcctctcctttatctcgagtctgcgggcgctgcccggcaaagcagcccactgcctgcctgcagggagcgagatgggctggttgcgaggccacagcctgaggcctgcgcccaagggacctctccaccagctcccagtgggtgcagccacgtttatccactcattagaactaaaagttcctgccaaggccttttatggcactttgaagccccccaaatcctgcatgtcagtgaatcttgagacttatttttttctcctgtggaaaatagaagtgttgtgtctaaatgagttatagatgcctccagtaataattctgttgtttgtcaatattttgacacatgaaggattggttttggaaaagaaaacctaattacaggttatagtgaagacttgatctgttgcatctctcactgatttgaagatgtttgattgctttcagtggggttcttaggtggacttccttattgtttgtggggtatgttttttttcagttgctcttgccccaatattccattgtgtttttatattctttgttaggcagttggctcacttgattttcctccttactttttttctttttccccccttcttaaggaggttcattttctttctttctggcttgagatcttattttctcctaaactacttcttgttcaggcatgtgtttatttctaggctcagctttatcatcctgtatttttatgttctttgccagcaatttgggtccttttcccattttctgtgttttgcttttactcttttgcgtagcctcagttccatcattttcattgacgttttcccctctatctgcccaggtcagtctttgatctcctcttgcttctccttccagcctttgttgattgtctttccatattttacttcctgttatacactgtaaatttacccccttctcatttccattttcatccatagttttagccggctatatatttcctgtattgcttctttttttctgcaccagtcacttgctgttctttccttggttacttctaccctggcagtttccttgctgtccttccttcatgtgggttttttttttccttccttttctcaccttgttctaaatgttctttttcagtgttccttctgatgtcctgtttagtttattttgtctctgttcccagatggaaattataacatcactaaatctaaaggagtgaagaggggcttttttgatgcccttcgaatttctccatatttccttttattctcacggttgcttttgttgtttttaaggaggtcatagagaggggtaagcttgatagcaccaagggctggatccctcgtgcttgttggaaagatgggaattggatggtaggcttcttccatacagtgagggaaatagtctggggggaagaaagccatagaactagacatcatgaattgtggtcataatattaatcactgatggacaaagccatctcttaacaggcacagtgatgtgagtggccatcagagaacagccacctgaagagctgattggttctctgagaaactagtcgttccactttg

SEQ ID NO: 111269 - DNA, 1981 bp, Homo sapiens
ttcaaggtcatccccgtctccccaccccccgcccccgcccccgcccccgcccctgcccccgtcttggggcagcccacgcccaatgattggccactactgaggtataaaagcccagcccctttgtccagacccgggacaactctgaagagccatgcctgctccagacctccctgtggggttggctgagaccgtgttgtggtggcactgcagtccagcctctctcactgccacttcctttcctctgctccactggtgttgaatcaagaacactccccagcacacctctgcacagaaatcatctgagtccaacttgcaaaactaggtctcagtgtgaggtagaaaggaggttgttctcaggtctttattttgtgagaaaatactcacctttgagatcttctttctttgatccttaaaaaggaaatcccaaaaaattgacctcctttgaaattcactacattcttttgctgaacgagacagtctgccatttgttatttccctttatttactaacgttcactctagttttaatttgtctcaaaatgtgaatagccaagcctacttgaaccaattttgcaattgaaatttgttgcagaacagaaaattacgtgaggaacttgaaggacgaggcatttgttggaacaggaaatgcagaacattatagcagagtggagtacttttggtaatgatgcatgggactgaaatgatgtgaaagggaaatcatttaaccatgtaaattgaacaaaggagaattccgtgataatgaccccaggccctagtattcaggaaaagaaaatggtgggcattggaatgaggtcaccctgacgcatgtggcattgcatctatcagtttgctttggtttggcaacctggtttgattctctgccagagcataagttggttttcatctcaacagtccttttgctccttgaagggtgagaaaataggcccatttttcaatataccacaaaatattttagggtgaactattttagggaaggaggattttaacaaacaagttggtgactcaatttgatccagagtttccaggttgaagcagttgcatttgctagagagaaggaagaggaggaagggctgttattgttgtcattgttttttctaatatttcctaccaagcaactgctttgggataataacaaaatgattttgctatggaaaaaatgcagagaaaagaaacgggggctctttgattggctaataatgaacataaaggacttcatgcttgctgaatggcagattgaaattcagtgtgtattcatgcagatcttatgggggtggtattggattggaccacaaattagtgctggcattaatgagatggaagctgtaaaatgcagagttccaataaccatgatctctgataaggcccaattgaaagcacccagaccgttcagacaagttctatgtgaaagcagagcaataaacaacaaagagatattcaaaatgcgggaaaaaaattgaggattatataactgactaaactggtatcagagtgcttggttaaaacattaatgcacagctgagtgacaaacatagacttgcatagaataatgatttttagaaacagacactgttcggctggttgtggtggctcatgcctgtaatcccagcactttgggaggccaaggtgggtggatcatgaggtcaggagtttgagaccagcctggccaacgtggtgaaaccccatctctactaaaaaatacaaaaagtagccaggcgtggtagcacgtgcctgtagtcccagctactcagaggctgaggcaggagaacggctggaacccgggagacagaggttgcagtgagcccagatcacgccactgcactccagcctgggcgacagagcgagacttggaaaaaagaaagaaagaaagaaacagacactgtttagatgctactcaaatgatcagagagaaggattatacctcttcgttatagggaagttagtctaaatctggaactgcactg

SEQ ID NO: 111270 - DNA, 1535 bp, Homo sapiens
gtcagaagcagatttactgtgcattggttacctctttagcccgttgcatcttgggcagcaacttctactacttgcacaagtctagtgagacagaacacttacacaagttaagcaaagcaacttcatttatttatttattttagagagagtgtcttgctctgtagcccagattggagtgcagtagcacaattgtagctcactgtggccttgaactactaggcccaagcaatcctcctgcctcagcttgctgagtagctgggattacaggcatgagctactgggcccactatgcaaagcaactttatcacttacagttaggcagcaagatcctaagcctagcattcacggtgaaccagtcccccaaggcttaggaaatctgcagaggatggatggaatcttgtctgcatggtctctacatgacattacagctgagggactccaaaagcagtcgattctgggttttatacctggagacaatagatcttgctcagctaaaattttgcaggaaaccctattttagtggggacatgaacagaacccaggctgttctggacagttacaccttatctcaagatgttgtgttccccgcatattttgcagttattctgaaaaccaaaggccagaaagtggggaaagagctgggtttctaaggggacttgtcctgcaacatggagagagatatttgatatatgtgaagaaagaggctctgggcagcaccagaatcacatttctgcccagtttcctttccccacctgcaccctccaaccagcaacacctaaggtgacacactgtgctctttgggcccctggaatatgaactatttcagtaacagctccttgaccccactttcaagatgggcaggagtgtcccatgctgctgtttgtgaaggtttgtgtttcagatggtagagcatcttcttgtccatgttcagtacatgcaagtggagcaggtgttttccccttggagaaccatgaagggcatcctcagacctcactatgcttggataatgttttgtagaacccctactaaggctacctgggccaaagctggccggcatggggtctttggttgtcccaggtcctactgaagggctgaggtatcctgcagctccaggcaaagctcttaacaattcagagcacaccaggatgccaaggcacacggaagatctgctcttagccattgcttccatgatgcagattcaagttttttcatcatcactgtcttcctctgatggtcatgtctgattaatatataccccttccaatgcataatgttcatacctgaaccccaggtgcagcctaatcagcaaaggagactcccaggaatactcacctctcttgacatagatattatatatatatatatatattttttatatatctatatatatatatatatttttatatatctatatatatatattttttttttgaggcgcagttttgctctttttgcccaggctggagtgcaatggcgtgacctcagctcaccacaacctctgcttcctgggttcaagtgattctcctgcctcagcc

SEQ ID NO: 111271 - DNA, 2047 bp, Homo sapiens
ctcgcctctccacatccagtcagccactagggatattgaccctgcctcctttatgtctttcaaaccccttctcctctcttgcccttggtctctgagttcagtaaggtaatgcttgcaaggtgttggccctgtgcctggcacatggtacctacagcatacatgacagctgttcctgctattagcagttgctccaaacccttgttaccattcacctatactgtcaggaattgtctcctgttctcatgcttccagtcgtatcccccattaaacccataccttaaattccttcaatcactattaatttttctcatagcatatatcttatgatctctgttccctgcttacaaacccttcagtggctccctatggcccattgattgagtttctatgacttctgttacccatcacctttcctgacctcagattttccaggatggctgaccagctgctcatttgtgctactgctacgtgtacattatcatagttaatccaggtctccaatcaataaggtagaaactgctgacagcattttaaatggaagtttttccagcattgaaaacaaaataaaattgtaaggtccagcctccagaaatcctgtcatagtatcattttttttttccagattgcttcataattatttctttaaatgtctgccttcccattaatatgatgtgtggggaaaggcctgggtcagagtctttgtctccacagtgcctggcatggtgcctgatactaagtgttgattgagcaccatttgtgtgccaaggactgctctagggtatgtggaaactataagggacaaaattcctgctcttcctgagggaagcctgtgcactacccatccctttccagtctctttcctacccagaggctgatgttattcactgcattttctgtgattagtaacataaagggggaaaaatcattcagagagaaaatatgaactgtcagatgagaatgaaattataagtggtaagaggagaattaaattaagagcagtaagcatcatggatttataaaaacaagtcatgtcagacaaacttaattgcttttcctgatagaattaccaaattaagggatggcgggatacaatatcctgagagcagtttccttcaacgaccaggtaatgaatattatttttgaagttagcagagccttttgaaatagaatcagttgaaattgtaccaaatgaattcagattgactttgatgtgagtctggttcactgacttgacaacagattggagaggagaaaaactaaggcaactacaaacaatatggtgctgagcttcaagacactgcctagcagaagcgtggggatccttattcagatggatttatcacaatcattattggagtcaaagaatgacttttgtggcatttaaaagacatcaagagaaaatcacagtacttgggggaagtcactgcatggagcacagaaatgagatgcttctacactatcattacaacagtgtggcccttggagtgataataaccaatatcttgcatagtgctttaaacctctgctacccagggtataagtctgcagacagcaggagcatgggggagcatctaggagcttcttagaaatgcagagtctcaggcctcaccccagtgaatctgagtccgcattgtaacaaaatcccagatgatttggatgcacgttaaagtttgagatgcattgctgggtttattttatattatcctatacaatttgatttttagatctttctcagaggggcgagactttgtgtttacctaaaaaatcagggattcagccccagtcttagcaattccattgtttactctttccaccttccttaaaatcaagcatatgaagctgatgaagttggtcccttggggaagttacttaacctcagtgggccacactgtgtttatttgtaaacaggagctaacaacctgggcaccattacagtgtttttacacgccacatgtgtatataatactttcgcatcttctaacatcactgagtatattattattcccattgcacacatatggacactgacatttggagtgtttatgta

SEQ ID NO: 111272 - DNA, 1089 bp, Homo sapiens
gttctgggattacaggtacctggccacagtgttttttctttaaaggccttttatctttctgaattggtaagggacacaaacttatgtggtcttgtttggtagagtgaggttcttaagactctgattcaaagagaactctggttattcttggcctatttgtatttacagaatcagagattaatagatgaggaagagatgtaacagatcatctacttcagacttttaagtcccaagtataagatttattgctagactgaaattcaaatggtgcaggaatggtgaacccagtatttccccctgtctgtcaacacacagaatgtggtaatccaaggcaatgcgattaagacagtggttcacctaaacattacttattttcacatcttatcaaggctgccagtgtagtattggagggaaagcgcagaatcaacccaagacacacaaataagaaataaaaacaggatgaatgtggcagacatcctcgggtggccatttaatacctgaatctgggtcacagtgaagggactggctctagtctctgacctaacaagcctggtcaatttacatgatttctgtctctgctttagctggaagatactcaccaaacaaacaaacaatgaatcttgatggtttggaggcaacagagagggagaggccttgcaaaaattcagatccgcacatgcaacatctcttggcaggtcagtgaattggcaactaacagctgtacagtaagatttctgagacaaatattcagattactatcaatacgactcaaatgatcctcctgtgtgttgcagggaggaggagggggagaggtagaagtgttcatggtggcttagcaacatggccaggggctaaaatgggagtctcctttgaggctttaagcatcaccagattctgaggagcatgcagagcaaagaactaagaccccaagtcttgcaacctagtttgggacatgggaaggggtgcaaaatttaaggagggatgcagatcattattggaaccagtaatttgaaaagtaagggattagcaagcagcagttcaagcataagcaggcagaggtctgggacaagagccaggcctggggtgttt

SEQ ID NO: 111273 - DNA, 1045 bp, Homo sapiens
ctgcttcctccatatcttagatgttggccaaaactttgtggccaggctggtatcctgattacagatcaaccacctggatgccaaacagtgtacctgtgggaacttttgcaagatgtgctctctactcccaatgatttggcctggaattagaaatgtgaactccactttgagaattttgcaggtgtctgggaagcgttgggtcccgtacaaaaccattctcatatcttcaacacagatttatcttttacttatgcagagatgataatgggctgccattcgctccttcaacttcctttgactattgaaagaaatagatctactatagagtttgttgagaatctttgtagtccaagttcaagtaaaaacacattatatcacggataaaatggtttcagaaatcagtggacaagtttatgttagtttttgcaacctcaggtcccactgccaggccaggtaatgctttccttcttggattccatgttgtgtgcttcagtctgaataacattaaaaatatttctcttagcaggatgcggtggggttgttttcttttttaatttcaaataacaccactccttgaactgggaacaaacaattcacttgcagctcggctctgcttttatttgtaattttcacataaatcaacttatatgaaaatgtattcataatttgagctttctctatagcgataaaatgtttctgcttctgtggtagaaaatagcttattatgcaaacaacattgccactcttacattatgcatgggatttacctggagaacatcacaaaagcttcaggaaaaaaaaaagccagggagggtgtagtagggtgcttcgtttactgcaccatttacctataataattagctacaaatgaactaatatctgtatttagcaacttctttaatattgctttggttaattcagtgaaacaatggagaaaaagaaaaaaatacaagggaggtctcctgacaaatggtgcctttcaggatgtcagctccatgaaaaatgagatctggtggtttcaaacttaggccagtggtggtgagta

SEQ ID NO: 111274 - DNA, 1173 bp, Homo sapiens
cagccctgaaaatgttctgctgttttaaactcttagttttcaagatagagtaaacagaaattttcataggcttgtaatgaccacatcctgcaagacctggcatgactcttaaagtcaaactgatgtcaacttctacccattccattttacattttactgccatccaagcaaaaattaggaacagtttgcagtccagtgtgaactagaagcctcctggtccaatgccactgttccctaggtgtctgacggaaggcaagttatttaggagaggcaagctggtggaatggacaaagcacacacttaggaattagggagcagctgtagcttatgactttgtgtgtctctgtttgcaaggcttagaagtgtgtagataatgatcacaagcactttctgttgtttgcaacctgtgaacaaatgccagcaactgactgactggctgagctggatgggtcccccagaggatgagtcgctggcagctgttcctggtgtatcttcatgcatagttacttgtgatagaagaaataaaattggagcaagagaacaacttggcttcattcctttggtgctgggaaagggttgtgtcttgaactcatctgtctgtatcctgttaagagtagctcagatgtaaatttcaaattaaataagaacgtctaagagaatgcattatgaactcagtgctcaatgaacaaaataaaaattattgcagtcaacggagttaattttactctggggatgagtttatatttttttctctttaagcatgcttggaattcagtcctgggagtcaaatattgacatttacaagatgacttcttatactatatgtcaatgagaatgagtgactctaactgcacacgacagttggaacaaatctcgtaaagataatgtttagccaaagaagccagacgcaaaagagtacattctgtgattctatttacataacatcccaaaacaggcaaaactcatcaatggtgtgagaagtcaggaaaatgattgcccacggggtcaggagtgacacaggaaggaacagggagagctagaggtgctggacagctgaatgtgatcaatttctttttctttctttcttttttttttttttgagacggagtcttgctctgttgcccaggctggagtgcagtggcacaatcccggctcactgcaacctctgcctcc

SEQ ID NO: 111275 - DNA, 1037 bp, Homo sapiens
tttctttctatttttttttgagacagagtttccctctgtcactcaggctggagtgcagtggcgtaaactcagctcactgcaacctctgccttccgggttcaagcgagtctcctgcctcaggttcccatgtagctgggattacaggcatgcaccaccatgcctgactaatttttgtatttttagtagagatggggtttcgccatattggtcaggctggtctcaaactcctgacctcaagtgatccaaatgccttggcctgccaaagtactgggattaaagaggtgagccaccgtgccaggccccaggatcatacattctttagtctcctttaatctgcaaccattccttggtctttcttttatagtatttcatgagattgacagttttgtagagtacaagcccctgatgttcccccaattttggtttgtctgattgttttcttatgattcgtttcaagttatgcattcttgccaggaataccacggaaaagatgtgtccttctcagtgccactttggagggaatatgcaatgtcagttcgaaaatgttcatgggcattagaatatatctttcattgttttccttcttatttgttaaaatgaagactacagagaatttcttacttggaaattctccttgaaaatcttactacatgaaacaatagagccctaaaacctgccatgttttttggaaaatgatcatagattctagattcagctttctagtctttatcacaaaatacaatggtgctgatgtgcttgaatgtttcaatatctcaggtacttctctaagagtctttgttatcaggagaattcaattgtgttggatatctgagggggctaattaatgacccttcctcttctacaggctcttgaccaattgagatgctgatcagctttattagtagcaatgctggagaatgtggctaagccttctgcctccccctccaaaacacaaccttccttaccctcccattcctgacctaaccattctcagcccatcttgtaaaggtgaagacctgaccaggcctgcccgaaga

SEQ ID NO: 111276 - DNA, 1035 bp, Homo sapiens
agtagagatgtggtttcaccatgttggtcaggatggtcttgatctcctgacttcgtgatctgcctgccttgccctcccaaagtgctgggattacaggtgtgagccaccacacccagccaatagtctttatttttatcatatactctctctggtttgaaaaatagtggtgcacaaacagattatgcttttctaactccttaaatatggagttgtttagtatttctcagtctacctcataaaactcagtgtccatcagggttggcaaattgggttgaacttatttgctaaccgtagtaggatgacagtagccgcctgaagtccagtgatgagaactgtggggctcatttggactcagcaggacagactgctgtgatccattagcaatgtctgcccctgggaggggaagggagtgggtggcacgtatgtaggctaggcctgaccaggtgtgagggttagtgaagagggcagtttggactcagttcaaggttgctcttgttctgacttacaatcaaagctgctaaatagcaatgtaaaggatttactcttgataaaggtttagatggaaagaaatggcttctctctgccttgctttctcatggaggatcaattcagtctggtggccttggcagcctgcatgcaggaagatgaccccaggtcacacagagtacagagaactgtgggcctatgtctcttatgccctggctacatcagcacttagagacaactcatgcgacctactaaggctttcattctgtccctctgcaagctgcatctcccaggcctaatgtctgggttatgggacctttgctgcagggtctgaggattctccacttacatccactacgcatgggtaggcctgacgatggctcaccacaaaccacactgtaccacacagtgcccatgccacatcgtggctctcagaatggcagccaggagatctgtgaacctcatttggatgcaaagctgcttcttgaagtctaattgattgtcataaagaagttcatatgtcaaacaattttgtttctagaagttcgg

SEQ ID NO: 111277 - DNA, 1004 bp, Homo sapiens
gtatccactcttattagcatcttggattctttgtcagttgattttactttgttgctgtagcaggcagcctctcatgtaactctgtgttcttgggttttattgctagaaatgcactgagcacttttatagttttactgtgcattctcttcaaggcaaaattgttatgtctatactgatatgcactgtgtataggacataccattaaaaatcaacttgtcactgaggagcctgaatctgggaatagaattactgatgtttcaggattctagtgaggatcatggaataaaatttggtgatttcaaatttgggttatgaatgccttttagccatgtgaggttaaaatggttgaaatttggtagtataaaaagtcaccggtttattaaaaatgggtttttaccaggactctccttggttccctttggtcaattccattagaaaatcattagctgtttacataaataattgcaaactgctagcaggtaatgtggagatcttaatcttttttttttaagtggaacttaaaaaaatgtatgtttagataaatttttctcttcttttctcccatccacaatccctgcccatttccctactttagacagacagcaagaagaaacgaaaccagaggagaagaatggagctggatcgtctgtgaagaccctgccaggctgcaaagaagctgcactcataatgcagagaatgcagctggaggagctctttgatttaactgttgttactgaaatctgtgcagcatcaagtgacttagagcaggaagttatcttagaattctggaaagattcaaggtgattagacagttgacgagtgagagttcaaagccggtaccactcatttcaggcaaggtttgggcagtgacataaatccttagccaagagctataatagtctcctttaggctccttgaagataggaggcagatcttaatcctttctgcatctacagtgaattgtatagaacaacagtaggtgcttcatgaatagctgtcagatg

SEQ ID NO: 111278 - DNA, 1079 bp, Homo sapiens
cccatgtgaggacacagctacaggcaccatttatgaagcagagagtgagccctcactggacaccaaatttgctgacctcttgatcttggacttcccagcctccagaactatgagcaataaattgctgttgtttataaattacccatttgtgggcagggcgcagtggctcacagctgtaatcccagcactttggaaggctaaggcaggcggatcatgaggtcaggagatcaagaccatcctggctaacatggtgaaaccccgtctccactaaaaatacaaaaaattagccgagcatggtggcaggtgcctgtagtcccagctgctggggaggctgaggcagaagaatggtatgaacttgggaggcgaagcttgcagtgagccgagattgggccactgcactccagcctaggcgacagagcaagactccgtctcaaaaaaaaaaaaaaaaaaaaattacccatttgccagagcagctcaaaaagattaagacagctacagctgtggctttaatgacttcaagtgtgtgtatgtgtgtctgtgtctgtcgatacacatgatgtgtgtgtgtaaatgtgcatatgtgtgtgttggtatacatgtgtataactgtgtaactttgtataggtgtaggtatgtgtgcacgtgactatgtatttatggccaggagttggtctggttttcagacatctcctccctcttctaagaactaacttctcccaggaactgggggagggggaagaaaagggcgaacatctctctgccgtcctgcacaagtttgcatgctccacttgattggctgtgttgctcttttttctcagtgtctgtgtaggagtgatatggatgatggtcattgtcattttccactgaccagggactcgctttcaagtagttccccaagtattagcaggtcctttcaagatacagctggatcttgcagcagacccctggctggttctgttccactgcatttctcattgtccttcctgcggtgacagtacctaatctttgctatcatctggagctaacccagtgcaagatccatcctctatacctttctcctccagaaattcttggcttcc

SEQ ID NO: 111279 - DNA, 1036 bp, Homo sapiens
acttttaaaaacaaaattcttattatttaaatatttgcttaccaagtcaaagcagaagaaaacaaaatcctctataaagattttcatgaaaaaatatgttactattccaatatttcataccacctggtatgactgatttatcggatcatttttactaacaacttttggggattactaaagaaattgatacaaaatctcactcaataatccaaatgaattactcaaactttccaagacatgcttggaaaaaataaagaacaaattctcaatttataaattgaattctacaaatgaacacaaaagtggaacaccctgccatctgcttcaacaagaatgatgaaaatgacaagacaaaaattgcatcaacccctctgtaatttttggcagaattttgtacttattctcatgtacctatattcttgtcaataaaaggtgatggtcgaatgtataactcataaaatttgattttgtaatttttgaggctttctaaaaataaattcacaaattaaaagtataacttgtcagaacatgaagtcaaatttgggctctagaaatacggtcaccatatgagtgttctggatcagaaagagcactctaagtcagaaagggtgaagcaaagacagtcacagtggatgtaaatgaaagaaaaatgaggtgtgggtgatttgaggattaatgggggctttttctgtccagaagaaatgcattgcagacataagatgattcttgataaggtaataatcgcttactatagtcaaactctaagtacttcagccagaaactactgagcaccaggagagagctattaggcattgttaaagcaattgatcgcttccatcattatttgtgtggctggaatttcacaatcagaacttatcatgctgcattatgaggcttgctgaaattcacagatttgtagggacaaattggctggatgtttacaaaactgtaaggctatcatttgcgaattgaacatcgacagagagtaaaaaaacatcgtaatgcccatacattatctaggcaccctgtgttggga

SEQ ID NO: 111280 - DNA, 1073 bp, Homo sapiens
gtgatcctcttgccttggccttccaaagtgctgggattacaggcatgaaccactgcacccagctatcagtttgtcttatagactcaaattatcgaactttcagaggggtggggaaaaaactcccttcattcttacagtgacgggaatgttgctttcctttgtgtatggaggacatttttcacatggagattttgtctcctgcttttgggaaaacaaagggaaaagagtgcagtcttcttgtgcttgctcttgtgtgcctgtaatcccaactacttgcttgaacccaggaggcagagtttacagcgagccaagattgcaccactgcactccagcctgggtgacagagtgaaactccatctcaaaaaaaaaaaaaaaaaaaaaaaagtgcctctaactcaaaataatttatatgccaaagtggcatcttttggggtgacatattccaccacccttcactgtttatctggggaaatcctagaggggctatgtttcctgaattcacacattacactcctgaataaacacagagtaaattttctgagtaaacaagaaaagcaggtggagataccagccacaggctctcacccctcttaccagagtggtctgcctgatttccaaggctgcaaatacacaaactgatgtccttgtatgagaggcttcttccttctgcttgtctcactcaacctaaagggcacggctataatagagaaaatgagtgtctgccctgaacagccaagataaccttgaagggaataaatgaacatgcatattgatggagcaatttgagtacatattgattcctggtagctggtgtctgtattcttagctcatataataggtagtaggagttcttataaataagcctacagaatacttttttttaagaaactcaaccaacctttgggagatcttgttatttttatttacaaataattgatggagaatgcagtgtggcctatggcttggtgattattgattttcagtcctgattaacagagctcaaaacctataggtggctacagaaacaatcctgagcaaacatgattccctactgggaaattaataatgcaaaa

SEQ ID NO: 111281 - DNA, 1022 bp, Homo sapiens
catggcacatgtatacatatgtaacaaacctgcacgttgtgcacatgtaccctaaaacttaaagtataataataataataataataataataataataaaagaaaggttggggaagattgtgcagaagggagagaggagcaaggaagatctgcaggatgatagttcactagacaggccaggtggagaggcagagtggagggcattttaggcagagagaaaaatgtgtgcaaagtcagagtggcaaaacaccctatcatattgtgttcagggaaatgaaagcagttccatatggctgaagtataaggagcaaggaagatgaaatggagagagaggcatgggcctgagagggaggggccttatttggtctttattctggaataaagaataaatggatgaaccataactgaaggcctttaagcaagagcatgttagcatcccatctgaagttcagagaaatactctagcaacgaaaaagaaacaggatctgaggacagacactggagggcagagatgacaaggacccgagcaagggtagctgcagtgctgatcaagaagacagaatagactggagagagggctgagaggcagaactgatgggagttcatggtctccatgatagacagcagctcctttgatcctaatgtctagattaggaaatcaagatcaggggttctttttcatttagtatctcccaaatcgaacacagttcttggcagacactcaacacttggtaaatggataaattccattgtttagcaaacacatcttcagccaggagctaagtgaatgagtcaagaaatgaatcagtgaatgagttaataaatcaaatgactatttcctggttagtttctgatggtcctccaaagcaattaaagacttctccttcatttctaccactgtccccatcacacggagagcagaagtcacagttggaatattgcaatatcctcctaactgattctgcagtctctattcttttgccaaaagtcccaaagctagaatggttgtgaagtgaggcttc

SEQ ID NO: 111282 - DNA, 1072 bp, Homo sapiens
aaattagagaaaatagtctgattttttaaaccttccttaactggaaaaaagtcacatggttttaccaggattgaaataaacagtcaatgtgacttttaacatgtgtttttttgaaataaagggcacgtactcttcaattaaaaagttccttatagggactctggcaaatgctaacacagttgctttacaatgtttacaattcagacaatacgacttataatagaaaatcctcattcatttagcattgaaaagctggaagttgcttctttaatgttgaatagtatacagtggtattgagcatggactttctaaatgttttatatatacatataaaaatatattggtgtctcacacccagaaagatgttatattgtagatattattaggaaaacagtgtttctcaggaacgttgtaaattttaaatgatatatgtacttcccgtcctcccacctccactctgtgctctaatgtgagactgcttcagcagtgttgctaagttaatggaaaactttttctaatcaagtcaggtgaatgtgtattctgctaaataatgttagccatttacatgaattgtatggtcattaaatggaatcagtgattcctctttaatttccagaggggaaatgaattatggaaatcagtcagcattctgatcattaaattttatactttaattttgccgttcagcattctaaatatccaatgtgaaagtcacatgataatttgttttgcattgcgtgcactgtacaacacttacaacttgtcatttaaaatgttttctcgggaaatgaatgctagtcagaaagtaatagattgtattattcatagttttaaaattatgacaatgtcataattactacaaagctaaataatcgtgtttatttttgtgcagttgccctttgatagttcctggttttaaaacctattaagtgtataatcttacaaatagtcatctacaaaatttatggagaaagtgcccagcccattcacatcacatggaccaggaattcttttgtaaatgacttaaggtaacatcatgcagttcagtgcctaataaatgctttttaatgat

SEQ ID NO: 111283 - DNA, 1013 bp, Homo sapiens
ggtagtacattttccccatttaaaaaatgcggattttactcaggccggtaactttacagtcagaggacacgttcatcatgagtagcttttgttagtatgttttaaaatgtatcttcagttcaattattttcagcatttacaagacatctgaaaatggctattttgctaccaacagtaaatgaaggggctgtttaaaaaccacaaccagttttctacactattttttaaataatactttcatttgaaaaaaaggaattagttttcagatacacttcagagattgaagcaaactatttgccttttactcaaaagcctgcttgcctttacatggacttaccagcaaaataggtagaactttctcttttaaaaaaagtcaactagaattgagaagaggtgattttttttcagatcgcttctcgagtttaatattttcacattcttttcaccctttttctcaatctagatttaaaattaggatatatgtcatttccttgtctgtatttgtagctccttagttaccagtatgcctctccattttctacaaataagaggttataacacatatacataattctaaccttaagggaacacacgtttacatactttacttcccaagcccttcctgtttggggtacagattgagagagtcatgaatcaacacatctagcaagaccacaggtgtaagagtctaagatcgtcttcaaaattctgaagtcccagtctttacctgtccagtgaatgaatattcagagcagcttttcctgggcttcccagtggtgatagctgaggtcaaaccacaaaaaataagaaagcaagagtgaaatgcacccctccagagaaacactttgtagtgtttaattctgttaatagagaagagctgcttctgtttgcgctcacttcatcagtggcacccttctgcagaattttaatataaaaacattatggatataatagaactggattttctgacttaaaaatgtaagttttattttaatcttgaaacgtggattgtt

SEQ ID NO: 111284 - DNA, 1071 bp, Homo sapiens
aaatcaagccactgcactccagcctgggcaacagagcgcgagactccatctcagaaaaaaaaatagtatgtaatcaaaatcatagtttgatataaggcaaattaccttgtataattgcatttgtggttcagtagttattaggaactgacctagatatgtatcatatatgaagtgaattacctatcccaagttctcttccttacaccaccccctccaaaaaaaaaaggaaagttagaaagctaatcaaatccactaaattcacaaagcattgtaagaaagaaattataattagttgcagtctataataaaagacaattattaagataggaggaggaatttattttttttcttcatttttatcatactaaagctgaggttttggctaaactataggaaatattttaccctagtatatgtcaccttaatcatgattcactgttgttatccattttgacacaatggagtagttgtcagaactcagtgagaccttggcttccagctctcttgctctcattatgctgaaggaacacatcacacaccagtgtgtgccacttttttgaaaataatagcactgacctttgttgagcgctcacttcgtgccaggtgcttcccttgcattttacgtgtactatctcactgaatcccagtaacaaccctatacagatccatcatctccatttttttccagatgaggaaactggggcttcgagagatgaagttcccaaagttgttagtgacagatctgggcctggagtccatgccagctgatcccagagctcctgctctgaaccattcacaattctgcctccttttgctgtttgttcaaaaatataatagagctgcaaaaaacagcctactactaacttgacaaagtacttaatctctgactcagcatcccagtgtacaggatgggaatgataatacctactttcagggttgtgtcctcctccctccacctttttcttcatctaaaaatttgcatcacaggattcctcataggaaagtacctgcagtttgtcagtaaattcagctagtaaattaattatgtcagttctctttctctagcgataa

SEQ ID NO: 111285 - DNA, 1020 bp, Homo sapiens
aaggctcctgggagaataccagggtagtttacgtttccctccaggactcttctaaactatcagtcttctgataattacaatctgtgaacagcatcttcacagcttggataacattcagaccgagggatgcacatttgcctaatgagccacatagtgccctgttagctttaactagtattttgttatttataacaacccacaacgaatatttgcattccccaaaattagttgtgtgggatgtttgtaagaaggatgtaggggaaagtgttccataatcaatcaatacctttaggaaacctgggtttaaaaaactattcagtagggtgctttactctgacttcttgaagccttacgctgctctgcgctgtgactctccaagaggatgctgccatggtttcttttcacctttactaaatctctggccatgggcccttttcaggggatgctttcaggactagcaaccacaggacagtttcatgagatactgataagcaaaagctggacttcattttaacacatagttcagaaattgaattatcgaattaaaaggaataaatgtttgtggtgttggtgcacattgccaaataccttttccaaaggctagttcattgctggtgggaatataaattgctacaaatacctattccaccatacacctctcactccaccaaactgatggtgaatttttaaaatctgatctaatttgtcagtgttctctaagactgcagagtgacttaacacttttccatgttgttaattacttgctgctgcttttatgaatacctttccaggtctcttgcctatctcttgagattgcagctattcttatgaagataaatgggctatttttctggtcagatattaacccagaatttcatgtatttgtagtagtcattctcccagttttttattgtttacttttttagttatgtttctttgaacacgtggaagttctacgttttcgtaaatcagttctttaaagcatcctttcatagttttttttcactgtttttaagcttt

SEQ ID NO: 111286 - DNA, 1576 bp, Homo sapiens
aatgcaggttattgtgttttacagactgatttgtaatcaaacaactgatgctttatgagatggctttttaaagatttttttaaaaaggtaaaatgcagaaccatcacaaaattataaaaatctgtaagaatggtgtaacaagtaaatatattgaacactgagatatcataccctgtctcatacaacttacttaataacatcatagtattttaaaattttgtttctcttaatgaaaaaaattttttttactaatactgtcctcatttttctgcgacttttaagtttttaaataggacaataatgaagattaaaataaaacgaattatgtttttaattatcttcactattctgggaactatattcctagagaatagtttcagaactgcacattttctagtgctcttgatgcctttttagaaagactattttcttttgcatgtttagttctcagtatgcattgatatatagtcaaaaaattttttataaaaattaacttctagtttatccaggtcccaactagctcttcctcctttccctctaaacaccttttttaatcgttttttttttttattactctcttgccagagaacagagatgcaaagtttctttcttgtatcatatggctagattgagtattggttcttagcccccacgagatgataacccctttttcagctcctcatcaccccagagaaatgtccaaaggaaagaagcacataaatgctgtgagctggtatctaatttgcatattttctaagatttgtgtttgtttgtttgtttgtttgtttgtttgggataacccaagccaagagttttctttgtctctgagtaatcaaaagctgctgagaataattgtaaacatattggggtttatctgaaacaccctttagttattttctgggtgttctgccctgtctagtttcgtggagaaagtaaccatcccatgtaagagcccaattcagttcaattaaactgagatttatggagtgcctatgtctcaggacctataccgggttcagtggatcaaaagtttcaaaaagagtccattctgaagagctagtttgtcatggagtagtcccacagacaattaggatgtaagacgctagctgttatgctcataatgcacagggactaacagagaagagagcgctggacgcccaagctgttgtttggaaaagtgtcttggtactactgttccccaagctgtccaggaaggtgggtgtgaaaagagttttccaggtacagaacagcccaagcaaggagcaagtgtggtgttaccaaggcagaaaatgattggagctagaaccagaaagttgagcaaagaccaggtcacaaaaagttacctgaatgtcattaacatcattactgtaagtcatggcagacatcttttcattacagaatatacagtattccagagagtaccagaagccatagaataaagatttgagtcagaggaagtgataaatgctattgataaactaggaagtcatgaagataattatattttgatgtgaatatatataccatataattgaaatttgcaagaatttttttcagctaaaatgaaagacagtaa

SEQ ID NO: 111287 - DNA, 1090 bp, Homo sapiens
cattacgagaaccagcattgtgttttgtaaccacagcacctttgcctgcaatatacggcaagtgtagatcgagcgtctaatgtgtgccagggcctgtgttaggcactggaggatgcaaggatgaatggaattggccttgtcctcaaggatccctttgtttaatggtggggcattgatgtcataaacgagagagaggccatggtgtacccgtatgctacagtgatgagcaacgtatgaaagctgaacgaagcctgctcctggtacggcacagctttaactattcagccctagagtcaattcattgtcgcattcattcattccataaatatgtgttgaggacttaattggtgccaggcactgttcctcaataccaagttaattgggcaggatccccattgcctaattgagggggccagggaatgggaaggagaaacaggtactaaaccagttaacaaatgactaaatgaagaataagtaaagataatttgacaaagtgataagtgacgggaggaacacagaacagatatgataggggacaggattataatgggtgttccaggaaggtctttctgaagttgggacggttaagctgaaactcacatgatgcaggaatgaatacctgtcatatgaagaagagcatttcacgctcaaggagtagcaggtgcccattctccaaggtggcaacgggattttccatccaaacacaaggcccgtgactgcagcagagagagctggagagagcactgtgaggtggggtcagtgaggtgggcagagggcggactgcctctctgccctccaggcccagcattctagtgtgggaaccaccacagtttttgtttgaatgacaggccagaaatactcatgaaagaaagtatgaaagtcgttgtgccatctgtttcaataaagctcataactggagatagtttgtttttttttttttgtttttttttttttttttttttttgagatgaagtctcgctcttgtcccccaggctggagtacaatggcgtgatctcagctcactgcaacctccacttcctgggttcaagctattgtcctgcctcagcctcctgagtagctgggattacag

SEQ ID NO: 111288 - DNA, 1113 bp, Homo sapiens
cagtaaaacaggtgagagatcatggtgtgtggggcccggagggcagcagtggtaagaagtggttggattctgaatacagtttgagggcagagccaataggattgatggacaggttggatgtgaggagacagaggagaagtcagggcagactccgttgtgtttgccatgaacatcaggagagagtgcttgtcggtaactcacatgatcctcacaccaaatgggttgccatgatcaccactttacagatgtggaaattgaggcacagagaagttaggaaccttatctgacatcactatctgactcatagtggcagagataaggtttcaacttcgatgtctgatccccaggtctgctaccttaaacgttgccctgtgctccttctctgataatagttgctaagaggaatgcatggtatttgatctggaaattagaagtctaaagggaccctcagtcctcgcaggtatttcagggatttgtaaaggaaaggaaatctctgtattctgttttactggcagcactacctcctccatgttcttctctctgccatttcctctctatagacattgcagcggtcttgttcttcctcagtccttcttccacatcagtgccacagtaaccatttcagaatgcttaaactgcttctcgagcgatgactgtatcttcatttctttcctcattcactcagacctaatggtgcggggcccctagtgccccataaatgagtgttaagtgattggcaaataacattttttgcttgcttccgtgttttagacaaacaaatgagaaacagtgaaatagaggttatagagaagcagctttcagctcacataagtacatctttccaacatcttgtgatttccaacacatgaagattttcagcagcagaacaggatgctggtctcatttaactaatccttcccaggccaggcagatgagctcccagccactgtgatacttaagcagcactacattctatgcctctgagtttgtcttccaattcctaagagtttctcttgtatgcctctctttactgcgtccacttcagagaactatcttaaaagggcacagatattttgctctagttaacaggatctcggggtgcaaattatacaa

SEQ ID NO: 111289 - DNA, 1034 bp, Homo sapiens
taagggaatttgagagagtttcattagtatttgtgtactcggtctacataaaacttttttgactcagatttccttgctctacagttcagccacatagcgatatgggggagcatcgcactctgggtggtgttttttggaatctactcatctctgtggcctgccattccgatggcccctgatatgtcaggagaggtaatgtgcgctaataactcacaatccaacaaaaccttaaaaactggtattttttagcaaaccttaatcgtttagcataattttccatcttgttgatttatattaaaataggatttgaccatttaaaagctgtttttaaattccacagtttcgagtgattaatcttgagagaatattttaaacttgaacattttacttaaatctgacttaccttttcataaacataaccaagacaataaaatatggttgtcgggagcttgaatctcgttaagaatatccatatagaagatgccattttaaaattacaccataaagccacaaatacattttgattaaagatttggggaaatggtgagtttctgtctggggacagtctatcatttcttctgttatctcttattccagagaaaaatctgctgtcactagattaaatgcactttttgagttgtcctaatgacatcagtttggttttcattttgaaagaattagggcatctgacatttcagccttatcatagtccattttcaattctgtctttcagtttcttgttacacgggtaggaattgagttattaggtgttcatgggggagtgtcaaaagatctcctttccttctgaagagattccagcagtaggagggtttatgatttcaattgcaggaaatttgacataaaatgtataaaagtaaatgtggaaaacattttgggatttcctgtgacctcacagtaacttgcaaatcaaggtaatgtgagctccgtgacagtacattgttttaccgcagtcccaggaaccctttccagtggttttcatgtatttgttgcccctaagtactgcctgagtacct

SEQ ID NO: 111290 - DNA, 1029 bp, Homo sapiens
ttccctctgttgatgtatagtttgaggacaataagtgctaatattttatgtagcctatttattatacctatgaggcttgtatcaagccctttatactgaacttaatcagacatgctggtattttgaagtatacttgagccaatgttttggatgaggtttttaatatgtttttatgttcatcttggagtgttagcttttactctgctcattttgagggaagtgattttattctctcggtttggagaaagaggatcatggtgcatttcctatacacataaaagtcattaaatagctactttagaaaagagatccctgtgattcttaagctggtgctgctctgtcttggagccgactttgccttgagatcctcgggaagacaccaaccattcagcgtgcctgcttcaatactacggtaatcaaaaacacaacacatagtacacccaaggaattgtcagtcctttataagtacaggccatacctacgtctatcaattaatggttgccaacagaagagagtgctgcctgctgctgcccactgatgatctcctctccataggtagccagagtgatccctgcagaacatgaatcaggccaggtgcttccctcctcagaattccataaagatttagcatacttagaacaaaatcctccacctccaaattgttccccattcttcacagatattcgaattggctctctcccctccgatgcctcaggtctgtgctcaagaagccttccccgatcatcctgtccaaaagagcagccaccacctgcccccactgctcctaggctctattcccttgtcagcctgtatgtcttcatggtacttgtcaatcaggttttgatatgtttgtttcttttgtatgatctttctcaaaactcttttaaaattgaagcttcagatgggcaggtaattagtagtttcgttgcattcacagtgcttagaacagtgcgtagcttgtagtaggcactcagcaaattgtgaatgaattaccaagagcttgtggcataagcgaggtgagtattacaa

SEQ ID NO: 111291 - DNA, 1048 bp, Homo sapiens
gttttgttttgtttttgagaccgagtctcgctgtgtcacccaggctggagtgcagtggcacgatctcggctcaccgcaacctccgccttctgggttcaagcgattctcctgactcagcctcccgagtagctgggatcacaggcattcaccaccacacccagctaatttttgtatttttagtagagatggggtttcaccatgttggccaggctggtcttgaactcctgacctcaactgatccacccagctcggcctcccaaagtgttgggattacaggcatgagccactgcgcccagccaagacatttctttaagcatctgcaaaggcagaaatttcaaaatactgatttgaaaggggaatattttacttctctaactccacagcaatgcccaggaaatgtcccacagacttctaattaatgataaacccttatacctagtgatacttttgcatctcttttatatcgtttagtttgttttaattttttaaagtctgtctgttaaatctggaaacatctagaatgtgagctaagcactagagaatctcatactgtggcccatctttggctcccagtttctaattaaactctttcgaaatgcactgaaacagttctggaaggattgggtttatgcgatattatttatatcctccatggcacatcaactccaaatctctggaaatactttcaggcaacctaacatattatatttttgtataggtttggtctaagtttcctcttgtgggagaaaaattttgaagacatgtttcattgagatagctcaggatttcaccacaatttcatctaaatctagagtgggtgggaggggccatcattttttaagccattaactgtgtgacttaaacagattttttagaggtatcaaaattgactgtcttgagtctctcgtgatatacccttaaccttgatctctccttctggcatctcttttatgtgaggagttgtgggatctgtccccagaggtagagctacatctcaaatccattttttctatttttcatcctcctttctgtactgccaggctttcct

SEQ ID NO: 111292 - DNA, 1030 bp, Homo sapiens
atttttgccctgcagtaagtgcaacaaagcaagagagggtaggaaggtagaggatgtactgattctcccaggaagggagatggtgatgggatcagcggatccaagagacagccacctgcaccttccctaggtgtctagagaagggttctgttattctattttctagaaacaatcgttggcctgtcttttgctcttcatgttggttatcatgaagtgtattacaaatccatttgtcagcttcaggacatcgagaatccttaccaccatctttttccagatgtctttgtagccttaacaggccagatgtacttgttgcatatccctcctatggcaagcaagagcatttcatgtttaacttcctacaaacctggaaaacaactggttgccctcagtcattataaaatcatctttagatattttcatagtacatatcattgttttaacatctttacatattctctggagaaattaattttaatatactctgtgtttggatacaggacactcctgcaaactgttgaagaagaacatgggaatgattgttataaatgaaggctctcttgatgtaagtaaaattatgtatttttaaaactcctttaataatatattcatgctatagtattttatattcagatagctatggaaatattttatctttctgtggttcaaggtaccttatcactgttgttctgttttaacataatgtactctgttttgagtcacattgatgtaaattgattcaagctttacatctgtgacagctaaaagaaattgcaaaatgatttgcgtaatattgtgagacagaaaagttgttttacaaaagcattatgtcaagaggttgctgagtgactgcaacttgctcatatccaagtattctgtatgttaaacattttacatctgctttaacttccagtattcatatatattttacctcttctaaaaaaatgtgaaagctattgaacaacacaaaacaaccattcctagtaggacggactttctttaatgtcctaacatctggaatgaaatgtaa

SEQ ID NO: 111293 - DNA, 1020 bp, Homo sapiens
caggctggtcttgagctcctgaccttaagtgatccgccagccttggcctcccaaagtgctgggattacaggcgtgagccaccgtgcccaggctgtttttaactgactttggattttactccccttctatgcaaatttattttagaatctgttccttaccttaggggttgggttagacagtttcagggagcctcagtgtaatgcctaaagactgcatgaaagtcaaggatatttcagaaaactcaatgggatagttggaatttacaccaaagtccatgaattatcatttagtctctgattttaaaacatatacacacttcaattttttgtttttaaagaatatgaacggatttttaaaacatttctaccactaatttttttcagaatcttcagctacttggagcaacagccattgaggataaattacaagatcaagtgcctgaaaccatagaaacgctaatgaaagcagacatcaaaatctggatccttacaggggacaagcaagaaactgccattaacatcggtaattcacctagttcacattttacatgttggtgctttttaataagttaatgtagttcagaagatggatttgagacatttcaagatctaaaagatttgatatgtcaagattggaatattccaatcttttttcaccattgcatctctgcctcccatccataagtggcacatgtggataacatttctgcagttgtctggagattgggcttatggaagatttatgtattgatacttgattatgtgaccaaaggttattttaagataataggaaagaagaaggttgctaatttgcattcatactatgttaatccccatgttttggaaagagtttataatagctcgggcttccataagagcgtaccacacactgggtggcttaggcaacagaaatttattttcacacagttctagaagctggaagttcaagatcggctgtcctcacgtggctcctcttctgtgtactactccttatgtctcttcctcctaaaacatcagtcct

SEQ ID NO: 111294 - DNA, 1100 bp, Homo sapiens
ctttctgagctcatttttccccttagagtagagacagaaaatatacaaaatatttgtttatatgtttctaatgaatgtgttcgtatcttggctcccacattatctagttaccccagtgttttgggaaacatattgcaaaaaaatatttttgcaggaaattttgagggcttgtattaataagctgtccccatgatcactaaaaaaaaaaaccttatgccttgggtaaaatgcttaaaatttgaacacagctatatcctgatcttcactgggatgtgagccagaatgatttaactgcaaatgccctaaaagtagctgaagatttggaagaatcattgtgtaaacatttaaattcaacagttgtggtgctggcatcactgatgctgaattgttcttcctttccttgcttgaacttcttgatgataattgttcatcaggttatggtagatttcaaatctgcttcccattaaaggaaataaaataatgctatcttcttgaaagaaatttaccttcctgtattatatattatacactaagaagtcatgcatcaagtgtgtctaataaccatccatattatttggaatatattgaaaagaaaatggtctagattgcagcagtatttttgtaatttctggattttggtcttgtcattagctcacttagcaaacatactaaatgctgacattcaatgctgtggagtcattaagatgagcaagacgtggtccctaattttgagcaaacctaccatactcatgcatttacacttctcttaatgtacatgaagatgagcaaaattctgtaggagaacagcagaggggaaattttattttaagaaataaaggaaagcttaaaagaaacaataacttttttttttttttttttttttttgagactgtctcgctctgttgcccaggctggagtgcagtggcttgatctcggcttaccgcaagctccgcttcctgggttcatgccattctcctgcctcagcctcccgagtagctgggactacaggtgcctgccaccatgcccggctaattttttgtatttttagtagagacgaggtttcaccgtgttagccaggatggtctcgatctcgtgatcca

SEQ ID NO: 111295 - DNA, 1060 bp, Homo sapiens
tctggtctttcttccttattttataattaaaccattgtttgaaatatgaaggcgtgccttcgtggaatacataattttttgaaaatgtttaatatttatttgcttcaatagaaaaatacaattatgtctttagtactgcatagattacctactaataatttctgtgtttctgaaagtaaatcatttatcttgagaattacagaaaacagcgtaagctataatacctgcctagattcatcactgattaaagcagtatttccctggtgataagatttttatttttctcttattatgatgcgtggattgggaaacttttttttttaatggaaacttatccaatgcttttatctgttcaagtttttctaaaataggttatgggttagaggatcatttctgagcttaagagtaaactcagaacactgtaactctgctgtcaagccttttttgatcagatagcaatgttgtgttttatgtgcattttgtagtttgtgattgatgtatgtcatccactagattgaagtttcacgaaagcagggactgtgtttatcatatttatcactgtgtctccagcgcttgactgactagcctatgttaaccactcaataaatatttgatgaataaatgaattattcatttaaataattaattcagaagttggagcttaataagtacttgcttaatgaaagcctgccccctattaacaaatctagttcatgctttccatgcattgaaggcactggtatcaaatgtgctatcactaaggattaatttaggggtatgttagaaaagaagccaataattttacagaaggcattctttagaagtttagattcgttcatttataaaacctgtcttcaaagttacttgatatataaatgtgagaaaatcatgggttggaaagattcagcaacaaatatctgagcaccgctgcgtggcaggttctgttctaggctctagggctcagcagggagaggatagaagaatttctgccttttgtttcagtggtgggagataggtagtgaacttgtaaactaaaacaatgtcattccagagaggcttt

SEQ ID NO: 111296 - DNA, 1031 bp, Homo sapiens
cacagggatctttgtgaccaagctgtttttctgaagtgtttccattaactgtgatcataggaggactgtaggatttttaatatagagagccagggttatatcacttctttcttgatctcagattctattctttgttaaaatcagctgggattagggttcagaagttgtgatttactgccattaaaaccactctagtgaggcaagtttcagcgtgtcagaccacagattcttccagaatgttaccctggctttaaattgagcaaatacagtcctagggttcatccattgtcttcttccttacctgctttaactgagacatgctgtttatgcaatctattttttatgtgattggaatctatttttacgtagaccataatattggacttagcatgtcattattggacttagcatgtcagacagtgaatctttaaactgtgagggtcgttttcacatcttttattttttaagaacagaattttccaagcaaacattgcctgaatcataatatatataattgacgaaagcaggactgctttggctggagtaagagtagagaggagatccaaactggctttcccctcagcctccaccttgccctcgtgggtgctccaggcagggcttgttgtgactctgaggatccactaagcacagtttgaaaaccatgtattacatttgtatgtggacttttagaaaacaaattcctcaaaagatcagtacatcattgtgcccgtatgcaagatgtttctgaacatatttgaattgatatgtcattgccacattaatggtagtattatattcacaacattcaaaatgtaaaagatttgtaaagtttttcctaaaataataatttagtacaaaataagaggaaatgttataataggattaaggttatacttttaaatgctgctctctgcctcttgttcctccaatgtttgttcaaactggtaattcagtttttaaaactaagttgaatccttattcctttgggtagtgtaactcctagcataagctgaaaaaaatatccaaataga

SEQ ID NO: 111297 - DNA, 1103 bp, Homo sapiens
acattgtcactcacgctgtaggagtgttactgcctttggtatctaggtgagaggagggtgcatcaaagagctgattttcagagctgagtcttaaactgcttgcaaggcagacagtgggcagtcgttgggaaaagcagaatggagaaaaagttaccagcatgtgcaaagacccccctatgtgggaagtgaatggcagggaatgagagtgaaggcacctgatgaaacatgtataagccgtgctttggggcttaaattttgtcctggggaaaaattggaagattcgaagcaaagaactgcttgataagattcagattttagaaacgccacactatgcatggaagatggattaaaagggttgggaattagaagcagggtaccaattttaaagaccaggggaacattaatctacattttatactaagtttttgtcataatttaattggacttcatcatattgtttgtatggaatcacttttttcaaaatgggactttgtgaaataaaaacagaaacctcagacttctgaagaaaatctttggtgtgttggggtgatgtatgctatctttttcagggttaagaactttatgttttgctgtggctgagatttcagagagcgactttcaggagtggcgagcagtctatcagcgagcatctacatctgtgcagaacaggctactcaaactcgaagagagttatgagttgattgaaaaggtacgtggatgattctgttgatcatacagagggtttggtttccagatagttttgatctttattcaaggaaccaatggaataaaaatcaaaatatcttgacataccattcactattgaataccctctcatcatctaagcattaacaagtattaatatgcattaaaatattgctgagaagcctttggggttagacattactttgtatagatcttcactcttttcacaattttggatcaaggtttggccagtctggcaatctccttgccaatgtatttcagtttctggatctctgaggatatggaacatgcccctacacacacgcacacattacatacatgacatgtgtgctttgagttaataactataatatgcaatgcaatataaaatagtactg

SEQ ID NO: 111298 - DNA, 1550 bp, Homo sapiens
tgaccattcacaggacacttcacagaattaaggccatgaggaagtaatgctgctgctcaaggaaataagtgtccatcatttttcttgaactttcttctgcataagacaaacttgtacattgcttaggaaaggcatttctctttctgtgccaacttttgttgctgtcttgattaggagtgaccatatgccagtggttaataacaaaaataatgcagtctgtctgacttattatttaaagctttttttaacttagatactctgaaaagcccaaagaagatgaatacattgaataaacagaatggagtattttcaaagtgcactcctcgtctctttcttttcatgtcagagtgattgcttttcccaagcttatttgtattatatctgtagactgtcattaagtagtctattaattgccatttagatacgttttttaaaccacacttagaaagcactatgctaggtgatgagtgccatgaagaaaaaaataaagcagggttgggagtttctgttctttcaggactcaatgatgaaggtgggtttaagaatgaacatgagaaaagtgaatatgatgctgttaaatagtccctatgaaagacattagtggtttagactaggatgatggtagtgaaaataaaaggaagttaatagaatccgtgtaccttgtagaggaatatctgagagactttgtgagggattggcagtagaaggcgaaacgaggaaggggtgagggtctctggcatgaacaactgggtagatagaggtaccatttacacagatggcagaagtgggaataggaatagatgtggaggttgaaatgtttgaagtcttaggttttagatgactgtgagacatacaagcagagctatcaggcaagcagttgaatataagggcctgaaacaaaagagaaatctatggctgaaatagcaatttggcagtcagtggttggtaagtggtatttgaagtcataaaactgaatgggatctcctgaagagaagatataaaatgagggggaaatggaaggctgaagattaagccatgagggtaagggttgattagaaaaagaggaatcagcaaaagagacaaccttgttgttaaagatgtagaggacagagagagggtcatagcacagagccaggagaagaggattcaaagagagagtggtcatctgtgtcggagactgctgcaaggttaggtaagaagtttgagaagtatttgttgaatgtagctattcattgtaatggtgaggagagaagaaaaaggaaaagactgggaatgaaggggatagatgagtgatggtttagagaaggtgaaatgtgaaagagttgaaaagggatgtggcttaatggaggagtggttgcatcgggtgagtttttttgttttttttttttttattatactttaagttttagggtacaggtgcacaacgtgcaggtttgttacatatgtatacatgagccatgttggtgtgctgcacccattaactcgtcatttagctttgggtatatctcctaatgctatccctcccccctccccccaccccacaacagtcc

SEQ ID NO: 111299 - DNA, 1056 bp, Homo sapiens
tataagcttagatagtaatgatttttaaaaataacaatagggaaggctttcactaccgttacagtaaagtgagttgtttgttaagagggagtctcactctatcacccaggctggaatgcagtggcacaatctcagctcactgcaacctccacctcccaggttcaagtgattctcctgcctcagcctcccgagtagctgggactacaggcatgcaccaccacacctggctaatgtttgtatttttagcagagatggggttttactatgttggccaggctagtcttaaactcctgacctcaggttatccgcccgcctcagcctcccaaagtgctgggattacaggtgtcagccaccatgcccagcctcaagctttattttaaatatatacttggattctccatctataaaataagtaattacctataggcctgcaaaaatgaaagaacaaatgtttcctgagctgctactgtgtccaaggttacgtggagtgatcaaagatgtgggctttggatactaagcaaccaagttcagattttcattctactggtactgttgaacaagttactcaactctttgcctgaatgtcctcatctggaagaatgtagataataatagtagttgcatcatcaggaggttttgaagattagatgagctctgtttgtgtagtgctttggatagtgtctgcacatagtcagcccacactgagtgttagttctggtgctctcacttaatcctcatgacatatttgacatggccattttaaagttggtgaaattcaggcaaagaagcagtttgccccaaattataaaaacgagtagatgatgtgagagttgaaacctacatcagcctggttataaaacagtactggttacattacatcctatggactctaagtaactttaaagaatatctgctttttagatcacaagatatccttgaaatttcagtcattttaccttgatatttctctttttcatttaatatttttcaacctagaatttctttcagtaaatttcttgtggtgttaggcaagagcagattaagcaggtaaaattt

SEQ ID NO: 111300 - DNA, 1324 bp, Homo sapiens
tgaataatatatttgttagtgcatgatgaacaattctcatttttaataaatcagtttttaaaaacactgtctcaaggagattttgctctcaaggtaaagcactccaagagcttcgagatgtcccttggtatatagtcaagctagtatgcaacatattggctattttcaagttataaacgtagttttagaattgttcatacctttcagccaggaagggaggaaaagttcatcaacgaagctatgtgagtctagtcaataggaatgttagatttataattcatactatattcacatatgtgtatatttgtaatccattaacatattctaggtttttcttttttgtattgttgccatattccaacttatgctttacaaatagcatctagtccagaattattcttatttcttaccagttcagatgttgcatgaagttaattgcgcaagctgttacaaattctacaattgcctgttgcattgagaaatgctgatagctgtttcagtgctctgtaaatgttaagtagtggtagtggcactttctagtggaaattcagaccatactaaggcatatgtctatatagttttctagtatggtgatagtctttaatattcatatgtgaaaagattcatttgtaaaatactttttaaaaagctgaatatattccttgataaatgggcagaaaatagttccttagtaatattcattgtgcccctgcaatgttaataaaaagcatgaggggtttctctgtaaaagagtggcataaagactttcaaaatattaatgagaaattttaaacttttttaggttaaatacatattttctgacaaaactggtactctgacatgcaatgtaatgcagtttaagaagtgcaccatagcgggagttgcttatgggtgagttttttcctttaattaggatatgaaatacatgcttaattagtgctaacagtttggtacatttgggagttcttattaggggagggtatggggttgtttggttttttttagtctgaaaagcagctgttataattttaggacacatgtatatttcgcgtttctagtttagcattgttttcatttgggatgacatgaggtgggtgctctgcccaatggtattttcagtgtttagtgttgctgaaagtctctctcttgccctggtaataaggaacaaatatatttccttttacactactataaactggagtatagcttggatctggtaaggacagataatcaggccttgagcagttttcaagttaaaatagtgacagttaccccttttgatactttttttttcttctatcatctctcctttttgcagtcatag

SEQ ID NO: 111301 - DNA, 1008 bp, Homo sapiens
tttaaatgttgccttcctatgttcaaatttccaggtgcctgtttgcgggagcatgggctgccttgtctgcctgtcttcctgaacggaaacactaaatgtttctagactaccctgtttgcttacatagccaagtaatgcattattcatcttacctgccacaatgcaaaagctatttttgcaaagggaatgtaatttcgttctcttctttcttatagtttacttcctagaaaaaggcctgggtggtgtagtggccttgaaaaaaaggtggttaaccattggcaccttattacatttgtcatgggtttcacataattttcacgtatccacccacatctagatactgagttgtgactttgtcatcctcaacagaatactaagtatagattgctaaatcattggtgtacattttttattactcatcttgtttctttttacagaattcaacaagtccaccacttaagctctcaaatgtggaacggattacaaatgtacaaattttgattttattttgtatcttaattgccatgtctcttgtctgttctgtgggctcagccatttggaatcgaaggcattctggaaaagactggtatctcaatctaaactgtaagcaataaagtgcttactgcacttttttagattaagacatgtatttgtttcacaattgatcttgatttactttatttcgtattgtttctaaaaagaccttgttgccaagatagctggacatttgatctttatttttcagtgagatttctagcaagtgtaagtaaaatttgggaatcctaaaatttcagaatccttaaaaacataatgagcactctatagtggtataaaatgttcactaagtatagtcatttattatatatatcaacgaaaactattccttaaaaatatttttaacataggtggttaactatatggtaaagaaagtagattgaccatgtgtggatataacaaaacatatatatttaaatatatattgtatgtatttataaatatataaaatat

SEQ ID NO: 111302 - DNA, 1054 bp, Homo sapiens
agggtatagacagaaaactgaagagacccaagagctatcctgagaccctccaacgttatgttgggaaaggcaaaggcactagtgaaagagatggagaccaagtttataggatggtaaccaagagagagtgaagaaactgtaccaaagcagggggaccaaaactgagtctgacattgctgatggtcaagtacaatgagactgaccactaacatatttacgtttggcaagtggagatcattgaaattgattagaacaggtgcctgacgatagtgagtttgagaaaatggaagaagagttgaaaatagcaagtatagacttctttttcaaagagttttgttgcaaagagagcaaagaaatgaggcagaaactggcagaaaaggtgaagtctttcctgcttcccttctcccctcttttctcctcctccattcccttctttccctgcttcccctactttatggtataccttatctcccaggcattgtagtggccaactaaatgttggctaaatatactagttgaactcagcagcctgagagaatgtttttggtgttttcattattttgtaattgcattattagagtgtttgaattctaaaggacatttgaagtataccctgaactgtcatcctcattcagatcctccaaaagctttcctgtaatccgtgaagtaattatatgttgttctaaaattttcacagagtgatcgttccatgaacatctggttaaagactaatgatagatttggccatttataccagtattgtttctatagtctgacattcctaactggccagcttccatgtcttaacagttttctgtcaaattgttgctgagcaaatctatgctgtgaaggagaaactttgtatgatggtgccaagattcaaggtacaaagagaatttatataatatgctgtatttcatgtgaaagatagattttcaagacctttgtatctgtggcacttttggggtttacagtgattacccaaagctcttggagaccctttggaatgagtatactttgttgcttttaaggatgagggtcatagtctaatgcc

SEQ ID NO: 111303 - DNA, 2292 bp, Homo sapiens
ccctatcacaaccctaaaaaataattttcattattattttcttccttttttggtacaagtggacatacagtagatggcatgaggttgagaaatttgagaaagaaaaatctagactataatgtagttctctataaaatatgctttaatttgataagcttatgagtaaacttttaaaaattaagttttcacactaaaactttaaattgggctaaaaagcaaataaataaccctcaaatattaaatgttttcttatgccttcagacctgatcaaaataagttttgaaaaaaattggcattagatgtttttattaacatgtattattttctataataatttcgaactttctgtctcttttgtccatttgtttgttttttttcctctgttcatttttttttttggccattttaattattttatactgggacgtgtaggtggcagtaggggagatagtgaaagtgaccaatggggaacatctcccagcagatctcatcagtctgtcctcaaggttagaaccactgagtcgtataggatgcgtgtatgtgggtcctcaccgtaaaccggagaacagttgcacccaaatatggttgagttctgtgtctcttcctttaaaacacaaactttttatactgcttggtgatggacatttcacagatgttttaaagggatttttgaatactatgttgactgatgcttgtccttcagctgggcaaattgaactcctgttgttatcaataggagtctaagaggcatgacagtaaaggtagattttaatttcctgtgcaccattaatatatattcgtatttaataacatgcctaagtactaaggcttaatttattatctctccgggatattattttgaataatgttaagcttttcatgaaacagtcattgaaaattgattagattataaacatgtcttattcttgtattttaaatttttctgtaagttctgtaaaatccttccagcgattgtgactataatttgggctcatagggtttatagaggaccccctgcacaaagctggatgttgcacattttgtaccgcatgctttgggatcgacttttatcccacttgtatctagtgacaaagtgcacgttactgtgatcaatttcagctgtctactagtgactgtattgtgatatgcatcttgtttcatttttcacttactaatcaaaaagcctgctttgcctctcttgactagtttgtgttttagatgtcatcataatttgctgaaatatttatgatctagcatgattccttatctgagacttcttgctgccttttcacagcactattaagaattgcttcagtaactgctgtcctaagtgattgttgagaatgttctgaatttcgatgcttattttattaccccaacttcaaatagaacttagccatttgaacttcctaacttcctagccatttaaagacctagataagttactttatgcaaaaaaaaaaagtagaattagaatattattctaattgtcagaatatggaatcaacattgtcatttagtattttctttgtcatcgtgcttctatattatcaggtgtgttttataaattcataaactatgtttcaaatgtatacataagtaaattacaaatttcgagcaatttccagagccaaattgctattgtgacagtgattttaaaaataaaattttgaataagttatagagtgaaaatataaatattgaaggacttaattttggggaaaagtagcagcttttacgaaagaaagctcatagggtaaattgaagaacctgcagagctactttaaaatgaatcagtaaaatatttttgattaatgtctatgtgtttaagcaattttcacaaatcttcgggccacaaaattaagctacatgcccatttctgaaactaggaatagtctgttttgcacatgtacaagttggaagttgattagaaaattccaggtgtttgtaatttgtaaatttttttctttctagctttgagtacacatgcttataagagattacatttataatacttatgtgatattagtaaattaagcctattatataaccaagcattaattagattagaatgcttttctttagaattaaggatcagattatacagttgggctacaaacttagatgtctgtagttgctgggcaagtcaaatcagcatgtgaaagggaaagataagacagtctgggctgtggtggtgtgataaaactggagaacatggaccccttaggccagccgccacacaccagattttactaagacacactggtggggaacccatgaagtgcatcttct

SEQ ID NO: 111304 - DNA, 1024 bp, Homo sapiens
taatattcaacctaataaaatttgcaaatttaaaccatattgaagtttcatttgctacctattcaataaataaaaacaaacatttcagatttatttttatgaaatattttatttacatactattgtgaacgagcagtttggctatttatattgagaactgtgaaaacgggattctggaaatttatcccaagaaaagaaaaagttggagaatatctccacgtgtataaaaatgtttattgtagcattatttacttataatagcaaaaaactagaacatatggaaatgcaacaatagggacagttttataaattatggcattttatactcatattttgtgacaagtaaaatctgtaatgtcacatggtgtagcaacacagaagaaattatactattcattcgacaagtgtttattgagtgcatatgccaagcagtgagcttaaagcagcaagcaagacaagtaagggttcctgtatcataagatataatcataggtgaaaaaaaatagtactatgtacactgaaatactggctttgtaaatcgtttattgaacaagcgaacaggcacaaaagcagccttacttgttgggataacaagattttgaggcaagtcttttctttgccttatatgatatttagtccaattaaaaataaaatcaataaaccaaaaccaagagtgtcgtctacatgccaaggtaatatgatagaccttagtgtaaatgggctttacttcagggctctttctctgcctttctaaatgtgtggctactgtggttgctctttaatgatcctcaaaggacctacaaatttgcctagcatgcatctaatcattcacagctgggcagacttcagctctcagatattagtggtttatctctccagttactgccctgaaaccttttccctgttgcaaaaggttaacttgcagatacatagttttaaaagaaagtatggtaatcacaaagccctacacaaggaactacattgtgactcctgaacggtaagctgctggcttcattgctcttgc

SEQ ID NO: 111305 - DNA, 1037 bp, Homo sapiens
ggtgtatctcacaggacagtattttgctaggacaatcgaagtgtaaccaacagtttatttgcactccagtacttcccagctagttgaagtccatgcccttgattctaccttgtcatggtcatcttgtatttctgcaggggatatcttgtaccccccaattaaaaattaattaaatttctgttgattttcaatcagtggctagaatagagactgacatctcctctttcatatagttgaaaatttacccctattttttctttggtttttgacatgagagcaacaaatgggaaaataccttggttgtgttttatttatttctgtgataggaatctctttttcagaagaacaaaataaaaatgctaaaagcaatttcaaaataagtttcttttctactcttttctggcacctatggaattaaacattttagaaagaagacaggtaggatataatcaagtatgataagatgaattttattacaaatattattttacctagggttgtcagtgtagttaacataaatatgcatgctaataaataacctaggctgcttgctcagaaaataaacagaaagtcaggagataataatgtactacttcactctaaacctttaaaatgtcttattttcctaataaacaatcattatttcaagattgtgctaacctacctggattattgtaattcttacttttcctatttttgacagacaaatcaccagccaggattacccataataatagcattttcagtcatctcacaggtcaatggcacacctaacctaggcatcccattttgagataaagaaggacagaatttaaagtgttgccaaaagtcatccagcccaaaagagctgaagttatttaataattagaattatagaagtaattagaatcactaaaagttggttcagtgatgaaatcatgataaatattcaaaaattaacatcattcttaagttggcagtatcaagtttgaaaataaagtgaagaagaggtctcattcccagtggcctatgggaggcctacaagtaaatttaatgta

SEQ ID NO: 111306 - DNA, 1067 bp, Homo sapiens
gttgatagacatgtgggttgtttctaccctttggctattatgaataatgtttcagtgaacattcatatacaagttttgtgtgaacatatgttttccgtttgcttgggtatacacctagtagtagaatttctgggtctgtggtaactgtgcttaactttttgagaaactgccaaagtattttcctatacaactatttattaaatgtcatgtttatgttatttttaacatgagccctactaggtagtggagttgtatcttcagtaaatctataactgttgcaatggttttatatgatcctatgacagataagaatattagtggatccagcattccacccagttagtacttactgagcaccagtgtgtgctgtgtgataacactggaatggtaacagtgagtataatagggaaggtttctcttgtcatggatcttataatctgggggaagagacagcccttaaataatcctgtttaattaagtatacagtaaaactgtgatgctgtgataagtgttctaaaggaaaagtgcacggagctcatttagatttgggggtgaggaggaaggactgggtgtcaacacaatgtcccctgagaaagtgctgttaaagctgagatctacaaggtgtgtgtacaagttaactaggtgaggatggagggaaagagaattctaggcatggaaacatgtgcaaaggatttgagacagcagagagcatggtgcgctcactacagagggcataaggagggtgtgttgggagtgacaagaagtgatgacaggaaagaggcaagagctgcttcataaaaggccttgtagatgttttgatttattttttgagcctagggaagccaactgaagagttctgagcaaggggtgacccaagtttgtgtgtatggactgatacataataatatgtaattataacatttatgtaaaatcatcatagataatccttatagctacactgtagaaactgaatttgaaagagattaagaatgaatgcaggaaactagcctgaggctaatacagacatccagttgggagggggtggttccttgaactaggggtgctga

SEQ ID NO: 111307 - DNA, 1054 bp, Homo sapiens
tcaacaaccctaaatgctcatcacaggctgggcattgtttcttgctttctctaaacttaggtttgtgccgggtcagaggaggttgatgatttaaaaatacctagattgctaattcagtcaccagcataatacatgtggtggtgtttattttcattgttctaaggactgggtgtttaagaaccagttctaaaagataacaatgaattataggattgactagtttccttggccagtgttcaagtcttgatttgtatggaaacttttttttatgttgtgagctgatttttaactttatcagagtatactcatctatattccaagaagacactagcctcaagtttgtgtatttcctttcttcatttctgtattctggttttgtatttcaagaacacagtaaatgggggatggggtagaagtacgtcctcatttctagggagcctaccagcactgcagatgcagcaggcccatgcagcaagtgttgaacagcaaggttctgtaatattttcaaagaagcgttactctatttagttaggattccaacccagtgtagggatgtaaaggtaatttatactttcattaatccagaccactacagccttcagaataaatatcaaatactcatcagactgacaaaattcaaggaatggataagtttgtgcttgtctcagtttatagtcagtggaaatttatacattgctggtaaaagtatggagtgctgtagattcttaggtatctggttgtatctgataaaattacaaactcaaatgccccggagtcagcaatgttctctggggcattctctcttacagggtacaatcatgtgaatatatttcattgctgtggtagtagaaaaaaatagaagtcagaatttgcaccagggggagaatagttgaatgctttatgatgcagctgttgtggaaaattgagttgtctcacacagggcaaggacagctctgtgcctatctctaggacacctggaagtgtgatgctgaacactgcctaagacaaggatgagacggactagctggtgatttataatgtgctgtttaaggtt

SEQ ID NO: 111308 - DNA, 1022 bp, Homo sapiens
acttatattgatgtttaataagccattggttctcaaatttggcatcagaatcccctggagcatttgttaaaacacagattgctgggactcacacctagagtttctgtaggcctggagtggggccccagagtttcagttttaacctctcagtgacactgctggtgagggggtcgtgcttttaggacaactcatttaaaggttgtataaatgagttgatagaagtagtatcaaccaatttgacatcaatatatgtattattatgtgtattacatgattgaaagaggaatccaggaagtttccattgtcttttgtgtcagtggacactaatggttcagccaagcccctggtggtttaatgtaacctttataggcaagcttatacaagagactcttcctgtgccatgtcagtttgtgccacactgaggcttttgccttaaagttgtctttggaagtaagagtctatatagtgaataaaataatattttaatgttggcatattggctttccttctttgccccagtcaaagccatagtctcagctatactacagtccttgatgacctaaaattcctcttaaatgctgactcagaggaattggagcacactacattttctgtggttttactattcctctatgacaacagtagtgtcattgtctttttggatgacttgcctcttgttacccacttaagaaatgataggctgggtgcggtggctgacgcctgtaatcccagcactttgggaggccaaggcaggcagatcacaaggtcaggagttcaagaccagcctgaccaacatggcgaaaccccatctctactaaaaatacaaaaattagccaggtgtggtggcacgcacctgtaatcccagctactcaggaggctgaggcaggagaattgcttgaacctgagaggtggaggttacagtgagccgagatcgtgccactgcactccaacctgggtgacaaagcgagactctgtctccaaaaaaaaaaaaatgatattattgcccggggagggcaccccgg

SEQ ID NO: 111309 - DNA, 1044 bp, Homo sapiens
tactgggaattgttctttcagttttaaaattcctaggtgtgctctaattcttcccatcaccactcctccatcaatgtatactttaacattgacatgaatgagaaatgataaaaaccttgagaaacataagctaaatcttttttggtatgagtgctctcttgttttagtaatcttattcacattttcacagttgttctttttgcttttaaactttagaaacgacataaagctgataatgcagtgaacaagaaacaaacgcaaggtaggaattttacatgcttttttctcatatttgtcaaacctacttgtagtatatacaaacacttcaattacatataattcaattgcaaatagtgtgcatctcaagtttttgttttggggtagattgatttttgctttgtggcatttgttaggatgacacttaaactcactttaaagtgatttatagtgataatacttttgaaagccaacattttaaatatatttaagtgcttcatagcaatagtctctcaaatacagtccataaagtctgcagttgttttgacagtgttaaatattataaatttattttgtttgtaatctacagatgttattctagaaaagatgtatagaaaataatcacatgtgatgtcacttgagtgaaaagcattttggaaacactgagttatacatgcagatgacagacactccagaaataaaacaaatacaacccggcctgcttctgtacagtgcatggcattttggcacagctctttttggatggggctcattttgatacagccaaaagcaaaatgatcttcaatacaagcaaattcgccatcatgctctaagattttttttttttaatgcccaggaatgtgagaaacagacatcttagctcatctctgaatgaatttgccccatctgagaatctcatctctgaagttctctgatgtggtgaggataagtgatgtctgccaacattatctggtatttaggaagactatttttatactgctgatatttctatggagtcctgtcaaaattccctgcttctttttcacc

SEQ ID NO: 111310 - DNA, 1122 bp, Homo sapiens
caggggcttgtcgcaatttagcgtgagttcaagaaatgttaagccattactttttttccttttttagacaataactgctgtggtgtgttttacacttgtttatttttaaatcaattccctcaaaggcacttaaagaaacatgtcatttaccatgtctcctaatgacaggtcctgatgacaaaatatattagtggttattaggatagagacaagactataaatttctgggaatttttggatgccttatattgaaatagaaaatttagcaaacatttagtgcacagaagggactttcctgaagggtcattcatgttacttccccatattagagtagcatacttaatagatacttacccatacccttgtgcctgtcccatcctctgtacataagcatgcatagcatttattattattgaactaagcatatagctcaaaagattagtgtcagatgtatgatggtcttttacatagacaatatattcaaaacttttgtaggtatcccttcaaagaagaatggccaaggagagtattttgacacttaagtagcatccaacaaggctgaaggggtagagaaatgtctgaactggaaatactgttgaggtgtaatagaccagcaaaggacagagttaaagggagaggtgaggtcaaatttaattgttgaatgaatgcatgaatctatctatcagtgtcagagctttagatatgggttggactttatcagtttccaaatgttgtcttgcctttggtgctcagtgactctctaaccttgagcaagtctccatatgacaagtgatgtctcctaatcttcatttttagaactcttttaaaaagtgaacccttttgtataatgaaaagctatcaattgttgaaggagataaccatgttttacatgatcaagggtatgtaatgtttgttataactcagatggacttggaggtaatgagctagcatcacagttgcatgaacaagagggtgatggagaagaaggtagggatgtggaaaaccgtttggctattgtgcaagttccttagagttgcaatccacagttgtcccagaacgtgctggactcagagcttgtttagggcagctgttaacatcagaagagatctgatccagcaagta

SEQ ID NO: 111311 - DNA, 1050 bp, Homo sapiens
gatgttggagctgagaagttctgccttttattatctgttaacaacattgtatcatctattctaggcagcaggctcatctcatcaattctttgtgtcccagatgaaagggggaaaaatcgagtggtctctaacgttttttacaacacctttcctccagtctcagatgtctgtgcatctgttaatattcactgttgaacatgtgaacctatctattttcaacctttcctgtgatctttttttaatcttgtgcttgttcaagtacttcctgtgaagcagcagtggtctctaaatacaactccttcaaccctccctgaccacctccccgccttgtcagggccttccacaattactcagcatgtgggtttggacagctgttggggcttctgcactttgtgggtcttgataataaattgaaatgtgccctcctgaaatccagaatacatatctgacatggcctggtattcccctttgacagtcaaaaactctttgatacagttattttttgaagagtatcattactactttaccacttttgcttggattagaatccagtccgtagtgtcagtctgccttgtttcctgtgcatttttagaggtgaacttaatgccactgcaagtcagtggtgctttaagctaattgagacttctaggagatgcttggtagatgtctggtggttgcaacccctcgtttctggtgcagtctgcttctgtgtcaatttttaaacatctatgttggcaaatatactatttaattcttctgtcagataaagttatctgtgggttattcccaaggagatgtcattaaattccttctgtctttcattgttctggttccttttccagttaagcatgaaatggcgttagtaaatgttttattatttccaagcaattcagcatgccgaagatgactattattttaggttaatatccaaggctggctgccaacaagattgactgtttactatgtgtgacgcccaactctaggcatactatagatttccttgtaatactgcttaaggatatcctttcttctgaatgtcaggagtactct

SEQ ID NO: 111312 - DNA, 1059 bp, Homo sapiens
cttgctcttggcaggacaagatgctggttcccaaccctagcttggactccagtgctcagcatttgtgagccgttttgatgccacgccaggcctaccaaggtttctgagtatcatttgctttcactttacccacagttgcttttggccagctcacctgaacccacatcgttgccccatgcaggagatctttggttctgagtgtaggtgttgcccatttccatttgtcctggatctgtcgctccaccattgtattgttattccagtggctgcgactagttggccctttccagttcccttctagtctgtctcactctacttttttttttttctctaacctaggccatgttctgtctctgaccaaagaaatgagatgggtctaagttttatccaatcctggtggctgctctacatgttaagctgggttcagtctaccatctatgccagaatggttgtgataaatattctcagatggacttaagtcaactttcctaactttattttcattgtcatgggtaaatgttagagaaatgacatggggaggaatgtctctgctatctttaatgaaaagtgtgtccaatgtggacagggcagtgggaggcttgtgaaatgtaaattgtttttatagccacatcgtgtgatgctcaaccctggcttcatagtgaattagatagggagcttctaaacaatacagattcccagacccatcccagaacgatggaatcagttggtctgttctatagggatagggaccaagcattaatattttatctcctaggtaattctcatgtgcagtggtattgaaaacactggtatacaaccttgaatttacttgctggcagagaggatgggaataaattgtatacaactatataggttgcgagccaagaaaccaagagtattagctagccaagtgatagacaagcaatttacccaaaatatttaccaaagaaaatcaatatttttggtaaattgtgtatcatccagttagctaataggactaattatactcctcttaatttcccctctcagaaatgatcaaggtcatacattaatactatt

SEQ ID NO: 111313 - DNA, 1026 bp, Homo sapiens
gtcagggccatagtggtgcttggtgagtgaatgaccctttcccctgagattagttgattccagtttattatagcttcagcatgtgcttgggactgtggtgaagacaaataatgactctgtggggctggcgttgtggctcattgcctgctctgcccacacttttctttcctaggaaatatttctttcctaaaaaatatagtcctacctttcctaaggaatattctcctttgagagaggccctgctgcctagagggccttgttctgaactgcagcctttttggcctcagctgattggactatggttggctcctgacccagggtcaaccaattcttatgtgactcagacacttgtaaccttgtggtttggctcaaaaagagtctctgtgttaatcatatctctcttgaaaacattaaagttagagatttagagtaaaagcagaagggagcagaggtgaataggctggtatgggagagaatgggtggccataataagtcatgggaatgctgctgatagaagaaagcagaaactatgagtgagtagagagatagcaaagaaaatggaatggatgggcagacacagatcctgagagagggtggcgagaccttggagcctgccctcccgaattttatagccctagttcccaagtagcattaaaataagctcttttcccccccttgaaatgacttgaatgggtttctgttcccttcatccagattggccagatgtatgactgtcatgcctgtaagttgtttacaaccaaactggggagaaaggacttaaagagggaataaatagtctaagaggggatgttgttaattaaatattgtgcatgctgtgggggacgcaggacctgtggaagattaggaatttagtacatacttattactgaacataaggcctgctgagtgaacatttcattgaggtgtgatttgagatgagccctcacacagtgcttctcaaactcgaaggttcataggaatcacctgaggatcttgttaaacgcagagtctgattcaggaggtctg

SEQ ID NO: 111314 - DNA, 1094 bp, Homo sapiens
tgtttatcctggaagagaccgcatcctacctcttccccggcggcagtccgactgtcgcgcccggcccctaggggacccttccccccgcgctgcccccagtgtactcgcagaccctttccaggctccagtaccctcgaatgggtgttctccgcgggagccccgaggcgtgctttgcaccgcagtgtgaccattaggtcccagtcactgagctcactcgccctgcccacctccctccccaccagttcgatttccactcagcagatccccagcccgccgcccctgcctccggcgcccaccgttttgcaaccccctatctgagctcccagcgaagcgagtttgcttttccccggctgcaggatcctttgatccgtagtcccttggctctcgaagcgcggggagccttcatcggggtcgggtgccgagtgggttccctgcattacagcttctgcaattctgcctcctgcagcggagtcccaccggctcgcgtctgaggtttcgtttttgtgtttcccttttgcccgaaaccctcacttcggccagctgagctgacttttcagccaggtggaagctgttttctttgctccacctggggccagctcttgaatggccatggttgtcaacactgagcaacagatgctccggggtagaagcaagtaagctttccgagggcccagactcttcatcgtctccgaggagccctcaacatcctgcctgccatgtggcaggcactctgtaaatattatttgattttgctcgcgtcaaagccaagactgtaaatatcccaaggtttgtttgtcctctcccataaacctgtacttgaatcctgcagagggtggaataacatgtttttcagaaatctatcttgccatcatcgctgattcccactcttcctccccacctccatcttttaatgtgagacaggtggtgaagtggttttagaaaaatatataagttaggagaattggatttcagggatggagacaggccattttttctccttaggggctccctgtaaaaatagggtccctgaaattttctgattgcagtatttaggaaatattaaatgaaactgctgtggggagaagacgaagcaa

SEQ ID NO: 111315 - DNA, 1050 bp, Homo sapiens
gtagggtcttgagagcagaaagcataactcatctgtccatactttccttgtatgcttctgctttcattaaaaccagttttggctgctagatttgccttggatgttgaatttttattaagttcacatcagagtactgggagaaataggtgcagaataaataaatcaaatcaaatgaataaagcattaggtgggctgtgcaatggggcagaagtgtctgtatgtttgcaggaaattcgatatgagatgaatggctttggagagcatgtgcacagctagggaagggttccaaatgagcaagccaagagcagttaagtcttacattcacagttcagttgcccataagactcaaatttgcatggtctttgaaacccagctgttgaaactctctttttcattttgaaaccaaaggcattgaattctactatgaatttcacacaatgaaataaacatctccattgatagtttattattctcttcactagaatttgtgaaagtgatgagatgaagtttacagtaaattggaagatgttgatgagggtagattcataattatcagtggctttctttactccagcagttgcttgtgttatatggttacagtcctactgaagtttcaagctaaaatttgtttttcaaaaggcagtaattttctgaacttgttttctacattaaaacaaaacatacttctaggatgtgatatgtcaagctgtgaaaaagcagtagcatgtatttcaccaacatccacaaccttcttttagatcatgaaaaatgtcactatctttcactggtgagttggcaagagtttgagaaatgtcagtaaggctgaaaaaacaaaaaactgactgtgttttttcacttacatttcattttcaatgtgttgattgacctccccgttcactgcttggggaaaaaagttatgaacctaattatatgttttggttttaattaccttttcccagtaactttatatagatattttattacaaattataaggcattctcacttatcaaaaatctagattttggctttttagtaacctgatttatctt

SEQ ID NO: 111316 - DNA, 1097 bp, Homo sapiens
taactgagcagattaggacaatttaccagttaaaagtcatttaaactttaagaatccatgaatccatactaatataaataagcaaataaataggtgcagataagagaacatatttgcttttggcataaagtcaaccaataaatgtaaaatgaaagatagaattagaaaatcacaatttggcacagtaatattcatttagcccaaacgtatctaatgctaaaatgagtagattaaattttgatgagcaatgggaatttacacagtctcaaagtacctccctacaaaatacttattaatcacaaaaggtcacatgggtaattttacagtggaaaagcatagcagatgccaccttaatcaagtgatcaaaattaacatcaccagtaatggacaaattaaaattgtttagtaactgataggatacaatgacaagaatgtaatatcacttctctcatattcttgccaaaaatatgtaactttaatcatggaaaaacattaagtaaatcccaattgaggaacattctaccaagtaattggttgtaattccaaaaaatattgagatcatgaaaggcaaggaaagactgaggaactatcactgattgaaggacattaaagagattgcaacatgcagtcatggtttgaatccttgggacaactgatgaaatttaaatgaggcctgtagattcaatgacgataatgtatcagcattcattttgatggtcatattgtggttttgtaagggaatgtccttgtttacaggaatcacacatcaaagtatttggggtaatgaagcatcatattattgactaattatttaatgattaagggaaaatgaaattatttgtgctattattataacttttatctaaattggatataatttaagaattgaaatcatcttaaaataaaataaataccacaaaaacccaaagttggaaagaacagaaatattcatcaaaaggtgaataaagaacaacttacagtgcattcatatagcataatactatttaataaataaatgcaacaaactactaatgcatgcaatcgcattgataaatctcacgggtactgtgcttaataaaataaggcagatacaaaaa

SEQ ID NO: 111317 - DNA, 1113 bp, Homo sapiens
atcatagcagcttttgagttattaatctagcagtgatgtgtaggaaggattgaattgaagagagagaggaagcaagaaacattaaagaattttggaatattttagtctaaattaggtatctgcaaacttttcttaagggccagataataaatatttcaggcttacagtccataatctgtattgcaacttctcaactctgcctttgtagtatgaaagtagtcataaaccatatgtaattaaataaacatgaccgtgttccaataaaactttataaaaatgggtggccagcctctgggcttaagtttgctcctgcagctctacatgtagcagtaacaagacttcaactgtggaaacaaagaagaaaggaatttgacacatgtttagaagtcaatcaaatataaattgccatgccagtgtagtactttccacattgaccctaataattgacataccttttactctgccactagactaggaactctgtgaagtaaaagtgtaactgtattccctttttattgaaaagatagtaaatattcaatgaaatatttctttaaccaattcgataagtttttactgattgaatatggagagtgcaaaagcatgaacaaagttcccaagcgtttcagagtgtctgttaagctttaatgagtggaaaatagtcatgctgttattagaaatgtttgtgactctgataaacttatttaacccttctacacctacacgtcccaaaggtatctcaaagttaccaggtataaaatgctatattagttttcccttccttctccaccccaaaatatgatcttccagtgttctctatcttaattgcctgtcatctatccagtcactagaaacagaaatcctgagccgctcttgtccccttacttggaggaataaggacaatacaatttagggggaaatccaagtcttcagacgtttttctggggcctaccttcaaattatatttttaaaaatccatctatttcactctactatcatttttcatctggattactgtaaaacatccctgcttccaatattgcccttcttgcattctctacataatgaagccagttacttttttggttagcactattcaatgattttctattgaat

SEQ ID NO: 111318 - DNA, 1036 bp, Homo sapiens
cacaaataaaaacagatttcttataccatagactaatgaagttgaaagattctcagacactgaaataggttaataggatttataattaaaacacaaacttttaatcacatttacaatttctctgcacattggtggtaactaattatgttttattcctctggtttactcacgaatctgatcattggttcttgtagtgaattaatgttaccaagactgctaactttgaaacatttcagagcataaacttttatagtaaaatagaaagcctatgatcttgaagtagtttctttttgttttccccctgaaagtgattaaccagcaatgccagtggtttaggccatatcaggagacaagcttagaagaaattagtttgctgaaaatgtgttaaaaatctgtatttttattttcatttttaatatgttgattgtttcataaatctctctgctcccatttttattgcagcactaaaatcactgaattcaacacttaattatacttagtgtttcttggcctagaaattatgtattaaagctgtttctatgttcaaaattagattatgcgtgaagtccccattgtacaagcagcatttatgctatcaattggtttcactggattacatatatcactggaatacatatcaatctatttatttcactggactacataagttttaagtgtatctctaaaatgtcacatatttcagagttttacatataaaccaaaaaggttatatttcttctcaattgaatctaatttaataataccaggtcccatgttttaaaacaatatacatttctttcttttttcagtttttctcttttaaggatctctccaaggacttaggtatttgaaaatgatatagatcctatgacgacattaccttcaaaaatttgatactgcgtaaggcaactgtgagcataaataattttagtattttacaactaaaatttagtattttagttcgaaaatactagaatagaatcttatttatggaatttaatggattctcttagaatcaaaaacacaaaaagctttt

SEQ ID NO: 111319 - DNA, 1065 bp, Homo sapiens
ctgactcaatgataggtgaaactatggaatgacagtttaaatcttaacccacaagctgaatttgtgttttattaatatggaaaaatattgtcaacaatatgttatttaatatttatttaatgccttgttttacagaaggccatatacatcactgtgtaaaacttgtaagacatgagagagtgtcatgatatgttgacttagaggactaattctatctcctacattcttaatgtcctttcttagggatcaacttaaaggaaaggagaggcttattcagtgtttatcggaaagtaaaaacctataaacctagttttatgagttaatgagaagagcataagtctaaataataagatctgtgaggtttgaagaaatgcaaaaagggccactttgaccaaaagtttgtcctctacctgtctgctactgtttctgaaattctgacagttggtaagactccgtaagagtcttcttttaggcttgtactgaagtttcatataggacttgaaatttggaccaaatctaatgtttggctttaacttatgctcaaatttaagaagactgatttgctgaatggctactcagtgtcatttctggaaaatctgaactcgtatggaatcacgtggattaactttgtctactcattataacagtgacactaacaatgacattggtattaatctgaatgttcatttattacagttgaccctttaaaaatataaggctgaggagtgccaatccccatgcagtcaaaaacttcgacccaactttttgactcccccaaaacttaactacaaatagcccactgttaactggaagtcttactgataacatgaacagttgattaacacatagtttttatgttatatgtattttatatatattatatatgttatatccttataataaattagcctagagaagagaaaatgtttctaagaaaatcataagaaagagaaaatattgactattaagtgaaagtagattatcataaagatcttcaccctcatcgttttcacattgagtaggctgcggaagaggaggaagagaaggggtttgtcttgctgtcct

SEQ ID NO: 111320 - DNA, 1112 bp, Homo sapiens
tctcttttccctatggagtaaagtcttgcactgtgtctgacagtactatttcttgtgtgaagtattgaaagatggtatgttaggtaggcttttaaaactgatgatttcttcagttagagacagtgctttctttttttgttcaacttgctctccatgctcattaaagcctcacactatgtctggcagcaagttgtcacttagcaaatatttattgatttaagtagggaagctgtgtgatgggtgagtatagacatcttatgactgggtttaggagtgttctcgagtaaaccagggctgcatttataccctatttcctttagttaataactgtgtgactttggctaagtcatttatttactctgtactttggtttcccttttgtaaaattatcagaataatagtacatatttcagagagttgccccaaggattaaatgatatgacgcatagaaagcacttggcatggtaccttttgcaaagtcaaggctcactaaagttaactattttacttgttatttatagacagttatggtgaaatagagaaggaggtaattgccttgaactgaatggagagttcagggaaggcattagagaaaaggtgacattgcaaattattgacagaaatgtgggcattcatgtaagagagcttgggagctttgctagttcatgcaaaaatggcatgttcggggaatagtttgatttggctggatatcaggggaagtgttggaagaaaaatctggaaatgtaggcaaaggaaatatgatgtagcacattcaatatcaggaaaaggattttatatcagaatgtgcattttcaaaaagcaactgtggcagcagactgcacatagaattggggaaactaaatgtgtttggatagttggtgggtattgaaaacattgaggctagggatgagtcagatgaacattagtggagatagggagtaagggacaaattctagtgctatataggtggtataatcaaatgaactttgggaggaaggaagtcagacaactggcagctggcctgtgattgattcatttcttttaccaggggtatgtcttggtggaaaaaataaggaaataggtgacccagtctaatctccatgtcaactggc

SEQ ID NO: 111321 - DNA, 2437 bp, Homo sapiens
gctattaaactgatgttccttgtaatatgaacttagccatacatgtctttttcttagaataataatataaacaatataaatgctagaaatgatattgttcaacgattaaaagaatattctttgaattggtatacttgtttgatagtatgccaaatttatactcctaaatgtggtatttcccctttctaggaaaaacttgacatgtctaggtttcctgttgaaaatattagaaatttcagtattgttgcacacgtggatcatggcaaaagtactttagctgacaggctcctagaacttacaggtatttcatttatgttacatacttaactgatggctgcgagttattgggaattacttttactcttaaattttaattttataagtaatattctcttttttttttaaagcccagagaaatatcaataagtgtttctgtttatagggacaattgataaaacaaagaataataagcaggttcttgataaattgcaagtggaacgagaaagaggaatcactgttaaagcacagacagcatctctcttttacaattgtgaaggaaagcagtaccttttaaatctcattgatacaccggtaagtttaatattaattttgcatgtattgttaaagtcaacattgtgtcagtagtgcaaacagatccttgtttaatttttgaactgagtattaaacatctgcctttgctttttgttttctcagtgttcttatgttagtgtcagttgtttcaaaagtgcaggctacaaaaaagaaacgaatatttaacagcttttatcaagtaaagtcaataaatttgccataatgctctttcctaaaaaattaactcacatttacaggtatcaatatttttgtttctcagggccatgttgattttagttatgaagtatccaggtcactttctgcttgccagggtgttttacttgtggttgatgcaaatgaggtaggtatttttcattttgtatgatgtgatatgacatgactatttggttgtttcaagagtttttctttaaaatgtgttttggaaatagaatttttgtgtttgaaaaatagatttaatctgttacttactgaaaatcatatggtttcatcctgttaatctgaaatattattacaataaagcattctctggaattgactagtttttaaattggaattgttcaaaagattgttgtatttttttgaagtgtgacatcatattgtcaatgcatcttaccaaaaaaaccccaccaactttagcagttcttaatctgaggtttctatatccatttttagcagatcttaagaataaatcattagttttcagatcattttaggtgattttaaggcaataatttggaagtattaggtttttaaaaaatcagtaacattactaagctcttttgttgtgtaagccgtaaagacactcagcagatgaccatgtaagagctgtgaatataaacttttgttacatgtttctcacaaactcttcattcaaaacccaacttttttttagtggtggtggtgaccgtgttgtgttaagccgttaagcctttcctgatcccatcaaggaaagtcaatctctaccttatgtaggcagtactggcctttataaactaccttgatgactgtgttctctaataagctttgaggtccttgagagtccatgttacatcttttgtttctccaatgcctgatgtagtttctggcacagaaaaggccctccaataaatgctttctgaactgaaaggaattattacagaggatgattcagatgcatggaaaaataggtatcatagttgagctgccgtgtacctttccttaaaggcttcctatctcaagcttagtagactgtctgttggctcactctacttgatgtgattattgctttaccatcagcgattttcatattgaccccaaagacataagttggagagaaaagcatgaagggtagctacatggcattttgtttaattttattattagcataacgcaaaatctcttgatgaagatgtatagaatggtcttaaattacaagttttgtgatatataatagaatggtcatctcagtatcttgtatcttgatattttcagggaattcaagcccaaactgtagcaaacttctttcttgccttcgaagcacagctatcggtaattccagttataaataaggtaattacaatgagacaacagtgttgctatttcactttctaaaagtacaattaatgtttaaatgtcagttgtactattcattatatgagggatcaccagctatttattaaatatattggtgggatttatctctttgaattgtatataacagaagtgcaactgaaactcacccttgcacagaattgagaaggtagttctcctgaattaacttgtggtagctgagggccatttctgtagggaagggaagcagggcagatgaaacatgtttgtcagatta

SEQ ID NO: 111322 - DNA, 1032 bp, Homo sapiens
tgtagaactacgtaactataatagaaaaagtatttgtcaatatactgtttgctttgttcttttccttttggtgtatttctcaaattgataactattggaatttttttttccttctgatcataagtcacaggtcatcaagatagaaaagtatagtcttaactttaaatgcttatatttttcacatgtatctttttagatttctgctaaacttggaacaaatgttgagagtgttcttcaggcaattattgaaagaatccccccgtgagtatttggtgatttttgtactagttgtctctatttaatagttcaaaaactgtccatgtttaatagttcaaagactgtcagcttgaactgttattttagcttaatggatgtggcaaatattcttgcaggcagcgagaataaatttatttgcttttagtaatacatagaaggcaagtacagtaaagtaaaagaaaaagtaaagatgattgatagaggtcttttcatgacaatcattataaaatatacctcagtacattggcagttattttcctttgctttaagctgaacaaatatattcataaataatttgttaaaactagaggttattaaatctaatatattttataaaaaggtctttttatttaggctgttgtgtatcaaactttctcaagaactcaagtacaatatctaagttgaaaataagaattttattaagattttaatttagtgtatatatatttactttttacttatatttactagtcctaaagtgcatcgcaaaaatcctctgagagctttggtatttgactccacctttgaccagtatagaggtgtgatagccaatgtagcattatttgacggagtggtttccaaaggagataaaattgtatctgcacatactcaaaagacatacgaagttaatgaagtaggagtcttgaatcctaatgagcagccaactcataaattgtaagtaatctgcattagtaaaattaaaatgcatttgtatgtggttctatttctgcatttttctcaacttggtatgcttag

SEQ ID NO: 111323 - DNA, 1051 bp, Homo sapiens
tttagatatgcaggacaggtgggctatctgattgctgggatgaaagatgtcactgaagcgcaaataggagatacattatgtttacataagcaaccagtggagcccttgcctgggtttaaatcagcgaaaccaatggtatttgcaggtgaggagttcacaaattcaaaggttgagggccatgatatttttaaactaaaagtctgtctcagtggttaaggaaaaaatacacattctggttattttaaataaccactaattccagcatattgtttcactttgtgctgtttatcagtttataattacatatgtgtgatgaaattatatgtgggagatcatttaggatgtgttaagaaataagttcttgaggaagaagctgtgatatataggatacagtaatataaatttctttcttatttttctagggagttcattattatatttgaaacatttttctaattaggatgttcttattagtaattatcagtagacactgactgagtgccttcatcttcgatagactttctttaatattgtactgtactaatgtagatatgacagaatggtgttgcctcaagtacgtataatttcagaatcttttacttcatttactttggaaaaaggaagacctgattgaaggtcatcaggttactctgtgctgagtatctagcccttaatttttgccctacagtctctctcactgggaattaggaactttgtttacccctacctttaggcaaagtcagtcatgtggattttagaggacttcagaggtgtcagatgaaagagaatcagtagtgattcccatagtttttgtcagtaaataccaaaaagcaaaatttaactatggttttaagtagataatctgccttagagaattgagagtgcagtatagttttcatgtctacttctatttttatccaataataaagtttcatttgggttgtggaatgtcttgtgcttttgtttttgaaattacactgtgttttcttaataggcctaattcccatgtttttttttttcttttccctgtattttttcaaaaacattaaaa

SEQ ID NO: 111324 - DNA, 1043 bp, Homo sapiens
gttcatcgggatagtagccttgctctgggtgctggctggaggtaagattcattcacatgtgttttataggaaagggaggtgtaaatggtgtattttaaaaatatttttataggaaagggaggtttttaaaaaatatctttataagtaagggaggtataaaatggtgcattgttctggaacatttactgaaaataagtttatattagtgtaaagtgaacgaaaacaatttttatctgcctgtttcacgttgcggattgacattttatgggtaagttttatagtgatttaaaatagattcccaatggaagattttaatcttatttaataaaattatgctagcatttaattatattgtgaattgtttgaatgacttaattccatccctcccttaaagtaacaatatgttcattaaaaaaaaaaaaaatgaagcccatgggacataaacattttggagtttgtcttttcctcccccaggctaggatttcttggacttttgcacatggaagttttcaaccagcgactggagcaagaatataatgcttctgttattttaacaacccctactgttccatataaagctgtactgtcatcatcaaaattgataaaggtacttggtatttagtactggtatttagtactgttttgcattagtctcttggaaaaaataaatgtgtgtatatacaatgcaggagaagctttttactataccaatagctgattaagtattaaacaaaatatttattgattagtagtaataaacattgaattaccctatggctaatgatgaagaacttttttgaaaactaatttatgcaatatttttcttaacctgatgtaatctccagattatcaaaactagtctattgctgatagtaaaaggtaaaattagtagtgaaaataatgttctgattctagcacaaagatgaaaaatgtaattttggtcataagtaatttatctcgtaaaaagtgaagcattcattctggtgactgggaaattttaaatttcaaatcagtgatgaagacagtattgtattccatgtaag

SEQ ID NO: 111325 - DNA, 1249 bp, Homo sapiens
attggaaagtgtgtcaaatggtgactgagctttgattaggttaaaaactagattgtaatcttggtcttaacttttaatttctctggacctaattatttgtaaaacaagaaattaggacttttgactttatatgtagttacatttgatttactgttaaatgaaatagtgttcattttaaaagataaaattgttagataaagattaaaagctttggtagcaagcctaatgcaattgaaatataaaatgtttctctctggattataaatactgcctataagtttttactagacctttagagaaatacatcattcctcagtatttgagtaggttatcattaaacccattttcttccttccctttttaggctcgaagagcagttcagaagaatatgatatttattgatcaaaatagagttatgcttaaatatctctttcctttgaatgaaattgtggtagatttttatgactctttgaaatccctatcttctggatatgctaggtaaaaaaataatgagaacctaagatgcctgaccaacttttttgaaatattgatgagcaagggtatactaattcttcatttatttagtaatttcagctttcttgaagatagttgagaatcatactctaaggttagaatgacttggaacaactttataggtgttacagactacttgtgatttgcttataggagaaaagtttcctttgatttattatctaacttttatttctcttttaacaaaaaaagttagtccccttttcatgaagagctgtattccttgtctgttaagaattagacctaatttcaaaaatttaccataacctcagtggcacttttaaaatgtatatttatgttatgcaatctcaagagcatctatttacatttgaaaaataaaagtgcatattcagtctgtaaaaaatgttagatgtgccgctccattagtgaacactttaataacttagtcttttgaggaacaggttgtcctcatcacgaaaacctttgtgtatctcataggagtacatggagaaaagccagataaaagtgaaaggagagttactattaaataacaaataagaaactcagggcatagcattctgagaggctgttttttgttgttgttgttgttgttggggcatataactctagataccctcactatgccctaaaatcttatgttacgggatagtatatatagaaaacagatgtgaaacatggggaagcaggaggggaaaaatgaacattgacatctata

SEQ ID NO: 111326 - DNA, 1220 bp, Homo sapiens
catattaaaaaaagttttaaacattttataatgatggatttagaattgggaacaagtttttttgttttgttttgttttttttttagatgggagtctcattctgttgccaggctggagtgcagtggcgcaatttctgctcactgcaacctccgcctcccgggttcaagcaattctcctgcctcagcctcctgagtagctgggactacaagcgcatgctaccatgcccggctaatttttgtatttttagtagagatggggtttcaccatattggccaggatggtctcgatctcttgacctctgatctgcccgcctcggcctcccaaagtgctggatttacaggcgtaagccaccgcgcccttttatatttgtaaaaaaattataaaaaggaaaacccccacgtgttcaagaaacagcagattggttaaaatgaattacaaagcacccatattgttattttcagccattaaaacttgtggagtaatatttagtgacataaaaatgtctgttaaatataaagagggtagaatatatcgtaaacactgatcatacaaaaaaatgcaaaaaagtgattagaaagataactgtttaaaataatcattccaaaatgtttaaccgttttcagcgggtaaggaaagagaatcaagaacagtttctattgtctaatgttgtatttctaaatattctgtaatcatacattacttttttaaatcagagaagttgttcatgattcagagagtaagagagatttataagtaagttccatttgaacctccttaagagatcacctttacactgattatgcaactggcctagaaaaatacttgaaatattcttatttaggatatataaacagttgtatttttctgtctcagagacaaagctcattcaattggcaaagccatatgtgaacggctgaaggattctcttcctaggcaactgtttgagatagcaattcaagctgctattggaagtaaaatcattgcaagagaaacgtgagttgaaattcatttttggtcttgagccagtttcagaaatgatatacctaaaaagtgaaagaatattgaacattttaatttaacattggcctaagctttcttacttgtagaaacagtatgatggtgctctccagttttctgatttaagtaatgactgttactttgaattacttatataacagcactgggtgatgtgatctgcagttagtataacgtatacgagt

SEQ ID NO: 111327 - DNA, 1003 bp, Homo sapiens
gaacaaggtgggaggtggaataaactataccgagctgaccaaagaatagcaaccatacattcatttatccagccattatttaataagtgcgtcctatgtgtcacttgttattctaaatggtaatatagtaatgaagataaagcccttactttcatgaagagtgcatgtacattctacccttagaactgtaggaacacaggaatgacatttactccagacagtgagttttagagatgtttcatagaggtgctgatatcttaatttagacttaaaggctgaataagaattagccacatttaaaaaaataattttatatcaggaacctcagttattcatagccaacaagcaaataccttgacccagctctgttattaacctttgctcataatttcagcttagctgtacacttctataaggcccaaatcatcagtgaggtcagtagtagtagatcttagtagacttcatatttttttcctgaagcttgtattttcctgatcccatccttccctctacacatatatagagaaatataaatgttagggatatgtatacctaagaggagaaacagaacacttttacaaatctagataatttaatgtctataattaatatatatttataagcagatacatacttaatagtagaaacagtcaatgcatattaaccatatgtaggtctggccttatgtctccatattaaaaattcataaattgttgtactttggcattctgtacttgcttcaatagagtattcatttcttcatttttcaaaactgggttactctttgtcatattttatcttcttgtggcctgggaaaattttgttaaacttgtgtgctaagtgtcagtaaaatacagatatcattaaagtaaatatgcagaatataaatgtaaaagatattttaatgactcaaggaattggcagatttattttttggctgaggttaccagaaatgtgactagctactagggtacttataaataaaactcgatttatttatgtc

SEQ ID NO: 111328 - DNA, 1669 bp, Homo sapiens
tttttttgggagggggttatgtttcttcagtataaaccacctcagttctccttttgaaatagatgttgcataagttataattatatatgtttatcactgacaccactaaaaagaatttgacttggttttttaaccagtttgtcttaagcttcctgtagttgtttccccgctcctccccgctcccaaatatattttaagagagttcctgtgcctcttacattaacatcttcactgtagtcatggatgatccaatgcctgacattttatatgtaccatctaaaggacataattgtgcagagagagagaaggattattgcattttctttgaacttttccttatttgggatgccctattattggatatgtattcatgaaagaatctcatttgttgatctaggtttatcatcattggatttttagatgaggattggcatctgggtcttacaactacccttcttttgttccagggtttggttaataaaaactctaagaactgtgccaaatgggatcaaaatatcagctttattaaaggtaaagttgaaatagagattgcagtttgggcttgaagccagaatggggtttttcactcctgccctttgaattggaaacagtagaatgagaagagctcaaaaatgttaatctgctattgctcattccagggaattagagcagaggtccctttcctctgagggaagagggaaagaaaaaggaggaaatacatactcaaatgttctaattcctcctctgatggcaaacgtgttcagagaaagggtaaaaggtgtatcatgcaattcctgacttaaccccagcaataagatatacaaacatggatttttaaaaataaaatctagggctgggatccggtggctcacacctataatcccagcactttgggaggctgaggtgcgcagatcacctgaggttgggagttcgacaccagcctgaccaacatggagaaaccccgtctctactaaaaaaaaatacaaaattagctgggcgtggtggtgcatgcctgtaatcccagctactcgggaggctgaggcaggagaatcacttgaacctgggaggccgaggttgtggtgagctgatatcgtgccattgcactccagcctgggcaacaagagtgaaactccgtctcaaaatgaataaataaataattttaaaaatctagttttacaataaaatctaaatatataaacttttaaaatatcttaacgcagtagtgtcttgggttttttgttgttgttgagacagagtctcgctctgttgcccaggctggagtacagtggcttgatcttggcttactgcaacctccacctcccaggttcaagcgatcctcctgcctcagcctcctgagtagctgtgactacaggcacttgccgccatgcccggctaatttttgtatctttagtggagatggggttttgccacattggccaggctggtctcgaactcctgacctctggtgatccacctgccttggcctcccaaagtgctaggattacaggtgtgagccactgcacccggcctaatagtgtttttaaaaagtaaaaataaaagaagacagtggagaaaatgttaaccttctgatttggttgcatgcttggattctttgctttggtagaaaaaggaaataactaatgggatcaaaagtaaattaactggaatg

SEQ ID NO: 111329 - DNA, 1052 bp, Homo sapiens
tagcctaaaccattttttcacattcagaactaaaggtctgggtaatttgggaattaatactctataacctgtgatggggtggggtgagctgttcattagcatctcttgtgaggtctctccattttcataaagaggcatgagaaaattttcagaattacctgagggtagaagcaaagcaacactcagttatagtcaatgttatcaacctactgaacttgatataaaagactttttgggcaccttactgcctattaaaaaacagtaaagtgtaaaagatagttctttagacaaattgggccatggaaatgccaagtcgttagttttggtgtctgtaatgcctcacaaagtaataaacttttatgaataatttgctaagaaattagccataatggcaggtagtttatttatatacattgatgaaatctatattatcctatgtacatgttattatacaaacatttgtttgggtttttctcagtcattttccataccgtaattccagctcagcccactccacttgcaattgcttgctctcatcttctaactcctgtttattcttctcaatttctgctttaatggcttcatttaacctgctcctccatatcctgtatgtttttttgctcacagcttttttccttcttcctgttggaaaactttgctaaataacctgtattaatattttagcctcatttgactttaagattatctcataaatgttctcttggatatcctgtataaatggtagttaatatttctgagcaccaacttcccttactccagctctcagacttcttctcattattatgacaattgaaggattttaaaaatcctgtcttaggagaagtggccccaaatttgccacagatctatgatgttttaattaatagtgacttctgaatgatctagaaaataatggtaaaccatgtacatatatttctgtgtgtgcattttatagattttttgtctttgtatgaagaaatttactgaatatccaaataagcattatttctatataaatgaggtatgtgggttaaaatctagtgaacaaaata

SEQ ID NO: 111330 - DNA, 1048 bp, Homo sapiens
tttcttttctctccgttttctctttctttttctttttttttttttttttttggagacagagtcttgctctgtagcccaggctggagtgcagtggcatgatctcagctcattgcaacctccacatactgggttcaagcaattctcctgcctcagcctctccagtagctgggattacaggcacacaccaccacccccggctaatttttgtatttttagtacagacggggtttcaccatgttggccaggctggtctcgaactcctgacttcatgatctgcacgccttggcctcccaaagtgctaggattacatgcgtgagccaccgcgcccggcctctatccatttttatagtatctattctatttcaggttcttgttatctctaatttgagagttgccataacttacaaccaatttctccgtttaattatttcttcacattctccatacaactgattaatattccaaacttggtgtgatatgtcattagtttttactcaaaactatatgtaataaagttcaaaatctttatctgtattctgcccttcagtttaattttgctgttattttatgtcacttcctatatggtataatatattgtgtaaacaaaaatacctaacacatcttttacaccctgctcattttcctacttccctttgttctgtttacatggaaattgtaaaccttcttaagatccagttcaaatgttgcttctttcacaaagcttctctgatccccttctttaataataagtaatttcttcatcccatgatgaagtgccatcagatggagtgtcatttatgacacattgctttaattatagctacatgtgtgtcttatctcacctactagaggagattcatgatgacatgctttaagaaaactattactaattgaatgttttacctggaaaaaaaattgcatgttaaaataaacttattttcaagagttgtatcaacaattttcttatcagcaatttttccaaaagataaaagtgggtgcaaactgaattagaaaatagatcctcaatgtgtttctaaatagattatta

SEQ ID NO: 111331 - DNA, 1047 bp, Homo sapiens
tcaaattatgggaagaaatccttccaagctcaaaattatctggtttccatgtaattatactctgagtaagtttgatttgaacatcctaaactgtcgtattagaggaagtgtctctaagaattattcttaattacatagtgaccattattcattgacaactgatttatcagaagcctattacatttaaaacctgtgattggtcctgccagaggatacaaatacaaataagacagtttcttaaaatggggaatatttttagtttaactgctgtggaaagtaattctgttaatttttccttttgatgggtttttaaatcactactgggatgatattaggaacatgatgaaacacagttattcaacgcctaatatgtgcaaggcattgtgctagtttgggacttcaaaaaggattaagattttgcctttgctgttacagatagaaagacccaagcagtatgctgtaataagaataatagtaaaggcatgaaaagcgctttgagaaaatacttcagaaactaatgaacaaagcagggaatgtaggtatagcatgttatattctagatatgaaattccacatttgcttaagtaattaataatttattattggtgatataatgtagtatagtaaagctagcacatgctttggagatcaatacaagggggttagaattctggctctgtcatacattatttaatctctgtgaactcagtttccagatccataacattctcatgaggatagcgcctttggagggtgtcgtgaggattacatgaaatagtatatgggaagaacctaatagcctacctggcacataattcatcttcaataaatagtaattattgtatcttcgcttattgttctttggaaaataccgacaccctgtgagcataccagcccctcaatctgtccagtcttcatccccactgccacatccctagtccaagctgttatcaccaactctcgacttgaacaacatggcagtctcttagaagagcccttcttctacttttgcttccctgtaatgtattgtcaataccattgtcagaa

SEQ ID NO: 111332 - DNA, 1030 bp, Homo sapiens
ttctcgttattcttttgctcatacagtattcttctgcatgtgaactaccttacctagactaaactcttttgtttccctttcaacatcatcttcacctcttacaagctgtataatcttagggaagtatatagagctttttgtgtctccagttacttaacctataaaataagacttaaagtaatgcctcctactgtgataaattaaagattcatattgtgaactataaagcaaccacttaaaaagttaattgaagatgagtggttagtaatccaatagtggacataaaatataacgctaaaagtttaatttaactaaattaaagcaggaaaaggagaaaaataaacaaaaaaagagaataaatagaaaacaattagcactaagacaaatttacaactaagaaagtcattaattatattaaatataaactatatatgaatattccagtgaaaaggcagagggtgtctgaataatgcccataagaaatccattttggatataaagatgttaaaatagaataatctaaaaagatgtaatcttcaaacacaaataataagaaagttgaggtagttatatcttggactaaattaaaataaacatcctacaaatcaaaattatggaaagtcattaaagtagtgaagaaagaacgttaaggctttaactgcttgtactaaaaaagaaaaaaagttctcatcaactatctgcgagtccatcttaagcttggaagagagaattaaaccaaattaagtatgagagaggaaataataaaggtagaataaaaaatccatgaattagaaaaacctctacctagattcatctattagactaatcaaataagaggataagatacaaattattaatatcacagataaaaggaaagatattacttcatgttaaaaacattatgctgaacagaagaagctagacacaaagactctatatgtataattccatttatatgagactcaagaaaaggcaaatataacttagagtatagaaatcatatcatgtagccaattccatgcatttaaga

SEQ ID NO: 111333 - DNA, 1094 bp, Homo sapiens
tgtaaacaagccccaaaatttcactgaatagagatcagttcttaaaactttagtacaagtagccttatactatcaaactgatgacagtaattgctggaacaatcaataaaatatcactttgacatatctcaaaatatatttattaatattttgtataaagtcactactaattcatttctaaagagtaaattttttaacttaattttacttttgccatatgcttttgtcatctcctggaaatctgtcaattctctatgttttcaggaattatagactcattcatttttgagttgttagagaatggaaattctggattattaattattttagttatgtgaaagtctccatttatgttttataaggatgaacaatttttcagaaatttggaatgtaataagatgacagcactaacacacttattgctgatcttgagtgccccaaacacatgacaccacttaattcacattcaactgatgcatttgatcatttgctatccactgtacactatgccagggccctgaaagataaactttgcctttcaggaactcagaatctagtgggactgagaaataattttaaaacaatagggtaagtgctgcaatcaaagtagaagagagttgtgggagctcaaaagagtgagtgactgatcctagaatccaatttcccaggggctctatcctcttctcaccttatgctctctccatggtgagctaatccattcccacaacttcatctgtcactcatgagtcacatagctgtgtttttccttgagccctgtcttcctatattctgacccataactacttatttggcacctctatgtgcatgcgccactgacacccacaacacaaacccatcttagatgaattagccatcttcagcccccaatcttcaactcttcttatcgtagtctacctacctactcaggtcagaaacctggtggccatcctttggtgcctccttctccctaacctcccatattaaaaggtcaccaagtgctgccttaaataactcacagttttcctctctttcaccttcctttagtggagtattaagtcaactctgatttatctattctctaggctaatgcaagc

SEQ ID NO: 111334 - DNA, 1595 bp, Homo sapiens
tctgccacaatttattcacctattgatggatattttggttggttcaagttttaggcattagaatacacagaatgctgcgaactttcttgcatacatctttgaacgaacatatgcttttttttgagcaagtactttagaatgaaatggctggatgatatggtaggtttattttttcaagatactaccgaaattaaaaaaaaattttatttgaataatttttgagggtacaggtggtttttggttgcacggagaagttatttagcggtgatttctgagattttagtgcacccatcacccgagcagtatactgtaccctaaatgtaatcttttatccttcatgcccctcccagccttcctccccaagtccaccatgtccattatattactcttacgcctttgtatcctcatagcttaggttttccattcccgagttacttcgcttagaataatgactgtcaagctttttcaaagtgattttaacattttgcatttccattgcagtctatgagagttccagctccatcttgccaacacttggcattgccagtctttttaatttcagttattttaatatgtattgtctcacagtggttttagcaatatttaacaaatttccctaatgaccaatgatgttaagcatcttttcatgtgcatatttgccatgtatacatcttcagtgaagtgtctgctcagatctgttgcccatttttcaattggattttttgttttcctagtattgaggtttgagagctcttttgacttattctgaatacaaatcctttattagatagatactttgcagatactttcttctaatctgtggcttatcttttttcccccatgtaaattgaccctatattgttttagaacagttttagataaaccaaactttaagagatagtacagagtttctatattattaacattttacattagtacagtgcatttgttataattagtgaactaatattgacacaatgttaagtaaattctagagtctattcaaacagaaaatttctaagtttttccctagtgtccttttcctgccccaggattctatcctagatgccgtattacatttagttggcatgtttttgatgaccttgacagtgttgaagagtgtgggcgaaatactttgtgggatgtctctctctgttggaatttgtctgatgttttcttcatgattagacttgggttatgggtgttgggaaggaagatcacagagataaaatgccattttcatcacatcaaatcaagggtacatactactaacgtgatttatggcttgatattaatcttgatacctggctgaggtacaggtttcttcactgtgaactgactcttcattttctccttttcttactgtacttaaggaaatcaccatagttcagcccatacttaaggagtgggaaggtgtgctctcctttttgaggctggaatatctacataagtcgtggaattttgtacccatttgtttcttttccactattgagatttctacttattatcagtatggactcattttatactttgggttataattcagtactgctttgttactcaaactgttctaatggcttggccattaggagctc

SEQ ID NO: 111335 - DNA, 1090 bp, Homo sapiens
agttttattgaaagctaaaaataggttctaaagtaatgtaaaaatataaagcacaaatatacttgaatattgcttaaagaattgtgtgaatagcaacatatattatggatatatactttgtgatatttttaaaaaataattttttcaaagaatgtataagctgcatatataactcaggagattccatgtctttctcatatttcagaggaaagattataaaatataaaatttcttagagaacacctctttgtcagagataaacaagaacaaatactctaaacttatgtgaacagttttgagtttatgaattctagaaactaaaatcaagaatacagaaaaatgaaaataacattttacttctgcgcttctatgtttgggaaacattgctctgataaaaaatagctgtcattatgcagtgtgtatattcaaatatgagataagactatgtacacatccacttttgttaataaactcaatattgaatactttgggatgttaaattcattggaaaaacaaaccatttgtaacctcagttaactttaacaacaagcattctgagcaaatgaaaagtgtcttgttttatttttatatattgctttattttaaatgactccaaataactcagtagttatacgtaattatacgtaactcaataatacataattaataggtgcttgctatttgcaagccatatggcttattagagcatcagactattctttgaggcatccggagcaattattactattctcatcatacagatgaggataggcttagagtgttttctgagtgtgatctaaacagtgctactcaaaatgtgtctgcagagaagtgcttgtctgtgaactgtttgttacaggtcagtgattcaataaggagcttgggccagaaagtgtatcagtatactgctgtcttcatcgagaaattttggttttaaaaaaattatcagctgaaggaaatagtgtgcttagtgtggtagttaatttatcttcttgtgcaagttatttgttatgatgggccagtgatggtttgtagaacagcacttcgagtagcactcattgtgaagtctcttctaaatttcagctttcca

SEQ ID NO: 111336 - DNA, 1338 bp, Homo sapiens
tcaggaagaataagtgagattgactttatttatttagtgttgtgctacttaattttcacacattcagaaattttttggttaccttttctcattagtcataacttcattacccagtaataaaaatataaacagtattatttagttctttgagatctgtcgtggtttgccaaatggctcagaatatggtacgttatggtgaatgttccatatacatttgaaaataatgtgtacagttgtcaggtgtagtattctatatattgctaaggttaggtagaatgcattttttcaattcttctatatcctcattgattttttttcgtttctttgtgtcagctattgagagttgtattaatacctctaactgtgaatgtggatttattcatttcttttagtattgccaaattttgctgctttatatattttgaagctatggtgttaggtgcagagggatttatgattgttgtgtctttctgttgaattgcccttttactgtcgttctctatttcttgtaatgcttcttgcctaagggctacattgtctgatatattaatacaagttgagtatcccttatttgaaatgcatggaaccagaagtgttttggatttcggatttttttgactttgcaatgtttgcattatactcaccagtgcagcatccctactcaaaaaatctgaaatctcaactattcaaatgagcacttcctttgagcatcctatcagtgagcagaacttttcctgttttgggatttgagatactcaccctgcgtggtggtatcagctttggtgttttccaggtgtattcatttccatgctgctgcttccatcagtcctttttctttactgtatattttgcagaaatttgttaaaacctattttctggttattcattctcatcttactcttttttatagttacagaagtatttctctttttcttttactgttgctttaaaagtgtgcaaaaggagagtggaattgtgtttttacattttaaacagaaagccccttttgcctgtttttatttttatagatatttcagcagttgaatcagttgaattcacttcatcaagaaactatcatgaaatgcgtgaaaagtaggaaagatgaaatcaaacaggctctgtcaagagaaatagttgctatttcctctgcacagctacaggattttgattggcaggtaaaggtaagagtctatgagtatgtgtattttttatttcattttttggatatagagaaatatctttataatatcatatatataaaatttgttattttgggaatgtattatcccaaagaaatatcaaagatagtttaaattacatcttgaattaacttgggca

SEQ ID NO: 111337 - DNA, 1050 bp, Homo sapiens
ataacggtagctattatagtttctttgccattaaataaagtcatttccatgacctttgtcattaaataaggtcatttccatgactttatttaataactgggatgaagtgttcattacatatttgtgaatgaataacaaacatattccaaaaaagataatgcttttatttttcagtttgagttctgggttttttttttagcatggggacagtataggataaggtgtagagaattttgaatggattcaaaattgagtatgttgatttatggtaaataaaaattcagtttgtatagtatattagccaccatttggaagcagttgcttgtgttctggcatgtgtggtgttagagggaaggagttattagttaaaatggggtggaatatgattatttccaagttatttggttcaaatactcctcttgtaagatacaaataacttcaagaaagataaccttattaaatgttaagtgcttagaatagtactggcattgtgttatctcagttaatagatgctgaaggcatgaattggaggaggaggactagtgataataattagaatggtaacgagggctagcaatgtctacatgtctttgtacatgccaggaagatgccaagtgatttgcacgtattcttattccatccttacagcaagattaagagaatagatgatatcctcatttaacacttgaggaagcagactcagaacatttaaataaaacttgaaaatactgaaactgggattggaactggatagttttattccaaaatccgtagtcttaatcactatgctcagttatacatgtgttaggctttctgttgctgatattaagatactaataggatagaaaggaaagtaaaaaaaggaaaaaagtactggagactttctgggaatacagcaaaagtaactgctgagctgggtgcggtggtgctcgtctgcagtcctaactacttgggaggctgagatgggaaaattgcttgagttcaggagttcaaggccagcctgggcaacatagtgagaccctcaaaagaaaaaaaagtatgttgtgaaaa

SEQ ID NO: 111338 - DNA, 1332 bp, Homo sapiens
tatatgggagcctttagagagttttaagttgtgaaattgtcaggatctaaattaggttataccaggactagactgataatggtggatcaggttgattgtaataaaggtgatgagaagtggtaagattctggatatagtttaagggaagagtcaacagaatttgcggactgacatgatgtgagttgtaagtgaaagaaaccaaggatgactcaaaagtttttgggctgagcatctagaagaagggagctgccattagctgacagggctaatataggggagaagcagtttaggggagagtgcttggacctccatttgcacttgttactgtctggagatgggctgccttttgggcatcagtctggagttttggaaagaggtctatgctaggggaacttgtggaagttctctttggatagctttggtattctcagaaaaatagaaacaaggtcatcaccaggaagaaagtcaggagggagatattggatgtaaagaggagaaaggaaagggtatgaaacagttgtgtatgagagtgggagaatacatggcgtggaaatgcagtatgattgcaggcagtgtgaatggccaacttaagagtttgcggtcaggacgttaaagtgactctgacaaggtgttgtgcatttctttccagccactttcaacctgtaggtactggaacagagtacatagagctttacatgtgaatgtaagcagggtgagggttttgccaagaagtgagagaggagttcactggttgagagaatatacaaggaagtgattacagtattaaccataaaatttgaagtaagtaaggaaataagaccacttgagaatatggggcagtgaaaagatggttggtggttgtttatgggtaggatcagtgatattggagttgggttaaaagtgagtcatttatttgaaagtaaattttatttgcatgtattgaattatagttcaaacacatataaagtcctctataaggcacagtaagcagtaaaaatgggtaacctcacctagtacaaaatgaatgttttaaaagtaaataaatgcaaatatttaaatttatttaactttattttttcaaatgaagcatgcctttagcgtttttctctgaataacttaactttaattttttaataccactcttctcctattctctctcccaaccctcacattccttgatgggttgccagagctatatgccttctgccagctcttattcaagtgttactgccctgtatcagagccctctgatagccaccaaggctctcattccatatgagatatctggattaagcttaagtaactacttactaagctgtgccacttgggtga

SEQ ID NO: 111339 - DNA, 1130 bp, Homo sapiens
cacaagctaaaagtgaatgcttctgttttctcaaaattagatcttacactcctacttctaatggcagaaaagccagattgagccatgcaaaaggaaatgggatgtctttatgttcttttctataaaattcagtgatcaacagacatttatatatcatctaactttggccaagcactggacagatgcatagagaggaattaggtatgttcccgactttgaagaataaagccatctgtaacacactatggcaagtgcatatgagccatgctcagggttctaatgggagcagagcagagaacaccttatggtgtctgttgtgtggatccctcccaatctccctcattccgtggtcaagctaaaacagtctcaaggatgaatagaggctggtgtggtgagtgggtgatatggttaaccagccctccagaaagagagggcagcatttggagaggtgcaaagtgtacactatgctttgcaacctccttaactcattgggagtactaactaaattacatattcatagaccccattccagatcctctaaatcagaatctccaggggagaggctttggagactgtgactaacaggggccccaagtgattcttatcagggggtcttgggcaacagaggacaagtggaatacagttcgttcatgaacattgttgggatgagttttggagagaatggtgaagaatgagattaggtagtatgaaggtcactttatgtcatgcctgtctttttgattgttcggttttctgtttgtatcctacctaatgctgctacttctcaggcattaataggtacattgaactgagcatttacttggacaactttaaattgaaagctttggacctaagcccaatgtataagattcccacccttgacttatctgtggcttgagaaacacttaaacaggagagtggggaagaggatgagcattgtttatttatagcatgtcccttgactattaatcgtgtttcattttatttgttagaagactgagtagctactaagtagtacagctaatatttgagcctggacttacagagtagaagaaatgtgatttgtcaaaaagtggtgagcaaagtgctcattccttcatttaaaacgggtgaactgcaaaatgcagggt

SEQ ID NO: 111340 - DNA, 1687 bp, Homo sapiens
aaaccttagaatatcattctagttgatatataacatatttttcattttcataaccctgtatattacttaaacctaagacatgtgacatcatccttgacaattttgatacaaatctgttgtggaatgatgactcctcccattcacgtagcactttccaattggaaaggtgttttctctttaccagaaaagatattgtaattcacatattataggttaggaaatgacttgactgtggtttagccaatgtcatgccaatgtcaagtagcagaccaggggctgcctctgggggtcttcttactcttgctttagtgttctttccatgaaaccacgcgcattttaatttcaaatttttcttactgataataggaggaaatagagctctgaagccagtgcagatgtcagatgtttaggtgaaacagtgacctaattcaacttaatatctcattcatggacaatctcctgtgagtttaggcactgaaggaaatggaagtgtgagtgccactcctctccttgtggagtttgcagttgtgctagggaaacacaatatatacatatataaaacaaaaagacatagggaatgcaatgagtgttataaagggctgtcaaatagaatgaaagcctcaaaaagagaaataataatggtaactggagcaatagaaggggaagtgacatttgacttaataacagagggtgggtgagatattcaaagcagaggtgtgagcaaagcatatttcagatggaggaaggagtatgaataatggcataaaggcagtagcataaaaggcttgcttgaagcctgggaaatagtgttctctgacttacatgtaacatctgtgctgaggagcaacaggaagtaaagtcagaaagatagatgtgacccaggaaagaggtcttgctatcaggataaagagttgagggccaagtctgcaggcacaattaccatgcttacgtcagtatttcactatggaagcagtgtggtgggtagatgaaaagacttagagatgatggcagagaaaacatttaggaagacattgtatatatcccagtgaattgtaatggagacctgaccttggaacaatgtgggaatgaaaagaagggtgatctcttacagatactgtggatttagtgtaagacattcagtgaaaggagtaaaaaagatgatgtgaacatgttgagctgtgatgaccagaagtactaacagaaaaatgaaaaacaagagtaaaaagaaccttggctggaagagtattttgtttttgtaaatgtattcaagacgccaatgcaagtaaagagattctccatattctttagtcattccacatacattcattctcatcattcattctatatatgttccatatgcatttattaaatagtggctatgtttaaaggacagatttgaatttgttgaattaatggctatgtagccctatgtgtgtttcattcttttatggagtttggaatctagtgtacccaatggaataaaaacctgaaacagagttcaaggttagagctataggtttagatgtggtccacctggaaagaattgaagccacagagtagcagaaagggttaagaaagaaattttcagagtaaaaagatttggaggtgacaaaaaagaagtatatatagattattcttttgagaagtttcatggtcaatggaaaaatatgttatcaaaatgtaatgg

SEQ ID NO: 111341 - DNA, 1003 bp, Homo sapiens
agaaatctgtacaccaaagccctgcaacacacaatttacctacatagtaaacctgcacgtgtaccacctgaacctaaaagtctaaaaaaaaaaaaagaaacaaaaaacaaagcaagtaactgcaataaccaaagtaaatgggccagagatttgaaaactttcttgtgaaatgcctttttactccaagtcaaaaacattcaagggccatgagatttatttttatatccccacttttgctgtttaaaagtgaatttatatgctgtctttcttatagagaacattccaacaaagaacgcgtgggtctcagtaaagaaaatttgttgcttagaggatgcaccattagaaacacagaggctgttgtgggcattgtggtttatgcaggtcggttatgtttctaattttcattgtctactctgtgcttttctacaagttaacatttttcatttactcaaaaatgcaatctgttgaagcagaaaggaaattttgcctgataaacttaattattggtctctgtttttctaaatggatcacaaaagcagattgaactgacaaaatagatcatgtaactgtgttttattaaattgtctgcaagagagatttttaaatatggtattcgcttcttggctttaatttgtacattttctatcatactgcacatccttcataggccatgaaaccaaagcaatgctgaacaacagtgggccacggtataagcgcagcaaattagaaagaagagcaaacacagatgtcctctggtgtgtcatgcttctggtcataatgtgcttaactggcgcagtaggtaggtaaaatttgattatttgctgacatcttttcagcaagatattaaagtattttatttcaaaattatatctgtgaatatttgactttggtaaggtggattttgtcagtagtgttttacctcatatccttgtctctttcatcctttagcctgaaaaatattaatattgactctatccatttacgttttgccatagtactgaag

SEQ ID NO: 111342 - DNA, 1494 bp, Homo sapiens
tgggaaacattccgtgttgtttaggcagattatatgatgagacttgcagagctgggaaagatcttaaagtcaccgaatccaaatcgttcattctgaaatgtttcattctgaaaacaaaggcccagaaacagcaagtgattttgctgaaagccacttagtctttgaaaaagttggtactggaacctaggatcaccacatagacccttagcctctccttgtccttaaagaatacagacaaaaactattacaaaaaaatagaatgtgcaaacattcttcacttcatagaataacttacccaaagccatactttatcctatagctaaatagagaagactggcaatccaacaagcacctatttatcgatggtctatattccagacactggatacaatgctgaacaattcacataaggcccctgctctcatagagtttctattagagaaaatattcacaaatatattacttttttaaatcaagaaaaaaattagcgataagtacttggtagaaaattaaaataaggtggtataatataaaatgattggatggccactttgaactggagggtcaggcaaggcctctctaagtgggacatggggcttagatctgaatgacataatcttgaaattccgtaggaaaggcttccagtcagaaggaacatctagtaaagaagccctcaggcaagggtgagcttgttacttttcaaagtaaagaaagaaggccagtgagtctggattttagtgggcatgtagaaagagaagtgaagttagataggtcagcagggctctgatcatcttgagttatttaagccaggatagggagtccagattttattctaagtgaattgtaaagctactggagtgttttatgcaggaagtgatctgatctgctttatcttttaggaagatcactctagctactatttgaaaaatggattgcagaggggcaaggagaccagttatgagactattgcactggtccagttgagagatgatggtggcttggactaaggtaatggatatggagagaagtagagttatttgagatattttttggatgtatggaggacagatgttagttatactttgaaaataagaaagaagataggaaattaggaggattctagatttctggcttaagtaactgtgtaagtcgttaagtttgatttacaaagatagtacctatcaactgctgctttgaagtctgagattatcatattggcaaaacagacagaattctctgaccttttggagattgtattctactggatgattcaaaaaataaaataaataagatatatatgtgtagatggtggtaggtcttggcataggatctattataaattgtgtggtcagatctgggaagtcttcacttcccagtgaggtcatttcaaagatgggaccagttgagatcaccaaggaagatgcaggtagagaaggaaggtgcttctgcagctctccagtatttgaggactaaaaagaagagacagcaggagaa

SEQ ID NO: 111343 - DNA, 1045 bp, Homo sapiens
gtgtcagtgaaagagggaagaattgtaagggtgaagtcattgagttcagggaggtgagattcagatgacaagtggagaatttggtgtctgaaacagagatgctttgtccacagtaggaggaggaaaggccgagagtatgagtaccaatgcagataagtaggtagatttgacgatggaaaaagaagggaattttgatctgattgcttctcagtgaggtataaggtaagttcattgaccaaggctatgggaggtaggccttggcagccaggtttgaaaggggaggagatggtgtgaaatagctgcttaagtaactgcctgatatattcaacttacaagtggctcttctcagacattgactcagtgtgctttttatcccacagccaggaggttggagtcctatcaggaagctgtctctgaagatgaagattttatagacacagtcagtggttccctcagcaatatggcaaaaccgagagcccccagctgcaggacagttcataatgggcctttgggaaataagccctcaaatcatcttgctgggagctcttttactctaggaagtggagaaggagccagtgaagtgcctcattccagacaggctgctttcagtagccccattgtaagtatgaatgcatgactagagtcttgcacatccacaatgtatgatgagagaacagccttgtaattatgatagagtcaaactctgttgtcttttctaccttagaagagactacatgattgcagctcagcaagatcaccacacataattagaagtataaacaaacaatatcacactagtctacttttaaaaaataactcaatgttgagaggtagtataccatttctgaaaaaaaaaaaggagaatatttctggccagggctgattatgtgtgagcctgaagaaggctgccttggtttaagaatcatggctcactcttagaaccagcaaagcttaccagagttatctcgtagtcagataagcaagtgtaatttatagggacattcataggccatgtggtacattgaaggcctttttattgctctgt

SEQ ID NO: 111344 - DNA, 1179 bp, Homo sapiens
gcctcgaacttcccaggatcctggctcttctcaaattgtcaacaaatgcataattacagcaactggagtgatcattttagtccagctcatttctgtggcactaatataaaaactattatattatatcttagccatatgtcaagtgattccaagacttaatatttctccaacttttgaaatggaagaagaatgtacacagttcattctgtgtactcattataagcccatatcggaaatatatttttcttctatttttctatcgatatattttcttctattttatctttttatctatccttgtattgaacttttcattttccatccacctgaaagtaagaacatgttggctcttgtttagacagaagcagcacagtttggtaataaggtggatctgtgccacaccttattggtttcttgatcaaacctcaccctattcgtggaacaaatgattggttatttcttagtttaaagtctttgtccctttatagataaatttacctcatctaaaatatattctctcttcatatactacctctatccatcaaatctggtgaaatatttatttctttaagaactaaattaaaaatatcacctttttctgaagacctctcagattctcttctttcagcatccgagctctgtttacaccgtccctccgtccctccgtcccttcatccacatggcattggtcttatttctgcctctggcaatccaccattaactccctgagagaaggatttatccatcttgaatcaacatctagcacaaaggctggcatgtccattctcaataaagtatttttaaaggttgttgaaggaagctacttaccaggctgtcttttcatctgggccattttcttttcatttgccttatactccaatgtcattgctgattatgtggatgctcttgtgctgctgttactgttgtccttgttttgtttgtgttttgcaaaaccatacccctaatatatagaataactaggttatggtcttcctcaatgtataagattatttctcaatcttggtctaaacaagttgattttatctttttgaagactaaagattattttgagaaaactacataatatttgatctgaaaaatgagcatctgcaaatatatcatataaaattctaaaagcccatctgtggagcccaggttaagaatgccagcttgagggca

SEQ ID NO: 111345 - DNA, 1079 bp, Homo sapiens
agagttagtattcatcaagtgatggtgaataaatctatgaccgaggtagaattctgggctcaataaaatctacctctgctattatgtatttcaaaatgagaaaacactcaactagatttggtgaaaactaaactcctgtttagtttaatagttaagagagtctccattgatgaggtgcattctggattatccatttgtttttatatcttttattttcctattctcacttcccatgacacgatatacattacaattgtttttagaaaaataaagtttaccatctcatgattcatttagatcctggctatacaagttatttctcatgttgatttaaaactaatttttatatacttcttataacaacacactgtcttattggatcttcaggaaacagacgtggtaccagacaccaggcttttagacaaatttagtcagattacacctcggctctttatgccactagatgagaccatccaaaatccaccaatggaaactttgtacattatcgactttttcattgcattggcaatttgcaacacagtagtggtttctgctcctaaccaaccccgacaaaaggtgagtaagttctctaatgcaaacaagggtcactttccagaagagaattttgggtttaaatgtatctgtactgagcttgatatatggataaaaatgataaataatagtagctgtataacactgattcagcatttgttctgtgctctgcacttaccatggtctatgtcatgggtccccaacccccttggttgcagaccggtaacagtctgtggcctgttaggaaccagtctgcacagcaggaggggaggagagggccagtgagcattactgcctgagccccgcctcctgtcagatcaggggcagcattagattctcataggaacgcgaaccctattatgaactgcatatgcaagggatctaggttgtgccctccgtatgagaatctaatacccagagaatctaatacctgatgatctgaggtcccacccaacccgtctgtggaaaattgtcttcacaaaactggtccctggtgccaaaaaggttgaggaccgctggtctaagtg

SEQ ID NO: 111346 - DNA, 1052 bp, Homo sapiens
gactctgtctcaaaaacaaaaacaaaacaaaacaaacaaacaaaaaaaacatcaaaaggtatgaaaggtgctgctggttacagaatccttcgaactaaacagtcctgataccactttctcaactgcaccattagaatcaaactggatttaactgtcaattggagaccactcccaactgcatactttctgatttaattaaagacattaacccactgtcatcatatatggtgcctagaatttccagagatgctgagttaaagggtcatccatcatcagtgttgcactagtctgaccacagagtttgggaagctagtgtccaggtggtgtgaggatatggatctgacatggctgtgcccagagggaggaatatgtaaaacaagttgatggtttgatattttgccagaggtcagtcctggtattcccacaagatcatatggcttgcttcatacctctcttttaattcttcccgtaggtcatgagtgacactgaatatgcagagtggctgaggaatcattttttagctgaaaccagcattgacaacagggaagaattactacttgaatctgccatgaggttggagaacaaacttacattacttggtaggtgaattatgtttgtattgcctgaatggaggattttgaaaaacactggatatctttgaataagggttattttcttccattgttatctaataaacatatatggttctgcctaccctgtccagtctgatctctatccaacttccaatccattctattctgttgtccactgcagtgaactagacttcacttgtgatggggtcaggatggtcaccccaagaagatcatgtaaaatccaacacttaacatagactacaaagccaagtaaatgttccaataaatatcttggttcaaatcaagataaatatcaagaatagagtttcttgtcaggcattggataaggtgcttaatacgtgttatcttttttttgaattctcacaacaaatctctatcttatgtagaggaaatttggggcacagagcagttcaatgacttgttcaaggtcacatgcca

SEQ ID NO: 111347 - DNA, 1395 bp, Homo sapiens
tcccttcaatttacagataagaaatctagccaaaaggagaacgagtaagtttgataaatccattgatccctgaggcttccttcccaaaatattacattgcatataattttggtctgggtcgtcaaacctcctttgactctcctgagcagctgggcagtttatgtagtgtagggttgagttggctaacagatatgattcaactgtagactagctgagcttcagctggctttggtttcttacaagtcctattgcactttggttattttttaggtgctactggcattgaagaccgtctgcaggagggagtccctgaatctatagaagctcttcacaaagcgggcatcaagatctggatgctgacaggggacaagcaggagacagctgtcaacatagcttatgcatgcaaactactggagccagatgacaagctttttatcctcaatacccaaagtaaagtgcgtatattgagattaaatctgttcttctgtattttcaaaggcattggaacatttgagatttgatgtatgcaaggattaaaaaaaaaacaaaacagcaaccgttagctttttttgttgtttgtttgtttgttttggtttttttgagacggaatcttgctctgtcacccaggctggagtgcagtggtgcaatatcttggctcactgcaacctccacctcccagattcaagcaattctgcttcagcctctcaagtagctgggattacaggcatctgccaccacgcctggctaatttttgtatttttagtagagacggggtttcaccttgttggccaggctgatcttgaactcttgacctcaagtgatccgccagctttggcctcccaaagtgctgggattacggggtgagccactgtgccctggccagcaaccattagcttcttgataattttttctatccagaaacctaccttgtgcttggaaggatgtctattcttctaaaggcctgatggaaaattataatgattcagaggaatcattgctgaataaaggcattagaagaaagttttttttttttatttgctttcccccctccacactggattaccagggatctgacaggacttagcccaaaatgagaaaatatatcaagtcctggtacaggaatctacctcccttttaagataagaaaaagtgatagtttttattgaaatcaggtgaataaattattaaatattttatggcaattctaaaaatagactcagggaaatcgtgccctcttgtggtaattcctaggtagtgctcccgagaatatcataagtttgaagaactgtttaagggaagaggaaaatgtcattttttaaaaaagaaggaaatttaggaggcttagactcagcccagttttttctatttttgcctcccgctaatctctaacaccaa

SEQ ID NO: 111348 - DNA, 1036 bp, Homo sapiens
acacatcacagccttttttgcttggaaacactgcagcccatgattgggagtcattttaaacagcaaaatcactgacaaaaagcagaaagatgcaaaaaatatggcaccaaatagcccatgaaaagaagactttgctacagtttgagaactggcaaaagaaggcatcatggtgttcagcttcagctgggaatgggcatatcacatgacttaaatgtcactctatgcatgtgacactcaaatgtcactctatgacatgtaaccacaaaaacatctcaagtattgtgaaattacagataaattttatcaagtaggagaattcacaaatgtggaatccacagataatgaagattagctgtgtgtgtgtatgcatacttctgttatttttataatgaaaaaaatagttaatttgtaaaacctaaacacatactcaaataaatagaagagtacaaaaccctttataatcaatttataatcataaaactacaatttaaaatcatattttggagaatatccacacagactgtattctgtatactgtaagcatattggtgccacaaagactatatttatgttattgtatggtattgcagctgtattctttcaattacaataccttaaacacaatctgatgttaatgttttcaatgattgcgaggcatgttactttctaaatgtgccattttaatttaaccaaactccaaaagagttttaaaaataatttttactatgatgtaatgagctgtatgagcatatctgattcatctttgtatactttgccttaagggctttggaggtgtatgggatcaaattcattcctaaaatggagccctgtgaacactccacaagagtgtttatagtttttgtgctgtttcatgtgcacatgtccatatctacttcttccttgcttttcttattttgttgtaggttgagaaatgcttgataaaacagcatttaaaatcaaagcaaacaagctttgagtgagagctctttcacgaataaactatttcagacttagtgtataaactaaacttaaattc

SEQ ID NO: 111349 - DNA, 1079 bp, Homo sapiens
cagtggggatagtgctctgtgctctcaagtagggcagaccacaggaaaggacattggtcttagatagagggagttttgtttcaagaggatttcatataaattttgggattaacattcagttgattacacttaattaaattaacattcagttaattacacttaatttcctgacctgtaaaatggcaacaacaatgtaattcccaggttgttatgatgattaaatgaattattcctaaagcacttagaacaatgctagcaccacataataagtggggtgtgagtgtgtgtacatacatgtgtgcactttaatttaataaaatatttaccaaaaaaagctgcaaggtaaattgtggtcctatcttatataagaaaactacagagaggctgaggtcacccagctcaaaatggcagcatttggaatgtgtaatcatagcacacattactgattctaagatctgaatgtccttctttgtgtctctaggcctatgtgaacctccttttctggtaccagttcttttgtggattttcaggaacatccatgactgattactgggttttgatcttcttcaacctcctcttcacatctgcccctcctgtcatttatggtgttttggagaaagatgtgtctgcagagaccctcatgcaactgcctgaactttacagaagtggtcagaaatcagaggtaggtgttaaagcaagagtgcttggatggatgcatatccattgtcaaagccagtgtgttttcttagttagcaaaatattgcagtctactcagaactgtttgaaatatctgattgttttaaaagatctctacttatgtggcagatattcacttacttaactttgaggtaaatacagattaatctatgaagggccttatgtacttagaagaagaaatctaaagtttgaatcttacaaccaataatatctaacatttactaaaccccattgccatctattgtgctaactacttaacatcccccgtctgatttatcttcatgaaaacacgttgagacagaacctagtgttggtcccattctaagatgaagaatctgaacctcaaaggggttaagtaattt

SEQ ID NO: 111350 - DNA, 1078 bp, Homo sapiens
gagtcatttagtgtccttacactacctagaacaaccaacagagaaatcacagattcagctttcaggaaagaaggggtccttataatcctctaatatcatccaatccattcagaccaaggaactacatgggttttcctaaaggagtccagtctgacttaaagttcaagccaggatgcaagaacatgtggttgatgtcagagaagtttgtcccacgccccaggcataattgaaattccaaatccacttcggaaaggagggttgagggagattttcagtcaaagtttttatagcctgtgttttaaaagcccatttgtatggactaaagattgttatttgtccttatccttgggagacgtgagatcattgtttcctgttgttgaatcctctcaccaatccttgtacacgctgttctagtgagctggccagttatataaaacatgatcacagcaggcagattttcccagcatgtagctattgataaaaggtaactgatttcattgactttaccttctaaaatttgtcctttctttgaacttggcctccaacaaaattatgttttatgcttgggtcgttttcctgtgttcagtgtcatgaaatatactctccagagctacagaatctctctcctctaaagatgagtctggaagtctgcagtcagaagcttcccttccacgaagcctcacccccatctctcatcacccacaatcttcttttttggctttggcttcatgtccagactttcccctttcaggttccagtggaccccgtgagttaatccctccagcctctcatttatcttaatcatgatccttctctctttacttttgtaagtcctattcctcatgtgactgtgggaaattgtatttctttccttttactctaggttctttgagcaacctctctctccccagatgcatgaagttatattttaacttatccctaagtggttctctcttgtccagtggcattttgcttgcccctttgtctctggcacattctcttccaccattggattgggcttctgctgagattttatggaagaaaggcaggcagaatatccttcatatccaatgaggaa

SEQ ID NO: 111351 - DNA, 1064 bp, Homo sapiens
aaaccatctggctgattttggaagattggattgagaataggggaggaagcaaagagggcagttagatggctatccagccattcatagagacaattgatggtgaattggaatgaagggagtaatttagagaaagagaaatggatagagttggagaagttttgaaacagtactttctgatcagtaggaaaggagaagttagtactaccggctgtatttcagctagatttaaaatttatcctgtaataaaggcaacatgagttgaataaatgttccttcaaggatttttttcatcatgtttacttgtgaacccatcacattcagttacccttatctttacctctgttgacaaataccacttgaagaaatggagctttctctcagagaaacaaatgtaagtactggcttgtgttgtttcttttcttggacccttgttaatcttactacctccccgttatctgcttcatttctaggcatacttaccccataccttctggatcaccttattggatgctttttatcaaagcctggtctgcttctttgtgccttattttgtgagtctttgttcactcagtatatttgttattaatgaatcaatgatgcttctttgtactttgccaccaatttcagcataaaggagggcagattgctcatataatcaggttgattattaactgactaaattataatctccccaaaaatatatgttaggtaatggattaaatttagatagacatacatagtttgagtcctcttaggcctcttgttaactctgtactgcttaaaaatttttatcaatgacttgaacaaaattggatgtctggctatataattagattagtcaaaaatcagacaggctgggcacagtggctcacacctgtaatctcagcattttgggaggctgaggcagttggattgcttgagttgaggagtttgaaaccagcttgcacaacatagtgaggccaccatctctacaaaaaatttaaaaattagctgagtgtagtggtgtggacctgtggccccagctatttgggaggctgaggtaggaggattgcttgagcccagga

SEQ ID NO: 111352 - DNA, 1725 bp, Homo sapiens
ttccataagggacatgagcattttactaggcttggaagagctgacatgatgagcattattgtatgtttgtatatacatttgtgatagagggctagagtttgacctagagagagtttaaggaagtgaaatatttaattcagaaccaaatgcttttgtaaaactttttggattttgtaaaagcattttcattctcttagaaattcaagtattttcaaggggagtcatttgagatatatttattttactaggagatcttatattctagggaaatgctttaaatggtcaggctccagtcggaatttttttaagaaaaaagtagtttttaatacattggttaggactcagaggaaatacggaaaaaacattgtagatggttaatttacagataaaatcccaagagccttttaaacaacaaggtacctaaaatagggtataattatactgcttaaaatacagttagtgcctattaatagctttttatttcctatgggaagatgcttttggtcttctggctgaagatgtaggcatacctctcactcatttcaatgttttcctgaggtggagccttcattggaaaggggaaagagggattctagggtttcatcagggaccaggaatgcattcctctgtcaggttccaatcaagagaagaccttttatgagatctgcctctgtatagatgttgtcagttaggaaactgaagccataggtcaggcagacatcagctcagcctgtggcccattgggtgatttcctgtattttaaaactgacagtagcctgatcaaagtgatacaatcaatttcaaaacaatcttccagagaccacttgaaggttcatagtttttacaataccctgagacttttcaggtgttggagcctctaaaatatgagatataaacagaaactaatacaagttgttctctggaggtttctatgaggttcttagaaaaatttggttttaaaatcatttgaggacaggaatgtctatagcaagtttactcctattgcgaatcatgtatgctggctttagttgtaacaaacgattttattctaagtaaggccaggtgctactataaaatcatatattcctgttgaagttcttttgaagtcctatctctatttattatatttgaaagttgtcagccaccagtcatccagaatttccttcctgaatctccatgctcatatgcaatgtctacatcaaggtcttcttaatgactattattctcagggtttagttttctaccttctgcctactattttggtctgacatttttgtagccttctgttattattggaaatagtctcttacataagctgatttcgagaactttcaaaatctcacatagctaatggaagttgctttctgctttcttatgactgtttttataaataaactgtttcataaataatgtatactggaaaattgtcatcactcttgtaaacatttgccaaatccaactgtaattagtaccagaacttagaaggaaagtcacaaagcatgccttttaccagaatattgctttgccttttcttatatggaaaatcactgatgtcatatcatttattatcctcacagcagctggcattcattccctgaaatcgtcgtctcctgataaacaataatttagagatatgttcacttgtaaataaaaaggttagaatctaaggacaaagaatgatccaaaaatactaaggaaaaagaacaattttcaattttcagaaat

SEQ ID NO: 111353 - DNA, 1049 bp, Homo sapiens
gttcacgccattctcctgccttagcctcccgagtagctgggactacaggcacccgccaccatgcccggctaattttttgtatttttagtatagatggggtttcaccatgttagccaggatggtcttgatttcctcaccttgtgacccgcctgcctcagcctcccaaagtgctgggattacaggcgtgagccaccgtgcccggcctaatcagacattttaatatttagtatcatagtcagccctacagtttgaaatattctcttctgttatctcccagtctcctttctgcttacctaaaccctgaatttgttgaatacaatcagtagtggagagtagtgttttaaaaaatcaaatcaatatattgactatatatcattactattaaaacattacccaaattgatttttatgtaaatggaaactttcaaatcaatgtatgcattgaatttaattaaaatgatgctgtttttatttaggctgaactagaagcttttgaaaacagactgaagggtcgtcggaagaagaacaggaaaagagatgaagtggcagttgagctatcactatggcaaaaacataaatattatctcatttcagtgtgtggagttgtggttgtagtgtttgcctggtacatcacccatgatgtcaattaaaaaaagttttgatcttttaatgtaactcagattggatttagataagttgttaaatttgaaatattagaaaatgtatattatagaacatgatatatatttacattcatctctgtattctctcagctgttgttagaaggacagaatgttaaactttatcttaattagtatactagaaagggcagtataatactgttttaaagtgaaggcatgactgaaactaaaatatttcataaggcttagctagaggcagagtaacgtgtttttgttcattgggcttccttgtacttagttttttcatttaataattcaaaccaacacttttaaaaaaataattcagatgagactgagccatatctgcagtaagagaaatatttcttaatgttttggttacttatgatag

SEQ ID NO: 111354 - DNA, 1069 bp, Homo sapiens
aaacaagtaaaaaaaaaaaaaaataaataatacgcattttaaaatacagtgtaacacctatttacatagcatttacattgttattaggtgttataggaaatctagagtgatttaaagtatacaagaagatgtttgtgtgttatttgcaaatcctccactatttatgtagagacttgatcatcctcaggtttttatatccaaggggatcctagaaccaatttcctacagatactgagggatcactgtatacagcacataatatatacttggtgactgtgagtcaccatttaactgtcagttattttactgtgtctgtagtcctcaagtttgcctgcttttaagatattttgacgttttttatatgtcagaaactaaccacttgggagtagtctgacattttggctcattgaagaatgccactttgtattaaactaagtttattattagatctttttcaagtgtggtttatgaccacagtaatggatatgtgaactaaagtttacatttcctcctattaaataaccatttacaaagttttaggtggatattattaaatacatatatattttaactattgtcttaattacctatgcactatagcatattatattacattattatgtgtaaaagtttaataagtacttagcagtaggataaaaatccccatttgatattgaatgcaattcagttatcgtcttttagtactagtttaaaatttttatgtctaaaatagtcattttgattttaaagcatgaagaattttttcctttgaagaatttttactatttttaaaaaatgtatttggtagagaagaatcgagttctggcagcttttttctctttactcacttgaatttctttcttaaaagccactaatgtttattgcatgcattgtaaacaactagaattataggtatcttcattctcactaggcatcacagcacttgctagaagctttatagaatgctggttctataataattgggttgaagtataatggtgtcaatgtataagaccagtgtctatattttagagcatcctgatttaataagacgttttattttatttat

SEQ ID NO: 111355 - DNA, 1033 bp, Homo sapiens
atttctgtaggcatgcagtagtgtaattgcttggtcatagggaatgtttaatttcaactttaataatatcaaattgatttccaaaatggttgtatcaatttataatcagtaacttttccagttactgaaaagtatcagaaagtttttcaacttcccattgatgaaagttcttcctctttcgcatccctgccaacattttgtgtggtcagcattttttatttttgccagtctttttgcatctcattgtggttttaatttacattctctgattactggtgagtttgaatacgttttcaggattagaggtgttacttttgcctgtgggacatatgttggataccagcacagtgtacacctagatgagtttcagttttcctagttgcaaattgcagaatcaattttggcttacttatgggaaaaaaaggagagagaagacgttgtggggagtatatggaagacattggggagcaattcacagattctgaaggaaatgctatacagtcaagctttgggaaaggcaggatctctgcatcctaagggggctttacagtgagatgactacttaaaccaccatctcgctcttttaagtttttagattcccgagagagaaaacctaatagactcaccatggatccaagggctccttttggcacaggcagccacagtcagggaactagaacaggtagcatagccatggctgtggctactgggggaattatggtgaaccaggcagccatcccaatgtatgtcttctacaaattttaccagtatgtggcagggtcaaatgaagggtttagagaaaaaaagatacatttattgaaggcagaagacctagccagagaaaagacagactttgaagtcgtcaatgaaattgtgaagatgagtatgaggtcttttaggaggcagaaagatataacatcaagaccagtgatttttaacttttcatcaacccccagcgcaacagaatactgattaaagtgaaaggcgacactatagccatgatcctatgtattttcaaaaggtcttcctttat

SEQ ID NO: 111356 - DNA, 1008 bp, Homo sapiens
gtcttgggaaacatgaggtaagttacaggcacaatttttaagtaaagcttataatctatactgttacatactagtataactttactagagttgttagaaataacaaagtcaaagtattgttattttactgttataaagagtacaagagtttatctactaatttaaaaaatatgtagtgcctttatttgagaattagcctgtggatatgcattcactacagaatcatattgaattttccttttaggaggagaacattttgcttcttggcattcattactttgaaatattttgacaggttactttgattttgatattattattattcgtgcaaacttatacctttctgaaacttgttctcaaatgatagcagagtaattttggaaacatataatatgtccagaaacgtttgagtaatgtgtgctgtgctgatttcctttattttttaaggtgagtccactaccatgccatgctgtaggaccctactcttgtaaaagagtttgtggaagaatcttggattgtcagaatcacacatgtatgaaagaatgccacaaagtaaccaaaactgatggctgcactggaaaaaacaaggtaatgttcttagattgaatgtatatctgcccatagtattcttgaaacgttttttcaacagttataccataaatatttttctgttttgctttagcttcctgtctctttttttgccctcatcccttctccttcttttcctttcctaagacagctggccttagacagcttggtgtgtatagttctgtgtctttattccagctcataataatgtgccttttaatgtggaaccctttacatactgtacctgtgttaatacataggatatggttttatgataaaaatacataggttatgtatcttcttagatagtaagtaagagtatcacctccatttctctctgttcatatctgagtttagagcatttactctaagttagttttcaaacctgacacacaggatggatgatgttcataattttaa

SEQ ID NO: 111357 - DNA, 1034 bp, Homo sapiens
ttttgagactggatctcagttctgtcacccaggcttttcatggagaaggagtgcagttgcttcatcacagcccactgcagcctgcacctcctgggctcaaatgatccttcaacctcagctctacccccaaccccctagtacctgggactaggcgtgcactattatgttcagctaattttttttaattttaattttttgtagagacagggattcattatgttgctcaggctgggcttgaaactcctgtgctcaggtgatcctcctgtctcagcctcctaaagtgtagggattacaggtgtgagccactgcacccagcctttgtggcttttcattctctaaatgttcttttcagagctgtaatttttagtataatgacgtctatcatccatttttatttcatggattgtgcttttggtgttgtatctaaaagtcataattaaacccaaattacccagattgtctgtgttttatagttttgcattttacatttagagctgtgattcattttgagttaactgttgtgaaaggcttagggtctgcctaggttttttttgcaagcaggtgtctatttgttccagcatgaatcatttattgaaaagaatttcctttcttcattcaattacctttgctcttttgccaaagatcagtagactatgatttgtgtggttccatttctggtctctctgttctcttccattcatttatttgcctattctttaatcagtaccattctgtcttgatcactgtagctttatagtaattcttgaagttgggtggtgtcagtctttggactttgctttcttttgtattgtgttggctgttctgggtctgttatctttctatatagactttagaatcagtttgttgatatatacaaaataacttgctgggattttgattggaatcatgttgaatctggatcaaattggaaataaactacatcttaataattttgagccttcataactgtgaacatggaatattgcttcatttatttaaatctttgatttctttcatcagtattttgtagttgt

SEQ ID NO: 111358 - DNA, 1050 bp, Homo sapiens
taaatatttttaagccttattctggggcaaagttaagttactcaaaaactgtttgttctttcagaggcttgatatttttaagtgtgaccggaacactcttttgtttagggctaatttggccccattactgaggcagtaagtcttctaagtactctacttgatgcccaggtattagaaggtccttctattctggctgtaaggaacacagactttttcccagccttgtgtgatctcttgaaattattctgccttctccttccagtggttctttctcagcttttggattgtttcctctcacacacatacagaccagtactcagccaaagacccaagaagttctttctggagttcttcagagctttttctgtactgctgccttctctgcacaaattctagccacactggcctctctgaactacgaattttgcctactcaactttatgagacagccagattctgcttatgatcttcctccttgtgctatagccagaagtcttcatgtgtaagctgatagcattgcaagacttacctagtttgtttcccttctgttagggactgccatctgtgctgcctcattatctaatacctgaaaactgtagcttcatatcttttatgtggttttctagtggtttgagacaggagtgtaaatctggttgttgttactccatcataactcaaaacagaagtgtctattggcttattcaagtcatggaccacataatcttttcccccactggcaaagtgataggataggcacatagtattactcaataaacacttgtctaattgaataaactatattgcctctttttttttttttgagacggagtcttactctatcgtccaggctggagtgcagtggtgtgatctcggctcactgcaacctctgcctcccatgttcaagcaattctcctgcctcagcctccgcaagtagctgggactacaggcacgcactaccatgcctggctaatttttgagaataaactgtattgacttaattgctttttaataatgtacattttgtttttagctatttttatataatgaaac

SEQ ID NO: 111359 - DNA, 1051 bp, Homo sapiens
tttatttgtgattgaaaaatggattgtgtcttgtatgaagtctttttttgttaacttttaaatccttcattagtgtttattgcattttattttaggtatgtggaaaaacactgccatgtggtaatcacacatgtgagcaagtttgccatgttggtgcttgtggagaatgtcctcgatctgggaaaaggttctgtccatgtcagaaatcaagtaagacttgtttttttttatatttatataggaaatgatctgtcaagccatgaaaagacattcaaaagacgtcctccaggaaacttaagtgcatattactaaatgaaagaagccagtctgaaaaagctacaaaatttaagcccccaactatatgacattctggaaaggtccaaactgtggtgatcaatggcatccaggggttggggagagagagagagatgaataggagagacatagaagattttcagggcagggaaactcctccgtgtgatactataatggtggatatatgtcattatacatttgtccaaacctataaaatatacaacaccatgagtgaacctttatataaactatgacctttgggtgattatgatgtgtcaatgtaagtacatcagttataacaaatgtaccagtctggtggggtttgacaataggggaggctgtgctattgtcattattatgtaataggttataggtgagtttattttaggctgctttgagataaaggcatagtaggatggcactttgagtaagcttttttgactctccacaaataacagcatcatatgtataagactacttctaatacttgtcacaatatgtttatgttacaggtgaattttataattttgtagttgttacagttttttaagagaggtggttttatcctgtcgcccaggctggagtgcagtggtgtgatcctagctcactgcagcctcagactcctgggctcaagtgatcctcctgcctcagccgtctcagtagctgggaatacaggcacctgtcaccatgcctggctcatttaaaaaaattttttgtagagatgggctctccctat

SEQ ID NO: 111360 - DNA, 2362 bp, Homo sapiens
cacttatgtattttaatgatggaagtttaaagtctttcatggtatttgaacttttctttgacttaggcacattcgaattatatctttttttgggctgggcacagtggctcacgcctgtaatcccagcactttgggaggccaaggctggtgaatcacttgaggtcaggagttaagaccagcctggccaacatggcaaaaccccggatctactaaaaatacaaaaaattagctggacgtggtggcgtgcacctgtattcgcagctacttgggacactgaggcacgagaatttcttgtacctaggaggcagaggttgcagtgagccgagattgcgccactatactccagcctgggtgacagagtgagactttttctcaaaaaagaaaaaaaaaagaattatatgtctttttgtgctagatgttgagaattatgaaattctttattttcaagtttattcccccttaattctaaattgtagtcatgtttcttgcggtattgcatgtctataccctgacttctctcttctgtttgttgttgctaatatattttgtttatttgtaaaccacaaaacaaaacttaaaaagttgagctttgtgaaaagcagagtgaattcctcaataaagttcaggtggttagtagaaaactaatgttactttctttttgtagctgtattctagatatgtgctgtttaattcatggtaactagccacatgtagctgtttcagtatttagaaattataagaaatttgattccttcctcagttgtaagcactagccacgtttcaagtgctcacagtatgtggctaattgctactgtattggacaatcccagtataaaactgttccatcatctcagcacattgtattgtgcagtgctgttttatatggttgaaatagattttaataagatcttgttttttcactaacacaaagatggagcagagttccttaacataaaactaatttaacagaatatactctgttaagtatatttctgtctctcatgttgcttttaaaggtgaagttagctttaataattttcttcttctttgtagtccaaaatgtaggtttgaatacaaacgatctgaaacacctagtaggtactattgctattgtggaaaagtagaagatccacctttagatccgtggcttgtgcctcattcatgtggccaagtatgtgagcgtgaatttaaacctccttgtggccataaatgtttactcctctgtcatccaggtgagttatatattgcattttaaattgtttgtgggtgattatttcttcttatattgaggcaaaaaaaaaaattgtaaaagttgaattcacagtttagtttgccatgagaaaatattgaaagttattgccttttgtaaagtgtcagtaaagaaagttctagaaattattgataggtgtagaaattgaaagttttagtttctgactttagattttttttttttttttttttttgcttttactgaattctaggtccctgccctccttgtccaaagatggtcacaactacttgttactgtaagaaagcaaaacctatccctcgtaggtgcagtgccaaggaatggtcttgtcagctgccatgtggacagaagttgctttgtgggcaacataagtgtgaaaatccttgtcatgcaggtaaaaggccatacccattagatttttctgactttaagcaaaagtcaaagcaatctttattgcttttatgtttctgtgctaatttatcattctggttttaggaagctgtcagccttgtccaagagttagtagacaaaagtgtgtctgtggcaaaaaagtagctgaaagaagttgtgcaagtccactatggcactgtgatcaagtaagtttatatgcattttgaggggtgggtattaaagagtacagaaagcatagacaacctagaaagcagcaaggctaatcaggtttagttggataaaaggcaaggaagaatagcaactcagatgaattatatcatgttttaagaaactacttttaaatttaatatcatttttaattattagaggaaaaatttttttcaaagtaacagctatttgttgagttttggattcactacatttgtactctttcttgctagctcttgtccccttcttctctttcccctctcttcaaccagcacgcctccctgcttcttgaattaatccaattgaggaagtaagattgattttataggttgcttgtcctagaattggcatggttttaatgccacttagaactccttggtgaatggccatatggagctgcatgtagtttttttctgtattgtacttttaaaatatactttttggtgcataggaaatatatgtgtgtgtatacatatgtatatatgtatctatata

SEQ ID NO: 111361 - DNA, 1074 bp, Homo sapiens
ttattttaattttaattttttttgagacagagttttgctgtattgcccaggctggagtgcagtggtgcgctcttggctcgctgtagccactgcttgtcgggttcaagcgattctcccgtctcagcctccagagtaggtgggattacaggtgcctgccaccatgcctggctaagttttgtatttttagtagagatggggtttcaccatgttggccaggctggtcttgaacttctggcctcaagtgatccacccaccttggcccctcaaagtgctgagattacaggcatgagccactgcgtctggccagtggtgtagtttttaaaaacatttagatgtgctagttacttttagaagagtatgtaaaaataattctcagcaatctgtgagagattttattctcctgttaccagtggggatattgaagttaattgaagggaaatgacttctgactcctcactcttaagtagtggagccaaaatttgaaacctaggatttcttacttttaaattcagtgctttttctattcttccacctgagttatctcttatgacctggcttttagaaatattatttttcttttcattgaatacacactttttggaaactgtttaacatttcaaagtatatttgttttgctcctgcatattatttactggtggtggaggaattttagtgtctaataggtacggaattaagccaggttttagtttagagatttaaaccttatgtatatatttttttaccctcgctcttctcacttctgttttaagtagtcgttttgccacagaggaggaaaggatcagttaaaaaaaatgtactgttaacttctaatttaaaaggaacaacagtttaatcagctgtgccatatactttgcattccatatttcatatttttttaagaaaataaatgaccattctggttaagaacccattttgtttaatcctcatcaagatggagctagaacttggtaaaatgttaataattttaagttattttatggaaataaaaaatttaaaatataggtttctactaagatactgctttttaatgaagaagatctagcataattacat

SEQ ID NO: 111362 - DNA, 1247 bp, Homo sapiens
aagattttgaaggaaaacagggaaaaatacttgcaaatacgtttataacatacactactcagacaggtactgatcttttaaattttgacttttgacgtcaatgaaactgtattcctgacatttttttggtaatgcctttgttctatatggaatagattttatatcttaagatgagcactgtatgttatagagttgaatttttgtacactttggtatttgagttatatattgtgtaacactaatttttctataaagcaaatagaatggcagtggctcttttatagccttaggaggcctttgtgtgtatttaattggcatttcagtagaatgcttggatggggctgctaaagctcctgagcggtggactggggcaagttttttctggttgtgatgatttgattgaactagagtactttgtgtactcctttcaatctattcattttttttcatcatgttaaatgcgtcttgaagtctttttaattctttatttccttattttatatcttatttacaacatctgattttcatgtatttatttttagagttggggtcttgttctgttgcccaggctggagcgcagtggtacgtagtggtgcgtagttcactgcagtcttcaactcctgggcttaagtgatcctcctgcctcagcttcctgagtagctgagactacaggcatgtgcactgcacctagccgtactttttttaaaaaacctaaatttcctcaggtttgacatgtacattcgtgttatctgtggtttatatctgattgctcttaaagccacgtttgtttatgtgagagagggccaaagtgatgttgctgtgtaccactttagtattaagtgtaaaaatagattattttaaatgtaaatattattaaactttctgccttttatactttaaaattattattagaaatattcttgtatgtaggccaggcatagtggctcacgcctataaccccagcactttgggaggccgaggccgggggatcacttgaggtcaggagtttgagaccagcctggccaacatggtgaaaccccgtctctactaaaaatacaaaaaaattagctgggcatggtggcacacacctgtaatcccagctactcaggaggctgaggcaggagaattgcttgaacttgggaggtgaaggttgccgtgagctgagattgcgccactgcactccagcctgggagacagagcaagactccgtctcaattaaaaaaaaaaaaagaaagaaagaaatattt

SEQ ID NO: 111363 - DNA, 1128 bp, Homo sapiens
aaaataagcattatcatgttaacatctaaaataaatcaaagcccttcctggttctcactagctttattggctacaagaacgtgagtaaggatggaggtaagaaagcaagcttccaacttaattgtctttgttgcttctggcaaaagcctttaaaacagcaaattagattatttccaacttgatggaattgaaaaagaacaacaacaaaaaaaaaacctgagaaggaagagtggtaaagaaggaagtatttgtttgacaaaagtacctttaactttcaggctatattattattagcttgttatgcagaattgtcttgccttcttcatttcacgttggttagaagggattcatccttcccacctttggcagttcagatgcaggtttcaagtctgttctgtgttttaccaggaattattacagtgttatcctgtaattttgaggttgatcttggttgtaggttctttttccccctctctgattcatgctacattttcctttttaaatatgaacactttcactttctgtcctgcagagaaatgggagattaacccttcagaactgacctttatgagggaattgggaagtggactgtttggagtggtgaggcttggcaaatggcgagcccagtacaaagtcgcaatcaaagctattcgggaaggtgcaatgtgcgaggaggactttatagaagaagctaaagtgatgatgtaagttgctatcatctttctggctcatctttttgtattaagaagtggccccttaccaaaaacttggtagtttcttttcctatagtaactatatatatgtcttccttcccaggaaactgacacacccgaagttagtgcagctttatggtgtgtgcacccagcagaaaccaatatacattgttactgagttcatggaaaggggctgccttctgaatttcctccgacagagacaaggtcatttcagtagagacgtactgctgagcatgtgtcaggatgtgtgtgaagggatggagtatctggagagaaacagcttcatccacagagatctggtaaccctagccacccatattcccactcattggctgaattcctttgtaacactggctcagcaaatgtgcaatgatgtattaatagccaatttttg

SEQ ID NO: 111364 - DNA, 1083 bp, Homo sapiens
tcttattaaacaaaaattatgggaggccattgttttggactgagctcctgtactaggccccaacaaaccagaccaaacagaaatggagtcacccatgctaaatgctgcataatcaaactgaagctttaagggagcaggtagatccccaaatagaccattttcccccctgaaaacagaagattacagtctacgtgaatcagtttaataaggaagtcccctctgttttaatctttaccaaaaaaagtaacctgaagtaacttgatgttactaatcagctttttttttttcctattattctgtttccttgttcccaccttataaaatccatggttctgccctggcccagtgggagctctcattctattttacagagtagaggctaccctgactcatgaattgtgagtaaaagtcacttttactaaatttgttgtcattttgtctcttgacagtctctaaacatgctttacattgctacttcttgctttttcaattgtagatattatttattggtttcctccttcttctcctctgctaccttttcctccttctcctcctactaccatggaggaaatagctctctttcataaagtactcccccacccacacgggagcatacttcctgctctcacacccaatgtatttatattggtagtaagattatcactattgtttacctgattatgacggtgtagttgttatttgtagcagaactctgtagcatacctgtgattatttttccttttctaaacaattttttgttttcctttggaattattttgttttttaaaattggctaaattttactaacttattataaatcttctccccatacattcagttttgtttcctagaagaattctttggaagaacctccttacttgatccaatccggactggttgtactcttggccagctgctcagtgtcattcattttgggatttcccttcatcatctattgggggagggggtccctttacctctttcttatgttggaatgtttgtttcctaaattcttgtggtttttgcttttttggtttcctgctttgttttggtattttggctacatccccaagtagctttttg

SEQ ID NO: 111365 - DNA, 1027 bp, Homo sapiens
tgtaagttatcacttaccctgcttttcttatgtgggctggacttcaaggtacctagtggttgatgagggaaagttctttatagaacaattacagttaataaatgcagaaagaatgataaattagaaaatgactatttttgaaatattttacaaaatgatgaatctaagtaaaaatcatcagtggtttctaaaaccattaggtgaaagatagataaggatccttaatactatatctattgatgaatcaggtcaaccacatttgaaccacatttaattgatggataaccagacattacgtgcctcttgctgtgatacaataggaagtatagagcatcatatatagagtatccttgcctaaataaataaatcttaaaaactgaatcaaaaacaaacctctaaatcttactgtcagtttgtaggaaatactattctgtactcgctaaaatgagaaagtgagtctgaccttagcaagcttagtgaagatgtagaaccctggaaactctcacaatctgctgccaggaatgcaaattggcccacgcagtttgaatttgacaacacacacaaaatggggaaaatcacctccttgccactagatggtgcttattggcttttgagtagtttgttgtattgttttctgttacattgctgcattcctctttttacttctgatggatcactggaggaacggactgggcactagggactagagcctcaccagaatgttgtcactgggatcccaaaagccgtatctgctgcggaactatgttgcccctggggacacatctctgagagttgctgcttgccctagccacttacattattcagttccttaacaatatctgtctctatactgtgtcgagggtatttttctgaagaatatatttttcaatacagtcttattatttttaattatttcacataatatctgtgctctctatttaacttttttaagataactttgaaattataaaatatggtacaagaaaatccttcatacacttcatctaggccccaggttcaccactta

SEQ ID NO: 111366 - DNA, 1872 bp, Homo sapiens
ctccggcgcggcgtctcctcggggcttccccttgggcctcagcgccaagtcgggcggcgggcccgggtcgggcccgaggcggacgagtagcgaagagctgcgggacgccacctccttgctagcggcgggcgagggcggcttgctggacgaggtggagccgctgcggcccgacgagctggagcgcctgtcaggctgggaggaggaggaggagagctggtgagcgcgaggcgccgggcaggagctgggcggggacgggcccgggggcggagagcgtcctctgagggtccctctggtcgggcgcctcgctttgtgtagccgggtccgctctcctgtggcgacttgtggttttcttgctttggcagagggaacgtcagctggagttgggggttcgaggcgtgcgcaagtaacagggttgtagctcgttgtcctttggattgtggaccttctgagtgctggaccctattggggtctgtgggttggggcagcttgagaagggctgttcgcctggggaggagtcggaggtgggaaactgctttgtaggcagggatcctgctttgtgtaagatactggctttcggatggtggccctgggcattctggatgtaggagaggggtctgcttgatgaggtatcaccaggtgtgggggtcaggggcagaccagagtcgtctacgtctatgcagcggttggtgtttgggacccatttctggcggggatggggagaccgtatgaatcagcactcccctttgggtagtggggtaaaccttgctttgtgtgaagagagggcagaggatggtgctgcttttttttttttttttttttttttgttactctgtgtgaagagtcaagggtggaacgagccctggctcttattttctaaaacaagaattgagtctggcgttttgcagagctctgaattgacagttatcacatccatctttcatttccacgtccttctaggggcagagaaaaagagtcctatttaaaaatttaaaccaaagctatattgtcataagccacttcttgatgaaattgtggcccccccaccttaatatcactttcataaataggacatgggaggcttttcctctcgttttattataaagatgtgtgtgggcaattatttgtcttaattcatttttcttaaagttttaacttttagctaaaatgtctctgctctattgaaattaaaacttctaacagtgaaatcgaaatcattcatagactctggtattgcagggctggaactttgcagtgttctgaggtagttaagagctttcctgggttcgcccctggttttgccacttactagcagtatgaccttgagcaagttactctgaggctcactttcttcttgtatttgatggagaaaataatagcacttacctctatagagttatgaaaatttagtaagataattatgtatgcatttagcgctggatctggcacatagtaaactgtctaaaacaagctgctatttgttactcttaagcctagttacttaaatcaagaaacagttcttatatgatgttgtaggagattctggtgattcttaagtgttgatccctgttcataaggcagttatagtcttgttgagaactaagttttgtgcagttaaataaactagaaagtgtacagtgaattacccaaagagtgatagaacaaagagtactgacagtgctcagtaactgggaaaaaaatagtagtccaaagtagttgggccagactttgaggaggaggtggcttggagtctgaaagtgaggaaagagcgggaagggcattttatgctcttgacagctacaagagcagagtcagaggtatttgtaactctcaggaagatttgagtaacagaattactcttgagtatatgatgac

SEQ ID NO: 111367 - DNA, 1209 bp, Homo sapiens
cacattgcatgtgactcctgttgggctaattttcagtagcaaaaatgaatttgtaaaataatgtaggttttaaggctttggtaataataagttcttatttcacctctttcatttactcaaaattacgtcttctgagatcttttgggatcgaagttatggaggaaatgaacaactttaggacaaactagcttatttaagaggaaggctttaaactaggtctttaggagtggctcagaaattgcagaacagtttactttgatctgggaaaggtctcacattctggaataaaatagaaattagagactttagagaaaaaaatattgattctatctccttgaaatatgaagaataatagatgcaatataatgtagtaccacggtatcagatatgaaattcttgaaagtatttggaaagataagacaaaggaagttgtatttagttaaaaatcaggtttataattcatgaggatgaatcaaatcatctcccacttctgcagtgtactagactgaaactcctcccccacacatccctctcctactccattcaggagcttctgctcctctctctgtgagacagtaagaaagtacccaattatgtgtggctcttgaggcttattttgtttgaaaagtgtgaatgagaaccaggagtgggccaagctagtctgtaagtgacccttgactccaataagcttgaggaatgggatttaataggtactctcaagttaggtttttagtatgcatttaatacctaatcggtactatattctatagtgataatcagactaaattgtgtgtttttgctaatacctatttagtagatacagaaagagtactttagtaattttaggctttgaatgcttatatcttttgagtgggcctgctcatttctcctctgagtgggagataatgaatcttgtgttgacctgtcacagtgaaactcttatttgccattggttatacttaggactgatggtggagtggattaagaagcaaaacccaaaaaactgatgaatcctagaaacctgaatctagaggtttggaacttgatgagcaggcacggtaagtcttgatggtagtgcagcctgcgagtgaaagaggctaacaacctttatgtgaggtgtaataatctagttatatcttaattcatcttcacatttctgtctaacgccatgtctggccagtggtaactgctgtataaatatttgtttaa

SEQ ID NO: 111368 - DNA, 1032 bp, Homo sapiens
ttatatttttctcattcttacctggtttatattttcacaaagttggtaaaatattttaattttattataactcaaaataattttagaatctataggaatactacagatagaaaattctgagatgacaattttttaatctttactgtgttaataaacctttgttatcagtgttttgtgggttcgaactttatgtttctgtatcttttccaagataatttatttgtagatgctttatcaacagtatgaaaaagtgttaattttttaaacctaaatcattaagttgacaaactattaaaagtcattatagcagtatgcattatcatcttggatttgaagaatatatcatttgctgaaaatatgacgttttagccaggaactaacatgttctatgggtaagatcctgttttagccactaaaaagcaaagtactctaaaataaactgcatggattatgcatgtttgtaatgtttatatgtatatattatatatgcacatatccatacatatacccatgtgtgttttctatggactaaaaacttcttgtgttagtaattgctatctatatatgcagttgtagctgaaaagatctgtactagtagctgaaaagatctgtactagtagctgaaaagatctgtactagtagctgaaaagatatgtactagtagctgaaaagatctgtactagtagctgaaaagatacgtgctagtatacataaagactgtattgcagctattgccacaatttgcaagtctggaatagtttgagactccctgtcttcctgatgtcttctctcaaaaagaagcaactcagtttctgattgatgcagtctaggttggtctcactgtaactagtgtttcccagcattcccaggtgcatagttatggttcagcactagaagtttgttttttaaagacttaattctgaacctcaagtttagtgacacttcaaggaatatcaaaattgttttgattctcttaaaattaaaaaaaccatgccatactggaatgggaataaagtgagtcatgaaatgaaa

SEQ ID NO: 111369 - DNA, 1025 bp, Homo sapiens
ggaaaacttaagactagaaatttaaataatgaggaatgtttagcatatagataataattgatgtatgattgagattccttaggagaaagaatatggcatagactgagaagataaaaaggcttagaacttggaatgctagtgattaataactaagtaaaagagaataaactccagaggagatggaggaggaggaaaaaggtagaatttagcaactgtatttctgcacaggttgatagttccaagatcatgccacatactgcatactaaatatatataaaatattgttttatcttgcatcttgtctcatggtgaatatgtacaaaactacatggtccaaattactgcactgtctaactaaacagaaaacatatgttcctcctccccaaaaccactactaccagtaggcaaaccagacatttcattcagctgatttcttttctttaacaatcctttccagtttttaatatctatcctttttttcttttttttccttttttctagtcaccgtgtactacctagttcagtctaacttattaaacatcaagatttctgtcattttttctccttacactgatcagatcatatcatatgcttgatcaaaatcacagatagttttatcactgctactaaataggcttagtggcctactaaataggtttagaaacctactaactaggtttcagacttctgagcgtagtgtctcaggccttccatgacctggctccagctggttttatctgttttgtccctgccctgtgctttatcacacttacctgagcatgctctgcatttccgagacactgcttttgttcatcttataaatactgagtaaagcacatactttccccatcctgtcaagttactactcatcctctcaagactgcttcaatgcctctccttccaaaaagccttacccagtttctctcagttgtaatgaattactcctaactcttcctttccattgccctttgcacctttatgatagtactcatttcattttgccttgcaatgtttgttgactctgc

SEQ ID NO: 111370 - DNA, 1012 bp, Homo sapiens
ctcaaccccagtgcgacctcctatagtcaaacagcttatacttcctggaaattcaggtaaggagaaaatgatatggagctattaaggaatgttttttagcttactgcactgtatcagaaaataacattcatctgcagttcgagttcattttatttatgaaacttttaactggttaaagaaaatatcgttgaggagcaacttagcaccaggtactatattaggcaccaggggtataaacataagccagtgtgctaaatacataaaattttctttagcaagtacctaaaagtttgtaagtctggcttaattaaatgggttacaaatgtgattcttttaatcaatagatccttattgaacagcctacttgggttgtaaaaactacagagttaaaacctctttataggaattttaataaactttgatactgcagctaaataatagtatgaggttagaggtgaatgtaccagcagagtgagggggcagtaaatgatgtgggaaagccagattgctataaaccagggaaagaatgttctgctctgagactgttattgtgtagcttactcttcacgaattcacaattcacccatttatttactcttattgtcgctgaagctgttgttatgactgattattataacttccttaaaaattaaggttaaccacctcaaattttgacctgtgcactccctagtctaatgatcctattctttgtgtagtatataggttgttacttgctacttacttcacctatgatgataccatgttaaaaagtttaagctgcaatatttgtttaaaataggtaatttcgttcaggcattatttgagcctgaccttgtagtacttttcctatcatgtgcactctgctcttttttcattaatagtataaagattaattattttgtactcttcttgctctccttacatgcttttcatgttggagctgactgttatggtgaagaattctggaaaacaagtgtttcagataaatctgtaatagaaatattagtgacag

SEQ ID NO: 111371 - DNA, 1026 bp, Homo sapiens
tatccttcttatgctttcatgtatcagttatttaaagagaagtgaaaattttagatatttgttttatgctgaaaaaccgttttttatgctgaaaaaccgttttaaaccatagctatagtaaaatttagtgtttattagttgctggatgataatcaaagttatattacaatttaaaattttctatgtaggatacttgattctgccagtacatctgtctatacaaaactctggtctctccagaattttaaaataagcaaaatgtaactattaaaaaagtaggtgtagcttttgcttatagatactagaattagaaataaaaaccagtagagcatccaaaaatatatgtcccttagtacgtaaattttctttaataacctccactttaaaaatacctaaaagtttgattattacataattttagaatcatactcaaaataatccattgttcaaacctgcaatatattaaatctgttatcaaagttgaattgttgaagttcttttctttccaaaacaaaagtataccaggagaactcttggatgatctcattttatttctgcatctgttgagataagatttctggttttgatttgattttctgtgtttgttaaggctattttaatgaaaaaatacaatattgaatcaatatgtatgccaaattaattcatagtcctaatcctacttatagattaaaatttgagataaattgccagaaaccatcactttttaagaattgatcaggacttgtctctttaaattatctttcagaaaacaaattcttagagttaaagctaaactcttaaacagagaaggtgaattttagaagtatagtagaaagaacacatgtagattataatttttaataagttttggtcattgggtggttactaacccatgaatgtgacagtatttgtattcaactattatttgtaatagatacttgagtttttattttgtggcaagtagtatgttaaatcaatacaggcatttctactatagcacaaaatatgcactccttaaaaacctca

SEQ ID NO: 111372 - DNA, 1108 bp, Homo sapiens
gaggtcatggatacatgtcaatttcttagtttcatcaattaaaggaaggaatgttcgtgagagagtttttcaaaaggctaatgccttgctttctaagactgttaaagcacaggtttagcagaaagtttagtttccagaaagtcataggaataattggttgagaaataagggaagggagaaaaacccaacacaatctactgatttaaaaaatgatacccaaattttatttgtttgtaaatgtttaagtgtattatttcatttaaacatcagaaatcatttatttttatagaaagggaacagagatccatataaattaaatgaattgtacaaggccatataactagggaagtggtaaaagcaaggccagatttctccctcttcccagctcctccctgagtctcctattttcctcttcctcattgtttggatgagatcatgctgacctaattacaaatgagtgcatcttggaaaacattcttgaatgactgtcagaccatgatttgagattaactgtaagtattttgtgaattaccacagacgagtaaaataatttagtgagatattatccatttgcttacatttagccaaacaaaagaatatttttgcatggaatacagagtataccccagagaaaatgcatatagcatcaacattgtacttggacctcttactgaagagagaaggacgactgtccagggcagttgtcagcttatgcatagccatcctgttatgagaccagtgaggaaggaattcccatccagatttcacttactaccaaaacactagtagattacacttgaaatatacataattttgaaacacaaattgaaataaataagtcatgattaatatgtgtaatgtgctaatctaagaatgaatgaaacatttatagaacatctatttaagtagtacagtgatgttggctcagttatctaatcacaaggacactttataaaggtagtttttctggcctttaccgctggaaattttgattgaatgcccttgggatagggacccagattgtgtattttagaagcatctcagttgattctggagcacgttcaagtttgagaaccagtgggttaaaccctgactttggtggaccttg

SEQ ID NO: 111373 - DNA, 1060 bp, Homo sapiens
tggccaatatggtgaaaccccgtctctactaaaaatacaaaaattaatacaaaaattaaggcagagccttgcttcatcgactatgctgaatggagtgcagtggtgcagtcacagctcactgcagccataacctcctgggctcaagcactcctcccacctcagcctcctgaatagctgggaccacagacacaccaccatgtctggcttgtgtgtgtgtgtgtgtgtgtgtgtgtgtgtgtgtgtagacagagtctccctgtgctgcccaggctgatctcaaactcctgggctcaagcaaatcttcctgccctggcctcccaaaggcctgtaagtgctgggattataggcatgaaccacctcacttggccaagaaatcttaattctttctgataatatatcaagtatccctttatcagcccaataacatttatgcagcctagctaggtttagagtgacaagagctctctttttttgcacataaacactaaaggtatatgaagtctgactttcaaatcagcagagtaactaaaatattttagagctgcttaaatacactggtaggtgtgagagtcatcagtctgtcagagccatagtaactgtatattggggaaattggaaccacttttatcttggatggccctgagctgctgcttacctgttaattttgagtttcagtgcagttaatagattaggagtttggaaaaaagcttagctttcctcatggaaaactttaaaaggtagagatggtctgactcctccaaacccctcaacccacaccagcattacatagcatgctccccacttgcatacgtatgtgcacagcttagatatccaaagtctgaggtaaaaaattagttgtactctacaagatgatattgaacatattaaagttactagattgtgactcgccaaggacctgctgggttctgagttttcttctcctttttgagtatgcagattatggtttcacattagggcaattcatctaacaataaccgctttgccaaaatctgctttttttgcgttgaacaagtgctgcacttcatactgtgtgcttgtg

SEQ ID NO: 111374 - DNA, 1048 bp, Homo sapiens
aactacagcctcttactcagtttaaaatttcagcaaatgatctagttaaatcttaagccatttggcatactgagtcagtggtgtctgtaaggcacattttagtcttattttaaagaataataaaataatgaggatttattctgttatttggataaatccagaagaaacattttctacagaggtatgtattgggttgcttttctgaaaggagtaaatgatatatagagaatatatttttcttacccacttaaaatgaaagggcatcatttcaactttttgccaactgaacttcataagtgctttaaaatgaaccaaatgtcagacattctgtatgttgatgttttttcctcagacttcaatttttacttttacttacctgtgtaaaatgggaacacttccacattagaaggtagttgaagttaaatcacaagttgtggttgattgataggtctggaatgtttatggagtggtagctttcataataatagttgaagaaatatatgaaggtcggacatcaaagctgtccaatattggttccaagacactgaatgtatgggcagctagatggaagtagaattaagagaaaacagtgggattggatagaccaacagtaataaaaacaaacagaggcctcaaaggaaatggtatgaaacaaagaggaaaagtatttttcctatccagaacatgtaggttttctgatagctttagatctcactaaacaaccaaaatatgtaacagagataaagcactaaagaaaattacgcaggaagaagaaattagattttttttgaaaaaaaaaaggaaaagaaaaaatttggttacgtttacaaaagtgctataatagaagttttggcaaatttattactgcaaatgtttttgcactgatttcttggattgagtataatttaaggaaatagttttagataataggatttgaaggtaagtcaaataggcaaataaaaaagcagaatgtatgaatgtttgtattttgaatatcagaagttgaccatgggcctccaatatgaatgttttttggtgccatggtcag

SEQ ID NO: 111375 - DNA, 2504 bp, Homo sapiens
cctaatggatgccaaagagaaatgcccatttgtaaatgagaaaaatgcccatttgtgcacaagaaaatggtgaattcaggctatccaaaacttcacattcaacctaatttactgtataaatagtatcaataaatatttgtgttaatgagaactaatattctgactaattatctaaagtgtttcactagtacaccaggaaactacagattgagattagggggtgggaggaaagaaacctgggctagagattaaaacattcctaaatttagcagaatttcagaaatgatttttgcagattcattagaaaagaaaaattgtcatttaatcttaagttttggatgtagctcacatgtcaccaccaccagatagtgttacagcatgtatccatcatgttgcattgacacatcaaacttgtgtgtgtttgttttgattgccaaaagggcttaatatcagttgtacaatctttctgaactttatagttcctggctcaggaaagatggcctttgctattgaagccaacttcttcacatgctgttatctttacagaactaagagatcttgtttctattagcaggttttcatgataggaaagaacaagtagtgtgtgtctttattcttgatacaacaccacctcggtgcttgcaacctggaacaaaaccataccatgagagagagggggaaaaaaatctatgcacttaacctacaaaatctctggtgatgacagttgtattgttgctattacatggcataacggtctattatgtggtaggaaaatatagcctgctaaatcctacttaagttgatccactttaaactgagtaactgtataaaacatctattgaaaattcttttccttttgacttagattctgccttacatcaatttttgcatttttggtaaaaaaaaaaccctactacgtatgactctaacctgatacttgctctctaatggctcttaatatatccttgaaatcggctatttcaattttatcagacttttaccagagtaaaacttgcttctgtagcaggcctctcattttttattatgaggtctgtttttaaatacttaatttgaacagctctaagatattgtcacttaggtcatctaaaagcttttagagatttgaacataagttcatttcctgttaatcaaagacattccgtaagttggcaaaagaaattgggagagagaaatagaaggcttgatattctggacagcattaaggttgataggttgatgataaaaacttaaaaccaggacctccattctgtcatgactgacaccatggtagtctgtcagcttgaccagtggagagtcattcatttagcacaagcagctggagatttaaactgccagtactatgtatttggtgtataatgcaaggaagaaactttatccttgaatttgagggtgatggggtgggtcaggaaaggatggcgccagaattctacatgataatgaactaaaaaatgttgcttttcagaggaagataaagcatcttcttttgggaggggggtatctcatgtctaagtaagtaaaagaaagaagtagctactgtctcttttaaaaaccacgtacaaaacagaacaagtctcagttttcagtgcaacatttcaaaaaatatatatgctgcaatctaataattaaaaggaattttacctattatgaaacatattacattttttaagttagataatcagtttcaaaaggagtattcaggttatttaactttgtttttaaatggctgcatcagaaaaaaatgtctatttttttttattaaaatatttcatcacttgttaaaacatatttttgatctgagtttggtaaagtattattttacctgctgttgtactaccacagactgttgacttttagtttcttaaagagaaaaattgcctttttactagaaagcctttgtatattgcaatttttctgtttgggaaaatctaaggatttactgtggttagtcttacagaagaaatgtggatttgataaactagtgcctatgattttaacttatgtttgatatatagtagtaagggttttatgaatgttgattattttgtgccaacagcccagaattgtcacttatatgtaagcagaaaacaatgagctctgcttccaaagttatttaattttctcagtgtttgaatgttattttttgtaagtgtgttaataaaagtgtaaagaattggaaaaaatataaatattcttaactcaagcatttgctggatcatttttctacaaaacttgtttgtacaatataaaacactctctgaagagttgactttttttcagtttcgtatcctggaaatcacattttgtaaaactggggaccattcataattgtcagatactttttaaaattatctcaatacatcacttttataaaaaaaaaaagtttttttgaaagaaaattagatacatatgtggccccagatgtttgtataactctagaatgatctagactatgtatgtttaaattaactttttattgaatgtac

SEQ ID NO: 111376 - DNA, 1024 bp, Homo sapiens
ccgaaaacgaagaaattgacatttccaaagctgcacaaactactatagaaactgccattcattctttaattgaaactttgaaaaataaagaatttatatcagctgtagcacaagtcaaagctttcaggtaaaacgtgacgggatttaaaggtgatgcctttaaattagacaggaagtttagtaatactaggttttcattttcaatttgctgtttccatatcatgtctttgtgaaagaaaaacatgagtatttttaacagttgccactgaaatgataccaattttagatttcttttcactttcagatggtactttgaaagtgaattcaggtggtactttgagtaatatttgctcaaatattaaaacagatcatgttattcacaaggaaatgttgttgttacaggtatttaacttaaattgagttagtcttaactattgcctaagtctcagaactgaaaaactattgtgtattttcagatctctctggcccagtgatatctttggcagttgtgaagatgaccctgtacagacactgttacatatatatttccatcatcagacgctgggccagacaggaagctttgcagttataggctctaacctggacatgtcagaagccaactacaaactgatggaacttaatctggaaataagagagtctctacgcatggtgcaatcataccaacttctagcacaggccaaaccaatgggaaatatggtgagcactggattctgagacacttcaggcctttaggaaagaaactaaactgaagatgatgaagaatattaaccaagcaccttttatggacccttgcattcactgataactttctggcagcatctactttttagtgtaactaatgtcaaactgtatcatcaaaaacaaagatctgaaagaaaaaaacatctgatattttaacagctgccaatatctcccacaataactgcgtgaagaaggaattttttaattacttaacctacgtgaaaagaaaagggctaaaagtgatgcctacaaatacattact

SEQ ID NO: 111377 - DNA, 1013 bp, Homo sapiens
gatttatttctaagcacacttctagattatatattaagatatttaaagaactaaggtttaaaaagcttcaaggttgatacctttgaggtatgtactggtctggcatgacgtctttgaaaacacttgaggatgtccttcctgaccctcctcaagtcccactgcactcctactctgttccagtgagagctcagctctaagtatgggacagagtagagttaagagaatatccaaaaaccaactaacagctattccatgactgaaaagtctcatgattttgtgagtctcatgatttcaatcagaaatggtaacctggatcaatacttctgatttgacagctgatgtcatgtggtttgctggaaacactcaagtttggtgttttggagttgcaagaacacctggatacatacaatgtgaaaagagaagccgctgagcaggtcagtctctttttaccatgtgcgaaaagtggtttgctcttgacactggaagggtaatcctggcagcagaatagcccagacagaaaagaagacctctcagcacctgcctcagggttttcctgagagcagcaggttctttgagctctctatccagcaaattcctacctttggcttttaaaaatcagtcctctaacagcacaatggaaaaccatagctttgtaaaaagcttctttgtggagactgtgtcactgctgtcaacattccaagtggggaaattgaagcagtatttctcagtgcattagagaattgtggtctaggaaatccacaacctctgacaaagctgtaatctttttcccatgatgtgtacatgtacatgggcaagcagtgggagaaaaaagcatgtagtgaattagacaattacctcctaagaaaggcttcttcaagtccaatctggcattgaaaacagagtagctctgttccttccctaagagtaaatccagcacattttcaattgggagggacagaagaacaaaaaataatttctctctttcacacaaactgcatacagtaggtaattat

SEQ ID NO: 111378 - DNA, 1019 bp, Homo sapiens
aggagatcgagaccatctggccaacatggtgaaactccgtctctactaaaaatacaaaaattagctgggtgtggtggtgcacacgtgtagtcccagctactcggaaggctgaggcaggagaatcacttgaacccgggaggcggaggttgcagtgagctgagatgtcaccattgcactctagcctggcaacagtgcgagactctgtcccaaagaaaaaaaaaagagcgagagagagattgagaccatcctggcgaacatggtgaaaccccgtctctactaaaaatacaaaaattagctgggcctggtggcatgcacctgtagtcccatctactcgggaggctgaggcaggagaatcacctgaatgtgggaggcggaggttacagggagccgagatcgcgccactgcagtccaacctggcaacagagtgagactccatctcaaaaataaaaaattaaaaaaaaaaaaaaaagaaattacatttcagtgtggaaaattcaataataggttcaaggctttatgaaaactgagaggaaagtgatcagctgtgcactgggagtgatggtaagaaaggacaggtttcatggtaactgggacattccaggcagagggacacaatgtagaaagggatggcagtgtgaaatagcatgatgtgtctagctaaaagcaggaaattgagtatttccagagagtaaaatgggaggagggagaggaagagcaataggagcaatgaatgggatccaagacaggagaagtcctatatgccacactacagacttagactttatcttgagataatagacaggagaagtcctatatgccacactgaagatttaagactttgtcttgagataacagaaagacattcaaatttttatcctttcaagagatacctattaagtaacaagcactgtaccagatgccaagatggaaccacatggcatgtgagcattcatttatgtgaccagtatctactgaggcgctacctcgtgctaggcactaggctaggcacggggcccgtg

SEQ ID NO: 111379 - DNA, 1025 bp, Homo sapiens
aagctaatgaatgtgctttctctctgtggtccagaatctggcctcccaaagaacccatcagtgagtaatcatgaagacctgtgtcaaggtcttaaagatcatgttattccttgaagaaatgatctgtctccttgcttgccttttctaatttaccttacttacggtattaactcagaatgaaaaaaagatttcttatctcttgtgacacctggcagccatgctaactatgtgttcaactagttaaacatgaagaccaaatttaagctgtgaattcattgaagaatgaggcctgcggtggctttggggtactgatacctcatacgcagagtgacaaatctgatggatggactttttttttttttttaatcgggcatcaggttgtattttcttctaatgaggatttggaagtcggtgaccaacagactagcctaatttctacaacagaagacataaatcaagaggaagaagtagctgtggaagataatagcagtgaacaacagtttggtgtttttaaggattttgactttttagatgttgaattggaagatgcagaggtaaggatgtgggctttctctgttaatatttatagaacagttgtatgagaattaaggatttgatcacaggatcattccttattgaggtcagtgtaaggtcaaaaaggtaaaaatctaaattaggaattaaatttgattaccacaattagtcaatagaataagtctgagataaaagagaaacattccatttttcatctttatctttaaaaatataaaattaaaaaatggcttccttcaaaattattttcagggtatgcttagacttaaatgttttgcatgatttgtcttacaaactaatatgcagccaaatggtaaaaatttatatgagaattgattaaggacaactttaaagagagttgcacttaccactaaattgcacattcatcaactctcatgtacatatacatatactactcatatacagctcatacacattcatcaattctcatgtacatatacatatactactca

SEQ ID NO: 111380 - DNA, 2380 bp, Homo sapiens
agtgtaaaagaagtttttataaaggtgggttttttttccatgtccagtgtttatatccttatttactgtccttaagtgacatgaaactcaaaataatatacactttacctaattaaaaatggaaaatgggtttttagtggtcctgatcctagagaatggttataatttttatttctacaaaattaggttttagcttagaaatcttttctagaataataattacagcatacaaaagtatttcttctggaaaagtttttagtttgatgatacatttgcttcctatctaaaatatgattttgagacagcaaaaaatggatgataaagtagccctagaacagcacaaaaagttaatatctatttgatgcctaagaagtaactttatacccagaaaagtaaattactaagtagataggcacaaagagaaagtcaaaagcaagagattcctagtcactaaaaatgtttgtcagtttataataaagtaatacctactaaattagttaaggaaataaaacaccatgatttagatgaaaagttatcgtctaattctcctttctgaaccaaggaaaaataacagtaatagactctgcctttcactttattagtctctagatttctaatccacataactataaactcataggctaaatctatgttttccaacctgtcaaatgtaaatattgagtttttattcaacctgattaaagtatactttaatattacttttaacattatttttagctgttagagaaaggattgtccagtatgcagcaatcattactacagattatttatagtctattgagtcatattgacctgtctgcagccccagccaagcagtttaatctggagatcataaagattattggcaaatatgtacaggtgagtgaccacaaaacttacatataacatttttcatctaaaaatgatttataatcacacaatattggaaatgccttaaatgtcgaagaatggggaagtggttcaaccataaatcgtgttttcaggatatttgcagtatggaaaatgttctcaatgtaagtgacaaaaaccagaatcagaattagtatgatttctacttttcgtattaacaatttctgtaatgttctgtaatgacaggaaggaatgcatatacacattgcagcagtcaaaactctggaaattaggactgtgactcattggttgtttttgtttttgttttgagaaggagtcttgctctgttgcccaggctggagtgcagtggcgcagtctcggctcactgcagcctctgcctcctggattcaagtgagtctcctgcctcagcctcctaagtagctgggattacaggcatgtaccaccacacccagctaatttttgtatttttagtagagataggtttcaccatgttggccaggctggtctcgaactcctgacctcaggtaatctgcccacctcagcctcccaaagtgctgggattacaggcgtgagccaccgtgcctggcctcattgttctttctttcttcgtacctttctgttttttaacgagattctacttagtgggcatacactacttttagaaacagaaaacctctttgaagagtttgcattttagagatttttttgtgtgtctgataaaaagtgccagatatttagaaagtggaaaattaaacttgatttaaatgtaaatgatgacaagtcggcctggtctttgctgaatttcacctttgaaattcagttaagctgtcggtttgagctaccagttaagaaagctttgcattgctgagcagatcagtaggatggatacaactcaccaaagagaacaagctcattaacaaccttaatagattaatatgttgtgtttatactccagttacgtttgcattcactagagcagaacttagaatgggaaatacttagctggcaaggaatttattctagttcatatctgaaagtaataaaactgtagtaaaatgttttcagtgattcagttatgtaatccacattacctcttacattcccttgaaaatcagtgattgcagatatcaaaaaaacgggagattttctggtggccctatttatcttgtgtcttatccttcagtgagtgaggctttaccagatagcagttatatctctttctaaagcacatttctcttttcttcttaagccttaaaaaaaaaaaacttataaaatatttgctatatttcacatagaaacatataccacattgaattcactaccttctgaaccataggtacatttcttatgttcagaaccacaagctcaacttgccagtggacaagcagataaccagaaggagcatagatttgtggctaagtgaactgcacactccccatctcaaaggagaaacacaacttagcttcctctggtggttttcatgttagaa

SEQ ID NO: 111381 - DNA, 1085 bp, Homo sapiens
caacaaagtcagatatactgaaaaatgatttttctggtaccagttactatttttcagtgttttcagaagtaaaattaatttagcaaaagaagtgactgggtatgcattcatctattctttcttttttttaagaacctcatatcatgatcctataatgggaaacaagtatgcagctaacaggaaaagcactggacaactcaatctaagcacaagtcccattaatagtagcagttatttgggatataacagtaatgcaagaagtaactctttgagattaagtttgattggtgaccgacgaggtgaccggcggcggagtaacacactggatataatggatggacggataaaccatagcagtagtttagcaaggactagaagcctttcctctctaagagagaaaggaatgtatgacgtgcagtccactactgagcctaccaacttgatggccaccattttttggatagcagcatctttattagaatcagattatgaatatgaatacctcctggctctcaggcttctcaacaaactgcttatccatttgcctttggataaatcagagagtcgagagaagattgaaaatgtacaaagcaaattgaaatggactaattttccaggacttcagcagctcttccttaagggttttacctcagcatctacacaagaaatgaccgtgcacctcctcagtaaactcatttctgtctccaaacatacattggtggatccttcccaattgtcaggtgatgttaatataattgcaccagcactttgcattttatgcagtaaaatgtaaactaatcatttgttttgaaatctactaatttctgctttttgcaaatagtcatagtttttatacgctaggtagcttaaattatttggtaaaagccaaaaaagaattagaagatcgaatatcccaggaaatgaaaagaaaatggtttctgtgaaccatctaaaaaaataactttaacttttaaaataatgtgcaataaaattggttattgtttgcttttttttgttttgataggctttcctcttaacatcctttgcttattgcctcacttaatccagcattttgacagcccaac

SEQ ID NO: 111382 - DNA, 1072 bp, Homo sapiens
taaaatcccattaggaagtccattgcagtttctttattccagagcataattaattaaaatctgcctttttccccccagggatttgtgattgagcttcttctcacattggaatctgcaattgatactttggctgaaaccatgaagcattatgatcttctttctgccctttctcagtaagaatttaaaccaggcaacctaatatagagagaacttgaatagctaactacatatagctataacttttaaaattctaatattgttagtaagcacaatactgcccaaattagatggattaccagtggggagatgggccgcagacagtgaggacttgtgaaaaatccaagtgctgattttagcagtgctgttcttcttctaatgtgctggttagagatctttctaatgcaccacttcattcctgccacattcaggattcagcatcctgtttctcccccagctgtctgggagccttaaggctctcccacctttcacatattgttccttctccctgcagcagcctctctccccactttttctaccttgcaagcccagaattgactagtccttcaagtcccatcccaaatgtcacttcctagctaagcatttctaactccttcagggtagtgctaattattccatcctttgggttctcatagtgattttttcatattgtaataatagcaattagcaggctataaatttatccatttacatatctatcccctctttcaaaagacttgtctaatattccttccttttctatacagctggcaaacataaaaagcattcagtcaatattttcttaataaaaattggatgtgaggaaggaggagaaatcgaaaatttttgagcttagttcttttgaaaagagtgtgtcattgacagaaatagggacatcaggaccatcaagtttgaggacaagacaaatgaagtcagctttggacataatgtatgcctaaatctcagagctgaacgttgttagcgattactatagcagaattttctcagcaagtagagcctcctttcaactcaaaggaaactgttagccacaagagaaaagatactgttgtacatt

SEQ ID NO: 111383 - DNA, 1020 bp, Homo sapiens
ggagtagctgggactacaggcacacgtcaccacgctcggctaatttttggtattttagtagacacggggtttcaccatgttggccaggatggtctcgatctcctgacctcatgatcctcctgccttggcctcccaaagtgctgggattacaggcttgaaccatggcgtccgtcctccttttttaaacagagaaagtgaaacataaagtataaataccattgcaccgtgaactgtgactaacttcagtgatcattcccatagctatgtgcacctggacatttacagtggactaaacagtcatttgaatcggcaacatcacagactagaatcccgatacagtagcagctctggaggatcttatgaagaagaaaaaagtaataaattccaaatgtttttaatataactataagggtgaggtgtattgttaattacattaatgttaataaatatatattttcagtaaattgtttttaaaaagcgtatttaactgccactagtggtgttccaacataatctgaaacatcttgattttaagaagcaacgtaattgggtgaaattttttttaaagcactggtttcctatagataaatcacaaggaacataagaactggttctcaggaagcatcatagaacaaatactggaaacaggctgattttttttagcaggattgctccttctgcatggattcactttttccttaaaagattctcccttggcaattgcaaagtgaataatctacccaagtttcactataacgttaaggcagggtatcatagaagcacaggctttcagactgggaagggacactgaagatgatctggtccaatctcctcattttgcacatgatggaactgaggtccagagaggttaagtgacttacccacgtcacacagaattcacatttcctgacattttttattgcaccccgcagccccactgtggtagagcagagttcctttcaagatggagctgtgttggccctatctcaggatatttagaactgaataacttaccagaag

SEQ ID NO: 111384 - DNA, 2258 bp, Homo sapiens
gcaaattactctgactccgcccacctcacaggtttgtcatgagcattaaaggatctgaatgtaaaagtaacaggcacatcataggcatctcccctatatagaaccaaaatttgtgaggttcctaatgggtcaatttaaaattaatctgtgtataaagatgttcttttatcttttgattacgtttttgttcattgtgataaaaaagcataaaatttgccatcttaatcattttcaagtatgcagttaagttccagaattgtttagtgtattcacattgttgtgaaatagacctctagaactttttcatcctgcagaactgaaaagtctatacccactaaacaacaatcctgcttttccctctgcccccaagctctggtaatcagaattctactttgtgtttctatggatttgactactttaggtactccatatatgtggaatcatacatatatgttgatttgtatttttgtttgtgattggcttatttcaggtaacataatgtcatcaagcttcagccccgttgtggcatatgacaggatttctttcctgttttcccttttttaagggtgcataatattccactatatgtatatacatttggtttattcattcatctgtcaatggacatttaggttgcttccacctacctcttggctattgtgaattgtgctgttaatgaacatggatgtacaaatatttgtttgagtttctgctttcaatttttttcaatgtatactcagaagtggggttgctggatcatatgatagttctatttttatttttttgaggaaccatcatactgtttcccagaaagtatgcaccattttacaatgccaccaacagtgcacaaacatttattttaactgccaaaagtattttgtataaaatgtatgtgatttatgttagctgttaattttatgatgtcgttgaggtgaaatttgctaaaaggaaaaacaatactcataattgttaagtgtaatgagtaaaatgaataaaatctggcttctgaaatctgttggaattaattacgggtcagaggaagctgaaattacatcagttatctttgacttgttttcaatttcagagataagccagagaatccagacagctcaccctgctgggcggcaggtgatgctgcactacctgctaccatggatgaacaacatcgagctggtggacttaaaacctctccccacagcaaggcgacatgatgaagatgaagatgattccttaaaagaccgagaacttatggtgactagtaggcgctggttacggggagaaggatggggatctccacaagccactgcaatggttttgaacaatctgatgtatatgacagcaaaggtaaaatgagttttgtatttataattgctgcacagaattattgagtgagtagatgtggttagaaacagatgaagaggttccataatcctgtgataaccaaacaaatatctttctttaaaaaagactcattagatatgaattttttttactaaaaccatatatgattaattatatttatgtttagatttgttggaagaaattattgtttctgtaaagtgtggaaacgattaaagctatctgtacaaaacattttttaatatttcatggtatgacaagtttggtttttataataggcagtcatgactgaagtatcttttgtgcatattgcatctagtatggcgatgaactggcctggtcggaggtggagaatgtgtggaccacacttgcagatggctggcccaaaaacctgaaaataattttgcactttttgatcagcatttgtggggtgaatagcgaaccaagcctcttgccttacgtatgtattcaagttcatttaattttaaaatatatgtatatatttactagtatcttgtgatgtcagagtatgggcagcagttgcccaggagaggcaaggcaaggcaagggccgggatgaagacagtcaggaaatagcacatggatttattcactgattcagttagcaaatgttatctatcattatgacaggccaggtgctcttctgggtattacaatctgatgggtaatacagaatttatttgttgaagctacatctgatttatttaatgaataaatcagtaagctaataaagtatagtgtgataaaggctataaaaaaattgcagagttctgagagtaaaaaacctaggaaccacagctgtctggaaggattcaagatgacacttgagagaaagtgatattgaagctgaaaccacacactggggatgtttctagtttc

SEQ ID NO: 111385 - DNA, 1636 bp, Homo sapiens
ttaccatatagccagtgatagcccagggagaaatggactcctggccccacctctgtgccagccttcatgtgccattgagcctgccatggaatttctgcttgcagagatgctctatgtcatgtaatgctgggacagggtgacacagactgcaactttgtttctgtgatttgcatatatataaatgatccctgctaccgcggaggtttttgatagtttaaaatgaaaacttctgctttcttttttacactattacacattcaataacatgttggtataaaagttaaagcaaaaagaaatggaaataaatgttttctatctttttttattcacagtgcaccagagaagaagtatttttcctcaacagagccttcgtcacagtctatttatgctgttcagtcactgggcaggtccttttagcatcatgtttacgcccttggacagatacagtgatagaaatatgcaaattaatagacatcaatactgtgcgttaaaggtatttacttagaaacctgatttcttttttcttaagagcagagttaagtatttttaagtctctcagtcactagtattaaaaagaggatctgagagtattaaaatgtttttctgccatattcaaaacttataccataagttatatttaaatacataaaatacaatgaaaaacagttccagaatctactcaaatttgatcaccattatcttaaagaacttaggattacttgaaagaaatgccttttttcccttacttaattactttttcttggtctttttatcttcccttccagtactgttcaaactccatgtctaatttggtatcatatttacttactcataataaatttctcagttttaaaaaataatttgtaaagaaaaaagattaaagtattgtgactagataagtattttgcctcttctcattaagcaaccaacatttaacctcttaaatttgttaaatgtaattctaatattattatttgaaggctatgtctgctgtactgtgttgtggccctgttgcagataatgtaggactttcatcagatggctatttgtacaaatggttggataacattttggattctctggacaaaaaggtaattatgacaatttccttaaaggttcataataagttgtcattgtattatttgcagttaatgtatgttgcactaaaaacaagtcttttaaaaaaataagataggttaggatcatatgcaaaaagcatattatataaagttaaataggatcccataatgtaaaaacgttccaattcttatgtatcattaatttgaataattttcatttccctttttatattataggattaatacagtggtatgtgtctctcaacagggttctaagtcaataaataaaataccagcatagaacatattgagctgcatgggaaaaatatgttatttgctatgtttcatttcgtttttttaaccactttccatttaatcattcctccttgccctccacactctgccttccttactctcatattgtacatatacagacttcacaatttaaaataggacttacattttttcccctcagaacagtttttctattgggttatcaaaaacaagaataaagcttgataaaaataattggagaggttaatgactcatttttctga

SEQ ID NO: 111386 - DNA, 1023 bp, Homo sapiens
tgctgaaggcacaatatgaatagacatggcagctatgaataaatagaactagtctttcctctttctacttttctaaactgatcctccccatttcatatgcctcctgtctctgtatttagaaatctgtgtgtttcacagagaggaaacaacatttagcactgagttgatttaagttagatatggagttgaataatataaattgcaatagcagttcctagattaagaagcaccatctattttcatattaaagtaagcaaaatcatattcatttaattttcatatattaagttgcgtgctgccatgagcatgcaaaattaacatgtattattctgattttgagtattaagaattttttatttaaatcataaagtcccatttacttcatcttttgttttcttcaatattttcagtgcaagtggtggccttgataatgaaacacattttctcaacaacactttattggaatatgtagatttaactagacaactcctggaagcagaaaatgaaaaagactctgacacactgaaggatatacgatgccattttagtgccttagtggcgaatattattcagaatgttccaggtattattttcagtttcttaaagcattattgagtattaaggaaccgtcatattttttctttccttgaggtttaataatctaagttgataaagtaacgtatgaacatactggaaaaatatgtcagcataacctggatggctggagtttgttttccctttgaattattgtcactgattagaaataaaaaagcaacccagcatagaatttcagtaataatcaggatactgacacaaaaacctggagaaatcaatagaataagctctttaggatagccttgttttagatgcaataagcagagtgcagtgtctcatgataattgagaataaaattaagaagatacttttgaataatgggaaaagagtataggccataaatacaaaatgtaacaaggataccgtgttactgatttaccagatatgttccaattattgagtagggtc

SEQ ID NO: 111387 - DNA, 1034 bp, Homo sapiens
atttttctgccatatttacatgttatatcaaaagttagaaattacgaagactatctagtgtattcttctttttaagatgcagacacttcccctccccgcagaagatcttatgcagaaacccattatgtaaaacggatgaaaaattgctttaacttaagtgagggcagaaaatagggtctagaatggagttggcaaactttttctgcaaaggaccggatggtaaatattttcggctttacaggccatactgtctctactcagccctgcctttgtagcatgaaagcgttcgtaaactacataaaaaaaggagtgtggctgtttgccagtaaaacagtaaaaaatttgcagcgacaggtagcagtgggccagatttggcccatgggatgtagtttcacaagactgagcctagattcccaaatctacaggttctgagcagctttcagaaactataggtccagtgggacagatggttatgaaaaccttaattctaacaatttattacgcactcaagtaaaatcatagagaagagattctaagaactacagagaagaaagcctgggactctggttgcagggtaaggaaggcattatagatgaagtgctgatatttcagatgaattttgaagcacgttcctcagtggacaaacaagggaaaaaggtattctaggcaaagaacagcatttgcaaactttacaaagaattttgaaattgcaaatttttctgtgtagttatattatgggggaagtgattgaatattaggctggatagcaagatgagaaatatctcatgaaaaactactagctttagctttaaccagtagaacagtagttcctgtgcctgtggcatctgagagttacctggggagcttgctaaaaattttagactcctgggtctattgaatgagaatccctggaatagggtccagaagtctgtttttgtaaagcatcttagatgagtctgctgtagaacattgtttgggaatcagtgctgttaatgttggggatgccctgaggaatttaagcaggagagggagat

SEQ ID NO: 111388 - DNA, 1050 bp, Homo sapiens
taatttttaatccattactttattcattgatatcagtccacaaaaacagtactagtaataaaaaccttatgctaaccatctctctaattagcattaggccaggcatggtggctcacccctgtaatcccagcactttggaaagccaaggcaggtagatcatctgagctcaggagttagagaccatcctgggcaacatgacgaaacctcatctctaccaaaaatacaaaacatttgctgggcgtgatggcacacacctgtagtcccagctactctggaggctgaggtgggaggatcacttgagcctgagaggtggggaggttgcagtgagccaagattatgccagttgcactccggcctgggtgacagagtgacactctgtctcaaaaaaaaaaaaaaagaaatttagcattagttaaaataaacttttaaaaacgtgttgtgttattcatatctgcctatttttctttttttttccttagtagccccatcaatgctaagaaagtaaataccaccacaagcagtgactcatacattggcctgtggagaaactatctgatcctttgctgcagtgcagcaacatcgtcatcttccacatctgcaggttctgtgagatgttctcctcctgagacgctggcgtctaccccagatagcggctatagcattgattctaaagtaagtttctcagatccactgttggatatatgaaatctgaatggccccataaaaataagattttaaaatttctttttatggacaataaagtaactcagttgaaaatgtgttacttacttgcaaaaaggaaaatacctcaagaaagcccatcattgcttttatggattcctagttggaatcaataatacgtacatagttttccattggaaagaaagacccgtgctcattcagtttatcatactcaacatttttaaagaaattgtcatacctattttcccatattctagtttttatagttctcacacttctcagaacccaaaaggaatcatttaaataattaaacgcctttctagaatttccctaaattacgtagtgatc

SEQ ID NO: 111389 - DNA, 1200 bp, Homo sapiens
aatttttggtagtcttccatttgggttatttgattgttttatccatgtcaccagtccctgtttcacatagacagtaactgtgctccttaaccataaaagatgctcaaatcattgatttatgataatgtgtaaatcatagaaccttgaaattttagacccgagccattgaagccaccctagcttctcaacctttaatgagcatgcaaatcaacagggccctaagaaagagtttcaggagtttcttagaagctctcaggtattgccaggctgctggtccacactctgagtgtgaaagatacactacaatcccctcattttccacatagaaatcagatgaagagcaactgtcagttccaaggttacaaaatagtcagagaatggtagaagttaggtacagaattcatatttagactgccagtgaaatgttttcactgtgcacactattccatttttataaaatacatgcgatttacattgcttgagctgaggcagaccggtagtcataatcactatgatttgctttattttttattaactgtttttcggaaatgtctgtgcatatatttttatattttgtttttaacttctgtttttcaagcatggtgtagctaatggagcttctcatccccctcctctggaaaggagcccatattccaatgtattccatgtggttgaaggctttgcgcttgtcattctctgtagcagtcgacctgccactaggagactagccgtcagtgtccttagagaaatacgggctttatttgcacttctggaaatacctaaggtaagatttaggtatttcattcagttatctattgaaagtacttaaaaaccatctctttgtccatccttatcccatgtaggtaggttactaccatgggtctaaactaacctaccgttctcaattgggaggccgagtcgggcggatcacgagatcaggagatcgagaccatcctggctaacacggtggtctctactaaaaatataaaaaaaaaattagccgggcgtggtggcgggcgcctgtagtccagctactcgggaggctgaggagaatggcgtgaacccaggaggcggagtttgcagtgagccgagatggcgctgctgcactccagcctgggtgacagagcgagactccgtctcaaaaaaaaaaaaaaaaaaatagtgctgaagtgaatttttagtgtttacttgggtttggct

SEQ ID NO: 111390 - DNA, 1050 bp, Homo sapiens
acctttgttagtggaagatactaagtgaaaacaatgtggctaattttataggcccctcaaaataaccagtatttagttatttaatgatatcagtgctatttattttaatattatttgtgggaggctaaatattaaatatttaatcttaaatattaataagattaattataaataatctgtttaaatatttgttatgtaataatggttgtaatgcttgttgtctagttactgaaaacctttttgtttgctggttttattttgaattatttctgtattcttttatccatatataggctaataattatctacaggatttatgtgcatttttaaaatattaaatacattgaactttaggggaggactcgcactttctgtagttatttttccaagtttgatttcattgtctagcatatgtaatatgtttcttattaaatcctgttgtatttttcaggggggaaagaaaacccaagattgatttgtttagaacttgtattgctgcgattccaaggttgattcctgacggtatgagcagaactgacctgattgaattgttagcaaggtaaatgagaattactgtttgctatattgttttatgtcttctgctcctttatatttctaatatacctttgttactgttatcactaaaaaggcgatgttaaagacatttctaatcctttatctgatttactttctaaacttccattttgtctttttttgttgttgttaaacacattttcctcactgatttttaacttctcaaattcttctagattccccccacaaatcctatctttcagttccctatttttccatctagtattctttcctgggatttctgtaacacattatcccttaacatatgggcattatcagtgtatgataattcccagttaggcaattaattattgtgtttactcttacagtcatttctttagtatctctagtggtaatcaggtctcatttgtgcttttttttccccctatggcagaactgtggcatttaagtttttctctctcttctattaggcatgtcatagctctgtaaaatgag

SEQ ID NO: 111391 - DNA, 1013 bp, Homo sapiens
tgagccctatttctggtatgagaaagtcaaacttatatttaatatgggtgtcaaagcaacataaaattataagaacacactacacagtgatgttactttttctttctttgtggtacttcctctttgttagccaataccctcttttgattatctatttctgtaaaatgtcatgtgggttatcctgggagaccaggaggcaacaccattgcacactttgctgtctgtgtatgaactgaataacagatgcaccttgaccaatcactgacagccttgatggaaaatgacagtgattatgatgtgcatggtgctttatggaccaaagagcgaaagcaaagtttgtttatgccattacttaatgtatggtagcttaaatttgaactgcctttttggggactggtattatttaactaaagtgtggtaactgaaattcatgcattttgaaaccatgtaaaaagaggactgactatatgaaatctctaggtagtgagtccattgccactataacaaatacccaaggccaggcgcggtgactcatgcctgtaatcccagcactttgggaggccgaggcgtatgtatcacctgaggtcaggagttcaagaccagcctgaccaacatggtgaaaccccatctgtactaaaaatacaaaaaattagctgggcgtggtggcaggcgcctgtaatcccagctactcgggaggctgaggcaggagaatcgcctgaacccgggaggcggaggttacagtgagctgagatcacgccattgcactccagtctgggcaacaagagcgaaactccatctcaaaaaaaaaataaaaaataaaaataaaacccaaaacactgagaatatccaaattcttttctacataaggattattttattaggccaactgaagaacaatttagatgaaagaaatttaaaaggcctcaccttcaaatacagaccagaataaaaaccagtatattaagaggttagacatttaaaataaataaaattattgaataactagaagaaaa

SEQ ID NO: 111392 - DNA, 1805 bp, Homo sapiens
ccccaagtgatttcactcgcctcagcctcccaaagtgctgggattacagacgtgagccaccatgctcagcccacagtgaatacgtttttttgataatagtcatgagtcttcatgttaagagttttccagttaaatctttatcacaggatcctattcactgcattctgtcctttcttcaacttagttttagtcctctgcataattttcacataatttctccaattagtccaatatactgaagctgatcatcagggagaagaatatgtcacagttgaaaccccttttgtggcaacaataagctaatcatttaaagattaataggcttttattacagaaagtaagtattctttatctaatttcagatattttataactgtgaagttttttcccctaggaatgtcagtttactatcctcaagtaagaaaagcattagatagcatcctcagacatttggacaaagaagttgggagaccaatgtgtatgaccagtgtgcagatgtctaataaggagcctgaagacatgattacgtatgtagtaaattatgtgccttcattgctatttcagttttcctaagacagtgtggatggttcttgcttacctgtctccttacttggtctttggagttcttccatgtttctatctgctgcagttttcaatacagtgattccttccacacactcagttttattccttaaagtgctgtcaaactggtatagatagcaaaactcactctagatcccagtctggtgtgttgtcaatgacaaggccctacacttactctgtgagcaaaatatgaatcctaggtaccccggatgtatgtgggcatgattggtttattatgtcaaataaatgctttcactgccaaagccctagtttaaaaaaaaaaaaaaaaaatcctgaaaatctgaactctgattatttttgactcctaggaactaaggggcatagagaggaataacatatgagcagtttttttcgaaacactacctcatcccaccccaccccaagggccttgtcattatttgtcatctctgcatctttttttcttattgttagggacttcctcctcaggaaactgtatgttatggcaatagcttactttatttgctagaaaacatctacatattctctgtaagggaggagattcttctggatattaatatttgcattataggtcttagaataccaaatttggtatttaatctcaatttatttaatatacaattattatgtactactatatgctaatatctctgagagtttctttaatgtgaagttttttgccaatgttacttcctctgggaaatcttgtttttcaccacaaccacttccctcatttagtaagtttttgctttcacccagttcctctgacacctatatagtgtatttcttctgtaactgcattaactttctattctatttcagtgtgctttaatttaggatctttgagatagagagcaccctctcggtgactaggagaaaagcaagatagcaataaagattttattacttacaggtgggtgggggacactgcacatgtggaggccacactcatggaggtcaggaagcatgtgtagagagagagagaaagaggcccatgggccaatgccttttttgggttgagggtgttttccaaacagttacctatggggaattctaattggtggattgaaagcaagcacgcatgagttcaggagatcatgctgtgcctgagaggtggtcactgcagcacatctgcatagtccatgtggggtacgcaggtcagtggggccagtcaagtagcctgcatctaggtatccatatgg

SEQ ID NO: 111393 - DNA, 1035 bp, Homo sapiens
tcagttctgctgggtttttttctgtgggggaggtggttgttatttattaggtttactttgttaggattatcttggatctgtattttcttttcttggatctgtattttcttttcaaggacttttgtaagagctcatgtagttaaagctagataaaattatccattagcccatttaatcaaatacatgcaaattgcaatacactgaaagaatgtataagtgaagctacattgtggagcttttctgcgtctttcaaggtgtcgtctttgactatgtgacatgtgactatctgatacttagactaagggagggcaccagtactatgtcgtatataaagaagagtgaagcttaaacttttaatcttacttagataaaatatatatatatatatatatatatatatatataagagctttattttcttcccgtattccattgaactaccttgcatacccactgggatgcgtgtaccccacttgagagaccactggtgtagatcagagataatgacagcttgggcttggattgtagtggtgcagatagaggagcattcactgagaaaaaaacattaagaaggaatcaaatctgggggcaaggtcatgcatttggtttgaacatgtctaacatgaggcatccaggtagaggcatccaagtaagagatgtcagatgggtctgagggtctgagttcagagagaggccaggcttaaaatttgtgggtgatctggtatgggtggtaaatgaagccatgtaagtatatgcagttgttttgggaggtaatacatgatgataggagaaggcagcccaggagaacgttgccttgaagcagtctaacatttaatacccaggtcagggaggccaaacctgaaatgcagataaagatgacacagccagaagtggaacatagataccaaaggaagggagtgtttcaggagggaaagggtgcttgaccttgtccatgttgctgggaaatcaagtagcatactataaataggcccactgttttgagcaatatggtaactgatgagtgagaatggcttc

SEQ ID NO: 111394 - DNA, 1426 bp, Homo sapiens
tggtcatttgagaactttattttttataacagctagaatgaagaaaaagtttgctgatcaaattgtaattgaaatggaataactgattctaaataataataatttaaataatgtccttattctaaataaaaattataacacttaatagtcaatgaacgtttaatacatgccaggtactgttccaagtgctttacagatattaactttacctctgaggtaggtaccatatgttctccattttagagatgaggaaattgtgactcagaatcatataacaatgcccaaggatggagcttggatttagtccctgtttttcccagttttagagtccacgctcttaactccctattcactcgtaaggatatacacttcataatattttgcattatttcgtaaatgcaaatgactgtaataccatttggtgttctgaattttaactatatatgggctacaaatgaattctgccaaaaatgagtgatcctttttcagtcattatgtcagtattggagtgtgaactgttcatcatcaagtaagtttgtttgtataattttagaattcttagaaatactagtataattttatttaataagtaaaatttagtaaataaaattttagcattttgaaagtgtaagaaagggctcaatttccaaatttatggttacttttgagccatatatttaccctataccaaatatgtacctggtatttaaacctattttagactgaatacaaaaaagattggcttttagttgttgacagagaatatgtttgctgttaagtgattgcaagtattataataagtttattctcttttgttttaaaacagaataaagatccgaaaatgtctcgagttgcactggaatctttgtatagattattgtgggtttatgtaattagaataaaatgtgaaagcaacactgtaactcaaaggtgagtatctttgctttaaagtgcattaaaaataaattcttgtttttaaaaaaacacactattgggaattttagtaaacattatactttgtgggtggaatatgaattctgtcaatatattatgaagaataggaagaattttttgctaatatgctgttgatgttatgatctcactatgactagatctttttccctgtagtcgtcttatgagcatagtgtcagcactttttccaaaaggctcacgaagtgtggttcctcgtgacacacctctcaatatatttgtgaagattattcagttcattgctcaggtgagtgcttcatctcatagtatgtatgtatataaattgttagagtaatctattgtaatcacttggagctttgaaattttttatgcatctaaaaacatagtaatacaacattgaataagtttatttcattaatctacacacttggaaagaaaacccacaggtggcagcactttgaattgaagagggata

SEQ ID NO: 111395 - DNA, 1064 bp, Homo sapiens
gctgttataaatgaaaatgttttaaaaatttccagtgaaattaaggagacagtagcttagattttgaatatagtttgttgttgttgttgctgttatttttaatttttgtgggtacatagtagatgtatatatttatgggatacatgagatgttttgatacaggcatgcactgtgaagtaagcacaccatggagaatgggtattcatcccctcaagcatttatcctttgagttacaaagaatccaagtctactctttaagttaatggaatacagtactgacaaattaatttttaaaagtttatcctattgatttgggtttgttttttgttttttgttttaattttttcagagagagggtctgactagcccaggctagactccaactcctgagttcaagctgagactacaggcatgcaccaccatgcctggctttactgattttggttttaaacaaatcatttttttagttcacagtagaaaaaaagagaagaaacattaaaatgattgttgccaaagactatatttgactgacataccaaaattttgttttatattaagttcattagatttttatttgtgtaattgttcaaattagattgaatatctttgtttaaagctcagataaatttaggatgattttattattcagacatatagcagcattgtagcagctgaaaaaataataattgatttttgtcacttctcaccttgcctttttggtcattgcgtgaatgccagctttgtttgaaaatcaagttttttcatgccagatacctcatcacttaagataatccaaatacttttatatttaatcattcatatgagaacagtttttatgtagaataggacttaaatatctttaatgtataatttttaataatattttgaaaatacaatttaacaatatgaaagtgttatttcatgtgtacctaaaaactaatgggacttatttaagactttattttttttagagcagttttaggttcacagtaaaattgagaggagggtaccgagatttcctgtgggtaaatttccctacccacactcatacctagcttcccccg

SEQ ID NO: 111396 - DNA, 1828 bp, Homo sapiens
agtctgaacaatatgagaaaaagctttgataatatcactaaaatcacatttaagtatgcccggccatatctaaaagttggtactggatctgcacagatgtaaaagctcctgaaatgattctgacttgaatgaaagggtacttgtcattaacactatttggcacatccatattcagcctctcttagtcctgaaaacaaaactgtgagagatagaaggatcattttcttcccaggatgctctgctagcaggatcctcttttcttctttgggtaggaacacaattctgacagtgtgggaatattcttcagctgcatgtcatgcgaatgcttgatttgaatattcttttgatatatacttagatgagcctatttgaatatttgcttgcaagttatagaaatattgcagacatgacattccatttcctggtattcctctaagttagacttgagactgaaaaccttatactttgaagataatggaaccgaggcagatagagaaagtgacttgtctctgggtatgcagctcgttgtgctattgtaggaataggactggatcttctttcatatttcaggaatgatccactggatgttatcctgtacgtctttttcatgattttatgtataattttcaaaactgcctcagtttcttaggtatacggaatatatactactttgagaaatgtttttgtctattttccttctagataaacgttgatattactcatgtttggatgagaatttatatgccttatttgactatttatgaaaattcccaggaccaaatcaaactgattgaactctttatgtcatgcaaccaggaaataaattttatttaattaattacattatacttatttctgttcttatttttggtaatttgtacagatatagggaccaaaagagaattgatcatttttctggatagtatgatttttcatacgttcattaaaatatttttaagatatgcatttaaatgtttctggaaggctgctttgtttcatgacagttcatacttttctgttgcttgttggaatttttatatatatacgtttcacctaacatatttgcaatacttcgcagtaccttaacttttttttgtcttaaggctttcatttaaatgctctgttttctttgaacccttacctcctgttaaatatttctggcatattgttcattttcattaatggctatgtcaatctgccaggctaaaggagataagagccacttagcatgagtatttggaatataattgtcttggccattaacccttaacttacattaaggctctattcagcagaaattttatgaattggctcctatttattaagtcttagataatgtggctgctctgcatagttgaggtaaggagttgagccttgaaggaaaaactatgctagttatctgttgtaacagttatttattttatgtatagggaaaattgatccaagataaaggccttacctaaactattttgagatccatttaatctcttgatactaaaaacctaaacaatttccttttattagacctatacctttttttttttgagatgaagtctcgctctgtcacccaggctggagtgcagtggaatgatctcggctcactgcaggcttcacctcccggactcaagcgattctcctgcctcaccctactgagtagctgggattacaggcatctgccaccaccgccggctgattttttatttttagtacagacggggtttcaccatattggccaggctggtctcaaactcctgacctcaagttattcacccgcctcagcctcccaaagtgctggaattacaggtgtgaaccactgctcccagcctag

SEQ ID NO: 111397 - DNA, 1072 bp, Homo sapiens
ttggcagtgtaatgatgtattgattttaagtgataattagtactgtatgattgattggcttatctctgtgaacaaatttatagtctccaatatgctctccatataactaattgcagactttatataaaaagagccttaaaagttggagacactgatttacatggtggcgttttgtgggttggttatttgatattattctattatggttattaattaaatggtaatggtggtgtcttgataatattataggaataaagaaatcctattatttctccttcagaaacttttaatttaattttaaaagaaatgaacagcaaatttagagtagcaatttttattttcctctgtgtgcctttctggcaattgtaatgaaggtagagaaaggagatgatatttaggtagcataccttttgatttttacccttaaatatcatgtggaaattagtgtttttaattcaaatcaaatgatgtctccacgtatattaaaggtttcaggctgtaaggaagaagtttgtgacagaattaaaagaactgcgacaaaaggaacaaagcccacatgtggtacaaagtgtcatcagcttaataatgggaatgaaattttttcgagtaaaaatgtatcctgtagaagattttgaagcatcatttcaatttatgcaggtgatataccttctaaatgacagtaaatagagcaagcctaacagtccttgctcttcatgactttttaaaagaaacaaaatacacgtaaattaatggcatcatttttagtctcttattccatgtgttaagttgttctaagtgtaaattaattttttttttttccttgagacagagtctcactctgtcacccaggctggagtgcagtggcatgatctcggctcactgcaacctccaccttcctgattgaagcgattctcctgcctcaggcacccgagtagttgggattacaggcgcctgccaccaggcccggctaattttttttttttttttttttttttttctttagtagagacgggatttcaccatgttggccaggctggtctccaactcctcacctcaggtgatctgcccgcct

SEQ ID NO: 111398 - DNA, 1010 bp, Homo sapiens
accagaaggttaaatatagtaaagtaaaattgaagatagaataaaattagtattgcttttatcatataaatgaatattcagagaaaattatacaatactctgataaggaattttcatatgtattaggaaagagagtttgtagaaaaatttaatgaaatgttatgtttgttcttttgttattttagatattcaggaaccaacactgggaatgtgcatattattgctgatttatatgcagaggtgataggggttcttgcccaatcaaagtaagttttgtaaatcacccatttagattttctttgcattttagaatgcttcattaccaatgaatacaatagatactgatagttcgaaatccaccattttccatagcactaagtcagctccaccttttattactttactgctctgtttctcagaagctctttaacactcatacctcaatttcaccacttgttttaattttatttggggttttctataaatgtctgaatcgaacaaatcagaaattgccaaccatatttaggacactatctttttccctatttttaacaattctgttagaatctttttaaagaactctttacagagctaataattattttccaagtgagaacttttattcctcagcaatgcagtgttttctaatcatatttgttttaatgctaaacagagtttgaattggtaagagacaccaaaaaggaaagatgaaagatactagattactcaattaaaactgttaattcattaagagttatacacattgagttgcactgaaccatcactttagtaaacagcaaaatatatttgttattagcaacttgtggttactgtaacaattatggaagattttggatttcctttgttactactgggaaatttataaggaaaaaagtatcaaattatattttcttagatgtgtttgaaagagtctttggccctgaaatcatcatataacaaacaacctttctaaattctaagaaggcaagtacaattattgttaatgttta

SEQ ID NO: 111399 - DNA, 1050 bp, Homo sapiens
agtaacaactttccatcctcaggccccaacttttacctctttttctaactatcaaatttctctccccactggtaaacacatggttcttttacatatacatacagaatatagttttacatacatataaaaggtattttatattactagccaatgtaagtgaatgtgtatatacaatatattatacccaaagtatttctttgtttttttttaacttatatttctcttacgagtgaggttaagtattgaacagatatttaaaagctataagcttttaaacagaataggcatattgctgataccagtatttgacaaccgccttgttttttcagataagaaaactgaagcacagagaccataaggcatcagcctatggtcattcacttcgtggtagtcaggtcggaggtcacaccaaggccctctggctactgataatctctgtactaggctgcttttcagtaaactcttgaatgaatgaaagaaagaacacatactgttgacttttgaacttgaatctaaacaaaacctatgttgaactttaagtctgtaatctaagaactatcaaacttaaacttgttacaaaaggagatgatgagcacaaccactttctttggtatggagagtatcacagtgagagccttgcctctggagccacacttaaattaaccatgtgaccttgggcaaagaggaggcttatctttctttaaaacaatctagtaacaagtgaaaacgagcaaaaccaaacgcacaaatctaaactgtttattatgtagaagatttctaatgttttatatttgtgctttatttttatttttaatgtttgttttttttaatcataggagaagctattgtccagatctcttcagaggggtgaagatcttcagtttgatcaggtatgacaattttgggagaatttttttttcccctggaaatagtgttcatcctaatagtctggcccaaatgtattcaatattaaggaattccttaatttctatatatccttgtatgcttaattcattctagatttgatagtttttttaaataagtagtata

SEQ ID NO: 111400 - DNA, 1442 bp, Homo sapiens
tgggtactcagtagagggtttttgttaaatattagtattttaatgaatgtagccttaagaagtattgctgtggtgtgtgccttttgtttttctaataataataataataataatgttttcattctagccagagcttccgatagttctttcagaatagcctgatgctattcatttatcttattagttaattcatttatttaatagttaattttagaggcatctgctatgtaatctgagattataaaattatgattaatagtggtaaggatttcatcagaacgtagatgtttctactctgccatcacaaatagaagaggcatcactgcttactcttcctgacacaccaggaaaacccccaaatcaccatcatattttacagattttaccccttacactcctatataccaagataatttcttcttatctagagcagagtgccagctttgtttttatttatgtccaagtctgggtaagttgggaatccatagcttcaagattagataatgaaaatacatttaatctaatattgtcacagtttttacaatatagcttcaaatgcttttattggaatttcatttattttgaaatttattctgtacccttttaggtaataatcatctaagatgactctctgggttcagagtcactttaaagaaaatagcatccagggcttgtcagatacaaggaggctggccttgctcatggtcagtcaggtagtaggtttcaaaaacacaaatgtgaatggcttttgctgaaagaatttaatctaccactaaaatgagagaattggctttttcattcttacattagaaaccataataaaagaagattaaggaagccaaaagactcgaagattagctgagttggatttttagccacaatttcattttcattttagaaggaagattcaagaagggcaattggtgattgaaatggcaacttgcaggctatgcaatccaataccttaggtccttttttcctaaaaggagatggatcaatcctcggtaataacctaggtatatccaagtttatctgttaatcttttagattgctggggactagaaaagaagatagaagaaaatccatttacctatcttcttctgatttagaccttatgttttgatttaggcccagcattttaaaaactctaaaattttcactattttttttgagagtataaatatatgtatgtgtcttaaagggtttcttctccctgtatggtcagtttcttccaaactgcatttttctgctggttttaccttctcctcacatgtttattttaacttgttatattttaagaatgaaacacagttgattggaagtccagtgtacacagaggagcctttttgactgtgatcttctgtgtattactgtcaatggaccatcagtgtcagatcttttttgggggacttgtcagagtccccaaagaaggttcctacagt

SEQ ID NO: 111401 - DNA, 1051 bp, Homo sapiens
atgaacattgagagaagtggttattggatttggaaataagcagaaataaaacagaacagttttaccttcttgatataattacaggaagtaactttgactctctgccaacttaaataggtgacagtttaggttactctttgggctggaaggaagtgggtatgtgatgtactaagaacacagtgtaggttcgatgtgggatgttgggaatggagaggaaggcgaaggatgttgtaacagctgaaactcactccttacacaactgaattagggatagctattcaccaccaatttcagattcagagggtttgtgacggcgcactgaggagttaggcacaataatatattggctttagaacctgtgtgcttactcagcctgttatagttccttagaaggatgagagaggaaaacaacagaagggaggacagggcaggaagaaagttgaaggaagtattgtcaatgctcttattttcttagtgaagtagccttgaaattgctgtgaaggtgagtttcttctcaatgattaagtagagaaaactactctgaggaaagcatctatgaaataatatgttccgggatctgatacataataatagccaaatgtatatttcaaaactgtgcagatgtttatattcagtttaaatcatcccatgattgctttccacatagcaaattgatttttatactaatgtatatatattttttgtgtatattgtataatgtatatatagtatatatatagacagcatatatattattaatataaagttctgttttagaagtaaggattacaaaagcctatagcataagttcatgattataagatttgattatagatatgcttaaactacaaaatgttagttttctttttcaatggtctctgaattacatgataaattactacactagtctacttaaacagcatacagtaagggaacaactctaaacaaattgaagaatttattatggaaaatgtcaaacatatataaaactaaagattatggtataatgaacacttaggacccatcacctggcctcagccattttcaagtc

SEQ ID NO: 111402 - DNA, 1058 bp, Homo sapiens
tttttcttgagctttataataagtgatatttctgtagtagacttcaagtaaaaaacattggacatatgccaaagatgtcataggacttctatgtttagaaactcttttcaataagaatagtttaggataaataaacattttagggacagctgtccaaagaacaagcagaagtaataatttttctgtccatcgaaatggaaccagaagcaaaaacattgaactggatagtgagggaaaatgatttcatttgcacaaaatagaaacataaagtatttgggaatagaattaataagaattagatctctcctctgaaggaaagtatacatttttttctctaggtacacaaaagaagacgagttaatggaggtgtgtcagatactagacaagaggttttataatataaagatgtcaagtttttttcaagtaagtttgtgaaggcatgcataagcttgaaagtatgagtgacaatagctgaagatggtgaatacataggaatatttgtctctacaaataataaaacctgttatacagctgtaacaataaaaagtctggtactaacacaaacacagatttttaatgagcataatagaaagcccagaaaagcatatttgagtatggatttagtttatgatagtgagtaaaatcagtgacagaatttcagtaaatgaacccaagagaattgattaaatattgaggaaaaaagataaaatctttatttcgtatcagtagctcaaataagttacaattggatgacaaatttaaatggaacaaataaagcgaacttaaaaagagttaaaatataggtaagtagttaatcaaaatggggaaacttttttgctctttttatgcaaatgaattagaagatataaccaaaatattagatttgggaaatatttattttaagcaaacagtatgataagaatttggacctttaaatgagagaaggatccatccgcatttggtaattatggaagaaataaagttattgatgggaaagttcttagcaaccaggatgcaagtttgtgttccagtgctgccactcccacatgacagtagct

SEQ ID NO: 111403 - DNA, 1057 bp, Homo sapiens
ttctttgtattttttaaagtaatttttttggcttttcttgagtgtttattcttccatgtatactgtaatatagatctatccaataaacctagacaaaacagtctcaaaattttagtgggctggccaggcgcggtggctcatgcctgtaatcccagcactttgggaggctgaggcaggcagatcacctgaggtcgggagttcgagatcagcctgaccaacacggggaaaccctatctctactaaaaatacaaaattagccagcatggtggcgcatgcctgtaatcccagctacttgggaggctgaggcagaagaatcgcttgatcctgggaggcagaggttgcagtgagccgagatcgtgctattgcactccagcctggacaataagagcgcaactccatgtcaaaaaaaaaaaattttagttggagctgtgctaattaatatattaattttatgaaaattgacacttatgataaatccttccatctatgactatgtctttccacatgttcagatcttcttttatatcttcttttatattaggaagcgcttgtcctttcctctgtatgaagtcctatgcttttcttattaaatttatttctaccaattttatttttgcgaatagaaggtcttttaaaatcattttctatttctaggtgattgttgctagttaataaagtttcgtatcttttttaatatttgtaacgatttaattttttaatattattgcatttacttatcatctccaggatggtgttgaatagcaaggcaaaaatcagcacttcagtttctgtttttaatcgaaataggtttgttttgcagcctatattatttgctgctgatgtttgttaaatattttatttgttttctttgtctctggctgctggatacctttaggtatacagttatattactttgtttgctacttgagtgtaggtcagactgctaccgtcttttaagaagtaatcccaagagtgatggaagggaaagcagcctaagttagcagcagttaacagcctgttaagatagtaggagggagcccctttccttcttgtcttt

SEQ ID NO: 111404 - DNA, 1111 bp, Homo sapiens
catagcctgtgccagagtctcaaatcactgggttctggcctattccactactggtcaaactcttagtcttcttttctggaagtaactgtttgcagttgcattgtcacattgataagacaagtttgctagccttttgcaggatgagaatgggtcatgtctttttggttattcttcctagtctgttgatgtgtgataccacaggacattgcctgtttgatggcatttttgacgattttagatctattagttggttttcattaagcatgctattttccaatttttaaaattttgctaaatgattaaagttttaagggtttttacagaaagataattaaagagaaattcatttgaatagggaaggctgtcgaagagaatttccaaattgtcagacctgttcttcccagaaggtaatgacttgtaaatgtcatagaaaatcttgtgaattgttttataagctgtattttcagttacattattgatatatgatacagaaagtagttagtcaaggcattcataaaaaatgaggaatgaattattaatatccattatcatgcaatatagtaacgatataacaaatacagacttacatttgatacattaagtcgatccttttttctttaaaataagctttacatgattttggaacaatatctgaatgagtaaattttattatagggagactatatggaagaaaataagaagatgattccagtaacatagccttagtaatatcgttgaagataaggttagtagtgtgtttttacgtagagtgcaagggcattgtattgccatgatttgaagtgtagggcttttgtatggttggaatagaactacttgatggctattatttgtggtattataattacaggtttccttatttatggtgcttttgaaactttttaatgatcacaatcaactttaagtaaaattattgtatagagccaactgttccattttagaagaatagggtaaggcaatagttcacaaccctggctgcatattagaatcagcctggggagctttcaaaaacatacacatacctgggccccattccaaagattttgattctgacttaaggtatggccagagatggccagcaaagttcagggtc

SEQ ID NO: 111405 - DNA, 1050 bp, Homo sapiens
cttagcatgctttttctttgggtagttgtttacttttgcttgagatttttggatttgtgggtttagccagtcaattttagaaattttttgatcattattttttcgaataatattttattttctaaatttactttatttaaaaaatattattgttattgttattttttttagagacagggtctcgctctgttgcccaggctgcaggtagtagctcacagtaacgtcaaactcctaggctcaaatggtcctcctgccttagcctcctgactagctagggctacaggtcctaatttttaaatttgtttatagagacaaagtctcactatgttgcccaggctggccgtgaactcttggcttcaagcagtgttcccgccttggcttcctgaagtgttggggattacacgtgtcagccactgtgcctgtcctcaattaatattttccattcactccttctgagattccaattccatatatattagaccatttgctgctgttccataaatcactgagtctaggttcatttttgtttgtttgtttcattatgtttagttgtcagtgcttcactttggagagtttctatatccatttctccaagtttactgattttttctttggcagcatcttatcctctgttagttctacatagtgaatttattgttttagatactgtgtttttctttctccattttatttgagtcttttattttctatttcttcttcattgtatttattttttcctttacatcctggaacttatttataattgccgtttaaagaacctatcaattctgtcatctctgtcatttctaggtctactctattgactggttttataggacacattttcctactccttgacacatttaatacatttcaattggatgttgccatttgtgacatcgctgagtgctggattttgtcacattattttaaagagtgttgtttgttttggaaggcagttacttgcagatcagcttgatcctttgcagcttggtttagaggattgttttggagtctttgaaactactttaaggagtgcttagatagttg

SEQ ID NO: 111406 - DNA, 1049 bp, Homo sapiens
atagtgggttgaggactgagttggtctgacttttgtgggtaccccagagcttagcccagtggcaagcacttcttaagcagttagtaaacctttgttaaataaatgttaagagtcctctagctttcatgtaccagagcaagtttttacttgttaacaagaagtgctgtcagttgccatatttagctcactgacttgtccttcaaaaccatctagcacattgctcagtaggcaatggttccctaggcaaaaccagtcttagtttctttctttctttttttttttttttttaattttttgagatggagtgttgctctgtcacctaggctggagtgcagtgatgcgatctccagccttagtttcaaaatggaaagagaaaaacaaaaaaaccacctcaaattaagcaaacgatgatcaatctagaacagcagttagtaaaccttttctgtaaagggccagatagtaaatattttaggctttgcaggccacaggtctttgtcgcaggtacttagctctggctttgtagagccaaagtggttctagatgatatgcgagtgaatgtgtgtggctgcattttactacaactttatttaaaaaaacagctgttgggccagatttggccttgggggtcagttttccaacccctaagctagaccacagaaaagaatattggtaacatcagagagctacatacaagtaacttacctgggaaatagagaatggaggctttggccggacgctgtggctctcgcctgtaatcacagcactttgggaagccagggtgggtggatcacctgaggccaggagtttgagaccagcatggccaacatggtgaaatcctgtctctactaaaaatataaaaattagccagctgtagtggtgtgcacctgtaatcccaggtactggggaggctgaggcaagagaattgcttgaacctgggaggcggaggttacagtgaactgagatcgcaccactgcactccagtctgggagacagagcaagatcctgtctccaaaaaaaaagaatggaagctttgaagaaagggtccaata

SEQ ID NO: 111407 - DNA, 1341 bp, Homo sapiens
gtgcagaagctctttaattagatcccatttgtcaattttggcttttgttgctattgcttttggagttttagtcatgaagtctttgcccatgcctgtgtcctgaatggtattgcctgggttttcttctagggtttttatgcttttaggtcttagatttaagtctttaatccatctagagttaattttttcaaccattttttcctgatttctatgtagaccatttgtggttcatcttttgaaatactatgcaaatcattttcttcatgttgagcattggaagaatgagattgtattgtgtttcactaagtgaatcagattttttaaattattatgtgtcattcagagttatagatatgattgcttaggggttttaccctgttacctttgtgttttcatttccttcttgctcacttaacaaccccacaagagggcaggcaaaggaagggagagaactttcagttttcaaagtcttttgtaggtattcctttattgtactctcttgttatacttctgaattacatcaaagcagtaggattggctacttttgctatttccaaatattttgtagggtgctcagttattttgaaaaacatataatgttgatgactgtgtttattgaatttaagaatttatactttcagtacttcagctttatgtttttagatccatatatttaaaattatcaatttttttggttattcatgctgaagttttcaccattactattgataagtatcattgattgtaatagggagtttttttggtgtttaaaagtaactttagaatgtttgtaatatagaataaagttttaaatgactccttttcatgttttataaaagttgacattcctgaggtctgttagtgaattttcaaaatgataagaattatcttttgaatacaagttgctgttttacacgtcagctctaagtttatttaaaaggaagacacacctcaggccaaagtaaatttctctttacatgatcacagtgaaagttttcaaaatctaaatgttaaactagatggacgctcaatattttatggtctcagtattgtcgttaacacccattgtacatgtacgcgtacatgaagggcagtttcatggtctatagctgtttggtttgttatcagcacaaacagtaatgtcctgaaaatcagcttcaaaacagctggcaattgactgactggggtttagcaccgcctaaattcatatgacgtttatttgctctttgacacaaatagtgtacctgaacttctcatcaaggaagttggtataggcacctttctgtgtgcttgtgggcctagtaatgtagaagaaccttaaaatggattttttaaagagag

SEQ ID NO: 111408 - DNA, 1045 bp, Homo sapiens
tctgttacagaagtcaggcttctctaagcttgctggaggcagtgaacacagagaaaaagaggaaagacaaactttggagattaaattgtagctacttacttgctttatgaccttgagcagctatttattcatttttctcttctagttaacatttttattaacttagaaaccttttcattgcaattgttttatataaacatgtaaaatatagctatcatctatacacattttctctgatgtttgatcttataggaccttagggtcataattagatagcataagttccattgtataattaaaaaaactatacatataaaaggttaacacattgattacagatgaccctagaaagcattttagatgttgcatctttaaattaaaaagaatttttctaaggggtcacatgttcccttcctctgacaagcaagaacagaaaattttggatgaattaattgaaatttttgttaaatagttaaagatttattgtgtgtttctcgtgggcgtatcatcttccagagactttgtaggcaacttctggagactttaattataggtttgggtggtagggagaagagcattttaacttaagggagtccagagaatcattaatgaaatcagtaaagaaagtctccatatgaagccactgaatacattagggttggttattctaggaaaaccatgttgataatgggtaatctgatagtccagaaattcatgagcagtacaaatggaataaacagaaaacattctattgagggttgaaggctgtaattggtttaatggaaaaaaaagaagtactactttttactacgaatagtaaaattgtaaaacaatctactggccgggcgcggtggctcacgcctgaaatcccagcactttgggaggccgaggcaggcagatcacgaggtcaggagatcgagatcatcctggctaacacagtgaaaccccatctctactaaaaatacaaaaaaaaaaaaaaattagctgggcacggtggcgggcacctgtagtcccagctagtcgggaggctgaggcaggagaatgg

SEQ ID NO: 111409 - DNA, 1098 bp, Homo sapiens
agagtgcagtgaaccaattctgaattctaccctcctatatttgttacttgtttagactgacttaaccactgtggagaataaagcctatttgtgggggttggggtgggggtggtgcctactgactcttatatgcatgttttttcagagttacaggatgtgtactggaatgtgaaggattaagctttgtggtggcatgttctatatggtcatccatagtgaccaaactaatttggaatgttgttttgttactaacttggaaatgtgttattttctctacagaggatgttgatctgaataaactgcttattatgctttatacatttctagagcgagaggaactgtcaatcagtgtaaatctcacccagcacagtattttctttcacaaacatggggaggaggcaataccaagataaccacttttgggacagagccaggagctgttgtgtaactcagagggtgtgtgatagcatccagctttggagcccatcacgtcacattgagaaattgtggcagggaggcttacaggaaaaacatcttgtttattaacacctgaatatgttacttatgtagctttttaaaagtcatcagttagctagcttctcaaagagaggcaagaacccattcgcgtagttacagattgtggctatagtaagtcttctggtaacaggagctgtgagcaccacttcttcagtgaagtctttcctgttcccttctccactcaggttgatgactgtctcctttgtacctggttgcagcttgaacatatttaggtaacttctctcaaagcacttgaaacatgctactgcccatgtctcctttccagcttgtctgtaaactccttgatggtagcagctgtgtgtgtaagtgccactgagtatagattcctggagcttaggttgatccccagtaaatgttaaatgcaggtctccctgtgcctgtggaaatgcctcaacatcaattggttcaattgtatccttcaacttgatcactaacaggtctttaatgaaaagtctccagagatgctattcccattctgtactatcctcatcattaccattcttatttcttctttgccaatgcaaattctctatttcattt

SEQ ID NO: 111410 - DNA, 1026 bp, Homo sapiens
ataaaagaaggaagtctcaagtataattttataaaattttgaatagaacttttgggagtaacctcatttagaaacagaagaatgttacttgctgtttgaagcagcttttatagttcagtgcacatcaaataatgcttatattctgtatattgggttgacaaaaatatgtttataagacagtatgacgatattagagttcttatgacttactgggggtaatggcatattcagggcattaaatatttgatcgccaggtagcagaaaatggtcaataaaataatgaatgtgtaggtatttgaatgcacctctgcttttatctgagatacctttggactcattgtccgcttagctgacttcttagcgtgtatctttctagagtaaatgtaatagtctgtctattgacaaggattagtttacttgattctcatacttgattttgttaatagatcagcgccagccagcatgtttcttttgtaaagggaagggtactaatattatttactgcctacaacttgcaaaatgatttcatatactctctttttaaaaatccttacaggtttccttctgtctctctcttattcaatttttccttcactcccttctttttcctctccttttcttcctataaatgaggttaagtgattttgtgtgggtaactgtggcttagtattgtgtaactatactgcatacattgtgttgccttctcatatgaaatcatttctctgaaattacattggaaatggggtttttacagatttgttgtggatatgactttacagatattaatctaacttttagtttctttggatcacctcttgaattaaatagttgtttttgtctcctaatacatattgatgcaataaaagagttgggcgatgataataattttggtcctatactgaatttttgttatctgaaatatagtagaaactaaaccttttaaacccatttaaaagtcaattttctaaagtcacatttaacagttttggtgtttcaataatattaactaatgaaaactattttggt

SEQ ID NO: 111411 - DNA, 1034 bp, Homo sapiens
acatttttttccttgtcatttataatgcctgttagtttcacaggctgactggctttctttccttcttttcttcctctctccttcccctccttcaacaatatataatagctttattaagctgtaattcatataccataaaattcacctttgcaaagtatacaatccagtggattttagtatttttacagagttgtgtaactatcaccaatgtctaattttagaccatttatatcacccccaaaaagaaatttcttacccattagcaatcacccccctcccctactaattcgtactatttctatatatttggtcacaggctttcttaacattcttagtaaatacatttactgacctattaattacagaaattcatctagatgctcacataggttgtgttagggttctgcagagaaacagaaccaaaaatgtgtatgtgtgcagtgcacacacatgtacacatgtatatgggggtggtgggaagacagggaaagggagagttgttaaattgttaaatttttaaaaattggcccaagtgatagtggaggcttgacaagtcaaaaatctgcggggtaggctggagacccagggaagagttgtaattcagtcagctagcagaattcccccttctgaaaaggtcagtctttctccatcagggccttcaactgattggatgaaacccacccttttggagagtaatctgctttactcagagtctactgatttaagtgttaatctcatataaaaaatatctggacagaaacatctagaataatgtttgaccaaacatgtgggtaccatggactagccaagttgacacataaaattaatcacacaagtattcactgagatgtttaaaggtagaaaagtagaaagagcattgaattagggaacaggagaattactttctggtcttggtattaccagtgagagctttatccatgggcaaacatttctgggctgtaagtttccctatctgttaaacaagaggttcaacttgatcaggtttcctttcttgaattattatatggaagctt

SEQ ID NO: 111412 - DNA, 1467 bp, Homo sapiens
acaatatctgacagtgttgtgagagtgatttgagtgaggaatgtgctcttaaaggaattacagaaattggttttaataaaatctacattattggaaacaaaagtttaccaattaaattgtattttgggaaacacatgggggaaccttttttttttttttttgagacaaagtcttgctctgttgcctaggttggagtgtggtggtgcaatcttggctcactgcagccttgacctcccagctcaaccaattcttcccgcctcggcctcctgagcacctgggactacaggcatgtgccaccacgcatggctaatttttcattttttatagagatgaggtctccctgtgttgcccaggctgttttcaaattcctgggctcaagcagttctcttccctcggcctcccaaagttctgggatttggtggcataagccaccaaacctggcctcttttttttttttaattgaatttttgatgttgaggacagacttgtagaatttaaacaaattataaacttaagttgcaataaattgacacatttgtcttgatagtctcaagtagaatgcatgagatagttccttgtgttgccttgagtgatacatactgttttttttattttaatgttggaataaaaatctcagtatgttttgaagcctagtatgatctaatctaaggtcattgtgctttatgtaccaaaaacattggctttgattacatttttaaagaaaagtatcacatggcctcaataaagacaattaggttagccttgtttttagagaggattattagagtgtgggtcaggagaacatataaggtacagtataactggatttcagctggagattttgcaacgtttctctctgacaagggggataatgtcagctgaataatgttggctggatgaccatacaattaggtagaaatgtgattggttgaggcatacctcaaaagttaatgagtaatgaattggtgacaactggagagaaatttctagtggcatgtggaaattcactgtctattttttgtaatgatgtgaatgaaaatgttgaggctatgtgtatcaaatttctggaagaaatgaattttctagggttaacttaatggaaatagtatttctgagtgaaatagtgggccatggctaatgggataacttagtgtggagctggatgtgaagtttcatacatgggttaaaaaaccaactgcacagttacaagggtgagggagatgtgactgaatataaacaacgtcaatattttaattaataaactcaatttggatataacatgtgactaccagatggcttcacagaatcatagtctagactaatagaaggaggaggttgagaagagggagagtgctagtcttacattattctgcaatgtacacagttctgtacacaatgctacacccagggtattgtgttcagttccagttgtcacaattgaaaacgattcagggccgggtgcagtgg

SEQ ID NO: 111413 - DNA, 1383 bp, Homo sapiens
tacttgggcagttttaatagcccaccagtattctagaaaatcacttactgtaaagaagtttaaatttagttttatttgggtttggaaagtgtgtatttatgtttaaaggagaaaaagtttttgcttatcaaagtttcacatgcttgttgtaaaatattaatatgaaagaaatgcataatttcaaaattaaaagtggctgggtatggtggctcatgcctgtaatcccaggactttgggaggctgaggcgggaagatggcttgagcccaggagttaaagagcagtatgggcaacaaagggagactctgactctatttaaaaaaaaaaaaaagaaacgaaaagtgtcacataacactgctcctatcacattgtaacattgttagtggttgtttattctttcaggttttttttttcctttttttctttttctttttttttttaacctctgtataggactgtcttaaactgtctctcatgcttgcaaattttagttagtaaattacatttattgggagtggggaaaactaatcattttttatatacttatctttaaaaataatttctccaggcctagtaattctggcaattctggttccttttaccttttcttaggatacaaagctgccactagtatgtttgtgttcaaaatgtagacttcatactctgcaaaaattgatcaaaacctgtgtgcctgaacagtttatctgcctttaccccagaatatttttggagtacatactttaatttcttcttatttcttgattattcttctcaagagagagaggattaaaaattgctttgagactcccagcgggcactcctcatagtagcccaaggagaaatgtagatttgttcatggtggaatcactcaaacgttaagttgctaattataaaaagggggctacagtttaggctggtgaagtaggtgagaagagtctgttgttccacgtccttctttaagctaccccagagggcagaaagggtttccaaaggatcctaaatagaaaacccagctgtaagcagccaggcggcctaatcagctgaaaaaaaaatctttcatttagcagacttttgagaactgcatctatagtgtgtaccatgctaggcattgagggtaagattaagtttgtatctgtcacaagttatgagctcctctgagcaggaaccttaaatagaccagtgcagagtggaacatgtggattaaaggtagcttagatgaagtgcaccctttggtgaacttattattcactcatttgtttatttttcggcatagcctcttccaaaatagcctagcacacaaacctgggcttccacaggaggtgggttaaggtccatggaacctcttgaattaaacttgttagcttagagttgttttttgggattgc

SEQ ID NO: 111414 - DNA, 1036 bp, Homo sapiens
aaaatgctgtgctgcctaggagatatcgtctgtaaagttgattctgctactgaatttacagccattataattagtaccaacagcttttactattgataaaaactagtataagacgtcttttcatcttgagcattatcactctgcttaatctgtcaatacttgccgaggaaatcagagatagcacattccttgttagaggccttagtgaagaatgttttcataagcattcatttttgacagtttcttcttgtgcaatactttatgtagagtacttgcatgtgcaagttacaaccgtataaacaaagtagcagtgggtgtgttattctctggtcttttttctgctactcattatcaaaaatagcattccatcgtgtcttgtcttccactctgaattattttgtaaaattagttctctaaaagagggaattctgttggaacatgtgacccagttttttttttttttattaaagcagtccaactttttaaagcgttcatcgattaatttattgtctagtaacttcggagtggtgtggaacattgtaaattcacaggctcagcagtaacaatagagaaactacttgggaaattggaagccaatatcagataatgtttgaaataaaaatctattcttctcacagaatttaggaaataaagacacacaaaaacaaattctttgggttcaagtgatcctcccaccccaggctccgtagtagccgggactacaggtgggcacgactgcgcctagctaaaatttttattttttgtagagatggtggtctcactttttaatttttcgtatagacggctggtctccaactcctggcctcaagcgatccttctgctttggcctctcaaagtgctgggattacagactgagccaccgtgcttggccgtttgtagtaatcttgatggtatctggcattgtttcacctaatatttcttcttttttgtttttttctttgatccatttctgtgataaggatgtcaggcaagcagctaggcataatcttccttcccatctcataataaaaggaga

SEQ ID NO: 111415 - DNA, 1032 bp, Homo sapiens
caagagggtgtgacaaataaccaggtatgcatgcttaaaaattactttctactacttagcctacaggctcaaagaatgaaattatctcataaaagagataatttataaagtcgctctcaaaagagggacaacagagggttccggaacgttcccgccagccgccacgagaagaccagagaggtgcatcacaacagcccaaagtcaagcctactcccaacccccttccccgccatccagggaaggggcggggcagggttcttggtccgccgctgtcgcctgcgcagtcgcagtgcggctcgtggccgcagctgcctgaaagggcaaagggacgagtatacgcatgcgtctattcctaggctgctggctctcagacccgcagtgaggtctgacgtcatttcctgccgtaagtatacagtgcctccgggtcgcggtcattttgagcccctgtctggatgacttcttgcggctgttctacccctccccctccccgcggtaccttgcacttttctccctccctgccccctctcgagtccaccctccgggccttctgcccctgatcgcttggttttccttgcagtcgcctgctgctgtcgtcgggaggtgggtgaggtgacgcaaacagccccgttgttgccctccgcgtatcccctcaccacctttgcggccatccacgactttcgcaccttccgccattttcctgcctgtgagggtggacagatcgcgctcgggtctcggcctcctgagtgccggtgactgcgggaggcgacggagtgcttctgggggtgtgagctggggaagttcgtggtcacggatgcgtgtggggttgctgctcagtctgtaacggcaggtgggagacggacactgggtggaggatggagtgcggtaatcagcggttgtaggccgcttaggctttaatccagcgttgttttgtgtaaagaacttaaaatggtattgtcttaagcgccgtgtcagccctgacagtcttcctggtgtttctaggaaggatgccgttatgggaaataagagggtttc

SEQ ID NO: 111416 - DNA, 1850 bp, Homo sapiens
tattccataattttggagtgctcctttgtgggagaggttgaatgtttctgatgattatttcattttttaatatggaagctcagaaatgacttgaaattttttttctcttctattttggggaattatcctaatcattgggcatagattcgagaaacgaccaaaacataggatgtgaaagaacccacttccaggaggaaaaaatatgtctgttattttattgatatcttgatagtaaaaaaaattataaacttataaaacgcatatgctttttcaattaagggacttaacctgaatagtgagttccaaattaatcagtaggtctgttactttttcatctagctatttacatgtggagtacgtaagatatagtagtgtttaataaatatttgttgattgattgctgtgtagactagtagttttactatatcatacgtcttgatttactttgacctatctagtgatagtttctaatacttaatatgtaatgtttttgatacaggaaagatgaatgggagggctgattttcgagagccgaatgcagaggttccaagaccaattccccgtaactatctattaagtatttataattagaagcacttcctatgtaaaggaattttcactgccttgagtaacagtggcaggtgggctggcttcatgggcatgtgcagacagcgccccatacttggtttcatgttctagtcttgttatcttgaaattcataatcatttggataaggagtcccacgtttttattttgcactgggcccagcacattaggtagccagtcctgactagcagatagtagcattaattctatttgaagtcaaagtttgttgaaagtgtataagtggcctggctcggtggctcatgcctgtaatcccagcactttgggaggctgagatgggtggaacacctgaggtcaggagttcgagactagcctggctaacatggtgaaaccccgtatctactaaaatacaaaaaattagcctggcgtggtgatgggtgcctgtaatcccagctactcggaaggctgaggcaggagaatcgcttgaaccccgggaggtggaggttgcagtgagccgagatcgcgccattgcactccagcctgggcaacaagagtgaaacactgtctcaaaaaacaaaaaaagtgcataagccagttgttttattatttgagtttaaaaaatgggtgcctcttgttaatgtttaggctaagataatttttcagacctagttttattatggataatttaatgttttctgattttccctggtaaaaagacatagggcctgattacattccaacagaggaagaaaggagagtcttcgcagaatgcaatgatgaaagcttctggttcagatgtgagttcaattttctaattaatataatttgatccaaaatttgtacctgaaattttgacttgaatttgaacctgaaattataataactccgtatagaacaaattggcaaactttttgcatagtgtggttgttgttaaaagagattaaggagataaaggaattgcacacattttaaagtaattatttccagatttttaacaaaaccatgaggtaattttgttgataatagtaatagttagcatttactgtgtgtacatagattatataaaaacaacccaataaggttgataactattattaccctcactttacaggtgaaggaattgaggtttagagatgttaaatggcaacacttagtgttacacaggtgataaattacgatgtttggagttgaaaacaggtctgtctgaaacagattttactcttaatgcttttaaccattatataatagcagattagttcccattttatcattgtgaaatgttgtta

SEQ ID NO: 111417 - DNA, 1044 bp, Homo sapiens
gaaaccccgtctctactaagaatacaaaaattagctgagcatggtggcaggtgcctgtaattccagctactcgagaggctgagacaggagaatcgcttgaacccgggaggcagaggttgcagcaagccaagatcgtgccactgcactccagcctgggcgacagagcgagactccatctcaaaaaaaaaaaaaaagacaaaaagcatgtgataaggacaggctgaaagacagcttgttaattttataccatatctacattactgagaaattacagcagccaaaaaattactgtattaataggtagcatttcactctcaaaacagataaccaaggtgttgttgcatattatagcatcaaacattgaaatgtagaagcttggttgtaaccaggtgataggaagttcaacgtataattatcagaaggatgataatcatacataggaaattttgtactttaacatttgtactttcgaattagatagtctatgctgtatgtgacatttatgtaaacaaataatggcatctgttactttggagagtatcaccttggattagaaaaaggtgataaaagcatttacgaatttataaaaaagcacttactaaggtaattttttatacattttttaggtctgttaaaatacttatcctcttctaaaattagacttgttgatctagggaccattctctttccttaagataactatgtttctatactgacctacattccattaatctgaaatataactatgaaggcatcttatttctaggtgcttaaaatcgtgaccctatgcactgacctaaaatcactatgtctgtgcccaaacacacaggtagtgaagaccctgtgcatatagggtcagtttattgcatattcatgttaaaatagttctcaaactccagaattactaaaaagatgtatcagttcatatttgtatcagctggagtctatgaataatatttcatatatgtgtactactagttttcaaatgatacagtataagagtgataagagtatgggccaggcatggtggctcacacctgtaat

SEQ ID NO: 111418 - DNA, 1149 bp, Homo sapiens
aggattgtgacattgcactccagcctgggtgacaaagcgagacttcatctcaaaaaaaaaaaaaaaagagtatggactctgaggcctgattggctggattcaaatcccagctccacacacagtagctgtgagattttggacaagttcctgaggtctgtgctatacttttcttatctataaaatggggataactgcctagctcatgaaattattatagggattaatgcaatttaattaagtgttggctatctttattaaatagctattagtgttattatgattaatgaaataaaaatttttattgactacagttaggaatatagagtagctttttgttactgtgaggggagaagagttcaaataattgtagggattcttgtatatattgaatatagtttgggactgtggtaataatgtgcactaggttttggtcagcagtattactgatttgcctatagagacagattatttaacaaaatagatattacatactgtagtggaaaaggccactgactagggagtcaggagacttgggttctgatctcagcattaccacaaactaaccagctgtgttgctttgagcaaatgacttgtcttttctggatattagtgtactcagattggaatgaggactagataatctctgaagcctctttcagtcttaccattgtctttttctgtgacataaagtagaatacctgagttggaatgagaccttaggtctaatccattattcctttatagcatgagaagaagctatgcaaagacattgtggtgaatggcagaactagtactagaatctcctcgaacagactattactctgcattaaatggggaaagcattatccattgtagaaatggccagctaactcattgccttttattcttatatgattcttcagtgcttcatgttgcaatccttgagtcaagctggagaaaaatgattgcaaattgtactggtgctgtaattaaaagggatttgtcctttgcaaaaccttaaatgataaatgataatgcatgaaggcattctaactagccaacattaaagaaaccatatttccagcaaaggtaaaatctgttagtaagtaggatagcatgaattcagaccttagcgtttgtgcaatttgtgtgtgatggcaaagttaatgc

SEQ ID NO: 111419 - DNA, 1928 bp, Homo sapiens
aaccacttgggaggctgaagcaggaggatcatctgagccggcaggttgaggctgcagtgagatgagattgtaccactgcattccagccttggtgatagagtgagactttgtctaaaaacataaaataagataaaatggttaagaaatcaaaggaaaagaatatttcattacgtgtgaaattacatgaaattcatatgtttgcatctaaaaataaagttttgttggaacacagctacgttcatgtgtttttggattgtctttcggtgcttttgctttaaaacggcaattgagtaactgggacagagattggcccacaaaacccaaaatatttaccatctggctcttcatagaacgtgtttgccaacctcaggtctggaacagcactgtccagtgtggcagccagtagtcacatgtagcaatttaactttaaaataacttgcagtgaaaggatataaagcaaaatcataaaaggaaagggagcatggggtgaagtccggcggaaaccaggtcccaagagttctcttcccagggagtgtaaatttctccaacagctagtcataacaatgtgtgaagttgtatctacccggggaactcattagagactcagtgcccacagtttttattgggggctggtcacttattcaccctctgcctaacaggtaccaaaattccagactcctagaatgaaagcagatgtttggcatgaactgtatttgtacaaacagtttgggcacagtgagccaattacgcatatcaatggggggaactgtttaccagtcaagtaccaagaccaaattgatcacagggttggtcactcaaagaccaacttccattatcataaaaaattctgttagacagtgctggtgtaaagaacagtgattcatagctgtttttaagttatagccccctttgagattatgagttttggatttttcactctcggttttaggcatatatatatatagatgtaatattttcatatagtttaaggagttcactagtttagaagaaagaacataagtgtttaaaatatgtgctttttaatttttgccccagccaccgtatgattacggtcaaatatgttttgtattttggtttagatggtatactagagcttaaaagcttgagatctggtatcagacagattttattagaatctgtaaccaaccattcaactagttgtttggccttgagcaaattacttaacatctctaagcttcagtttccttatctttaaaagggtggtaataacattatctaccttatagaaatatgataaaaagtataataaatgagataatgcacataaggcgcttagcatgatgcacagaatttagtcattactcagtagtggttcttacttgtaacttgtttcttacctctccttcattaactttttccccttctcttacttcagaagtaattttgagtcacttttactgtgttgtcttagttgatgctgttgatgaacagctggctatttggaacctaagcctagatggttcatgaattatattgtttaatattttgtgatgttttcttaaatttaaaatgctcctttaatttttccactatgtatacagtacagcttttaaaaatggaacagtcttttttaaaggtcttagttatgcaatataattcctagatggttttactgctattcatttatctaatgaactttagacaaaatcttttacttttgttgatgttaacaaggtctttttcttcctatagctgtgcctttggctgcaacaagtatgttgattactcaaggattaattagtaaaggtaaatatttaaaatttgaatttatttagcattttggataccatgtttgttttgtggtattttccaggtctttagaaaaagtaaagataacaatgtatcatattaaacactatgtagaaattcattgatgaatttaaacg

SEQ ID NO: 111420 - DNA, 3116 bp, Homo sapiens
tgttaatggatattaattgacccagcactatatttgaaaggactatgctgcagtgttgtctttgtcataaatcaagtgtgcaggtgtggatctgtttctggactcttagttttggtcagtttgcctattcttgtacttaataccagactgtcttaattactacagctttatcatgtagattttgctatctggtggtagtcagttctataatacgattcttcagtgttgccttggccctttgtgttccacatgactcttagaataagcttttcaatttttgtaaaactttgattttaattgggattgcattgtatttataggtgaagttatggagaattgccatctttagaatattgggtctttcaattctcagtaagttttataacttgtcagtgtagagatctttcatatctttcattagatttgttcctgggttttgagcgtttttttttttggtgctataattaattctgtcttctaaaaaatgtttgtttttttgtttgttgttggtataaacagtttttcatacacacacacatatatatttggtctattgaccttacatcaagtgatctttctaaatttacctgttctaatactttgtagagtcttttggattttcgtcatatttctcttgatactgaattcatttggttttccctattaaacagtctagggttctgtaggatcatggaaggagctaatgttgtaagattatatttaaagatagcctttactgatttttctttctgtaacagtgttactcagaaatacttaactcttttctttaggaatactttcaagtcatcccaaatatggttccatccctaaacttatacgtaagtatgaacaacattgtagttttcatagctttttaaaacttaaataaaattatttttatcaaatgttttatcatgtcttactcatattagttatgtggttacatgctctgataaatcagtttgttaaagcatttcattaagtggattacttggatattttattgttagcataaaaaatcatcagttgaaataggcatttttttgtgtctttataatgtaatagaacaattaatttaaaattattttgtaaggataaagtatttgaaaataaatttttggtctgtctatggggaaacaaagttatgaagatattctgattaatcaaaataaagtatatttaaaattaagcttaatttttaaaagaaatctctctaatttgtattttaaaatgtaaataagcataacttatttacacattgcaatatagttaatagaaaaagaagctacattgcccatcaatgatagactggattaagaaaatgtggcacatatacaccatggaatactatgcagccataaaaaaggatgagttcatgtcctctgtagggacatggatgaagctgggaaccattattatcagcaaactatcacaaggacagaaaaccaaacaccgcatgttctcactcataggtgggaatcgaacaatgagaacacgtggacacaggaaggggaacatcacacaccggggcctgttgtggggtgacgggagtggggagggatagaattaggagatatacctaatgtaaacgacgagttaatgggtgcagcacaccaacgtggcacatgtatacatatgtaacaaacctgcacattatgcacatgtaccctagaacttaaagtataataaaaaataagtaaataaataaataaataaaagaaaaagaagctacattgctcttcaaaagaagtacctgaggcttttcatgagtctttcaggttagcctttcttttctatttgaaactcatgtgatgcagtaagtgccacgtttaggttatggttcgtaatttattactttaagggatttgttgcacctaattttactttaaaacaatcttgtgaaaatggctgtgcatatgatattctgttttataggaaaataatggcctaaatccttgtgatctagttctgtttatttagaactagaaataaataaatgttttgatgcttttattccttatccattcctcttcccattatacctttactaaatctttcctgtatatattataaagtaattagtatactataattgatttatttatagcagctttattttggcacactttttttggaaactgaattatatccatagactctgtatatgaactctgatctgatttaattttgatttcttctaccattatttcaggaaatctcagtctttctaaaccaaagacttatttagaatcacactttaaaacaaatttttcttttagaaaatacttttgtctgaaaggcacattcagttacactttttgtttgattttacaaataagttgcttgtatcatgggatactttgctggaaaactttcttatgtgaaaacttgccaagagaaattcaagaaacttgaaaattccccccttggagaagctttacgatcaggacaagcacgacgatcttcaccacctgggtaggccagattctgatctttacttaagatttttaatttttaagaaacaactagatgttgctataactcatggctcaaaaacattgcctgaaggaccactggatacttgccatttgctgtaggctaaaagtaatttgcttcaaaaattggagcaagacttgccaccatttatttatttatgaatgaatgaatgaatgatgggatctccctctgttgcgcaggctggagtacaatggcatgatcctagctcactgcagcctcaaactcctgggttcacaaggccccactgcctcaagctctctgagtagctaggaatacaggtgtcagccactgcacccagctaattaaaaaaaaattttttttatggagatgggggtctcactatgttgcccaggctggtgttgaactagtgggctcaatcagtcctcctgctttggcttcccaaattgttgagattacaggtgtgaaccactgtgcctggttcttcatttttgttttgttttgttttgagacagagtttcactctggctcccaggctaggagtacagtggcgtgatctcggctcactgcaacctctgcctcctgggctcaagtgatcctcctccctcagcctctggagtagctgagaccacaggcataca

SEQ ID NO: 111421 - DNA, 3231 bp, Homo sapiens
atttactgtagtatttttctaaaacctcagaaactttgaatagtgaaacatacctgaccccaaggtttggataagggattatggacctttgtagagtatactctttaaattttaaaagattagagggaaagaagttaaagggaggggagggtatacagtggaaagggagaagttgattataggtcagagaaggttctagagaatgcagaagggggttctaggtaggtcagagtagccgctagccatatgtggctatttaaattaattaaagttaaatgaaatttaaaattcaatttctcaattgctttggtagcatttcacttgctcaatagtcacatgtgctagtggctaccgtgttagtgccaatatagaacattttcatcattgcagaaagttatgttggacagcactacttaagagcaaaagtcggggcaaaggggtgagtattagccttgtataaaggaagagacaggaaagaatggaagttcagatgattaaagaatttggatgaaagttattgagagcttcttaatcctcaactctgatttttttatttttttctttaatggttggaagcaaaggcatcaaattagtcagaaaaggaaggaagggaatgggcagattaggagagaatggctaaagtcactatcttatctccaaaggcagctgtccttgttcctcactatgtctcatttaaccagtctgaagttcaaatccattcttcttgtacagtagtccccccttatccatgggggataagttcgaagacccctgtggatgcctgaaacctcagatattaccaaatcctttatgttctatgtttttttgatctagatggctactaagttactaacaggcatgtagtgtagacagtgtggatatgctggacaaagggatgattcaagtcctggatggaccagagcagaacctcacaagattttatcacactactcagaacagggtgtaatttaaaatttatgaactgtttatttctggaatgttccatgtaatattttcagaccatggttgactgcaggtaactgaaaccctggaaagcgaaaccacagataagggggcactactgtattctagacatgcactaactctttccttgtgatgacttgcatcttccccaccatttgcattaggaaattctgttatatagtttttttccatacaaaagccaacaaacaaaaagccctttggtatctacccacagactacttagcaaggccatgtcttaatattattttatgccttccacagcagccatccatccatccactgctctgccttctgacccccttctctaaatcaaagtggctacttttttactgctctccacatgggccagcagtggcctgcttttgctttgccccagatgctatcctcccctaccagggcatcttattctttggtttaagtcctactttagttctgctttcttttaccaggaattcagagagttattaatcttttaaaatagcaagcactccttcagagctgttaggagacttagagtttattacagttagatttaaatcagtgccactttacatttttttattccttccagttctttataaccttcccaaaatagtaaatcatgttctctccatagtgtgggaaattctccccagtcttcttctgtctgatgtatattttcattatttgttccagaattttataatggtaaaatattttttataagaaaaagtattagacctggaaggaacttcagagatcatctgctcaaactaccatatttcgcaattgagaaaaccaggattcaaagaagcttagtgatttgcccaaggacatttcctaattgtcagcagagtggggttaagaacccaaggttcctgaagtacacacgatttccttcagaatttttaatataacatatatggtgaagggaaatgagttcagtaattacttattactaatgaaatgcaaagtgttttaatcccaatataaggttataatatttttctttacattctttttttagtaagaaaaatgtagttttgaaccatcatataatactagaactaattaggagaaatttaaatcctctttgctttatataagtatagtatatatttatttagcagaataaatgtttatggttgaaaatggctgggtgcagtggctcatgcctgtaatcccagcactttgggaggccgaggcgggtggatcacctgaggtcagagttcaagaccagcctgaccaatatggcgaaaccctgtctctactaaaaatgcaaaattagctgggcatagtggcacatgcctataatcccagctacttgggaggctcaggcaggacaatcactggaacctggcagggggaggtttcagtgagtcgagattgtgcccctgtgctccagcctgggtaacagagtgagactctgtctcaaaaaaaaaaaaaaaagtttatggttgaaaacattatttaatgtatagttatgttgcttagaaaattctgattattcactgggatcctacctttgagttctaaataagtatcacaaaaattattttttaaaaagttaatattaaaagtatatgcccaatttgtatgtcttattgaaaacatctttgaaaaacagtacttttggtgtggtatgtggtaggtaagactttgtaagttaagtagttgttcactgaatgttagcatcttttttttttaatgttcatatggccttttttgctgtttataaattgtataaactatgttcactatttgatcctgtcaaccaatattaggagtaaccactgcattatatttacatttgactctatgataatatgtaatattcacattttgactctctttgggagaaataaagaataaatgttagttcccaggccaaaataacagttgatactttcttctgcatcaacattgcatctgttagactggaatgaaaacaacacatattctgattaaaggctatgttttatacttttcaagtaattattttcaactttttttcctttttttttgagacagagttttgctcttgttgcccaggctggagtgcaatggcgcgatctcagctcactgcaacctccgcctcctgggttcaagcgattctgcctcagcctccttagtagttaggattacaggtgtgtgccaccacgcccaactaattttgtgtttttagtagagatgaggtttcttgttggccaggctggtcttgaactcctgacctcaggtgatccgccc

SEQ ID NO: 111422 - DNA, 1065 bp, Homo sapiens
tgatttttgaaaatagctggagttgttttcatagagtctgtggttataggactatttaactatatattgagtaaaatctatgctatgtcaagttttattcagttgtccctagtagaatatatttctcttttaattctgtatacagtatgagtaactccagtttaaaacactggtattttaatgagtttaaattgtactgttatatattatgatacatatttttcttctggctgtggtttagtttttaaaatttttgatgtccattttaatttttagaaataaaagcttaaaaatatgggtggaagtagatttcagtttgatgattatcttggtgaaagtatagtacctgtgaaatggtggtaataatttgattctttattctattttgattgtagctccttttgtaaggagcatttgtaaaatttagttgctttagagttatacaaatccttttattaccatttattaactgtttgttgttttaggacctgatcccaaccttgaagaaagtcctaaaagaaaaaatattacatatgaggaattaaggaataagaacagagagtcatatgaagtatctttaacacaaaagactgacccctcagtcaggcctatgcatgaaagagtgccaaaaaaagaaggtatgatagtttagtctgaatcactttactgttgaggattggaaactaaaacattactttaaaacaatactataaaaaattaattaatatgtgatttaactcttcaagcaattaaccaaagtaaaatatttttaaaatagtactttacagttatcagttctttttttttttttgagacggagtcttgctccgtcgccaggctggagtgcagtggcacgatcttggctcactgcagcctctgcctcctggattcaagcaatcctcctgcctcagcctcccaaatagctaggactacaggcccccacgcccagctaattttttgtatttttagtagagatggggtttcatcatgttggccaggatggtctcgatcttttgaccttgtgatccgcctgcctcagtctctgagagtgctaggattacaggc

SEQ ID NO: 111423 - DNA, 1040 bp, Homo sapiens
aggcagggtcccttgaaggggggagtccaagcttcggggtgcggagagaggagggggcggggctgaggtggaggagacggggtaagtgccctaaggttggaactggccgtggttccccccggacggcgggaagcgaggtcagcgctggcgcgggctccggcagcgggactaggaggcggggcaggggtgcgggctgcggggtttcagcagcgggagccggaggggtcgggccctgatggccgggtcgggggcttggcgccggggaggtgtcggggtccctggcagtccgtgggtttgatagtctgtgacgcagttgtctaatttctggctatcaggtgtgggggttggtgccatggaacccgcttccttagagggatggccgggccctaggccgcgccccacgcccggggggcgcgacttctcccaggcgtgctgggagggcgcttgaggggtttcctttagggtttgtctccagtcaacgggtatgaaggggaaaggcggtcccgccgaattctgggacttgtagtcgcggccgcgcccggccgcggttgggttgggtgcacgtgggtaactgtggaaacgggtcccggcatgcagcgcgcccttggagccttcctgctcggccaactcgtgctttattccccggccagctcctgcgcgctctcgggaggcggttgagttcccagggacggagcgactccccagcccttctcccttgggagagggagagcccacgccaggcgcagccctcttcacgcttaggttcttggtccccaagtgaatttccccctgcattttgtggccttacttgtggaataaatgcttggtcttgtaccatcatgcgcacgggttgtgggaaaacatttaagaagcaacacaatgtaaagcagcctttagaatggtgtatttaattttggcatccagtgtgtgtaagcactgggttccagcattcccttgcataaatatgagaacacagtggaggtacacgtaacccttgtaacgataatataaactatgtgttggtatttcttggggtgttt

SEQ ID NO: 111424 - DNA, 1188 bp, Homo sapiens
cttctcatagcttgctttttttcttttgaaatttacattaggagaagtacctcttgagaagtattctaagcagaacatgtattttaaaatgtgttttaagaaggaaaacattgaaatgcattctaaatagaattaggtattttaacaatcattgtgtgacagttttagatgtagcaaagtatctgctacttcaggtttgaattgcttttaatcagaaaatgctgttaatgagttatgttcaatctaggaagataggcttgtcatttgtaactaatgtactgaaaaaaacactagatatgaaaaagacccctgccctcttcaaatagcattacctgtggtatgatttattttagttctgccttcgaggatttttttttccttgtgaaattttttgctggcctgtatcagtagatttgcagagacggggagtaatccatttgtgcttctccccctgccccacgaccacaattgttggcttttaacatatgtcatcttaggcctcctccatattagtttatgattagtgtctgtaatggacactgtcagtccattgactcttggtctgattggagaattcttaccctggcaggcagatcttctcagacacactcgcctgagactgtgaacctgaggctggaggcaaggaaagaagagtagcccatgtggccattttctggggggatgcacagtggtggctgctgtgctgcttctagaggcaaggtctagttgttgctgcaatgatgatgcagtctgctgtgtccccttaggcattgttatggccagggggagattctgtgaactgtctaatagccgcctcccctttttttaaatcacttttctgtttaaattacctagaattagtttctgatgctctcaactaagaattctgatacttcagcatccagacttgtcactgtcgctggtcagatacgtggtagaagcccttgtgaagagcagtgatgtatctttttcatcctggctgcctgtacattctggtcagaggtgacccagaggactggaggaggacacagtcgatatcagctgtgggtcgtgggagctgtgtttgctggtggtcaggcaggactcccgaaccacacactagcccagcccactgggtctcatcatgtgccactctttactgctgctttttcctaattctttgtcccccaaaagttgggatgcctagga

SEQ ID NO: 111425 - DNA, 1070 bp, Homo sapiens
tgcaaaggcgctgaggtgggagtgttcttggagtgttaatggagcagtaggaagctcactgtggctgagtagaatgaacaaggggaagatgagtagaagatgagattggagagattagcagatgcagggtgtacaaggccctgagcccatgataagttttcttttgctttgaacagcttccccttccatctgtaactattgggtgaggtggaattaattttaatttgttctacatgctgaccagttgcccctctgtttactgaattattatgtcttctccattgagtttgaaatgccatttaattatatgttgtgtatgtgtatttatacgtatatgtttatcagctctctgtcattgatttttcttcttgcacacatagtataacattttaattactgtacctttataccaggtcttggcaaacaatggcccatggggcaaatccagccctaccacctggtttttataaataaagctttattggaaagcagccatacttacgtattgtttatggctgcttttgagctactatggcagtgtagttgcaacagagactgtatgggccagaaatccagaaatatttacaatctggcccttcatacagagtttaccaggctctgctttatactgtgtattgatatctgatagggcaagttcatcctcattctttttcaacaatttcttggcaggcctaacatgtttatttctccagatgaactttagaatcaatctgccaagcttgcctgacttccttcttttccccacctctttttggggtggagaactggggagccagcagaataggaattttgattgcattaatttgtggtttagtgaagggagaagtgattgctttacaacgttgggtctttctattccagaaatatctctttacgtgtatatctttcagtaaactttaattgttcattctgaacaataaaatcatacatattggagtttattcctatatgtattgttgctttttgttgccattataattgcgttcttgtcccagttatattttgcaagtgactatggtataaagggaagtttttgctttttatgtatt

SEQ ID NO: 111426 - DNA, 2175 bp, Homo sapiens
ctaatcttggagaaatagcacaaaataggagtgaattttaaagagcccaatcaggctgggtgtggtggctcacgcctgtaatcctaggactttgggaggctgagaccagtggatcacgaggtcaggagttcaagaccagcctgggcaacatggtgaaaccccgtctctactaaaaatacaaaaattagctgggcatggtggtgcatgcctataatctcagctactcgggaggctgaggcaggagaattgcttgaatctggacccggggggccgaggttgcagtgagctgagctcatgccactgcactgtagcctaggctacagagggagactccatctcaaaaaaaaaaaaaaaaaaaaaagtcaatcagagaggaccaaaaataaaaaaaataaaaaaaaatgagtagggatgatgatgatagatgtcagaagtatttagagagaggaaaaaattcttttgtccttagcagttcaatgatctgttcaagaaaatgaaataaaaatattagctactggtaagatatcttaagcggcaagctatttatgaacttaagttactgtatctttgtgacaatgttcaatgaaaagtgaggtgaaatagctatataaaaagtactgaagtggcagaatgagctccgtaaaatgttagtaagtgaaacaaggctgtgatacaatcagctcactaaaatgaaacatgagacagtgagatttttgtattggcacatctatttgtattaagtttggagaagtaaaatatattctctaattttgtaaacctcttgtactcttttttacttgaggaccacaaagcagaaagattaaaaaaaaaggaagtgaagcacatacttaggcactatttgttaagaataatgtgctacgtaattaaattattatgaaaatagcaagctggatagatgataaagggcctttagtctgaaccaggtgaactcaagttgccctttaaaatggactttctgtcataaatattaggatagacctgttgaaaaaatgttggcagtatttctgattaatgtgggaagaaaagctctattcattgactgatttatttgaaatcagatggggtcagttaaaaaatatttaatttgttctcttgaaacactgaacccaaaagaaatgaatctgaacttaaataataatctttgggcaaaaattgcacacaattttgattgctttcctaagtgtcatgtaaacaccaaaacattaagaaagagcttctaatgataggaggattgatttccgattcactaaaacgtcagccttaatatcttgcttctacctctgatgccagatgttcgtacctaattaagtactttaaaatggttaaaatagctcattttctgaagcagataaatattccgtaacattcttgtttatattatttgtatttttttttgtagtttaaagataaacttgtaaagtcaagtaatacaactcatacaagttgtaagtcggtgaagtctaaatttaatgatacaaataaatacaaatttgtagaaattatttatatttaagtatttttatcataaaaaaatcacagttattttaagaagcaagcattccttgaatatgtcttctaaaaaaatcctatctgccaagaaacttaaagttaactgtttgttttagtgacaaatggggaaaaaatctgaaatgatggtgttttatttactcataggtgttttaagtctctggaaatgtactttttttttttttagaagaatctgatttatacatgttttaggagcatttattcaacaaatatttactgagagtctaccgtatgactcagtaatggatgtatcttattattactgtaataagatactgtattagctgctgagtatgcacaagtgaaccaaacaggaccccgcaaagcagtatgtgcctttgcacgtgcacttgagaaatcctagttgttgctcttgcttagttgggatccctgcaaccattgggggagcaggtttggggtaaacagacttgaattgggtgttctctgtgcattttgtttatttagttcatgttggcaaattactattttaagtaaagttgtttccctaagcattaaaaagttgttttttttttgtagcctgaatgggttccagggtggctctgccttgaccagctgtgctgtgtggtcctaagtcaattcccttcc

SEQ ID NO: 111427 - DNA, 1057 bp, Homo sapiens
aaattaggtaatttgaattcttagaagttaaagttttatcttaatccattgatcgcccaaaactggtgcagagttgatttctttcctttcaaagccttgctgtctgtgcctgctgaggaccacagaattggtgtcttgttctttaagcaggtctcactcattcacttcaaccacagagctggagagatcttcctgtacttaatggtctgtgcccgcccagaatatcagccaagctgaggtttattctcacatgggtgagaattcgatagaactgtgaaaaacaaggctctttaaatcgcttctctttcagataagtgaacttgttaattttggtaactccaagggcctgttagattcgtttatttcaaacatctttattgtttcaccctgagtttagtaagtagttttttcttccttgtttcagaaacaacaaacgaacatcattgtctagtcttttctacctttctccatctttccccattctggctttgtgggtcatatcactaatgggccagaatttccacatgtattaatccagggaatttaagtgagatttttctgtttctttcttgctgtgactcagaggaataagaaagactctgaaaatgtaaaaataatgtcattgtttatatctcaaatgaatagaaaatattatctgaaagaagatagtagtgatttagaaaataatcaccagcaatctttaggccagtgatttttcaactttacaaaggcaggctactttgatacttttttggtggtgtggacgttattatcagaattgttaaattctaacaatcacataacattttgtgactttgtagcgcttagtattttctcaccacagtctaataaaatatagtatgataaagccagatttgaaactggcagtgtagttgcagtttctgagtttcattcttggcctttcttttttaaacaactttatttacataccataaagttcatccattttaagtgtacagtttagtgatttttattaagttaactgagttgtacacaccatcactacaaaccagttatagaacatttctattatccc

SEQ ID NO: 111428 - DNA, 1364 bp, Homo sapiens
tgtgataaaatgctaaatgtcgtatttgagtcaagaatgagataagaatgtccactctcactactcttacttgccattgttttggaagctactaggcactgctgttagacaagagaaagaaacgaggagtgtaaatattggaaaggaggagacagaaatgatcattgcagatgaaatgattaaattattttacacttggaaggccaaagagaattgcctgggcaaacttagaaacactaaataaatatgtatatattccatgcatatacaattctatagatggcttattttgagaagtgttgttaaagaagctctttaataaatagttgtctctgcagagtagggaggagttagaggggacaacttcacttttggaacattttattttttattttcaaatgaaactttgtatcatgtttatgtattaatgtacaaaactaaaatagtatttggttttcttctgataatcaagataagaaaactaggaatatataaatatatatatttatatataaatttatatttttaaatttatgtttatacatttatataaaaaggggatagaaggggacaaaaccccagaaaaaagtaacagatttgaatatatgaagtaaaatattgtgtaatgaagtagaacatttgtgattaaaaggaaaataatggcaacaagaaaaaagtatttgctttggccagattatgaggaagggcctgagtttgaactttagggggagccaaggatttgaagcagaaaaatgacgtaagacttcccagcaggagctccgggtgactttagtgttcctcctttgttaagaacagccaccttatactttgtgttagtgaaagtcttgttgttactttgtattgaggttactcctgtactttgtctcccttcatggagggcagggactgtttgcaccctaggcaactactgcagtgcatagctccaggatgtgtctaacaaatgttatgggaatgaaatggatacatactaagaaggtgaattctgctggacttggtgacttgctaaatctagagggtataggaggattgtagagcgtttcctatattctggtattcagccattcatttagtccttcattcagtttttattggaccagctattctatgccagatagtatgctgagcttgtaagaagaataaaggaactcttgctcttgagtttagagggaaagacagatgagctgggactttgaatgcagtgtgctaaatgtgtgagaaccattcctagcattgcgaggggtcacagtactgcctgacccagcctctgcaggtggggagattgtgaggactactcctttgctctcagtcttaaaggttgaataagttagccaggggagttgggg

SEQ ID NO: 111429 - DNA, 1049 bp, Homo sapiens
gaacggaaaagggggccttactgtctttatcaagaacagagtgataacttgatttttttctatgtaaaagaaacatttatgttttttcttatttaattttatagagactattatgtggttctttgctatgtttccaaaaattattttatgtattgaaattattacccaagtaagagtagaacattaagctgttttaaagagcaggaattgaattcagccttaactttagacaaatggtatataccatattccaacgattgaaggacatggtgataagttgatttaaatgattgtacaaagtagagtcctttaaagatactgaaattcgagaatacttttcaacttagacttgatttttttttccaaaaggagttaatggcctttaagtcttacttgttgacagtataatactactacagtggtaatagtatggtgtgcatggtcagatttaatttacataagactgtatttcacaggaactgatgatgttgtaggccctgaaggcatggagaaattttgtgaagacattggtgttgaaccagaaaacgtgagtcaaacttactgagttgggtgaatcagttggttgtttttcatacttaaatctttgttctttagcaaataaataaataattaaaaagtagtggtatgttagtttttatgaagcagtctaagaaataagttctaattctagtttgacttataagcagattctccattcttgtaagtgatatggtgtaactacagttattttttctctcatttaatttcttgtatgtaaaaggtacagtaagccagatgcttacaaaatggtgtggccacatgtgcctacaatgacggatcaactggaggccacattgtacgctgtgtaccttcgtgcccctcagtagttgttttagcctaatgtagagtcaatctaggacttataattattcatcatgattttgagtagattgtaatcatcaagaatttttcatagatcgtttacttccaattgaatttagctcagaagtgattgcttttttttttttgagatggagtctcgcactgtc

SEQ ID NO: 111430 - DNA, 1031 bp, Homo sapiens
ctttaaactttttattttacccttaccatttctgtgcttctgtcatctatcttggcccccagcagtgctttaaattttctaaagagcctttggaatgtctttcacttattacatagatttttatcttggttttttttttggttttttttttttttttaaatgtattccagttcaggtatttcaataaattacccaacttggcatgaaggtttggggacacctgggtcaatagtattttgccacagactgggccgtagacacaagaaaagaccattacattgaatttaagaaggaagttttctatgagaactgggccaagcttggcagagtgttttctaaacatgtagtcagagggctgagagtgagttgggcttgagaggggctccggaggttccacatggggtaccgtagtaagtatatgacagaggagtggcagcagggcctgggcttgaagttagaggctgagaagactgggagacaaagggcttgctggtatgtgagggattagctgagcatttagtctcagaggcagaaaagcctgtccaggatgggagagcactgacgttgactctaactgaagaagaaagggaggcacagctcttcaagtttcctcacccccaaataccagtactcaataaaagatagttattgtcattcttttttggcagttatgagtcctttagaactctatttctggcctggcatgatggctcacgcctgtaatcccagcactttgggaggccgagacaggcggatcacctgaggtcagcagttcgagaccagcctggccaataaggcgaaaccccgtctctattaaaaatacaaaaattagccaggtgtggctacttaggaggttgaggcaggagaatcgcttgaacccaggaggtggaggttgcagtgagcagagccgacatcatgccactgcactccagcctgggcaacagagcaggactccatctccaaaaaaaaaaaaaaaaaaactccatttctgtaggaatagaaatatccttaaaatttataatcatattaaa

SEQ ID NO: 111431 - DNA, 1041 bp, Homo sapiens
tttttgtatttttagtagagacggggtttcgccatgttggctaggctcgaactcctgacctcaagtgatctgcccgcctcagcctcccaaggtgttgggattacaggcgtaagccaccgtgcctgaccatcattgctgagtagagcagccgatggctgctttttaaagtgtccttgtgatgatgaaggcatgggcatatcaggattttatttcaagccttcagacgaggcaccatcaacattttcaggtccatttttatttgtcttaagaaggtgtgatacccagtttgtatagtactgagttctttacgaaagaatgtccctctacaaaagaatattacctgataccagaccttgcccatgtgttttgagggccctatctcctgggaagtgagaagcaatttcctggaagaggtctgcgtctgcgttctgagtccagggtactccttcaggctgtttgttgggaaccttgcttgccactttgtatgatgcaggtggtggcaggtgggttctcagggtgattgccacttgatccttgcaattcagggtttagtgacaagcctgatccactgtaaaggcatggaggaaccgcttgctttttgtggtatgaaactctgaagttgatgtcctcatcagtgaggtggagataattattcagaataacttttaaggttctttgtagtgtcctcatcagtgaggtggagataattattcagaataacttttaaggttctttgtagttcaaaaatagtccaacttcaagtttaagaacctctgcctaccctcccacccccaccttccaacctttctagattagtcatttgtttggcaaatgtttgaatgacagtgatgtgccaagtgtagtattccaggccctagggaatcaaaaaccatgagtaagataaagtccattaagaggaggggcttataaacaatattcagacaaaagatccagaagtcataaggtcacttgtctttatgccagtaaagtaactaaataagcattgtatttgtgaagtatgtgcacctagtacacaagaaa

SEQ ID NO: 111432 - DNA, 1027 bp, Homo sapiens
tctagagactaaggaaatatgacagctaaaagcagcgcatgatccttgattggatcctgattgaaaacagcagctataaaagaaattggggaataattgggaaatttgcaggtggttgtatatcagctaagaaagttaacattgatacagtagtaagattgttgatggtgttgaagtgcttagggatgaagtttcattatgtttgcaacttttaaatggtatagaaaaatgtatatgtatatgagagagagtacataaatataaaaaaggttaattgctggatcaaggggatggtatatgagtggttatttgctattctttcaacttttctgtacatttaaaattttttttaagtgtagaaaaaataggttatggatgtgtttcaacttcagggatttgttctttcctttggtattgtgtttatattactgcctctattaaaaaaataaataaatgaactcaggtcataatttgcctttattctgtttttctagatgtgatacaacagaaaaactcagaaatactttggattacttaagatcattcttaaatgattctacaaactttaaacttatttacagatatgcgtttgactttgcacgggtgagttctctggagcctatccagatgtttccctctcttccctcccctttttaaattgccttttgaggttagtttttacatgccacagcaaaaaaacttgaataagttaactcccaggatgctagttagtatttctttctacatgtatgcttttgaaaactaagtttgattctggtcaaacattctgtaggtcagcaaaaagctctagtggcagacgtttactggctcttggaattggcttaaaagtgacatgggcatgcaatacacactgtcttaaatgtctcttagataaggttggaaaagctttccttctcacagaacaacaaaccttctcctgttgagtttactagaataagctaatcatatctaattcagattcaccgtgggtgctattattgtatttggaaatcatgtgaattttaga

SEQ ID NO: 111433 - DNA, 1158 bp, Homo sapiens
gcttaattaccggatagattcagtttagctaaaatatgctctaagataaattttttaatgaatcctgttcttttttgctttgttttgttgagctgtatcttcacagattttgagatgttatattttcattttcatttagttaaaaatattttctagttcaccttgtgaattcttttttggcccattgattatttagaagtatgttattttccaggtatttaggattgtccagataatctttctattattgatagtttaattctgttgtggtcagggaacataccctgtataatttttatctatttgatttatggtccagaatatggtctgctgcggtgaatattttatgcgtactttaaaagaatgaatattctgctgttgtcagtggagtgttctataaatgtcaattaggtcaagttagctgatagtgtctttcaggtcttctgtattcttcctgatttctacttgttctgtcaattactgagagaggaatgttgaactctccacctgtatgtcttctgtcacctctgtcacttttttgctccacatgttttgaagcactgatactaggtttagtattgttatatcctcttgatgaattaagacgctttaccattatgtaatgtctctctttatctctagtaatattccttatattgaagtctacttcgtccaatacaaatgtattcactccaactttctttttattaaagtctgcatgctatatcttttttaaatcttttacttttaacctgtttgtttctttatgtttaaagtggatttcttatggatagcatgtggttggatctgacaatatgtgttttaactgggatgctgaaactattacatttaatgtaattattggtatggacaaaatttatatctcctcgcttgctattttttctctatgtatcccacctattttttgttccttttttcctcttttcatgccttctttttggatattttcactattgccttattaacttttttttcctagtagttgctctgggtgttccagtatacatctttaaatttcacagcctaccttcatataatgttatgccacttcatgtataatgcaagaatctttacaactgtgtactttcattttgccctctcatattttatgctgtttttgtcatttattttatttag

SEQ ID NO: 111434 - DNA, 1008 bp, Homo sapiens
catttttattactatgtcttccaatattaatcttttcttttgcagtgtttaatctgttcatctcaaccagtatatttttcatttcagatactatatttttcatctttaaaagttccatttgggtcttgtttatgtctccagtttctctccccatcatgataatatttttttctgcttcgttgaatttctagaacatgtttatagtaggtatttttataaccttgtcttctggttccatcatctgttaattctgtgtctctttctgttggtttatttttctcttggtaatgtgagttacttgcccagcttctttgcattgcttgtaatttttttttttaattggagctggatattatgaattttaggtatttggttgctgtgggttttgttgtattcctttagatagcgttgagtttgtttgttttttaagtgcataaattacctggaatcagcttgatcctttggaagggctgtccaaagcagtcttgatagggatgatttggccccactactaaggcaatattttttttgaggattctacccaatgccttgtgtgctatgagatctttccatgctgactggtgggattacaaactgtccccagccctgaataaaccctggggacttctgctcactcatttgcaatgtttcttttcagactcaggttgtttcttcacatgtgtatatggccaaagactgaaggagaccactctggagaccttcacatctctttgtgtagttcccacctcactagtatttggctgcataaattatagttatctttgccaccttgaactccaagctctgtcttttccaactcagcaagattgctaggctcagttttgggttccccctcctttgctatggcctagaaaccacctccacagagtaagctggtatcaacctgaggcttaccttatttattttctttttcttggggatcacagtcctgtgttgcctgtttttcatcatctgaagccatcatttcaccttttttgtccaatttcc

SEQ ID NO: 111435 - DNA, 1015 bp, Homo sapiens
ttacagccctctatttttatcttttggttacttaggttagctgggttaaggaggactgcattttctctatgtctgtttttcctgtggcctcaattggaacaccatgacacatgtaataggtcttcacttaaggccttttgatttcatgtaccaatttctgacttcaccatttatgtttggaattgtgatttgcctgtatattatttcttgattccagctagtctctcttgaaaatcttctgggttttaatttttcccgttgaatttttttctttgtaattttaataattcagggttcctcttttcctcttttcatatgtaagtcttaagctgtaaagtttggtataaattggaaatacatcttttgaaatagttaggggcctttgatttagcagatctggatactcagatgtttaaaggttcatttttgtaatatatttctatttacatgtttacagttaactattttgtttcagttgttaagtcatttgtgtcatctaagaaaaaaatgctcaattgtcaccttttagaggagaacctatactgaaacagtagtatgtgaacaaaggcactggttttttatttcatactagaactctaaatcagattgtaataaaatttcactgttctctacactagctcttagtctttagcttatggagtatatttattccatttataaaatataacgtagaatatttagagtaggatcctttggttttgcagctgtactatatcattctataacttctatttttaatctgcattaaggaagaccacaaagtagaatctagttgtatattgtgggggattggtatatctttcgtgtatagagcctgttcagtttgtattattatttgaaaaatgacacaaaattccgttgctttttatcttagtaaattaaagtttatgaaatacctacatacacattttgggtcaagaggtgggtagggagagatgttttcatttccttctcctttaaccttgatgggccttctggggatgctggttggctc

SEQ ID NO: 111436 - DNA, 1047 bp, Homo sapiens
tgaagtgtcattctgtgggacctggaagtatatgggatacaagtttgagttacttgggttgtcatatatggcatcctcctttccctcctgccccaagcccttctaaaaagtgtcctttgcttgcaaggatgagggtgttgggtctttgagaaaatgctgggccgtaagatgactctggcttcactcttgaataatctttctcacaacttactttatgtaatggtccagaatatttttaatatctgataggattctttgagaactgttattaaaaatttcttttaacattactaagtgggactcctcaaaaatttaaaaactagttttacgtaagtatctgtttacccaaaatagtccatgttgacatatggtctgttctaatttctctgacaatcccttgagatgagttagcattatttggaaaaataaatagaaatagttccctgttctcagagagtttagctggatttacacctgtgtgtaaagagtcttaagctggaagacctggcctggaggaaatctgactttgtgtaattccaggtgcatcatcaactgtttcaggactggtttttgcttttacctgcttagaaagttaaacttgtagtctgtgctttgttctctctcttacattagtttgcatttttctttaaaaaagacagtattcctctcatttcagcttttcttgtgtttgcatcctcaaaaccattgactcaactctctttgctttttatgtacttgtattgttttactatgtttctgattttagtggggaagatttaaaaatcattggttctggattttatttatgaatcttcatacagggatactgtatttttaaatagacacatggcaaatttctcgtctaagaggaatagaaaaacgatttcacagctattctagcttcttttatgatcagattcgagttttgaattattagaacagtaatttttttctgtgacaagaacacctaattttgagaccacttgcagcacttaccggatctcgtcaagtaacctgctgctgcatgtgctttaagccgaaggcttg

SEQ ID NO: 111437 - DNA, 1117 bp, Homo sapiens
cactgtgattatgtgtatattgctgtttaaattttgtatatgtgtataaaaggaaaaaggttcacctagagattatttctgaaaaatgtattgtaaaaataattttgtggcatttctagtccctttttttgaatgaaccaattatactttatttggtctcctatgtagcatttcagaaaacaagagaaaactgttaccatgaacaaacattgccagaattaaccttactgtttaagaggccaacttctggaaggaggtaggagtcataactttttagaggcatatgccaaatatcatttggtatacttaacaatattagtgttttaaaatgatgagttataattatttgaacatatagatatgtaacatgccacaaatcatttctaccatgcaaggtgtataagttgtttattttttagtgttaaaactataatagcttgaatataggtaccaatgaacaaattcaaattgcacctcttttcttaaaagaatgggatttaaactcttataaacattctttaacttttttgtttgtttgttctctttttttccttttgcattcttctagccagtgattgatctgctaatgctttctttgccactctaagtaaaatttatttcacctcctcaatgaaaacctcatggttttgctggctgtttataactgcatcgcacttctagttgtggcttgaattttcagttaagctttcatggtatgtaattttccagccttttgagaaaacaagcatactataagtgagagctgttttgttttccttgtttgtttgtttcatgctaggcttttcctggcagcatgtccattgcaggcagtggacaagaaaccaccagcattgagctaacccagtacatgctaggacctgtcctagaggggccacttttcattacctgagttatttgtacagaagggcaatagccattatttttgtggatgaggaaacaagaataaacagaatggtatttttaggtttgtattttatgtctttttttttttttttttttgccattcttgaggaaatatagagatgacatgttttcaccccaactatctggtgctattgaatgactaattcagtccctaaagttctgtgaaaacaca

SEQ ID NO: 111438 - DNA, 2450 bp, Homo sapiens
ttctttgcaaacagtgttcacattttcatattttttccctaactaaaccaccaaagaaagaaattttgtatgtatatacagtgtgtgtgtatacaaaatcatgatatagtagaatgcaactactttctttttctaccaaacgaaaggttttatttgctgtgaaataaaccagaagtttaaaaaaccctgtagtgattaagcatacttaaccactccttatttgtagattcactttcaaccttaaaaattaataccagtttgcataaaccaatatctgaaaagaacaggaaatgttaatggcaagcaacagctattaatactgatgtgatggatgcatttgttttgcagtggtgactggcctaggcaggtttggatctgtgaagaattgattcattttcaaaattattccataaagttaaaaagttacactttaaaggcaacaggtcatacagttctttaaatctgatcaactgtagctttatttaaagcaaatataaatcatagatgaagttattttaaacactatgttagaatatagagatttttaaaaaatgctgataagcacagttaattctaaaatgagaggattgttacaggagggagatgttacagttaatccacaatcaacattttgatggtagggaaaaaactgcgtaaaaactattgcattatgtatgataagaaagtaagtattccaaagggataatcttgcatattaagaaaactccaaataatctttaaactgccttgaaaaataaacctctttgactgctgagcggcagagtgcttacccttgattgtcttgattttatatatttatttctaaggggagaaaaaggggtcagacagagtaatatgatacattttcttaaaaacttctctaagttgcacaaaactgaacaatcatcaagcacttatttactggctaatgttgaataaattagggtgccttcatctgggttttctttagtacctaagtctacaaccctttctctttttctattgtgtttcgaactccacattgcaatactctgttgtcatggaatacaacctttagatgtttactgctgaagtaggtcagaaattgtattatttgatttgcctcaaacatccactgtaatgttacatgcaccttttttgaagcatgaactctgaattatgtttttataaatctgactaggcaaacctagattctggtttcacaatggatttattttctctctcagtctccattttaacagtgcttttgaagtttatacagaaagctttaaaagttagtttgtgcccttggtttttattcttaaaactgctaaaatacctctgtaagccttatcctttattctttcatatgttgtataataaatgtatagatttcattgaccaactaaaatgttgggtgtctgtaaatgagaccaaaacgtgggttgcttttttcataaaataatttctattgggggttactgttcaatgacagcaggtaacctataactgtgaatgcttcgtgtcgtcagtatttgcattacattcataaaagtgtgcaagtcctgtgactcccagcttaactgaaatactgttatgccacctaacttgagtacagcaaactggttttaggtttcaatgacattgatgtaaaatgatatcccatgaataaaaagtatttgtgtttggtttcagaacagatgtgtaaattttttcttctctcttctggctttcatttcaaaaaccatttaaggtagtctttaaagcattttttatccttttttgtttgttttttttccaacttcttctattgaaaatttccaaagctacaataatataatgaacaactgtgtacctgtcacttagattttccagttgttaacattttactgtatttcctgccttactcttgggctatacgtgtgtgtacttctcacattctgtaaatagattctgagagtaaattacattatgacacatcacacctgttaatttggaataagggcattcacctataaccatgataaaatgatcacactcaagaagtttaatggtggtactatactataataaacagtgcagatttaagtatctccatttgtgccagtcatgttcttgatagctattatctttttaatccagggataagcattgtatttagttgttacgcctctttagtctcttttaatctagaacactttcagatacagtattttaaatgttttgattaaagatagtgcagtcactcctcagccaaatagtgattttaaaaaaacccaccatgttttgtgtatttctacacattgagctaaagaattaagtacataatgtgggccacaagctaggcaggaatgaccactttactaccctcaaggctgccacgcaattagtctataagtgtgtgttagccctggctacccctttctaaaattgtcttacactatactagaatgtaagctttctgagggcag

SEQ ID NO: 111439 - DNA, 1075 bp, Homo sapiens
aaaaaaaaaatatatcaagcgaagaaataacacatcaagctttctggcccggtaaggcagaaggtaattcaaaatcgggcatgttcaccacttttggcacattcagcagaaaaatgtttagttttttctctgccagaatttgttcctagcatttatttccaattgccttaacgaaaataaaatcatcccatgtatagaagtacttgcttagaaatcatggtgaattagtacgtaggctatgctgagaataataattggaaactgaaaaacaaagattgactatagtaattaaatggaaactttaaaaaccatcatttaaaatgtaaatctcttctccaataagtgtattcggtcctttgaaagaaactcctttgcaatcactctctgaaaaatatagattgtaaagaatcctggctgtgagaaaggaagctgaaaagggtttgtttttccctctgacactttccagcagagacatctcagaattgcctaagtgtgaatatctaaaattacaaactagtgttctctagaaatcttaggatacatgtgtgatgataaagagagctacagctgtactcattaccagtgaaataactcatgaaaaagttttgggccaactttcgatagcatgttgaaagccactgcgttttctttgtctctacttgcttattgttcatttttgcttcattacctatggtggcttctctgtatcccatagtgagagtagggcctggacaaggtttgtaatcctatcacacttccaaaattattgaataaaataatagatgccttctagcaacctgttccatgtgtctgtgttctgtgtgtctcaaagtgctcataaatccttcaagtccttattttgcctacatcagggttgattttcagattctcaatataatcattgtatcaacaaactttaattgtgtgttaggccgaattcctatgtgaaattggtaacacaggcattaaagtttacaagagtgcatagaggaaactggaataatagaaaatcaacagactaaagaattaggaaagacctatgaatgggaggcctatgcccactgagtgtcagtgc

SEQ ID NO: 111440 - DNA, 1037 bp, Homo sapiens
atctctgctcactgcaagctccgcctcccgggttcacgccattctccttcctcagcctcccaagtagctgggactacaggtgcccaccaccacgtcccgctaagtttttgtatttttagtagagacgaggtttcaccgtgttagccaggatggtctcgatctcctgaacttgtgatccgcccacctcggcctcccaaagtgctgggattacaggcatgagccaccgcgcttggccaggaaaagtctttttgtactcatgatcacaaacttaccaatcagtacctttgttatagttctcttaggacttacaaatgaaaatgatctgaaactttatcaacatcaattttattatgaacttaggaattctgatgtaattttaactaacaatagaggaattatgttgcagatttatttacatatgttatggatatatgaagtgaagaagtcactcattgaatcctgatattttgttttttattgttgctgttgttgttttgtttgtgactttactctttcttactgcttgcttttctcattgatatttcaggaagttttgtttactgactttgttctgtaccccctcatggaggtaaataaatcatattactattctcctaataggaaaacagtatcatcctaaatggatctgtgatggtcagcaccacccgcctacccagttcctccagtggagaccagttgggtagtggtgactgggtacgctacaagctctgcatgtgtgctgatgggacgctcttcaaggtgcaagtaaccagccagaacatgggctgccaaatctcagacaacccctgtggaaacactcattaaaagaaccccagaggtcaccaacatgtttatatcttgacttgacttttttatgcatgcaaatcattgtttttacagagtttgtgataactcataattattttaatggcagagcactgctgtatctgttttatggtctacatagttaaaatcttctcagagagcctaaattctaatacattttattaatttatactaatcttcatatttactgt

SEQ ID NO: 111441 - DNA, 2012 bp, Homo sapiens
agaccagcatctgaaataggagggactgagtcattcacctgtagggcctgcacaggtagagtcggaattggttggaattgaacgctcagctggtgtccagagaatcagaaaataggttgttggtgtggaaaacccccataccttttgggtcagaagtgttgtgaggagatacagctcaacaataaacatttattatctcatcatttctgtgagaaaggaatttgggcgcagcttatctggttggttctggattggagtcttgccaagaggttgtaatcaagacgttgtcctgggctgcagtcatctgaaggtttgactgggcctggaagatttacgtccaaagtgactcactcatatgactgtctggtggttacaggtgtaggcaggaggcctcatatcaccagttgggcctctccagggcgctgctcagtccatgacagccggcttccctcccagcaagtgcccaagagagcaaagtaaaagctgtaatgtgttttattcctggcctcctaagtcacagcctgtcattttaacagtgtcctattggttacccaagtcagcccaactgattacagaagggaattaacaagaacatgaagaccaggaggtgaggctcttcaagggccatcttggaggctgccaacccacagggctcacatacacttttcaaataaatgaacaaaatatttaatcaactccaagtcctctgtattcagtccatttggatctaacatgagagataatggcttttgacgacatgcaactttttactggctttagcattttcactctggaagacctctgacaagtgatctactttcattgtgcctcaagtcttaaaacaagagctgtaagatcaccatgaaattaaataattttagtgccatggagaatgttcattaatgaaaccttcccacaggactggccccacgcaaaatcatgaagctaaagtagcttgctttttctaacccatctccacaaatctccccaatttcccccacccctgctccccgaccctacacatgcaatattcagtttaatgtacagaggcacgtattttgcaggatttgcttccacatgccttgaaaaagtgccagttggagataataattgtgtatacatgcatgtttcagtaaactcgataaggccaatttttcctgtagctttaaaacatgtcactgaatctcagttgaacacctgatgaaaatggcttacaaacagaagttgagatgtatgaaaatcctgaacactggagacatttgttgtggagagatcatcaaggagtgagatcttgctgaggggcagcggattcctacagctcatctcaggctcacctgaagggtacatgaattgagcggaaggatggatagagtttgcttgtttgttcatttaacacatattttccaagcacctactttgtgccaggcactgttctaggtgttaatctatgctcactttgggtttttgctcaaatatcatcatttcaagaaagcgtagcctgactgccatattttaaattgcaattttgattgcagtcttcccaatcccttattctgctctacattttcttgtttcataacatgtgttatgttttactacatactatgatttacttctctattgccttttgttgtctttcttcccccccccaactccatgccagaatttctgctccacaatggcaggaatctcaatctattttattcattgatacagtgcctgactcataataggaattgaattgaatgccccgctggtgtccagagaatcagaaaataggttattggtgtggaaaacctccatacctttgaggtcagaagtgttatgaggagatacaatacagctcaacagtacacatttattatctcatcatttctgtgagaaaagaatttgggagcagcttttctggttggttggttggtattgaatagttggtgaatgaactgatgagtgctggcagcataagaatgaataaaacataccaaattctctgtcttctacaaattcattca

SEQ ID NO: 111442 - DNA, 1011 bp, Homo sapiens
ctttgttattatgtatgtcttagtccattggggttgctgtaacaaagtatcattaaatgggtggcttataggcaacagacatttatttctcacagttctggagactgggaagtccaagatcaaggcatcagcagatttggtgcttagtgaggccctgtttctgtgttctcacgtggtggaaggagtgagtggtctctgtctgggtcttttatgagggtgctaatcccacccaagaggattcttctgcccttgtgatctaatcaatgcccaaagaccttgcttcctcataccatcaccttggcagttaggatttcaatgtacgaatttggggagacacattcaatctataacaatataatctacagaaacattaaaaataccctccctggaattcctttaaattcaaatgctttatttaatcagagaaatagaatagaagagtagaggcagaaatcaatttctttagattaaaaaagctttgcaatgcattaagagggaacaaaggaatttaataacacaaagataagtgacagtggcagacaatcccccaacactgactctcacacaaacagtacactttttcccaatgcaagaggggaaatgctactaatttttcactgaactattttctcttctccagtccaggctggacttgataaatagaaagtattcaaacaagaaatggctgagatattgtaaaataataattaaaccacatacacaattgctctagctgaaaaggtctctaagcatttttctgtggataagaaatgcacatgtttacctggaagcttctgtgtgttcataggatatggagagtgtgattaaactggaagataggtgaaacataaaagtaaactggattattctactaagaaaagttacctttttgttgaaaaatgaatgtactactaggtcttgcttttgtcccaaataagtgttcaaccaggagatttgaagcttccacaggataaaaaaggaaaatacgaacatgctatgcgtatggatttt

SEQ ID NO: 111443 - DNA, 1031 bp, Homo sapiens
tataagtctcttgtcctttttccatttccatttttatcactctgcaatctgggctatatggatatttaataatactccctactttgaaacgatgggaaaaatgaatggagaggaagagaaatctggttgagttttaactattaaaagctgtgagtcaaaactgggaaggggatgaggttaaattgagaatttgggattttctctagattgggttgtttttgaggtaactgggtgccaatgagtatacatgtccatgcaggactttaactgcagttatggtttttattgcagtcggtgattacctatacatgttcaaagttttatctactacatatttcatgcctaatatattgtttctgttttttgtttcaggttagtagcaaagatgaagattttcttgacctttctgttgatgtggagcagaatacatccattacccactgtctaaggtatatgaactctgaggcagtttgagcttttgatcaggcttgtaactaagtgggagagaaaatcctgtatttcttcaggacataatcttcccttctgttaaaccaatatgatcctattattttctatctctcctttcccaagagcgattatgtggtctggagaagagtcccactgagaaaaaagagcataaaatggaagtcattagtcaaaagggcaggtggcagtggctgtagatttgagatcagccaggtaaagtgttaagtgattggtgataatttcaacctttgggaaaccttgttataagaaatagaattgaggccgggcgcggtggctcacgcctgtaatcccagcactttgggaggccgagacgggcggatcacgaggtcaggagatcgagaccatcctggctaacacggtgaaaccccgtctctactaaaaatacaaaaattagccgggcatggtggcgcgcgcctgtagtcccagctacacgggaggctgaggcaggagaatggcgtgaacccgggaggcggagcttgcagtgagtcgagatcgcgccactgcactccagcctgggcgacaga

SEQ ID NO: 111444 - DNA, 1736 bp, Homo sapiens
cttgtttttgatattttgatacatataaatatgtatcctttgtgttttgccttttgctcagtatcccttgtgagattcatttgtgttgttgcatgatgctttagtttattcgtttttattgctgtatggtattctgttgcatgaatgtgccacagtttactaattcattttactgttgttggatatttggctattgccagtttggggcaatatgaacaatgcagctatgagcattttaatacatttactctagtgcacctgaacccattttctctaggatgtgcacatcaggtaaatctgttaggtcatatggtatgcttttcattaacatcattagaaagtgtcaaattcccaaaatggttataccactttacacactgagtatatgagcgagtgctttcatttctctacatcatctgtccctgctattctcatgtcttcacttttgctaatctagtggctttgtacagtattcttttattcagtaaatatgtggggtttttttcccacatttgctatgtaaaagcctgaagcactgagcgtacagtgagagccctgcctttctagaacttccagcatggagacagactttaatgacaaaatgaataattagttaagtaattataattgcaagatgccgtgaagaagaagaacagattacttcatgagtttatgatatggaaaccagaacaagggggcttcagttcctacatttgtagctagaaaacctgcaccagactctacagtaacactgttgctaaatccatctttactctatgtggattttcaggaagcctcagaagatgggctcagacacatctgtagttgttgttgttgttgttgtttttctatgaaaaggtcagctgaccccaataaatgcaaatattgcattgtcaagtatttatattgcaaaagcttttacctagcttgttatttcctggagggttatcttgagtgggaagcctgtgcccaaaaatgcctttgaaaattttggatgatactgtagtatttgttataatgggattccagctgtttatacttgctttgtagaagtagatgagtgtgcaggtatgtctttctggaaaatggggcaatctgaaaagcctacttttcttccccctgaaatgatgagatgattttaggcaagagtgttttttctctggagttacttggataattacctccattttcttagatccttcaactggatgggatcctagcagtcatttaatcttttttttctaccagtgctgagtcccttctatgatatcctagccagttggtcaacagcatctgatggaccccgtccagaggcagggaatcaatctcccaaggcgttgcattccatttttagaaagctctaattgttagaaagccctgtactttctaagaaaacacagagcctgcaggctttttctgttactataaagtgttgaggacttagtgtgcaagaagaccaaatgggaaagatttccttcacctggatgaaaaacagggagcctcttttgagtaacaccctttgcctagggcagacagcctttagatggtgcttcagtcagaattgccaagacccatgtttatgaagtctcactgtaggattaaatggcactagatcctgagcagcaaatttgcccctgggggcaccttgccattgttgctgcctcagctgctagttccttcaatcctggaaaacctttttgccagccttcatgctttcagaaaacaatgattttctt

SEQ ID NO: 111445 - DNA, 1154 bp, Homo sapiens
tggtgatatgttgctaactaaacaggtcaggcattcgtagccactctgggtaagtgcccggtggttaggtaatgtgtgacagccagcagccaaagtggacatactcagagacagttcctggctggctgcccaagccttacatctgtagctaaagaattactgaaaatgtgaatgaaaatatctcctctcctggcttgtggtccagagctcagactcaggaaccgaatttacataggtttgaatcccagatctgctcttattggctgagtgagcttgggcaggttccctacatttttttcatgtgtagaatggggatattaagagtaatctgccttggggtggcaggcaagattaaatgaatatgtagatgtgaagttctctgaatgagtggcacctactgctaacttttcccctgcttcccaagtttattcagtgagcaaatttatcaagtgccttctatacaaccagacattctactaggtgctggcaaatgaatcagacctaattgctgcccttataaagcttatggcatagtacaggggttggtaagcttttctgtaaatgtctggacagtaaatgctttagactttgtgggccgtagtgtctctatcacagctacgcaattctgctgttaatattgtgaaagtagttgccataagtaaatgaatgatcatggctgtgttgcagtaaaactttatttatgacaacaattggtgggtcatattctgcccataggctgtaatttgcagacctgtggtctagtgggaagacagttgttaaataattacaattatgatgttacagattgtgctaagggctgtggaggaacagacaggattctatgagtgggaagggtcagggaaggtagctttgaagaagtgacattgaaaccaaatgatgaggagaggcagccagaggaggagatggagggtgctccaggctggtctgtgggttcgtatcttttaaaggcataacagatattctgcagctttctttggattaaaataaataatttcgttcctctatttaattcatcgccagttttctcctcccctaccctctccctgcaataatccaagagataagctatgttaccaagagataagctacattaatatattaacacattttgttctgcatatgcactttctttc

SEQ ID NO: 111446 - DNA, 1136 bp, Homo sapiens
ataccttctttaaagctttttggggagcatcagaagagatcctgcccatggaagcactgtgtgagctatgatgccttcatgcttgttagttttcataattattctcactcttttagttcatcattattttccttctgtttgctcaaagtgcaaagctgttggtatttcaggatccagtgaaattctacttccattttgacctgctgtccacatttagtggggcactttgggaggagtgacattggggaaggaagttggcaaaagcagaggccaaattcacagcatggtttggttctgactgggtgctgtggtggtgagggggccctgtggccctgtttctgtggtattgggagacacgggtagagagaggcccacaggactcttctaatcattgctgtagtggatgacaggacaacaggaaactgtctaattgggttcccaagtcagatacttttcaaagagaaaagaatgctcagagtaattataaaatattaattgatctgtaggtgtaatctgagctattcagggcaaactagaggtaggtccctctaaggttaagctaccataggacactcctatttaaatgcagagtttcagtatgcttcaggaactgggtttccctgcctcatgaatcagagggtaatgtagtaatggagagaaggcaaatacaaataaataaataaaaaataacattcagaacgaatgcatattgtatggttggcagtgtaggggtggataacctattatttccaagcttttcttactctagagaaaaactgtgggatggatccagttgcttaggtcagtgatactcaaatgtcagtttgtcatcattgttcatggtttttgctacatctgtgtatcacttgaacttatttacttagttttccttaaatctgttcaccctaatttgaccttattctgaaacatctgcaaaatgatgggtttgatgagctaattttatgcttttctaatccttttcaaaaacattattgctacacttaaaactgttcatactggtgccacctaagagtaactcccctccctccaggattcatggcccatagtttgggtgacattggctcagataagaggttttttgtagtggctcaaataatcggctcttggaggagcac

SEQ ID NO: 111447 - DNA, 2710 bp, Homo sapiens
gacccaatctctaccaaaaagaaacaaacaaaatcatgtaaataaaaatgtatcatataaataaatgaagttatctggaaataaagggaaagtaaacattacaattttgaaacaaaactagagtatttttatagttttatcttgataagtcaactacttacctaaggcaagtattttgagaatggttggaaacaactttttaattattaaaaaatatgtccatcttgtgatttgggggaacagatatcttgccttttcctctgttactgttattcatgctttccattctcaaagatagttggcaattataagtttagttaatatatcagctaggtgtaaagtcatatgagggtctactctgatagttgctgggattagaaaatacagtctgaggtgaggtggattaatgtttaaagaaaagaaattctgtttttctggccccactggtctcatatgcagaggtttatattaggtcgggacctgacaattagttctgcggatttttctgtttttcttggactcctcagagaaaacaaagttgaatgctggtatttagttagaatgaaagattatgataccttttctgtataacaactttatgtgcttcagttcactcataccataaaatctgtttatttattcttcactaagtggaattttggtatgtttgggttataattgaaaggcattttcaattttgattctcttagcaattaagagaaatttctctagctcagatgtcttttttttccccctcctggtctttctagttagtgtgaatagattggggttccatgatggtattaaattctgtggtatcatcagaaaggtatttggtaaccacctatctctatctctagcttacccatgaagccacccaaagctaactaactggaagagatgtaaaagatggtgtcttttagtctagttaacttttctggtctaattattttaatgcagcttcttataacaaaccttcagttgtggtggaaccaaatgctgatctaagggtttgaaaggccttggtggtctttaagagaaaaggccacccaaaaatcaatcagcaaaatcttttttttttttttttttttttttgagatagagttttgttcttgttgcccaggctggagtgcgatggcttcactgcaacctctgcctcctggattcaagtgattctcctgcctcaatctcctgagcagctgggattacagttgcctgctaccatgcctggctaattttgcatttttagtagagatagggtttcaccatgttggccaggctggtctcaaactcctgacctcaggtgatccgcccgcctcagcctctcaaagtgctaggattataggtgtgaaccactgtgccctgccacgaaaacattcttgagacgaactctgtgttagcgaacaaccctaacagtaaagggtttttggaatatttctcttctgggactatggcttgaagtttgagggatgctgtaagtgctgtacatggaagtttaccccaattctcagaatgattctttgcaatggatagttttaagatcatggtgatgggactctgtggtcgccaaagcttcactttaccctcatagggccaaccttccttttcttcctcaagttccaatgtcacttttagaaccctcagatactttttaaattagctcagactttgcctttttttctgagtgatggtgaattttagacatacagaaatgtggaataatagagtgaatactcgtgtactccccacccagtgaagaaataaaatactatatatacatttaaaaccacctatgagtccttcctgatctcattgcctctccccacagagtgaccactattctgcatttagtgtttattgtatatttttatatttttactagatttgtatgcattcataaactagatatagtgtattttttcatgttttaaacatgctttataatattaaacattcctctcagtttgcttttattgtttaaattgtgattttgctatttatccattgagagacacataatcctagtttattttaactgctgtataacattccattatataaatatgctatgacacattcattttaatgttgtaagcaggtttacaaatttgtgagtgtgctgttttaatgcaatgaacagttgtgaactcatctccctgtgtatagtatacacagttgacagttgacagtttctctgtggtgtaaacctggaagggaattgctgggtcaaaggaatttgatcgtcttctttaataagttgcctgattgctctccaaagaagttatgccaatttgcattccaaccaagcagcgtttgggggttccagttgcttcacatgtttgcagatatttgatattgctagacttgatgttttgccagtctgatgggtgtgacattgtgcctttgtggtttaaaatttgcacttttcctgtttgctaggggaggttgaacatcttttcatgtgtttgttatgctggtttgttttcaactcaggggcctgagaacagttttccaggtcttgaaagtcaggattgtagttttggttttgtctgaaaacagggacaatgaagaagggacagtgaagaggaaaatcaaggagaccaaagcaaaagtcatgaaaggtagggatggattggaagatgcaggtgaaaaaaatgatgacaagataatcactgtggaggggtgaaaactagtaacaaaaagataatag

SEQ ID NO: 111448 - DNA, 1025 bp, Homo sapiens
gaaatgtcttctgttgataatcctctgatttttgtccagaccaatggatttaacttcctatatatttttatggccctgcaaatggaaagtttttgtttttgggttttttaagtttcctatttgaagagcttgagaaattttctaaaaaggaagcattagttagaagaaaccaaatgtgacataccaatgcaagttgcttcagatcatctaatcttatttcatttgttaataatgctgtaagatgtacctctgagaaaatgctgtgtatcaaatgattacgagttttgttccgataaatggccatctgttgaggacctgctatgttggtgttggcacagactatactcaagtgcttaataaatgaatgaggtgagtccctgtccccaaggggctcagctgttccttatcttgtgggtgttaacattggtaaagatgaaacaatttcaatacagtgttatatcagcacagatagaagttgaataaactcccagcagctgtacagtggaaagaccgattaacacaacaggacatttcaaaaatacattctcgtttgaccaaagttgtatacacattctgcttctggcttttattttatatgaggacatgattgtagtcaatgtgagttagaattgaaatctgcaccattgggtgtctctccagttaagcatgaatctaatggtgcttttgggcaaactgttgtatttccggagaccttagtttttctcatcttgtaaaactgattttctgtttttggtcatgaaaaacttcatggtagaattccttagataaaggctttatgaaaatctgcacctcttaattggttagcaaccacttcattacctaactaccttgtttaaaactgtattgaacttatgacatgttagcattttagcgtctgtagaacagcctcaggataatttttgacatcagtttgagtgccagattttagttcttttaaataaatgaggtaggctgggcatggtggctcactggtaataccagtactttgggaggccgaggcaaga

SEQ ID NO: 111449 - DNA, 1751 bp, Homo sapiens
caagagcaccaaaatcaccaacgccggggattggtaggtagcctgaaaaatctaattcagagaaggatgctccgcgcgcagacatggcttatccccgtgctactgcatgagccacacctaggccggccccggacaccgacagccaatggccgggcccgtcccgccccatccgggattggctgtgcgtgccgcggccctccaccccgccccgctcaggatcttcccgggattggctgagctacccgacctctccaggggatcggctgcgcgccccgcccttgcccagagtcttcccgggattggctgcgggcctcgcgaccctcctgcttccctccccgccccgcgccgcctctctggtttgtgcgcccgtcgcaggtcgcaggcctctttgtcagctggagttgcgcggtgagtgcatctccagtcttcggctttcggtctcccgcggggagggcgcccggccggcccgtgggtccgatcaggggctgggctcgcccggtgtccccacgagctttgcccgcctcgagctcctctgctcccggcggccagaacggaggggtagagcagccctcggcggcccggggggcgggcggcggtgcccgtcccggggctgcgcgaggcacaggcgccgcgcccagcggaacagccggaggttcccggcgcaggtctgggcaccgtaacaattttgcgctttgcttccccagggctgacgcgccactatgtagcgggtttcgggcgggccacgcgtgcgggacaggaacccaaccccagccgaccttgagctccaggagttcgtctcttacgtctgcggaagtgcagctgcctcagttcttagcgcaggtatgttcctagccttgagcggggtgggggaaggaatgagtcagcctggagcacgtggccagtgggaccggagggttccccggcgtctgtttgtcgccaaggtccgaatccggctccccttaactggaaggaaacatccatgtaggggctcaccaaacaaaacagctgtgtttctagtgtggtttcagacttagagaagcagagatccacgaggtattgagagcaacgcggaaaatagtagtgaaccctgtaaaaatcaaagaaaaaaaatcacaaagcaccctttcctgtgcccttttaaggttgacccagtgctttaagaggctaacacagaagggtaaagtaagtctccataaaacccagagaagagactggaaagctcctctttggatcctgtctggagtcacaactgaaccagaaaaagtttcgttacaacttgagcgcctttgtgattttctttacagtttatagaacaagcaatacatttcagttttctttggttaaaacgtcattttaaaacttttctttctataggttgacaactacaggcacaagccattgaagctggaatgtcctgttgctggtatttcaattgacttaagccaactatcccttcagttacaataggaaagtgcctctaataaggccaaatatgcgtactaacttgtagcaaccacgtgtccgtgcagtgccacaggagctagagcagtgacaatgctggtggcaacagggcagtgtagcaggtgcttcatgttcaccttttcaaccttttcatttaattgtcacaactcggaggtggattctgttagggacaggctgccccaggaccactccgcccccgctaactcaatgcagctgacccttaccctgaatactctgcagctgcattcctgaaccgttatctaggcgct

SEQ ID NO: 111450 - DNA, 1048 bp, Homo sapiens
aaagagaactagagcaaggtagtttcaaagctcaggtaggctttgaaaagctgctggtggtgagggggtaagttaaaagtctttccattggaagtaagatgccaacaaattgcaataacttaaagaaaggaaaatttattatgaggcccatgggatgtcctggggagcccaaggacagcaatgagagaggcctcagtaaggattgagactaagaactggaaagccatcaggaaaccaggcagttctgtgagacccattctgccctgcatgagaacagcgccctgcattttgtagatgctcaataaatagtataaatgaatggttgagtagctattgccacagctttgactgaaccttatctatcttaggtcaagcctgaattcccagggaagggcctctagttggcccaccctgggtcagggggccattccaggaccaatcaactgtggctgaaggacagggtcacattgtaactgcatggatgctaggagcctttcctatgaccatgtgggcaggggagattgttggcttgtggattggacagatacctgcagaggaatatacagcaggggtaaaggatgctttggaatgcagagcaaaaatgatgggctgtcagtaaagactgatgtcaggtccttggatggtgagagctgaacatgccttggaggtcatctagtcccattccacattgttcatataagaaaaacaagacagggtgcagtagtgctcctgtaattccggctgctggggaggctgaggcaggaggatcgcttgagcccaggagtttgaaactagcttgggcaacatagcaagatgaaagaaagaaagagagagagagagagaaagaagggaaagaaaagaaagaaagggagaggagaggagagaagaaaaagcaagattcagagggttgaactattggattaggtccattggacttaagggcatttccgacaagaggaaaatatctcagtgttcacgtttgttgattaaatgagtacaagtcctggaattcctctttgcaacactatttgaaaccattgtttatatt

SEQ ID NO: 111451 - DNA, 1023 bp, Homo sapiens
agcaaacgtgctcttcttcacagcagcatcagggataagtgctgagcaaaagggggaaaagctgcttgtaaaaccatcggatctcataagaactctcccactgtcatgagaacagcatgagtgtaaccgcccccatgactaaactacctcccaccaggtccctcctgctgcatgtggggattatgggagctacaattcaagatgagatttgggtagggacacagccaaaccatatcaggggtatattttcttctctcttaaatatgacagcctatgtgtatttctctgtgattctgctaatgagttttaatagactaataaaataaataactgtaagcttctggaaggaggaaatgtccttttatatctttatgttcccttcatgctttctatcagaatttcattcagttacaagtaacagagatctgaaaaacagtggcttaaacatacaaggttttatagtgacatgtaaagtaggtactaatttagcctgtccatgttatggtgatagtggctctataagtcatcacttaccaaggtttctccagctctctgcttcaccatctctaaggaatgtcctgtcttccaagatggctgctggagctccaggcttcacttctacattccagccagcagagaagaggaaaagagaaaagcatatccttccattttaaaaaggagacttctgaaattctcacattactctatttacatctcattgcccaaaccttaattacatggctatagtcagctgcaaggaaggctggagaatgtagtcttttagccagctggtaatgtgcatggctgaagattgaagtctattaccaaggaagaggtcaattattatttgatgatagtgccgataaggtatcagattattggccaaaggacttcttgtggaggagctttaaagagattgaagtttaagcgagtcaatgtccagaaaggctaaggtgatagaagagcattcagaacagtttactcagggaagagtatttgcaggatttgcaggattcagattcc

SEQ ID NO: 111452 - DNA, 1030 bp, Homo sapiens
tataatgttcattatctcatcttttctgttaatatctgtacctgtttttgtcagtgttcaagatttgtcatgttttgttttgtttgtagacttactcagcttctgttactattatagcattatgcatactgattgtttactaaataaaatgccactttgagcttgaaaaaaaaagaaaggtaatttattaaatcctatgacttaaaagtctagaggaggggcagcttcaagtggtgagaggccatcgccagggtgatggtggcaggaattgcaaataaacaggagaagcaagttcctgcctgttcttcctgccttctggtctccctcgagtgccccctatcggcagagtctaacagacctagctggcaaagcacagaagtggttttcagagtctcagcccagcatcacagaactgagtctagaagagagggtttggaattgagagacaatagcttgataactatcacattttcatagaaaatgttatttcaaaattgttgttatatgaaaagataatcagagagaatgcaaccaaaaaatgtaagaaatgaatatcaaagaggtaggtcaggcaattaataaaagcatttatgttcttttcctggattatgtgatgtgtttgctgttacttttctgtattttaaatcatagtttcttttctcctgctatataaatgtgcacctacataccttaaaaaaataaaaaacaaaaaagatttccaacattcccagtgtagcacagaacaatcacaaagtctcaagaatgaagaggttgagaaaacagcacttctaaaatctctgctcactacccccaaggagaacccagctcagtgagcattttctcctggatgtttcattccccaaaatttagtcaaaagtggagcaagggaaagagtgagagtgatcctagtgtccctacttaccccaatccctccataactcctgctttcccctgtctcccagtctacactgggtcacaggacccctgagaacaaatcctatcaccccagatacactgtgccttgcacaga

SEQ ID NO: 111453 - DNA, 1030 bp, Homo sapiens
atctttctcattcttgctgtcctgctttatggaaactattggtgggattcaagcaagtgagtttgatcataacagtctctcgtattttcctttgtgtctcctcatattttcccaaagtcgtgttccgaggattatgggccctaggagcttgctttctgtgaaatgtctgcagtctagggatggaagccagtggctgaaatcccaggcaattttgagttccacttctgtcaaaggcatttatactcaatttgcttcattgctcatggacgattgaaacagcccagttggtaaacagccagaggaaaacagggtaaaaaataacaataataataataataataaagaaaaaaaaaaacctcccaactacattacatcgagctcaagctgtcatgatgaaaacttaaagatttactcactcaagaaaatatctctggattttttcagactgggactcttcaattaatctgacatttcacaaatccaaaattgccgtggatgaactctttacttcacttcgggatattgctggagctcggagtctcctgaaacagtttaagtctgtatatgttcctggaaatcatacccaccaggcaagtatatacgttttaaagtaaccttctaatctgttgtacttctaggattcagagtctatagaagaaaaggttcccttttaaccttcctaaaaccaaaggtttgttctagatgatctccaagttctcttttagttcagagttttgggtcccacggaatctgaaagcctctcaattcatttatgccccaggcttgatatggtgggatgagcactgagttgggagtcagccatggctttctaactgtgggtttgtcgcagactgattctatagccttctgcaagtcccttctctcctctgggagccaatgactacaggtaccaaatgaggggctggccttagaggattcccaagtttctggatctaaccagtccgtaaacattttgaatgagcagaataatgaaaacacctgataatgttacgacaagggaaaaagtttg

SEQ ID NO: 111454 - DNA, 1096 bp, Homo sapiens
ttccagttccactgtcacattctcacctgggcccccatcatcacatgtctgcacactgtaagaacctccagctggtctttctcctcccaacagtagtagtgtatttatatttgataacacagaccagatcctagcatttccctgtgtgacatccttcaactgctgcccattcatcttggaatataatgtaaacccctggtagtggctctctaagccctgaccgtctctcctggctcaccctgtaccccttccaaattctttttgactcggggccttcctgtgtggtgttgcccctgcctgaaagctgtgtgatttcaggaagtcacttaaccttctgggccttgattttctcctctaaaataaggaccttgatcctttctagcaatgaccttcctgttttcttagaaaaaaaaatagcagttctcttgaatttatcttctaataaccctctactcagcactgaccctgacataatatgaaaggttagccacaggcccattggaaaatattttccaagtatagtatagaactataaaatgctttgaaactgagacatacatgttaaccagcaatgttttcaattaatagagggatgtgtataccctgtgagaatgcttaaagcctaaaattaaagcagggcaggagacttcatctttcttagaaagcaaatttactgttctctcactagtttctgtctgaatttaccagctccatgtgagtttgtatgttcattggcattctaaccatcctttattataagtgcattttcaaggtttatactattctcatcagcagcacactcttgtcaagtttttaatttcagattgtcagacatccaaactagaattgttccattgcctatagcagataataaataattagatgctcttaaatcagtggaccgcagaaaatgaaggtgaatttttaaaattcagtttatttataaactgagccaaccccatgccagttcaatccagttctgtgcattttgctgagtgtcttccagatgccaggcactacaccaatataggctatgtaataagcaaatgctgggcccagctctctaagaactcacagtccagcaggaagatctata

SEQ ID NO: 111455 - DNA, 1024 bp, Homo sapiens
agtagaatgaaagaaatgaaaacaggaatcaaggtgaatagaatccaatgccacagtgggaaacatacattattagatgatgtcgattttatgtaaacaagggagcaaaggttttgtctgatagaaatttctgaactcctttgaagtcactaccataagcattccacaggcattctattccttctttgcattgtatttaaaatgggcacactagggaaaattacagagtgtctttatcataagttgaactcctaagctatcacatttcaaatactgaaacactatcatataatattaaaggaaattatagtatgaatagagacaaaactgaagttattctgttaataagactatttccatcatctttccttaggatgctttatccatagtggcatgttggtcttataacatccctttaggagaaattgatgggcatagcatggtttttatttcaccaaacatggttaaaggactaataagataatccacaaattagtcacagaactagggacatcatccaagtttcttgttccatttgtacaatgattgcccactctgttcatcctacagaaacaaatgaaccagggattaaacacacccaggtgggagtctggactccctgatgttataactttataaactggagcaactctgatgttctttgttaggtttctctttctataaaatggagatactgccacttttttcccccaggattattataactattagggataaaatatataaagtgtttgaaacaggtagatagtcgacacattgtagcaattatcattttcatgcaacagcaaatagtcatacatatctttacagtaaaaaagaagtattaatatcattgtattcatcaaaaaggtgggggagacagcaagattaaattagagcaggaaaggaaaataatggaaaagcttgctagagtggttgtatcctatagtaaaatggaaatgtattcctgtattgcctctgagtcagtgtacctcagtgaaaacaagtacagaaatgaaataaa

SEQ ID NO: 111456 - DNA, 1110 bp, Homo sapiens
catagccattatttgtaagtaaattaatgtcctctccagcaacagatgttggttgctatcattaacatagtaggtgtttgcaaggctttttttttatgacgatgatgatggtaatgatgataaatatagtgtatgatattatgcagatgtagatactctcatttttttcctgttgttaatgagggaatgtttttgcattgcaaacagtgaggacagaaactatgtcagtgtctgtctaaattgctgcgtggagtctcacaacagacaggactttaatcgccaacagtgtggtatatctgtcgagtggagtagaggaagggctagagccctggagttcaagtgtaatccccacaccacctgagagtccaagggagcatgaggctatttgataccttggtttactcatctctaaaacaaggtccctgtgtcaaatgggccagatgatctccagatctctcactgaccagtggggcttgccgtccaccctctatttgacaggtgagggcaccgatggcactgacttgggcaatgtttaattgacttgctcaaggtcaagatcagcagagctagaagtagaatccagttctctggcaccaagtcccgtgctctttccacttccccgctcataatttcagggtggtccgaggcagtataagaggctagtgaaatgttagagttttgaagaaaactgaagtagtaaggcagtgttaagaaaaacagggaatcctctaggtttggtcagagttcatccaggacttgcccagaatgcttgagctccctcaggaacacctggctgtgatccacagccctccaggtgtcttttcatttctcccccaaccattcagaggaactgctggcctgaggatgccccaggaacagccccactcctggcctgtggggagttacccctgaacaggagcagctccaaacccagctgtctagagcgggaccagcctcagggctgggaggagggctggggcccaagcaatgcggtctgcgctttgtttcccttgccgtggcactgccaagacctgcagtacacgcccccagtcatcgttttgacaaccccaatatctcccacacttccctctgtctccagagcctttttct

SEQ ID NO: 111457 - DNA, 1049 bp, Homo sapiens
tggtttgttttgctaaatcattaccttgtaatgtctagtttttattcaaaacaactgctactaagtactacaccagtaaaacgttctagtggatattataaattcaaaaatatttctatgtacccttataacagggaatgctgagttaatgcgtttttcacaaaatagagattctctaaccattttttggttgtccccttaccgtctgtaccaaagcaagctatgtaggacactgtttttttcaaaaggtgcatttaagtatgttttaagaattgaggtatatcccaccaagctcgtgtatttattcaagaagcatttatctcctgttatatgcttggcattgtgctggagttctggaggtggctaagacagtccttcctggagctcacgggggagcccaaggagccctaatatcatgtgatctgtgctataacaaggactataaacacagagggctgaggcagcacttggagagggttgtgcctatgaggttcttgataaatgctgaataagctgaattcagggccttctcaaggtgagtgaatcacctttgtgtattgcaaaggaaaactaagaatagtgtcttggatgacagggaagaataactgtacaaataaatgttacataccacacttaaaaatgtcaacttggacaaggcaagtaaggaacacatggattttaggtgtggccagtgaaaatcagagactctgactataatccctttctaacctccccttcagtgcgtaactaacactgttttcacaaaaactctgaaactttcttttccaggcttttatacaagttgtttcttttgcctggaacaatcactgccactccatctccataccaactcctttcaccctggaggaagcctcctctgtctcatagcactctgcacttccacatcatagcgcctaccataccataatgtaaacaggtccacccatttacctccctgcatcccctgcacatggcaaagggtgtatgtctgtttttctccgggacccaacacatgctcagcacctcaggcttaataaagatgagttaac

SEQ ID NO: 111458 - DNA, 1111 bp, Homo sapiens
tgtgtcttattttgttgttgttgttgtttttctggtggtgatagcttacttttctggaaaattgtatgaaatttttcctgagaaggagaaagaaaaaaaaaatgaaaaaccgtagtcatttacatatccatgttcatgaaagtacataagaacataattcagtctaagtaaaaagatttcttgaaacttttaacatatgaaattatccctgtggaaatcaagtatgttagttttatacatgtatttaacagaggttacattttgacaaactattatttaaaaatccagtccataagatccatgaggtgactccagttaaataaatgttgtgtgtgtgctgtggtgcacagcagcaggccacaggggcctcgtcctccaggagctcacaatgtggtagtttttcccgcatcaattgaatagctttttcaaaatctctttttttaactcaaatttttagcatttataatggaaatattcagctcttggatagtcggtagatcacaacagaacatgctgagatggcataagagtgaaaaattagcataagagtcctacttggcagtgaaaaattgtgctttgataaactgatagagattgagaaataactatctgcctactgtgtgatctctaaattgtacttactaggcattctccatcagcagcatggagaatatatgttttctttgatgtgttttttggtttggaagtatctatgttgtttggcatcaattaaactaaaagatgttctcatagattaacaagaatgtttattttaatgttgattttctaatttcattgtaagaaggatatccctatctgtgcttcattcatgataacttggaaataaagatatttttatttgtataagtgtgatttgagagtttgaaaaactgaatgtggtattatatgaccaagtatagatttctgtttcagatgtggccacccagaagggctaagccaccttcccctctatttcttacccccttcttctgttcattccattcctttttttcgtaactatagtaatggaagctttcagcagagccacacagaggggccgtggagatgcccacaggttggattaatcacatgtgccctgtttatctgtgaa

SEQ ID NO: 111459 - DNA, 1019 bp, Homo sapiens
tccaggaagtccagtacatatttcctttttctctactggactgagaaaggcaaagaacatggtgtgttgaaccatgctaaattataccacagggaagggacacctttgctcagccttagctgattgcgtccctgtgggaatgaaggcccagtgttcttggatcttttgatgatatatatatatatatacacacacacacattttttagaagaagctttatactacttacatagaaataaatgtctataatagcagatggttgaaaacagtgaaatgattttacgcatttccggatttggattgaggaatagatagcaaatccaccaccgtggtgtatagagaatgagagaaaaccctgttgcagtctccaatgagaccagctttgtaaaccacattagagttgttgattactaaagggcccagaagtcagcagaagcattttacagctctgctgagagaagtgtatgtgtccctttgttagacccatgagaccaggtcctggctcttaggtatatttgagatatgttttattcttttgacatagcttatttgtccctcagcttgtcttaacaaagtggaacatttatgctccatgctgtcactactgaaaagaggatgaatataaaaataaggaaactcttgagggtagcaaatgatggaagaagtggatacactctgggaaacagagctatgctatggaatgcctgaaaagaataaaactcaagtattttaacaccaacaacaagtaattatattaccactgaaatagtgaagcatggtttttgaagcagtaatgtgtgaatttcctaagggctacatcaaaccatccttaaaccacatgtacaaggtgaacacttccattttcaaaggcattttgaagaaacaatgtggatcattctttctctcatcctttctctcatccttacccagtacttttacaaaactaaatttttacccttcccaaaagctggtaactggagtgcacagttaatcacttagttactctcattggacatctc

SEQ ID NO: 111460 - DNA, 1098 bp, Homo sapiens
ctcctgcttcagcttcccaagtagcagggattacaggcgcctaccaccttgcctggctaatttttgtatttttagtagagacggggttttgccctgttcgccagcctggtcttgaactcctgacctcaagtgatctgcccacctcaggctcccaaattgctgggattacaggtctgagccaccacacccggcctattattactattattatgttacatattatgttatataattacaataataattatatatattttaagtcacctaatagcatcttgttacctccctagactaaaggctgccatcacatctggatgtgataacatcaggccagctagctctctcaccctctgtctaatcgtggacttgggaaaaatcacttattgtttctcttgcaccagtttgtgtcctagtattacatttctttttcaggtgctgaaggaggactgattaaggcaatcagatttgcataatggaaatagggggacatattgccgttatgagaatttcttgtgacacaactccccagggaaaaagtcctttaaaactaccatctgacctcccagccctgaagcgcttcacacatagggtgatgtttcccaatgaataaataacgcagagtaagcagaactctaccctaaaggaactcgcaatgtaaatgcaacagaaggcagaaccatggacctcaatctacattaagggcctgccatactcttaaaagcccttctgatttgtagtcctcctgtcctcgtttgtactaaagtgccttctggcaagtaagagaggaagattcctaagacaggaatggactggatgaatcatggtggtccatatgatttagagcaggagctctggatacaggctacttgggtccaaatcctagctttttaccagcagtctgaccttggacaagttattgaacttctctgggcttcgataccatcctcgagcattgttgtgaggactccgtgagaagagccagtggaaagcacttagaaatgcatctagcacagagtaagagctccatgaatatgagcattagtatttgccatgccaaaatataagttcaatcttgcattttcttcactaatggatgtt

SEQ ID NO: 111461 - DNA, 1081 bp, Homo sapiens
taaaaattaaaaatatatacacaggaaaaagtattgaaaggtatgcaccaacacatttttgtagttacctttgagtacaaagactaggtctgaattttcctctctatcttattctccctctctccttcatcaatactaaattttctttcaaaataaactaaacatgaagtcatttaaataagttaactggtgctaatgcttatctaaaatagaaaaattgccaattgatttgaaacaagaggaacagattttggaacattttatttctgacagttaaatttatgtatattttaaacagactctttagaaactgtggagtgggtcagggtgatggtatagaggaactctgtgctttcttcttaatatttctgtaaacctaaatctctaaaaatatctatgaaaattttgaaagaccctttacattttcactagttggccatcttttattgtctcatgatcacaggtgatgtcagttaacatgttatgttaacatttgagttttaataagtcataagggcagtgcttataagcaagatgattctgtctatagtctggaaagaagcaaggacttgctaagaactctgaactctgttgtatctggtattatagatttcttttctggctggctcctcctagcctcttgaaccccaaactctatcagccttcatctctcgcctagtcatagaccaggcagactattcacctgctagattcctgtatttgctggttataacctctgttctcagagcctttgttgtgttcaacactgtattagtctgttctcatgctgctaataaagacatacccaagaaacaaaagaggtttaattgactcacagttcagcatggctgaggaggtctcaggaaacttacaatcatggcagaaggggaagcaaacatgtccttcttcacatgacagcaggtgagagaagaatgaaaccaagagaagggggaagtcccttataaaaccatcagatatcatgagaaattactcactatccacaagaacaacatgggcaaaaccgtcccatgattcagttatctccacctagtcccacccttgacacatggggattattaca

SEQ ID NO: 111462 - DNA, 1098 bp, Homo sapiens
ttggcagttcctcagaaagttgaacataagagttgccatacgcccagcaattccactcctatacctaggagaaataagattctgtttttatacacaaaaccttatatatgaatgttaatagcaatattattcatagtaactcaatagaaacaacccagatgttcagcaactgatgaatggtttaacaaaatgtgttatatccatacaatattcagttatgaaaatagatgaagtactgacacatgctacaacatggatgaaccttaaaaacattatgctacattaaagaagccacacataaaaggccacttattgtatgattccatttatatgaaatgtccagaatagtcaaatctatacagattagaaagattaatattgcctagggctgatggtagagtgaggagggttggagtgggcagtagagaagagagggacatggggaatgacaactaatgggtctgggtttctttaaggggtgatttcagtgctctggaattagatagtcatgacacttgtacaatcttgtcaatataatataatccactgagttgcacactttaaagtaataaattttatgatatgtgaattatgtgtcaatttttaagaatcaacacagagaacctataaaaatcaatgaacaaactaaaagtcatcctgataaagcaatgtaataattatccagagttctgatttcccccctaagttattattaaaaggtaaaagtacttaagaatatgagtggttcataggaatggaaaaccaaataccacatgttctcacttataagtgggagctaaacattgagcacacatggacataaatatgggaataatggacattgtggactagtagaaagtggagggaggtgggttgaaaaactccctattgggtattatactcactgtctgggtgatgggatccgtactccaaacctcagcatcacgcaatattcccatgcaacaaacctgtacacatacgccttgtatttaaaataaaagttgaaataaaaaaattttgaaaaagaagatgagttgtttatgacagcaagtgtttttcccaggatataaaggatagattatacaacaattacctaga

SEQ ID NO: 111463 - DNA, 1057 bp, Homo sapiens
atagacatatccattccaaaagggagaaatagcaaagaagaaaagggtaacaaatcccatgtaagtccaggctacaagccaaactccatgagatcttaaggcttgagaaaaatcttttttggcttgatgctccttccaggcccactacagtgggactcctgccttcaagaactgctaggttagaggttctgctcccacggctctgtcaggcagggcttaggctccaagccttttggcagtcctgctgtcactattttgggtggaggagatctggctgattgtgcaatgatggtcttcccttttgaaaccaaggaaggcagccctgatgatctctggaatcatctttggggtcattcttccattgtcttagaggatcatacctggcttctgttgagatggctgatccatacaaatttcattagcaaatggttgcttggtcacatctttactgttatcttgttttgcaatatggatagtctaagaattttctaaatctttacgttctgcttccttttttacctaacaatttcatatttaagtcatttctctcttctgttattttactataagcagtcggaaggagccaagcctcactttcaacacttctcttagaaatagttttggggccgggcatggtggctcatgcctgtaatcccagcactttgggagactgaggtgggtggatcatgaggtcaggagttcaagaccagcctggccaagatggtgaaaccccatctctattaaagatacaaaaattagctgggcacggtggtgggtgcctgtaatcccagctactcgggaggctgaggcaggaaaatcgcttgaaacctgggaggcagaggttgcagtgagccgagatcatgccattgtactccagcctgggggacacagcgagactccgtctcaaaaaaaaaaaaaaaaaaaaggaaaaagaaaaaagaaatagctttggccaggcacagtggctcacgcctgtaatcccagcactttgggaagccaaggcaggcagatcacctgaggtcaggaattcgagactagcctgaccaacatggagaaa

SEQ ID NO: 111464 - DNA, 1034 bp, Homo sapiens
tgcctaaaaactcacagtgatactgatattgactctggaagatttatatttctttaagtgtttagtaattgaatcttttaagagttttgatattccagcataatatcaattaataaaattatttttaaaagaaaagctataaattattggaagtgggaagtgagcatgatctagagtgtctaatagtgaagatgtagcattgctaaaatgaatgtagaaggaacagactccatagccctatttttcagagtgcatctctcctcccagaaatcttcatgtctgcctgtgttatatcacaggtcacctaagcagtttctatgaaagttgtatctacaggactctggagagactttaggtgttctgaatttgaacagttgaaagttgagctaaattgacattttatggaataataagtcataattaacttatttagcaataagatttatgtagatatccctggagggtcatgttaatattttatatgttattttctagattctgaattactggaaaatcatcagagacaatatatactcaaatgattttcttagttttttaatattctgaatctcattaataattactttaagacttacacaccatcctagcacagagttgccagagttctttttttttttttaacctagtttcctcttttgcctgggtgctgagagttaattctttatctctagtgggagacagctctcttccatcttagaaaaactcatagcattattcctttctgctatgtgcatctcttttaactttgtatctcctcactgtctcctctttcagcaatcttcagagacaaaaaatttcctttcttcagcccatagatttaaactttaccaatatggaagatttttctctcatctgtgaatgactataatagtataatatagtatgaaatggtataacacccatttgcataattgccatccaaaaataaacaacatggcatagcagttattaatatagaagtatgatcttagagtcatgtgatgaatctgtgaggggagttgtgcagtggtgaa

SEQ ID NO: 111465 - DNA, 1251 bp, Homo sapiens
gtgaaattcccctacataagatttacacccttttgccttcctgaaaatcatgtataaaaatgggcctgtttttcttcagcctcaccaacaagcttttgtttttttgtcaaactgatggatgagaaattgttttcaatataattttaatatgaattttccttttatgtaaaattgaacatattttcatattttaatgtaattttatatcttttttgtgtattttctattcctgtcttttgcccattttctagagtacttttgatctcctttcatcaacttttaaaagttctttataaattatgaatattagttctttatattatttgcaaatattttcttctaatttatttgtcctatcattttgcttatggtgtttttgccattcaattttttttagtcaaatatgtcaatttttaaaaactgcatctggatttttagtcacagaaggccttttctaccctcagattatagaggaattatagaggaatttatccatcaaaaattacttgtatacttttacttattaaaaatctgatctatttgaagtttgtgcttactggatgacatgaggaatggatgaaaatttatcttttggaaatggctttccaattgtcccaacagcacttattaaaatgttctttgctgccccagcattttgagttgcacctgtatcatatactagaataatttccacctgtggtcaggtcttttgctggacttgctgttctgcttcattgatttgcatgtgcattcatgttccaggaccacaccgttttacttatacagattttgtggtaggttttaatatctgatgtggctgttatctcctcacaactctttcttttcattgtttttcttgatattctcttttggctattgtttcatgtgaaaattcatgtgtagtaaagttcatttgtttatttcccaggggagaaaaagcttattggtttttttttaattgggatgtcacaaaatttataaattgacttagtgagtacaaacatcttttgatgacattgagacatcctaatcaagaaccaggaatgtctttccatttgttcaagtctacatttgtgttttgcagagtgttttattaaagtgttggtcctataggtttgaaacatttggagtttatttccaagtattatctcttttttccattgttgttgcaaatgaggtttttctctaccattatatcttttaagtcacccagtggttcttaaagttctgattaaaagcactaccaactgc

SEQ ID NO: 111466 - DNA, 1056 bp, Homo sapiens
cagctgaaattaaaagcaagaactcactttgggggaaaaaaaacaagaaaaataagagtgaccttggtagctgcttatattagcattcttgattaatgtctgctttaaaaaaatcacacgggtaatgcagctataatcattgtaccagtcataaccaattagttatgtttatgtaatatgaaacaatatgcaggcagggctgcctggaatcccactttcttccacaaagggagtcaagatcacatggattgccacttctgcctgtgccttgcctttgcaggacactattctgattgcgaccaggtctgttacgtaagcaccgcattcagttggctctgccagtaattcacaaagttacttcttttgtggacgtggaagggacctgaaagaactgtccataacagcatgttcccaattcaatcagcctctatccttctacgcctcagaaaagaaactggatggcaggctcataaccagcaagccctagctgttctggagccctgttttgtttggcctactcagtgtttgtgataactttcatttggagcccaaacttgaacaatagagacttcacatgaatagctggattttgtttgtgtgtttctttttgaaaaatgcaaggaatggtaggaactggtgggagttgaatcatggttgccccttagaaggggcctgtgctcccagcccaccccagaatcaatccctttcattctcttgtattacgtgtgggcccttaggtgcagtggagtttatggcctctgctttcccttcactgtcatgttttccctccaccaccctgttggtggaataaaagattataatgagcgacagttctgatcaaattggaaatagttcacttatcattgtgtcaattttttgtaaacaggaactcaagatccacacagttataaatgtccttagaggcccagaaatgtatcaagtaccggatatggcacgtagtagccgcttggcaagcgtctattgagtgaatctacgaatagaactcctgagtgtgtggggactcagggtcatttgtttggctggaagaagagacct

SEQ ID NO: 111467 - DNA, 1053 bp, Homo sapiens
acaaaacaatgactgtcaaatccacccactcagctaaaggaaaacttcagggtgtagggggaacactcatttcagaaaggattttgactaatctcttgtttctaatttaaatattctcatttattgtgccatgccagcattagacttttccattacagaatacatcttcatttctagtgtttcagatttgttatttcagggctgccaaaacaaaacaaaagaaaacaaaaaacagctttaaatacttgttttctattgtggtttgcaacgttgtttggtataatagggtctattttttctcttgatttctaagatttctgctggaaactctgacgaagaacatatgtctgccaaaatcactcccaggagaaatgttggaaccgttatatttagttttactatccaacatattaaaatagttacccatagcacatattactaaacactgtatcagtgaagtttaagatgtttaatacatatttaaaatatatcacaagctatgtagaaagatacttagagcttcctattgaggtagctaactagttaagtaatttgctaacatattaaaggatcactacaaattactttctccagtacttaatttttccatgccacatcacaaaaatgattattcttatctgagacactggaatgaatcttcttctactaatatttatatgtgtacaaatgcatgacacatactgtccatatcaccaatttttatgacaatgctggcagtaataattgtgtttgtaattattcaatgaattgtttaagagattagctattactgactcttgttaactctacattagatacaatacatatttctcaatcatgaaagagaagagatggaatgcatggaacacaagagtagttttcttgaacacaaagctatggatcaaattggagagatcatgtgatgtggtggaaaagagcacagcggggaggaggccgaattttcactcctaagtatgcccacagttgtgtaacctgcaagtcacttagcttgctgcagactcagtatactcatcataaaatgagaatcttgtt

SEQ ID NO: 111468 - DNA, 1035 bp, Homo sapiens
aaatggaaagcagtgttcttaaagacattgggaaggtaggcatagtctagtgagctttcaattggggttctcttacattccccactagaaatctaacagagcagagtcttatcaactgtgaatgaggaaggagttgaggatttgtttttccttgggttgtggaaggcagctcatgttaatgtctttagctctagtttccaaaggaaaccatgtatgtattcttatccatagtaaaacaagaccacattctacaaccagtagtaaaaatctatttgcaatgatttgtttatgttatctctcttctttggaaaagtctgggtctaatgtagaccatataaaattattattgttcttcatggctaccacttaattataaaagctttcatctccattagcacaaggcatggacgttttgtttattatgtttgagaagttatgtctttcaaacaaagcatttttcatacttagccaagtaattttctccagccttgtagaaagtgagtcttctttataacatatgaagtacttccaaacagagaatttttttttttttttttttttttgagacggagtcttgcactgtcgcccaggctggagtgcagtggcgcgatctgggctcactgcaagctccgcctcccgggttcacgccattctcctgcttcagcctcccgagtagctgggactacaggcacccgccaccacgcccggctaatttcttgtatttttagtagagacggggtttcactgtgttagccaggatggtctcgatctcctgaccttgtgatccacccgcctcggcctcccaaagtgctgggattacaggcatgagccaccgcacccggcctcaaacagagaattgtaaaagacaaggagctaataagaatttttcctcttatgcttcccttattatcacctctgcattcttctctcatcccacagtttttcctcagtaattcatcaaatttcaggatatgtatacctgcatatttctgctcctcaggacagtattccagttgaaagacagttttcaggatt

SEQ ID NO: 111469 - DNA, 1047 bp, Homo sapiens
ttacaactgtcaaccaccatgcccagccttatattttgacttttcttattttattttgaatttgaattaattggtattatccagaataatacctaaacatcccagtaaagtaggttctgctaattttagggaaatatgattaaacatcataaaatctaactaccttcacttccaataataactgcaatataactcatgaaggcattcatgttattttgtatcaaattcattatttatattttgtgtaaagctaatttccatgcgtatggattgagcctgtgtctatctgaaagtaagaagttattaaaagttctatgtgaaatgtgagtactttaaaaatgtaccacatttctattcatttgctggtgtgtgtgtgtgtgtgtgtgtgtgtgtgtgtatgtttaggtgtatgaagacttcttcattcaggaagttgcagctgaggccgcttatatatcctccatcttttcctcttgtcctctgttgggcctctctgggagaagtgtccagacttcccgggagcagaatgtgcagctgtaaaccttagtctctcatgcatgtgaactttactttgtgcccactgttgacctttcttatggttgcttatagaaaatgaaaccctgtcaagatgggaattgaatgaagtttccacagaaatgaaacattttcttgcttagtataaaacctatttgccaacttaaaatccatttaagaaaaacttaaagccatttcattaagtataacactatatgtgattgcatgtgtttggccatcaataaatatcaacttagaaagttttaatatgatttatacagtgcttggaagagtgctgggattcaaagtaggtttgaatgctaggagaatttaattaaaagttattcctaagaagcataattttggaaacagataacaagatgacatgttttaacctaggttatttggatagcttttttaaacatttatatgttgctatggtacttttggaactgaaatcatgctgtaagaatattcatttgatattcactcaaggtgttcattggcccagca

SEQ ID NO: 111470 - DNA, 1008 bp, Homo sapiens
tatagccatattacagggtaattaggaggactaaatgagataatctacaattatatctttataaatgtttatttttttctttttttctaatgtcagctatttcattgtagagacaagtatgatttcaataccaactgtattcaaagggcggagctaggtcctggagatgggattaggaataaaatgtggttcttgctattgaggatttttcagtcttagaagaaagctagatatgaatagataattaaatttagggtgataagagccatggcagacagacagagaggcttctttgggattgcaaaataggcacatttaacccatttagggaaggtcaaagaagataatgcttaggttgaatcctgagacaaagtgaagagggaaaagaacagtctaggcagggagatttgcatgcataaaagcacagaggcaaatgcaagtagttcagtaaagtttaattgtaatctgtcagaaaagaagtcgtgactgttgaggctaagcagttaattggggccaagaagataaatgggatgcatatgtaatgttaagggctttgtctggaggattttatttaactttaaataattttaagtggatcagttttttgttttagagtgagatatattgtggctagagatgatggtaattacaacttaagtggtaggggaaggaatggataagaagggatggatatataaaaatcatcaagacttggctgatttgctgtggcaggggcaagggagaattctggtagagtccaagcttctgacttggtcaactggaagagtgatggtaccacacaacagtacaggatgtagaggatgaagagcaaatttgggggtacaaatagtgatttcagctttagacacattgaatcaaatttacaggtgagatatacaagtggagaagtccaataggtagttttggctgggtttggagcaaaggagagaaatttggctggagatatgtatttacgtgttatattattatgcagattaaagtgctata

SEQ ID NO: 111471 - DNA, 1045 bp, Homo sapiens
tttttagaggctgctcaatcattgtaattgattgatgataatatgataacaagagttcttaaatcattaaatgtagccagataaagacgaatgactagtggttttgttggatgcatagttctcaattccctgtggtgttctgttctgctctctgaagaagtcacttgtcccttgtttcatgcaacttacggctcaactggcctgtttacagaaaacagcctcttaaacttggcagttctgtttgaagcacagcataacatcatttcccgagagatgggaaaaaacgttacaaaaaagtttatatctcccttaaaacatatgcatgttttaaactgagcatccattgaaagttgttttttccatcctctgaaatcaaggcttttccctatcttcctagccaaaggtacttgtagctgaattagattatttgatgaattctgtaagcttcttatgttttcctgctcttactttggataaatgctaatctgtagtaagaactctaagtagatagctctgttcttcccaggactcaggaaatatggctggtttaatgtcattttaaaaactttttattgaagtaaatataatatagaaaagtacagctcaatgaattttcactaactgaagacagctgtgtaatcatcacccagctcaacctggaagattatcaacaaccctggaagcccctcttttgctctctcccggttactccctccctctaaggagtagggacttctgaaaatctagatacatttcccttggcttttgtattttacatggatatagttatatattttttctggcttcttccattacacattatgtttgtgagtttcatctgtattatcattttatgaaattacagagcattcattctcattgttatgtaatattccattgtgtgaatataccacattttttcctccagtggcatttttaatagaagagaaagtttgtagaatgttttcacttcctcaaggacttcactatttctcactatcagaattgtatgctccacagacacagaatgtcaactagtgcccct

SEQ ID NO: 111472 - DNA, 1054 bp, Homo sapiens
atctgaaaccccagagtaaactgaaattagagctgagtaagactttctatagtcaatatggagctgtggtccgtcacaaacatgcaaaacagtcatctgtgctgtacggcataggcagaacatttatatggatgacataaatcgttcttataaacaaaaacatcccatgctaactatactgaataaatgtcatttcttttgactgaagacaaggggtgaggtgtgggtatgaagacttactgcttcatattagcagatgtttcccactttgtcgtgaatttactgttgcaccttcccccactccaggactctaacaaatgaggaaataagccaattacagatttcattaatgtaagtctctttccattcttccctgtgcccaatttaatcattttattgaagtggttgattgattagaccagcatttttggagcattttgaggtgcacttggcactataataggagctaaatgcacaaagatgactaacattttgggatattatttattttactattttcagcttctgttgttgctattgatacatctgcagccactttaatgtcagtttctttgtatgtgatccatttttctttgactgcttttcagatgtgtatgtatatatattttttacaatttcattataatgttaataatgtctaattctggatatctttacattttccctgcttggtatacattgtattccctgtgtctgtggttttatgtttttcttcagttttagaaaattctcatatattatttcatttagtattatgtctcctcttcatttttttaatttagcaattctaattaaacatgttttagaccttcacattcaatattattttcatatttttgtcttttatttctttgccatggttttgttgatatcttcagatttatcctcattttactattttcctgcttagtatttgaagtcagtatttgagtttttaatttcaaatatgtttttgacttttaaaaactcttcttttttaaaaatatcaggtagtttttgataattccttattcataccttaattattttgctt

SEQ ID NO: 111473 - DNA, 1049 bp, Homo sapiens
ttatgaataaacaatgatactcttatcactcaggaaattctaaaggtttttggtgctctttgccaggaaccagaaacaaaaaccaaatgtatttcttcttatactacacaacccaaagttcatactctgttgtttgtaatcatctcccctctcattcgatcagatagataaagaagggagagaagcaagaaaataagcaagcattttatgtagtatgtcagggtgctttctgactacagatgatggagaaatgaaataataaggaaaaatgttattattagaaggaaatgctgccttcttttccatcacaaatgccatcactcagagatgaaacaagtgcttgcctttagagggactgagtggttatattggctttgctacagaagaaccttggcccctcaaactagttaagtttggcagtgatattttggttggtgagaaactaattagaagatgggagcattttacatactcttcaaatgacccagcatttcaaacagatgtttcaggaaaatgcatacctggtgctcttccattagtgaattactttgttgtaactgtcacaagctcttttggacggtaattatgaagaattatgtcccatttggcaactcaaatgtatgctgtttagctcaatttgagggaaatttgatggtaattataggcacagtttttctgttaagtcttgaaaaggaacctatcacaacagttgagaaaacctgggtgataaagcataggagcagtccatattctccaagaagtatacatatgagggttcttataggatctttaaatgaacacatgtatacacacatgcacacacacacacattcactcacacagcataaaaccaaaacatccccaactccaaaacaacttaaacaaaaatggacaagtagagagagtataatgtataataataagactagaataaactataacttgaagtactgaaactgaaaatttatagcatttaaacatgattacaataattgctggcttcatatgatatttcataggttttagtattcttaggatctcttttttta

SEQ ID NO: 111474 - DNA, 1029 bp, Homo sapiens
agacacatgcacacgtatgtttactgtggcactatttacaatagcaaagacttgaaatcaaccgaaatgtccatgaatgatagactggattaagaaaatgtggcacatacacaccatgggatactatgcagccataaaaaaggatgagttcatgtcctttgtagggacagggatgaagctggaaaccatcattctcagcaaactatcgcaaggacaaaaaaccaaacaccacatgttctcactcataggtgggaattgaacaatgagaatacatggacacaggaagcggaacatcacacaccagggcctgtcgtggggtggtgggaggagggagggatagaatgaggagatataactaatataaatgacgagttaatggatgcagcacatcaacttggcacatgtatacatatgtaactaaccttcatgttttgcacatgtaccctagaactttataaaaaaataaataaatgaaagaaccgtatggcattattaaatgaatgagaaaatttgaagaactctttgaagcagaattccactaatacttttatatcctgtatttgcctgcacatcttaattcctgaatttactttcagcttgaactagcatgaagagcttttacaaaagaggctttttacagagcatgactgaaagcaggtagactttcgagatcatagtcactctggttttaatttcagacccctttttgtatcaaaggtcaggtccctgatgagaaatgaatcaagtcagacgcatttttttctactctattacaaagaaggttttcgagttcttgttttggcactatgcatctccaagaggaatttcttttttctatacacctgcagcaataaaacataaagggattgtgattttgatttctatctttactcatcatctctttttgcttatactggagacaattgtatttaaagtcttatatgcaactggactttctttagacattaaactttgcaaaaaggtagtgcttttcacattacacctactaaataatttaatcgtgattat

SEQ ID NO: 111475 - DNA, 1084 bp, Homo sapiens
cacctcccaaggggaggagaagcaaagaatttatgaccatctttatcttctctcaggtggattgtgagattcttattttctttgtgtttcgtagtatctataatgcagaagtattatttttgtaatttgtaagagctttttatatattaagtttataaccttccatgagatttgcataaagtagttaacattgtgtctggcataaatagagctctctataaatgtcaactgccatcagtattgtctttagttcttttatgttagaaaagaaacacattggtggacttatttgcggtggctcattttaaaaggcattaaaaagtcataattgcatctaggcaagccaaacgagatttccatgagaaaatgttccgtgagactatgttttgaaggatgaaagggaattgccggttagggaaggacgggaaagacatgcaagacaatgggaactgtatatgcaaagacacagagttctgatagcgcatagcatgttgcaggatctcacatggcagggtgtgactgtaaggcatgtgtttgtggaaaaagggctgacacctggaggggaagaattacattccagagataaccaagaaacagaatatacaggtcctagtgactgatgaactataacagttccttcagagttacagcaaacaaaatttaacttttcactagttaaagcaatcttactatctgttcctgatttagttttctttctttaaacctcaacatgaattatatgcgaaaaggacagaattcagactaagtaataaattacatatgggtaaatttcctttcaaactaaaaaaagagaagaattggagaaaatgacaggccaagccatatttttagtttaaaaataaaatgatttatatatttttttcagaaagccaatagaactgaacatttgtccatcatctcagaatgggtgctcctgcctgttgagcttattagctccattcttactgtcccagggctctcgtgtttgtgtgccatatgggttccacatctggtgaccagtccgtgctcttttgggggaaagaaaacaaaacttccttggagggactacagaaatacgtttctg

SEQ ID NO: 111476 - DNA, 1027 bp, Homo sapiens
ttctgtttcagtctgtgtaataacaatgtattgagcacatgctgtctgctagacagtaacattgtcaaactgaaacaaatatttttttttggatgtgcatacaatttcttttgtaatgtggatttatcagtacattactactacttgtgccatttttcaaagatacaggacaaagtaggattttataggctggtatgagtatctgagtcctgcttttctagtattgcttctgtgagaaaaataagtcctagattctgcatttaattgataactttttttatgagtactgggattactgaaatgcattgtttcccattagtttgtttttctttgatatatctataaatttggcattcacgttaaatttttatcttgagttttactcctcagtaagcttttaattggacactcatgagacctacacatttctccataaggatatatcatctcaatttcatttcttcttgcagaatagttattttaatgtagttcttctcccttatcacattaaagtattgtatttttgaataatgaaagagagacaaatagaaaaaagaaaataacaccatgaacttttgttcctttgcccagggtaggcatatggccagatttggagttaggtgaatctgtgccaagcatctgatcagaaaatgagagtcgaatatataggctatgtaaaccagtgctttttaactggccttgctttagaagcaatgatatcatgtgttattccagctggaaaccagagttagtaatcaggcaaagtaagtttaaggctaacaattttggttcttaccatttcatgggtttactaaaaaagtttcaaatacacaccttatgccagtgactgaaggcgcatatgggtgggtcttcattttgtgaaaaacaaggaggatacaaccattctggttattcttgcatgaccaaaagggaaataacagtggtttgtgcttccctacactaactgaatcttccatcctgagccactccctctagctgtttgtaccatgacaactaccccagtggt

SEQ ID NO: 111477 - DNA, 1032 bp, Homo sapiens
gggtcttcatgctaaggttaatttatattgtgtttcagtgatacaacattatgatactatcacagagcataaatcagtttctattgctcgattcaggactcttaaaagagcaacaaactacttttctaaagggccgtatctttgaaaaataagcagagccacaaatttttaaaaaggacaggtaatcccataagcaattcacatttaaatgtttgagttttctgtcaatcaaaaaaaaaaattttttttaagatagaattgtttgctttattccacaactctagataggggctggggtgagagtgggaggaagaaagaaggaaaaaaacagaggattgttagcaaacttctgttgtaagaaggaccaaaaagattgattcaaagcatactccaaccatgtgcccactactctttagtaacagataacacagtatggctgcccatttttgcttcatatcactagccggaatttcttgggtctcattttcatatataaacagattcataactatgaacagtaaggaagagaactggaacttgtaaacataataaaacattgatttttgaaaactgtctatcatatagcttatcatatagcatttaaaactataacatatattttaaactatgcacaattctcccatccttgctatagtttctactgaagtataaatttttctgactgtgataaaggcttctagtatttttgagatgttaaacagattttaattatagactcacgattcccttgtatttaaatttatggggagggatcccatgattgaaacctcatatcttaaatataaaatttctcagtacaaggtaaattcatgttaaaacgttatgagcaccaagagaaataaacatcatctacttaaaggaaaaatgtttaattgctaaaagacagagaaaaattcattttattattgcacatataaacatgtcatccttctgagagcttgttattaaattgtcagttaactaaatagatatgttccagaaaagtgactttgaaaacactgaaatgcagtt

SEQ ID NO: 111478 - DNA, 1010 bp, Homo sapiens
tggcctacaatattatgtgccatctggcttcctggtcccctctgactgtgtctcttcttttcttctttgcagccacataagcttccttgctgtccttccaattggacgtgctgggtcctgcctcagggctttggctcttaaagttcctctgactcagatcattattcctgcagatacacacttggcaccatttccctttttccttcttagtggggcctttcctgtccatcttagcacttcatgtccccttccctatttcatttttttttcctccatagcacttaccactttctaatatattaatatttatgttgtattttggtttcttcctctactagagagctatggagagaactctccactagggagttccacgagagcagggatatttatctgatttattcactgctgcgtccccattgccaggcactcccggcattcaagagatatttgttgaatgaacacatggtgatggatgctgccagggcaggatcggtgagtgaagtgaggctacttgactaagacagagagggtgaagctggaagagggcatggggatctctagactctgtggaatgttttgaacactgtcattggcttagtaaaaacatttgcaaaaaagggggaaactatattcacatttgcttatgacacattaaatatatctggagaatgtttaagacactgattacattagctacctcttacactgatggcattagctgcctctgtagtggagtgctgggtgactggagacacagtgagaagttagtcaaatgaatgaggatggaggcaggagggagatgtcttactacaaatatcagtttgagtattttgaattttcaatcatgtgaaagttatttgttattaaaaataaatagacattgggcttaaataaaaacatgatttccttcttaagctagcttaaggtagggttctcacttctaggaaagaaagttgttgtctcttactttggaacctctacaaagcttctctcccttatattgtcct

SEQ ID NO: 111479 - DNA, 1047 bp, Homo sapiens
attagactatgagtgagtgttatcatagattatgagctttgagtgccattcaaaaatcacacctgtaatcccagcactttgggaggcccagattggtggatcacttgaggtcaggagtttgagaccagcctggttaacatggtgaaaccccatctttacttaaaaaaaaaatacaaaaattagccaggcatggtggcgcatgcctgtaatcccagctactcgggaggttgaggcagaagaatcacttgaatctgggaggtggaggttgcagtgagttgagattgggccatggcactccagcctgggcaatagagtgagaccctgtctcaaaaaaaaaaaaaaatatggtcataagtgtcaaagatgagtctagagggatataaataaagaagaaagctttagagatagcaagtttggtgaaatagtgaaaccagaagtcaggttgtaaaagataaagcgataggtggtgagaaaattataaacaaatagaggtctaaagcaataactgggagaaaaatggtagtttttttcaattgcttggaagactgagggaattatgttgattaatttatctgcaaaagaagaattgaaataaatcacaactttcctagcacaatttatatgtctatcaaaacaataataactactaccttcgaccaaacctaccagaaacttctcaatgaaatgagagtaaggataaaaatgttagtactaaaaggcaaaacaaataagtgcttggcaacaaatgtgcctgcaatggaaaagtctttaaaaagcagtaagctttgatagtcaaaatttatttgctaagataatttttataaaaggctgtttatagcaattgaagttactgccaatttttataaaaggctgtttataattatagcaattgaagttactgccaatgcaaatgagaaattgagaacttaaaatgcattttaacatggccttccagtccttgtctgttgttctctggattatgtggagtatttcaacaagaagtaggcagaatcttttctgcttttatgttttcctcctgttgaaatg

SEQ ID NO: 111480 - DNA, 2505 bp, Homo sapiens
aagaataaaagaaggcctttctgaagattaaaaaacaaataaaaagttgagaagaaagagcacgaagagtagaagggaacaatggtgtactcgccagcaatggcaatacgggttattaaaaagaagggtgggggcggggaaccctggccgactcaggacgccacgggaggaagccacgcaaaatagcaaaccgggatcctagaggggcggggcccacctcagcgcgcaggcgcaaccaggcccaggtggccgccgcggaagcgaagccacctatacgcgccgcgccgcttgggtctcctgcgcatgcgcagacggacctgcgctggaggcttcatctttgccgccgctgccgtcgccttcctgggattggagtctcgagctttcttcgttcgttcgtcggcgggttcgcgcccttctcgcgcctcggggctgcgaggctggggaaggggttggagggggctgttgatcgccgcgtttaagttgcgctcggggcggccatgtcggccggcgaggtcgagcgcctagtgtcggagctgagcggcgggaccggaggggatgaggaggaagagtggctctatggcggtacgaaacttcctgtctctgtctctcgggttctctcaggcctcccctcttggccctcaaacggccggcgtccctggcctctcgcgccgccgcttcgggcctctggttgggagtcctgtccggcctgacttaggccgagcgcggcgtgcgcgtgcccccagtccccgcggcggtctcccgcctggcccacgcccaccatgcgcatccacccctgtggcggccgggccgggctggggggctgtgaccggtcctggcccccggcttcgctgtgctttccccgaggcgtctcgatcgcctagctgctgcgctctttacccttgtttttttctgtcgattctgaggtggtggtttttggtgtctgtttttgccctgtggccttagggtgcccttcctgtcccttctttcagaaacagtcattctgtaataatagctaaataaagttaatgctgtacaactaacgtcttgtttcttgatggtcagtttgtatggaatgcacctgcaagggtacctccttgtctgaaagtcgtgctttaaaaataattaattaagagagagagagagaaagatggcccataaagaaaactctgaatgtctcctgtattaaggtgaagttattcttttttaagagactaccgtttaacctacatcatggaggtatctcatgacccttcggcttatagttttcagtgtcatctcatgtatttgtttttctcaaaataaatttaatgcatcatgtacttctctctagaagggtacttgtttgacatctggtttttaactttaagtcacaatcccttcttgcttgttaacaccagatttgaaagttaatgtttgttccttgcctaaaacatatattcttgattgtctttagaatagaatagtaaaagtgcactttgggcaccatgcaggtccttgatgatgtgactttgataaacttgtaaaaaaaaatcgtttggtggcaagatttagcattagttactactctttgaaatgtgaatgtgtaggatttcttttacaaagatctggaaatcttcattacctcttaaatttaagcttatttttatagcagtaaagtctgatttttttttccataaaataagtatcttgttaagtaattataaggtgatctaactttggatgtgcttataggcccatgggacgtgcatgtgcacagtgatttggcaaaggacctaggttagtgcttgtgatgatcacttcagattttcataatactagtttctttaagagtggtttctttattttgtttgcttatttatttatttgtttattttacttggtagatgaaaatgaagttgaaaggccagaagaagaaaatgccaggttagtgaaattttctgttgatgcctattacacaggttgtgtgaaacaatggttctgtcagttgtcaaaattattttcttacaatcattggcttcattacaacactgacttacaacattttggaggacattgaatcctttaaggattattccagtttcaggacctaatcttacgccaattctatttgttggtagtttaaaggacaaagtttttgaacttaggattggactgattttacactgttaagtaacttgttactcttaagtgaattcagtagtgaagtatacagtataatcgttaagctactgataaaaatattttaacttaattgaaaatgtttttaagtaaatcaggaacactccaaactactgcttttccagtttattaacatttttgatgatataatggcagtttggttgtaatttcaatgctatgtattgtttgcattcaaaatgtaattagctgatttgttataaggttgatttctttgttagattgtaagaaagatgtaagtgttcatttatagaacatatacagggagtcagaattttaccccagatttcaaaaagcaagccatgtaaa

SEQ ID NO: 111481 - DNA, 1857 bp, Homo sapiens
tcaaaattatgagttgaaataggtggcagcattataagcttgtaacttttaaattgtatctcaaaaaaatacagagtggggccgggcatggtggctcacgcctgtaattccagcactttgggaggccaaggtgggtggatcacctgaggtcaggagttcgaggccagcctggccaacatggtgaaaccctgtctctgctaaaaatacaaaaattagttgggcatggtggcgggcacctgtaatcctagctactctagaggctgaggccggagaattgcttgaacctgggaggtggaggttgcagtgagctgagatcatgccactgcactcaagccggggcgacaaagtgagagtctgtctcaagacagaagaaagaaaaaaaaaaacagggtggttactttttttagttattagtattagatgttgaaatggattactgaatgtattttataatttgtttatgttcatgtagaaagtgactgagaccgaagatgatagtgatagtgacagcgatgatgatgaagatgatgttcatgtcactataggagacattaaaacgggagcaccacagtatgggtaagttattttttagtaagtaacaattgtgtaaatgctatatagtaaggagagtgtgcctatatcaaactctcagtggttgagtccattgtttttacatttttctattttaacataaaagaacttgttaaagtttcatcatgaatatacttctttgctaaaatacagttaattgattaggcgaaggtacatagaagcagcagtttttgatgctgaatttaaagtgtttttataaaagaattgagtgctaggccaggcatagaggttcatgcctgtaatcccaggactttgggaggccgaggcgggtgaatcacctgaggtcaggagttcaagaccagcctgaccagcatggtgaaaccttatctctactaaaaatacaataattagccaggcatggtggtgggcacctgtaatcccagctactccagagactaaggcaggagaatcacttgaacctgggaggtggaggttgcggtgaacccagatcgagccactgtactccagcctgggtaacagagtgagactctgtctcgagaaaaagaaaaaaaaaaagtactataaattctttgattagaattagaaatccttaaattgtaatttgtatctgtacttattattatttcactttattatccagacctgagtttaggtttttaatttttttgcctaataaaaacaatatcaaaagtatttctttttgttcttaatagtgttttcaggtttctaattctcccttaggccttttaggccaatgtttgtctccaattttgtattctataaactggaccaagtaaatggactgtcattgactcattgagcgcataaagaatcttacagaaagattggaagggaaatacattgaagtacgaattgtgatttagttacgataggagaataagagtcaatgtgttttgtttttcaaattggctgtataatgtggttattatagcttatgcattggaaacataaaatacattaatttcactatagttcattaagcaacctcatctggaatcaaccagtatatacaaaaatattgttaaatattttattagtagagtcatttgttttcagaagtcatttcaggaagcttaaagccaattcagttattgtcatagtcagttttgtattataataatgactacccatgtaattttaaaatcctagcacctttttagggaacagagtaaagaggctgatttttcatgttaggggtggatattctaaatgtgctcctcattctcatttgggaaagtaaataattacttaatgagaaagttg

SEQ ID NO: 111482 - DNA, 3954 bp, Homo sapiens
agataaaccatggcgtaaacctggtaagattattgtggattatattaatttcaatattttcagtgtgaagtcatcagaaaatttttttgaacatcaatttagaattttattttttcattataattttaattgtcttaagcaaatgatgagtaataatgacttgggattattaaatcttactggtggccttgtattacttaaaatgtagacttattgtttattataatggcgtttgtaaagggaataatttgatcaaaaatgatatagtctttttgccaccataaatgatagagtgataactgatagaactctaaatttatatttttatagtttagtatatttttgatgctgcataaaaatagagctgaaatatttgtacactaaagttgtgttttatctttaggtgctgatctttctgattattttaattatgggtttaatgaagatacctggaaagcttactgtgaaaaacaaaagaggatacgaatgggacttgaagttataccagtaacctctactacaaataaaattacggtaattaataaatactccggaatacccttggcttgtctaccgtcccacttttactccccaaataaatcgcttccctataaaagtggttaaatgctatatgatagtttaaaaattccattttgtttaccatgtttgtttttcccttccctcccttttagagtttcgtatttaatgattatctgatgttcttactttcaaatcacagactagccacagctagtttgtctttatatggcctattaattaaatattatgtggtatcttaatggggaatatgttatttaacttaggccgaagactgtactatggaagttacaccaggtgcagagatccaagatggcagattcaatctttttaaggtgaattttagtaaattatccttggttgctctcattttttgttcttgagtctgctcccatgccactactcaagggacaagattaaagtggaaatagctaccttttttccaaaccttcagcttcctggtgacttacaaatttgctgattgttgttttatctccacttttgcaagcatgtgaatttatagcctattatactaacaaatgccgagtaaaactattgtttgctatatgttgtgatttcattttgagtcgtaatacatgtttgtaggatagaaaagttagtggcaacagattatgctctcattgtagataatactctaatctttatcaacagaattggaaacttttttgttctctttaaaaaaatggtaaggaaggtggcatactgtttatctctatgacacttataacactgatatcattggtgtaatgccctgatagctcaagatatcttcaaaaatcttaggcattctctgagaggctttaagaactcaacataatgagatactgccattgattttaaaaatttgttcttaaaaggagtaggtttatgtgagagactttgaggttgatactacaacttgtataacaagtctgatttctggcttctccattccatggtatgatcacagacccagtccaaagaataatactatattgtcatagttcttttatggaaaactgattgtgtactcttttttctttaccttaatagttgactcttatattgaatgacactgggatgaagattgggagtggcttttagattgggttgtatactcagggaactttagtggactggaaagagaccactgctccccttttgggtttgcagccctgtccaccagaatactgccttatgcagtgtgtgtgctatgtctgcagatacaaccactctactgtacacagttctatatagataattttattttaatttacatcctactttgcgtaagtatttggttcttcttttgcaaatattttgaaagtatgtgatgatgtctgttgtgttttaaagggtcatcagttttttctgggttatattgtctatataggcattgaatatattaaacttgactgcaatgggtagaaaagttgtcttaatgaactagttcattagcagcagtgcattttattttcttttaatagaaatgagaactgccatcataaactgttagcttctgtatacttcattttttgtagtagacttaaaaagagaataaaaagaaactcctaggggtcagtctcattgaaggtagccgttatgaatgtgtattttatatacatactgtgtactgaaaaatttattttgaagtttcttttggctatgtgagaggaggtcatagagtattccattctgattggattctgaatgaaagattttaattcgatgggtacagtcttcatggttttcttgccttgatagtgtgtttaaatactaatatgtttggtagaaatactgatttgggaatagggtgtgtattaagaatatgtgtggcaaacattttttctttatgtatattgtggtccgtaggaaatggtggaaatagggccatgatgagcaggacattgattttaaactaacctgcaaacatttgtgtagccaataggaagctgtttgaaagttcctgagcagtagaatgaagtggcagatctggtatttagaaaaggaactggcagcaggatgggctgtagaatgaaaggggtgtgaaacagatagggagctgttgccatactatgggactaaaatgaactagggcctgaactcacttatgaggatgaatgggcaaaggagtggatttaagaattaaaatttattttcatatctgctgcaaatagaattttttcatccttaagtgtgagacagcccatcagcctctttaagataactttatttacttttcattaaacaatttgcaaacccagtaacaagtagaatagtacacatgaacccttaggtgcttatcatacagcttcaacacttaacagtgttttgacattcttgaggtaacagccttttatgtacttcaatatgaataaagtttttttaaaaagcaaaataaaagaaatttaataggtataaaaataaagccactcaattgggtacaaaaacaattgtgtaattatttaattagagtgaatggcaagagagaagtgactagtgggaatagataacatgtatgtatgagaaaacgttgactacaacgttttcttaaaatattttttattcatttgtgcacatatgcatagattttccccccggcccccccccccccccccgcccccggctgtgaatgtatgagctttgtcaccagttttctgaaattttacagttatgtgtcttggtctgttttcatccattgtaccaagcattctcgatttggaagcacatatccttcacttatggaacactttcttcttttacttttttctctgctttcttttctattctagataatattggatatcttcgaatggtcttctaattttttttattgtttttctctttttcatcttttccattatctgggagaattttttattcttataatgttattgtacttagttttcatttctgttgttaatttccaagaaaatttttctttattatttagttgtagcatcttattattcatgcctacagtaatgcaatatctttttccctcctctctcaaaggatattaatgataggctgttttgtttctgttagatttttcttttcctgcatagtctgttttcaacttgattatttaagttagttatttttatcttctgacttagacttttctgaaatgtttgttgattgttggccattcactcatgtaacggtgggctgctaaaattgattggaagctctgtacatctgaatagaacttgcttgactgcaggcttcactggagggctgttttttcacattccctgatgtcagtatttttaggtgtttttctttttgtggtaatcagattttttcagataaggtattccagtattctatctagagggtatatacttggctgatgcaaatgttctggtagctggagcttttaatttctgaatt

SEQ ID NO: 111483 - DNA, 3498 bp, Homo sapiens
aggctgggcctggtggctcacacctgtaattccagcactttgggaggctgaggtgggcagatcacttgggacgggagtttgagaccagcctgggcaacatggtgaaatcctgtctttactaaaaatacaaaacttagccaggcatggtggtgcacacctgtaatcccagctactcggggggctgtgaggcaagagaatcactttaacccaggaggtggaggcttcagtgagccgtgattgcacgactgtactccagcctgggtgacagagtgagaagaggtattaagacagatgattaacttcaagcttttaagcctactgaactgtcaggatgatggtacttttaatggtgatgggaaaatgggagaaattgtatggatgtacagtagcagattattcacatttgtgttacaggaaatcacagtctgaatagaaaatggtcagaatggctaaaatggtcacctattgttttcttagaataagggtggtgaacacagaacgggaaaattcttcaaggtctttcttgaattcgaaacatgaagtcataaccaagtatctgggacctatttgtagtgatctgcaggaatttatgaaagtgccaaagaattaacagtttattcggcttctaagtgttattaatgtgaactttttgatagttggaacattttgatcccatactctctttggtgcctttcacctaatactgttctaaaataggctaattttaataaatattcagcaaaggaacattcttagtgtttaacttcaaattaaatgttgtaaacttattttaacatctaaagtccattatgtttgagtgttctgttaaattcaacaagctaataaccttttttttttaaggtacagcagggaagaactggaaactcagagaaagaaactgcccttccatctacaaaagctgagtttacttctcctccttctttgttcaagactgggcttccaccgagcaggttagttacatagttataactcaattactgtacgacattggtatctttacattgtatttgtgctatattaagtataaaagctctgaatgttttaccaaaaaactggaacattttactttggtttagtacaaaatgaattcttcacaagaaacttcttgatgtttttccatctaaaaagcctagggtaagcaagaagtgaagtgcggtatatagttttgtgtatgaataaagagacaatcttatattcaagagaggtgaataaagagacagtcttacattcaagagaggtggtaacagtagtatttgctgtttcctgtgctccctattcttacataaagaattattggacttctaagtctagatctattggcctgaaggtcttttgctaattgtagtgaaagaggctattgaaatttcagcttggaaaatctttaaaattggaaccatttgttgttgttgtttgattttatatgataatacctcatatgttcccgaaggtatcagatgtaagaggcaaatatgctagaaaatgtcttttttacttaaatgtgacaaatggttaccctattatgccattaccaggaaactggtaaaggatagtaggctaagactagcgaagtttgaggtcagtagtttaatcttggactagataagatgactaaagtctgggcctgaaacaaattaataacccaactattactagttctcggccagatcacttaccttttgtgttactggtttaaatttattttatatagttttctgtttttgttattctacagttttgtattgttataagagacattttagaataatctaatgcaggaagagactttatagtggcatctagtctagctctaagataacgattcttgaagccttcagccaaaattaaatggcataaagtgatccaggatttttgtgaattgtcatagacataatgaaatgtgattatttaagctaaatataatctcaaaatgtttggttttaaagaatttatgacagctaagctttaaatatgtagtaatatataatattgtaatatgtagtattcttttggcttatacattttttaagaggttaactttcattcattgagtttatggtattctgcagtatagagtgatggtaacagcttggactctggagtcagatttctggagttcagatgctggctctgcggcttactagctgtgctgtcgttgggcaaattctctaatcttatgccttgatttcttaatctgtaaaatgtagtaatagtacttccctcacagtgtagttatctatattcagtggattcatttatgtaaagtgttttagaacagtgctggtacctagaaaatactctagatgtttgctattatacttaaactatttaaaaatcaatagtttttctgtactttgccttttgtttttttattgttgattggcctttcaaaatttgggccagattatgtaagggctgtgtgccattataaaggctttggcttttcctataaattaaataaatggggactcactggcggattttgagcagagcaatgaaataatctgatttaggtttgtaaagtttcgatttagtcgctttactaaaaacagactacagagttacttagggtgggtgaaaacagggaggccagttaggaggttgcagcaattatctaggcaagagataatggtaacttggaccaagataatggtgtggagatgttgagaagtagtcagataccagttatatttcagaaggtaagccaatagcctatcttgatggattggatgtagattgtagaggaaaaagcagttaaggatgaatccaaggtttttgttctgatcaactgaaccagaatgatggttttgtcatttacagagatggaaaagaccataaggaggagtggttattggaggaagaagaccaagagttcagtgtagaatataataaaaatgagatgcctattggacgtgcaagtgggaaatttgagtaggaagttggctatatggatctggagtagaagggaagagtatgggctggagataatgaatttaggataatcagtgtttaatattacttaaatgaaactacaaaatggaattagaccataaaagaggtaagtattgatagagaagtggtaagagacagccttggggcactcccttgtatgtcaggaaaataaggattaactagtaagaggagaccattaataaggaggaatgatgaatgaagtaggaaaaaaacccactgtatgtcttgaaaatgatgtgtttcaaggagaaatgtcagctatcaaatactaaatccaattgattggtcaagaaaatgaagactaagaatgaccattggattttattgatggtcattggtgatcctgaccaggatcattttcatttgtataaaatgaagataaaagactttggaatggattaaagaaagagtgggaggaaaagaattagaaagagaaaatatgggcactttttggaagactattttctttctgtgggggccagagaaatgtgacagtatctggaggga

SEQ ID NO: 111484 - DNA, 2042 bp, Homo sapiens
agaacttttactgttataagaaaacctattcagtagtttaggatttgtttacagttttttctttgtctctttttaggctaagggtatataattcagatattgggttcagaagtttcctacagagttgttatattaagaatttaaaatatataatttggtttattgtgtctgtttgtatgcagttttagcatttatttttccttccatgttcactgatttattttttgcatatgtaaaacatctaacagttcgaaaggcaagagtatccaaaggtatatagaaacttgtcacatctttctctgtttctttcattcctgtcagaacagatttcatttcgtttctggtttgtttttcctgtgtttctttttacataaacaagcagatgcataaacatgtatatatatcctgttgctttgaaagagcatcttattagttctgtaaagtattggcaatattgcaaatatctgaactttttatgaagtatgtcaacagggataaaattaacttttttgggaactttactttgaaagagttattttgaaagggattttttataaaatagtataggtttttatgaaacacgtcagagtgttgctgttaactggttgcactaacaatacttatatccattgttgaagaatatagggaaagaaataccaaaatttttagtaagattttgtaaaattgcaaaaattaatattaagaattcatagaggcacagaaatgtattttttgattaatgtattgtaacctgatgtaaatccttagttcttttctcatttctgcattgacatcatactatgttgaagaatatttctaaaaatattctagagttaagaaagtgttgatagcacatctatatttaaatacttagtaccacagcaagtagtttatatgacttgagaatgatactgtaggaacatactaaaagactttagaaaaagcatgtcaagaaaaaaaaaaaaacagaacaaggggggtcagagacaacaatatgtaagaaaaaacatagaaaatttatctcaccagaaacagcacttcttctcagtctcagacaagtactgcctccagaaaagccaattcaagcgttgggaagtggcaggatcgatatgggagggccgaatcacctgatctaaggtaaggctatttttaaacattggatactccctgatgtttagatcatcaatgttgttatgccttattagtaagataataaattttgactgtaccatatttttaccctccaacttatgctttttcagggtacagttgtaggttttttagttaccttataaatcaaaacccagcacttgtcttgctacccatctttctggctgtttataatatttaatgaattatattgaaccgtgctaatggatgctcagtaattttttttttcgttctcttgctgcaggttaattctttctcataccacatcgcatttaaaaaaaattcccaggtgcttttcactacttatcgaataaaacctaacattctgagccagtatttaggacccgtaaaatttgactctactgaatctttccaatcttatacccactacagtgcaaaaacccctgatttcattaagcagacgtagtagctgccctggaatatgctatttcccttattgttgttatgcttttgttaatgatctaccctccagtgaattttggtttgtgttctgaatcttaaatttacacagcatacaacctcgaatggatattataatttctctgagcctgaaaattgaaataataacttcatctttaagggatgcaatgagaaacaactatgttccaatatgaaactacattacttgcagtgatcaatctgagagattgtgctttgataacctgacttcaaaatacagaccaagatactttcctaatttatcatttgaggttttaaataattatgatatacaaggggtaattttgttttttgtttttttttttgcttttgttagagaattttaagctatttacctggttagctcaatgctatataaatatgtttgcaattattttaatttaaaaacttaa

SEQ ID NO: 111485 - DNA, 2161 bp, Homo sapiens
tgtccctccatctgaaatgttctatcttcccatcctacatgtcttttaaggctcatctctttcctaacgtagcttaaaagatgctacacaatttccatgcagaactgtttacagccatctatttacatatgtgacctgaattaaatgtcataacaagtgcatctcttttcaagttgggaatatgagatagccacattctaggctttttcttagcaaatggacctttgaactgtttgctgcccagttcttattagaagcccttctgtgagaaaacattcatagatgtctacattgatatgtgattcacccattcttttagaatatggttataaactttcaagcaataattcaagcaatatttcaagcaaaataatttgaaaatttgctataaactctggacttttgcctggaaattgcatctatacatatctatttatttagaaatcagggacgtcctgattcttctttagagaaccatgttgctagttaagaacctgaactgttctcaaaagcacagttacattattagatcaagcctaaccattaagagggctagatacacagaccacgttgttttgcttcccctgattaaattgctcttattgaattgggcattgttgtgcttcactcagcattaaagggcattttgagaaatagctctttaaaattcaattttttttggtaggaattttggagactttatttccatatttttgaaaacatgagattgcaatccattagtgggttgtgaaacaatttggtggtcccaaccagtatttcttggttttgtattgtttcttttgcttttttcctatgctatatttaaatattaataaaattacattttatcttagtgtcaccatttttccttttttaagtattgtttcatgaatcttttttagtttttaatgtattgtgggtactggattgctgtgtaaagtgtacttcttactgtgttttgtagtcaataaagtttaaaaactattgtactcatattttctcttagactcagaggagaatctttttctgtttattctcatttgtaaaatgacaataatgagagttgctaccttatgggtttatcatgaagactaaatatatataaagtatttagaacagtgcttaccttgcgcatagtaggtgctccataaatactagctgtcattaccaggaaaacaatcttagagcaaatgctttgttttaatcttaatgcacattaaagacatttgttgttaatgatgtcctttgctttggcttccaagaaaaagcagctgagatatatatatatgtatatatatatattttttttttgagacaggctcttgttttgttgcccagtctggagtgcagtggcacaatcacagtttactgcatccttcatctcctggactcaagcaatcctctcacctaagccctctgaatagctgggaccacaagcatgtgctactatgcctagctgatattttaaattatttgtagacacaaagtctcgccatgttgcccaggctggtcttgaattcctgggcttaagtaatcctcccgcctcaggctcccaaagtgttggcattacatgcgtgagcctgaccttcagagatcaatttatggccttttgtctatcttctattagccctgatttgtcatcttaaactttctgttgcatctctgcagggagccctcagattctttctgggatatcagaatcatcaaaatatgataatttaattccattgtaacttcagagatatttttatattcatttactgtgccaggaggggaggtagaggctcttgggaacatttactgcctgtttaaactgtacattaactcagacacccagagtggttagtttcttagctttttactagatggttgagtccaatatggagaagaggattttgataatagcattagctgtctaccttactgaacaagtttgttggcctaatcaaacctacgctttggggaactcttaagttacagtagatttcctcatagggaaactctattaaatcttcttaagcaatgaaagaaaaagctgtccattaagaactttcgtggaataatatggttcaatatttttttccataatgtggcatcagaataatattagatttttaaattatttgtcagtgttagatattatgtgctttttgttgctgtg

SEQ ID NO: 111486 - DNA, 1050 bp, Homo sapiens
atgttttttaacacttggaatatatcacaaggaaaatatcttgtgtatgttaaaatgagcattattttcaggcctttttggggaatatttaaagtttctgtaatagagctgtagtatgtgttacaattgtagtggtcccaaaatttccatttgtctagcatttgctgtcttatttaatttcacaaagataaatttatttggagactactaaaactagtaagtgtagaagagctctacagagacttaaaacttaacattatgatcattgttgggtatgttggttctagcttgtttattaataaaaatttttatgacaatgcaaagtagtgagcttaaactcagggatatttttcaatgtgtattgtgatctggttttattttaaaatttattgcaaacacattttgtttttatttctcactgcttttattattttttaagcatctaattaggtgaaactgaattgattcaatttttatgttacaggagattacctggggcaattgatgttatcggtcagactataactatcagccgagtagaaggcaggcgacgggcaaatgagaacagcaacatacaggtttagtattttaaaataaataattttctttaactgaaggatgatatcaacattataatttaatttattcaatagatagtcatagtgctatgctgtgttttaggtgatacaaagagatttaaaatgtgaagccagtcatttattataaaggcatttccagttagaatttataatctctgaatctttttttaatagggttttctttcttttccttggtagaaacatagtacaggttgagtatctcttatctgaaatgcttgggaccagaagtgtatcagattttgaaatgtttggattttgaaatgttcatacgtatgtaatcttagagatgagacccaagtctaaacatgaaatttatgtttcataaataagttatttaatttgttataatgatttgttaatttatgataatcttttttcctttggcaaccctgagtaaactgtgtagtgggcctgagttttgattgtgatc

SEQ ID NO: 111487 - DNA, 3814 bp, Homo sapiens
agactgctactgggtgcctggtatttatttcttttaaacaaaagtaaatgttgatcatatttttagctacttttgattacaattaaaaaccaggttagtggtgatagagaagaaactcacaaataattcccaaattttatttttatttgaatttttcatcgggttgcctttcttactttgtttttaacctttatctgccttaaccaagtttttatgaaactagcaagattgattgagataataattacttcttcccagggagaaagctagtagtaaatgatgaaaaaatagctgcttgtcctcatcagggcaacatgaaagacgtatgttaggctttacttcctattaatcaaatcagtttatactagagagccatgtactctcactcacttttatttgcaagagagctgtctttgttttaaggtgccagttgtgatccgagtacagaaccaaatccagggtctgaatagtccttccctaacatattcatccttggcctctaaatgtcagccactgcttctgtctttcatcttcagtgcctttgatttccttccactgtcacctctactctcaaaaagtatgagaaaaatatgaaaaaatgacttgtggctttagagggtctgttgtctcaacaatagtggaaggaagaggttggaatataggttagaggtccttattccagacaacattagtatttctaatttcagtgaatttctagttccaacaaatagattgagcagaaacgactcattagttgggattgacttgtggttcttgtgtctttaatatgctgagtattaaccaaatgaaagaggacttaggtgattcaaaatgaggacttctgtgatttctatgtgaatcctttgtcctctgaaaaagaattagataaataaaaggtagaaataattaatgtttcaacatatttgattaatgatactaaaaaaattattaatgtttgtggtactctgttggattcctttgtaatattacttaaactttactaggtagtgatttgaaataattttctttttttaattcttaaaactttttaaaaattttatttttgacagtaatacttgtatatgtttatggggtacaatgtgatgttttgattatgtctacattgtagtaaatcaagttaatatattcatcacctcacatacttaacatttttttgtggagagaacattctgaaatctcctagcagttttgaaatatacggttattaattatagtcaccatgctgtacagtagagctccaaaacttgtttttctcattttactgaaacttttgtatcctttgaaaatcatctcccctacctcacccgtggcccccagcctctggtaaccaccattttactctctgcttctatgagttggatcatataagcgagattgtgcagtaattgtctttctgtgcctggcttatttcacttagcacagtgtcctccaggttcatgcatgttgtcacaaatgacagaatgaaaggatttccttatttacaaatatagtatatccccagatggctaacattttgtatgttcagtactaattattaaagtaagtaggacagagttggtatgaattaatgacaacaaatacttagctggtataagaatattcgaaactccgtagaatattgctacagaggtaattgctacacataggcagtagcattatctggaagtttactttttttcaaaatgataaaattacttttttttttttttttttttttttggagacagggtctcactctttcgcccaggctggagtgcagtggtgcggtctcagctcactgcatcctccacctcccaggctcaagcgatcctcctgcctcagagtagctggtactacaggcgtgtgccaccatacccggcatttttgtattttttgtagagatggtgtttcgccatgtccaggctggtcttgaactcctgacctcaagcaatctgccctcctcggcctcccaaagtactggcattacaggcatgaaccactacccctgaccatttctttttcatgtaacctttgttcataagtataacaaatctttgaagagtgtttaggttattaatgacattatactatagagtgcagctaattatttttctgttgcttaatctatttttctacttaattctcagctacatgctttccatattttaaaatcgagatttccttttatgtttattcttggtttacatttctatgctcttctgtcaacatttaatgagtgcagattcaaatgaattctaatgctggtttaagcagtacctaactggtatatgtgctgagcaggataccagttcattaaaaccaaatatttgaagttgagactctctgaattgctccttacttttagtagaatgtgagctgttggggagcgtacaggctatgtatttctatctatgtttccctacagttttagtcaagtggtcttgtacgtacttggcattccctaatgtgtttgctaattgagttaacgacatatttatgtatccataacaccaaagatgattttcggatttatacctggtacattcaatcaggatgggcactggctctgaataacagtacggctgcatagatatatgccagctgccatgcttaaagctgtggttttcagttaccctttaccacagaaccacatgattacactatgttccgtagtttgttgtaatttaaatcaccttaagaatcataagcagctaatgaaagaaagctatgattcaggattctttttaaagtattgccttaaaagatattccatttttcttagataaactgtcttgttttttgctttcttcaaaaataatcaaaagaaaatggaaaaacatttttttaaagaattaatttaaatgtattttaatgttgcctttttaacattagacttctaatgtttttaaaagtaaagtccaaaatatgatgagataagtatagtaatgatattttattctcatattttaggatgctactagatttttgttttgttttgttttgttttcaaataaatagggtgaccatacatccagatttgcctggaagagtcctactttataccttctatcccagcataattattattcattcttagaaagaaattccctggtttagatgatacaatttctgattgactcttggaaatttacagaggtcttattgcataagtagataagttactgtttaacaattataaggtgttagagataactctcatttgaaggacttttaatgtcaaatagttcacagaagaggagaaatgtattgcctcctctcacccttaaacacacacctgcaaacgtatatgaaactttgctagtaacacagagaggacaaagtatttctggccataatagatttgtatgaagagtagaggagatttatgtattagaatacaacaaagaaggaagagatgtctggaagtgcaaaagcatttatcgtggttccctgcagccatactaacagtagcttgaaaacaaatactgggccaggcatggtggctcatacctgtaatttcagcattttgggaggctgaggcaggaagatcacctgaggtcagaagttcaagatcagcctggccaacatggtgaaactccatctttactaaaaatatgaaaaaattagctgggtgtggtggcatacacctgtagtcctggctacttaggaggctgaggcaggagaatcacttgaacccaggagacagaggttgcagtgagccgagatcacaccattgcactccagcctgggcgacaagagcaaaactccatctcaaaaaaaaaaaaaaaaaaaaaaaaaagaaagaaaacaaata

SEQ ID NO: 111488 - DNA, 1316 bp, Homo sapiens
gaaagcctgttttctttattaactatgttgaaatgaatcagtacctatatccagaaaatcgtattattggattacgtgtatttgtcacagtcctagaaacttttttttttaaagcatttctctgatgttgaagtacatgcatacgtatttgtgggtagggaagttagggagattataaggaacagtcatcacatttttgaaaatctgaataaggtttttactgtttgcctggcttgtgttaagaagtctgtgtttagctgaagtcagttttgaaatatttgtttattggaagaaaaactgtaaaactggaagtattaatgttatagggtaggtgattttgtgtgtttgtttattgtggtaaaatacaatctatttgtcattttagccatttataaatatgtagttcattggcattaaatacattcacaatgttatgtaaccatcaccatgagctgtacctaaaactttttcatcatctccagtgaaaactctgtgcccactaaactccttccctcctaaggatagcccctgtaacctctattctactttttgtctctatgagtttccttattctaggtacctcatataagtggaatcatgcatttgtctatctgtgtctgacttactttgtttctaaaataatagaatttaattaatgattgtgagctaactttatggtaggctttaatttaggcttttaaatgttaatttacttcagtgtcatcatatttgatgttcatttttttttttgtagtggagtttactgtagaatagaaggtaaattcagttaaactcatttgtttttgtatgaactcttatcagcctcaaatgactagttctgtgggtcttgggaacaattgaaatgtagcccagtagtggaattctgctgagttgaagaagggtctttgctttactgagatatagcccaactactgtggaccacaaaccaggatccctgcttttaaagttagctatagggtttaactgtttatctagataccagatgtgtaggattctgcattttagaaagaagtagatttcttcctaaaagactgttgtcttgtatcagtgtctggctaatcatctagtactactaatttcatgaactttaaaatcttatttattccttaaatatgttaatttcgggttagggatgatatataggaatcgggtcagggggtgggggcgggtggcgagttgctcatatctagggtcattctgcatttcctctaagtcctgcattctcattagattatttttctgttagcagtctggttctttagcacagcagttctcaaaactttttggttacgtct

SEQ ID NO: 111489 - DNA, 1039 bp, Homo sapiens
gatcctaataaaggtaacatagtttgtccattttatagtgtatgtaaaattaccttttttaccttttagacatgaagtatgctggtaaatttttggttactttgttgtgtgaccgtaccactttttaacccttttttcttttcttaaaaataacttaaaactttttttgcaccttgtaattgttttaattatgaaataatggttttgccatattctttctacattctggtttgtatttaagggtggatggtagatgagatgatacacgtgtgtgtgcgtatgtttttgtttgtgttgaatttttaaaatcctgatacatagaaacgcatttctggtagaaggtgatatttaaagatttttgtaaaccttgtccttttctactcattttgagtaaaacttctgagcttgatggctttgaaatacaagtcatgagacttaaggaaagtgatcaagtttatctgtttcttaaataatagtgccgacggaacttggaatttactagtgagaaataggaagcgtagtttacatattctgccattttttttctttcatgtgaatttgaatagagaaaagatagatggttattgcatgtattgggtttctactgccgtataacaagttactccagaatgtagtggcttaaaacaacatacatttattattgaacagttttcatgggtcaggaatctgggacagcttagctggatcctctgctttaaggtctctctcagacctcacagtcttctccaaaagcctgactaaggaagtatttgtctccaagctcactcacctctttgttaaaaggattttgtttttttctaggctgttgcattgacagggcttcagttcctcactggtgtaggcgtcttaatatgttagcttgcttaatcaaagcatgtaagccaagaaggcaacagagagggtgccagtgaaatagaaataactgtcttttgtaacctagtcatggaagtaacatcctttgattttttttgtgtgtggtagaaataagtcacaatgtccagcccccacacaggacata

SEQ ID NO: 111490 - DNA, 1450 bp, Homo sapiens
tttgagaccagcctgggcaacatagcgaaaccctgtctccacaaaaaatgcaaaaaattagctgagcatggtggtacacacctgtagtcccagctacttgggaggctgaggtgggaggattgctttgagctggggaggcagaggttgcagtgagccgtggtcatgccactcaccctacacaacagtgtgagaccctgtctcaaccaaaaaaaaaaaaaaaaaaaaaaaaaaagagagagaaatcatcttctcttttgagaatgccagatggtgtaggctctcatagtccttttaagtgtcataggtagatgcttttgtttcataaaaattcggaatgggatttatttagtctgtactaaattgctcagcagtgaaattaggagggaagcttagaatcggatccagtgatcctcatagtatagtcctgggccagcaacatcatctgggaaatttaggggaatgtaggttttctggtcccaccccagacttactgaatcagaaattctaggggaagggcccagcaatctgtgtgttttaagagactctccaggtgattctcatgcatgttcaaggtagtttttatttatttatttatttatttattattttattttatttttttgagatggagtctcgctctgttgcccaggctggagtgcagtggcgcgacctcggctcactgcaacctccgcctcctgggttcaaacgattctccagcctcagcctcctgagtagctgggactacaggtgcatgccaccatgcttggctaattttttgtatttttagtagagacagggtttcaccatgttagccaagatggtctccatctcctgactttgtgatctacctgccttggcctccggaagtactgggattacgggtgtgagccaccgcgcccggcctatgttcaagttttaataccactaatctgttcagtctgttagagcttgagtattacttttccaaaaggttttggctggcactagaaatctacttttactactgttacatacagctttccaggaaaatcaacatttttttaaactcatttttcagataaaggatatagaaaagaaacaaaatactttccttatttaagtctgttgtctaggttaggcagcatgtgtttgccaggaagatggaggtgttgggaggggaaagaagagggacgtttgagatgaattttctcttcccttacactgtttctcttttattaagaaaagtcaaatactaaatagtgatttttaagtgagaatgatgttggccttacatgatatcacgtatcagtttgaaaatacattcagtaattgtcaaagaattggttatatagtgtttcatcaactttatagtcttgttttaatgaacatttacttataaagatttgcattgaaataacatcttagatgaaatggaggtctcacaagaagggcccttgctagttgccatgcc

SEQ ID NO: 111491 - DNA, 2164 bp, Homo sapiens
tatgtcttttatctctacattttgtggaagtttaacaacttaaatgtttttgaggactaaagtttgaaggggctgactagtaattttttagtttttagcatgaatttacattttagtaagctgtagtaagccttagctaaagtgatacatcctgctcacataatcatttaggtaaagttattaggattatagtatatagaatgggtggatgattttggtatattcctttatcttataaatcttatcttacaaatctgtatcttataaatctacgaaaataatcatgtatttacttatgaaaactagatcaaatagtgaagttaagtagtgtccgtattgttctaaagaaaattaggttgtagtatatattaaaaacatttaatgatctgccttccttacttttctcatttactttggagtctgggactctactagcttgtatggtttgttggattcttttagtttagtaatttgggaaacaggaaggtaacctcaggatggatgagaattgccattagctatgggtcagtttagtagacttgtggattcataaagatttttgaaacttgatggctgctttatgtatctttagtcttgttggctttgtaagtttggaatatgtttttattgtatgggtggttaaaatcaggtgctttggtctcttttttaaggccatttgctaccttaagatctttttaatctaaatctcttactctgataaaacatgcacatcagaacatgtttagtgttagaatatgtttcctttgacaagaaaacatttgaaaacaattctgtttctttttttggcatacatttagctaataaattagattattttttggactaattttgatgcagtttttaagataggatttaggaaaccgttccaactgttttagttatttatggtatacaacttttcatgaaaaagttactttaaattgtcttacttttttttattttcctgcttagaaatctctcatttttcctccactgaagatagttaaaatttgcatgccacataaattgcctttcatgtatctcttaaatttaaaatgctgaatttaattttagtatttagtaaatacattttacattaggctttaagggcacatttggtccctgtaaattaaaaatatacatagtttattcctcagagtttataatgtgtacaaataatgagtgagagtcactcaaattaatatttgctagcacctgtagaagtaaatcattcacgtttatgttaatgtgccctgggggtgtatatatatgaattggtttttccccctttctctcctacaaatcaaaggaaatgttagccttttctcacttctgccaacaatactagaacagtcaacacttgaatgaaccacaacatattgagctttacaaaagtcagtaatatccatcatcttgagttatccttgtactacctgcagtattagagaaagaacccacagatcagtttttctattaaaatgttaaaataacaacctcaggcattgattatcatatttagtaaggattaacttcatggcatttgataattgtgtgtgcataagtgtgctttttaactgatgtctaactttgtgattactagtgggggaaaccttgttatcaagttgttagactgggttttcatcaaggaagttggatgttatactcgaattgttagtcctctacgagaaaacagaatggttctcttgagtgaataagccaggataatgaggcgaggggttttatttcaaagtttgttttggtgatggcataaatacataacaggttctgaaatccaattactatattaaatttcatcacttgttttttaggtattccaataactgtaccacctccaggtaaaacttttttcatgttttctccatcattgttaataaacatgaaatttcaagcttatagttacaggagagacggtgttgatgcggttagaatatggaataggctatggggatttcaaggtcctattttcagctctgcctttgcttcattccagttttgattaagatatttagttttcttatacctgtcttacccgtttctgtagaaatagagattctgagaaaattcttacctattcaatttgtgaagaaaacagtataggatataaaataaaagttttcttaaaaatgtctttacagaccaatga

SEQ ID NO: 111492 - DNA, 2018 bp, Homo sapiens
actataagagaagagaaagataatttattttgtctttatcattatttccgattttttaattttagtcctgctggcttagtatcgtgagaaaatgtgttctaaaccccacatagcaactagacagacagctggtcaggtggctgttcttagagtggtgattgtttattgttgtaatagtatgatcactaggagtttatatgtggcccagtgttttatttatttatttatttatttatttttacatttttgtcagttatttctttttatagtgtgatatcacacctggtagcaagtgtgtcttcctgagttcagtgttaaaagccaaggtgtgtaaagagaatgagaggtgataatgcttgcaagggtgggtctaaattcaaaatgacttcaataaacagaaagagtgaagtttaggtagcatagtacagtatacatacttagatgtggaatacagacattgattatgtgtgaatgtgtctgaaaaagactcatcagggaaagtcaaaggaatcatttgtgtctttttagtttaaaaaacaatgtggttgtgaggctgtatgaaataggattgtggactttaggactaatgtggtaattgccaaattttgtacttttaagatgtttaatagaggaattatagatcctaacactggatacagtgaagaacatggtaaacatgaaaacaatttgaagtggggctaaaaatggatttaagtggacctttgagaaggattcagagaactgattcattttttcacagaattactaaaacggaggcttagtggaagtgttttcacataactagaaggtgatagacagtatgacagtggaatacctcttgttctcatttaggacagtgtctgaattgtagtatgagagacttaagttagataatttagtgcatttcctagtagtgagagttgttaattgttaacacttggaaggaattggtatcataaggaattgacatcataagttttggaaatctttttctgctaggatgctttatagcctatctgaatttgaaagtgtagtgtagattaactgttttttagccatattattctgtggtattccatttaggtattgtgaattattcagaatgcagaccccacgatatagaggtacaaattatattccttccaaactaatacacaaactatattatgtgcttttctttgtaaaacagtttgttagggttgtgctatttgaacatattttctggtggatattctcagctttgaacactgtacatttactggtaagattttatttataaattacacattttaaggaaatttctatacttctaaaactcgaaatattttttgaaagaggtaattgctatatatctgctttccttctaaaatatttcaaatatatctggtggctactgttttatgtatggagaaggtaaggcattgagattaactttctcatacttacaaaatgggctgtgtgtggtgctgaaaataagaccggtgtcctgactcccagtttgttttctgtgtattagaccagactgcttacttaaagttttattgcgctaaaaatctgttcataagtttgagctccatttttttctgtccattattacaacatagagaagcacattcatatccccagagaaatttagtgatatgcagcaactttgtttcactcttgacattaagtgtacattgttaacattttttatcttatgattgaatgtttcaggttttcctcctccaccaggcgctccacctccatctcttataccaacaatagaaaggtaaatcagtatggatactgatttttgatcattgatagccttttgacagaagaaccatatacttggaaatattttcagatatttaattttataaacacagcacctgtcttttaatttataaatctagatctatgttagttacttttatataagatgttggacctgtagcccgatatcaaaacagggcaaagaaaactaaaatcgtaatattttgaaataatatcttgctttgatttatgacacactt

SEQ ID NO: 111493 - DNA, 1053 bp, Homo sapiens
catgcccggcaaatttttatatttttaatagagacggggtttcaccatgttgaccaggctggtctcaaactcctagcctcaagttatctgcccgccttggcttcccaaagcgttgggattacaggcgtaagccatcgcgcctggcctcctctcaacactttgaagatgtcccagtgtattctggtttccattttttatattgggaagtttgtggtcaacctaattctgattcctgttcaccttgtataatgaagggtctttatatgttaggtttttaagatttgtttctggatcttcccgatactgtgggtattcattcaccatgtgatatttctcttttctatttataaaatgaatttctattataatctcatgacacatttttggtgggcattttgtttttttaaagtaccataacgtttgtttttaatcgtgttttttctttagttgcctttccccatcttcctggttctgctccttcgtggcctagtcttgtggacaccagcaagcagtgggactattatgccagaagagagaaagaccgagatagagagagagacagagacagagagcgagaccgtgatcgggacagagaaagagaacgcaccagagagagagagagggagcgtgatcacagtcctacaccaagtgttttcaacaggtttgttgggtgtgcaggagtttatactatgtattttataagcacttacaaatttattttcgttatgaggaagtgaatttcagttcacttggaaaagagatgctcagggagtacataggaaagccatcttaaaatgataaaggattagaggcttcccattaccttgaacagtagtccttaaatttgtttgtttacttatctcttaaaagaattttctaccccttcatttatttttatcttgccatctaagtttttcatcttaagcttaaattagttgaccatatagatatttccagtgtattataaatattaatatttaaaaagaaaattatcaccacttctattattattctatttttagagacggtcttgctttgtcatccaggctggct

SEQ ID NO: 111494 - DNA, 5401 bp, Homo sapiens
ttattagccatgtagcccccctgcccacacagatgtaattaggatgtcagaatgcaggtatgtccaatctgcattttgtatggatgctgtagaagttgctttgatgtctctgttctttatttttatacttctctatttgatgaatatttagtaataaacctaaagtttaaaaacttatttgctttctgttttgtagtaattgtgagtcgtgtatttttataatgttaaacgtatgtccaagactttccaagaatattgattagaaatctgagatatacaaatactattttaattctaaaaggagcaaaaattttaaaagctgataacaatttaaatcagttgcagatctcactttttcaagaaatgaaaaaaccaaagcattgttatattaaatctttttaacagctatgaaagcacagaacaaaattggtcatttaacatgtgtaattattatatatttatattcttagctctagtgctattttgagaacaagcattattttcctctcaattcaacgaatatttcttcctcactaatgttataaaagatgctaatgtgaggattttggatttggactgcagatcacatctcttttacagtttgaatccattcagaattaatggtccagttgtcaagaaaacatttctatttcaatttcagcgatgaagaacgatacagatacagggaatatgcagaaagaggttatgagcgtcacagagcaagtcgagaaaaagaagaacgacatagagaaagacgacacagggagaaagaggaaaccagacataagtcttctcgaaggtttgctctttaataaaatagtgaaccaatagtatgtgagagattttgacttactacattgtcgcattggaagaggggaaattttggcctatgaaccagtcttgcttggtttcattaaagaaaaattcagggccttgtctcaaatttttttaaaaaagcattaaacaaaatacctattgtttgccaaaaatcaaccctatacagtatttccggttttgagttaatgcctgtttctaatttgttactgtatattataatatgcatttcagaagctgtgtataggcactgggaatctgagataatatcagtgaagatggccctataaaataaatacaatccctgcataaaagtcacataaaactgattattcctcacattatatttatgagaaaatgcattagattattttaaacccagtgttatattgagaatttccttagagtgattggatttttgtcactgattgtgtatttaaacagaacacaccttttttttttttttttttttccagtaatagtagacgtcgccatgaaagtgaagaaggagatagtcacaggagacacaaacacaaaaaatctaaaagaagcaaagaaggaaaagaagcgggcagtgagcctgcccctgaacaggagagcaccgaagctacacctgcagaataggcatggttttggccttttgtgtatattagtaccagaagtagatactataaatcttgttatttttctggataatgtttaagaaatttaccttaaatcttgttctgtttgttagtatgaaaagttaactttttttccaaaataaaagagtgaatttttcatgttaagttaaaaatctttgtcttgtactatttcaaaaataaaaagacagcaatgactttatatccaagaaaggaatgtgaatgagtcacttaacagggaatctaaagagctgtgttagctgtgtacatacacagattatctgagaaaaggtcaagggttccacttgggccacagtttttttgttaatcaaacaccactctcttaagaggctgcatcacaaaaggcaacaaagggcccctctaaggcttgagattaaaactagtctttatcattactgctgtgacactcttgcttagtatattaagagactcatacatttttgatatcacaactttttgatggcttttcaatattctaaatttgggttcctggtgaaaccaaatggggtacactttcatatccaaattaataaaacctataaggcatctgggtggcctctatgaaataaattaattaattacccatagtgtagtttctaggaggcatgtgtacacacactcttcattgtggcacaaatttaaatcgcctcatgaccatgtctgtgagccagggtcaagctggtttggccttcttgatgcattttccaaggcccactggtggagcagcatgagtttttatacagttactaacgattgtggaaaaaaagagctttagccatttcttactaaaaacaaaacaagtttataattaattctctgagcgagcatttttagggataagcctaggaggtattcatcggtgatggtaacaaataacatggtatttgaaagaataaattactaggatcttttaaatagtgataatacaaaagtaatcttaattagtatcacatactaaaagacaactataacttctgaaaaatatttattcttgtttgatgaaagcaacgtttctcagcaatgcattttaaaaaatattttagctgtaaattaaaaatggccataatgtacccttggcagacttcagcatataccaaattttaaatttaaatcagcttgaattcagtggggtatacaaatcattttagttgttttagggctttttattgaatagaaaaaatataaacaatgttgtagagtaatgagaaatcctccacactgaaaaaaaactagtagttttaatttttttggaatcatattttctgaggtgtaactggctttcattagatgatcatacttttcctgacatttttacaatgtattctttctttaaatataaaaactgacaagataaatatagtgtttcaacttcttagcctatttgtgatttttctgttttcctctgacccatcattgattctataaaaaagtgccaggccaagaaacaatagttagagtaattcttcctttaagttctttcagcagtcttgccaagcaagcatgtatcattcctgatgtacttctaccattgacagcaagaagaatatcaccacatctaaaaaaaaaaacaaaacaagatatgattagtattttaattcgttgctgaagttaatgcaagtttatcttagtggtgctagattttgctacatctgaccattttaattatgttaacttctaattgagatatttcttgcctcttatttacattctccaaactcactatccattcagcttgtgttagaaggaatgctaaaagtatggggagttgtagtatgggaccaagaatatgtgtaattattttggatttctcagaagttgaatgctacgtacatacttttaatccccacaaagtataataaatacatgccttatctcaaatggggccaagctttggcatttatgaaacaacatttaatacaagtatttttgattagtcattattattacctaattcttccatcattgtatgctggtgttccttcaacaatggatttgatgaaaaaaggtttgtttccattgtattcttcataacctcctacaatgcagaagcccagacttccagctgtgtttcttcgtaatacaatatctttacagttatacaagcacctgaaatagaatgtaatcagtgtacatgcatatttaagtttcacagttaagggaatacttactgtgactcatcctccattccttttgttggcatttttaatggctaagtaccactgcataggtcccactcaaaattgtatcataccttggtgacctttgtgctgttagctggctttttgtaattgaacctgttttccataattttgaatatccttaaaaaactgacagccctattgtgttctgttacacatctactgggaatgataatcatatttttaacttaagacaatgcttgaatatgtattagcaaaaagttggataaacctaaatccttattggtgaacaaacacacttatggatgtcatatttttatttacttgatataattttaatgagggcaaaaatcctttgaataatctcaatgaaagcagtttaagcctaatcctaataaatgaattcgtatactttttttgaccttggaaaaataccactttacacccagtgctacgtttgataagtcatagagaagcatgcacgcataaagtgaatggaaacagaaacgtttaaagattataagaacaattcaaataggaggaaaaacaaactgcaggaaactggataggaagttataaaaggaatgggagaaggaaaggcccagctcttctgtaaattagaatcctcaactaaaatagcaaatgagattgaagaaatttttattcagtggcccccaatggatcagtgttcatataggtacaggccaagtgttaactatgttataattgccatagaagtgtgtgtcaggagctgaattttactccaggatgacgttgttgaccacatttgtagctgtagtccgggaattggtttgaaaggaaattggcattttcatgttgccaaaaatcagatatggctattttgtttatataccgtaccttaaaatattaactgctttttagaaaccaataaaaagtcttgtgaaatgttaaatgataaagttgatcattacatttgttaccaaccttgttagtcaatgtgacgtgacttttttcatgatgatgttttcacttgaaataaaatgagctttagggtttggcaaatacctttaaaatgtaatgctgaaattcaactctaaccagttctgaatctatcgtcatacatacacatcatctataacaatttcttttactgaaatgattgcttaaaagtatgaatttcattaaatttcctattgtaaaatatttatctgctgcatttcacagtaaaccttgatgtcagtggtaaattcattctttgggagctgtggtgtgtcacataacacactttacataacggttcactgactcctcatgtacaaagcaggtaactggctattctgtaaataccaaagcattacattcccacctgggaggatgtgtgcccaattttttggagaaaggtaagaattagatgattgttatctaaggtcatgatcaaatatcagttttaattgcccagtttgattctttaaaatagataaatgagtatacttttactgaatattttatttcatatggagaagctgtaaacataaccatcaaaaatattacgtgttctagttcaaagctttgaacccagtaagtcatagtgtgcctattttctaacctcttgatactggagagaacataactgctttgatcatctttctgcagatgtttaaacaaaacacaaaatcccctgccctcctgaagcatccattcaagttgatatcagtgttcctagttttatttaattaaaaagtaaacgccttcttttagtggtgt

SEQ ID NO: 111495 - DNA, 1049 bp, Homo sapiens
ttgtttaagtagctttataaagagatctagcctttcaataaaagagcctggaaacttcctttcatatcagtttgtctgaaactgtgcaaggatttcttccttttgctgagaacatgggcaaaaaaaccttgcaggggaccaccctgagacctgacacattcccatccgcacacacacagtatcacacgcacatacactccatcgtgctcacacactcagaccctcactcacacactatcacatctacatacacacacagtggtgaggactggaagttctggtatgagttgacccagggagaaaaattcaattggagatttttgggaagaaaatgtcaactcggcttgaagagctgtttaatgcaatcatttgactgaggcaaatgggaaaaatgcttttcttttgccttttcctaccttatcttccttccctctcttcctgccagctaaaaaataatgacaacagaaatgaaggctaggattctgggaataaatatgtgggcttgggtaagaacaaggtggagaaagatggtgtctactcacagaggcctggagaggtgctgcaggccacgcttggagagaacagggttagaaacgctgttggaaggtgcggttattggacacaggatgaggtgggagagcagagcagtctttaaagacaggatcctggcttttctgtgggcctggatctttcaggaagggttgtggcaggtggagctgaccgcacgattgttccacctgcccccaggtcaacgggatggacatcagcaatgtccctcacaactacgctgtgcgtctcctgcggcagccctgccaggtgctgtggctgactgtgatgcgtgaacagaagttccgcagcaggaacaatggacaggccccggatgcctacagaccccgagatgacagctttcatgtgattctcaacaaaagtagccccgaggagcagcttggaataaaactggtgcgcaaggtggatgagcctggggttttcatcttcaatgtgctggatggcggtgtggcatatcgacatggtcagcttgaggagaatga

SEQ ID NO: 111496 - DNA, 1196 bp, Homo sapiens
tttgtgagttagtcttgtttccttgagtcatcatactgtagtttttaaagaattgataacttattttctgaatttttattattttattcacatttttcatcctgaccagaaaaacgtgagcattctcagaagtgacttgtttcttttttcacaaagagagacctatgcaaaaaatgccattgctgcttgcactagttactatcttagaatccatcacagaaagcccaaaagatagcacaaccttttgtacctacagtcttagatattgttagatagccattcagttttgtttgcattgtgtatgagatgaatatttcttgagacttttttgtttgctctactaaagaaatcaaccaagggaaaaaaaatccaaaaaacaaaacaaacaaaaaacaccctctaactcatgtgaagcatgcagggtgttgtaatttcagtttgcaaagcggtgtgatacaatgttgctgagccaaaagcacacgatagatttaatgtagccaattgtgtacttttgaaaaaaagagtaactgttccctgtgagttaattttggatttcttcaaaatctctcttttaggctttgtgctggattcttccagacaaatgcgtattccatgtgggccactgttctgctaaatgctctcagttctccttttgcaatcaagattatgttgctaaggagattttgcttttattgctgccattgatttgtgttaatacgttttgaatacctctcggtattctttcgtagacaaggccaaaagaaaaacttccccgagtttcccaatttacattacaaatggagcggtggtgtaatgaagccgatataaagtgggcagttgaaaggagactaaagaagggcactcaagtgagaaatgaagaaatgtgccgagtgcagtctgtgggctgcccttggtccagctgcaggaactggctctggccagaggtagagtgagtgagcacctccctctgcaaagaccacccacttttggagcctaggctggcacaccaaagattacctcattgattaatacagggcttgaaaatttctgaggtggcaaaatcacttctaaatctcttttttgagtccttcctagagcatgactgaggccacacttcctgtgccttatgacctgaagttgtaaaggataacctatggatggaccagttcttttggttctgaggactagtgtatttc

SEQ ID NO: 111497 - DNA, 2255 bp, Homo sapiens
caattgtgatacaacttctctggatcatcagtttcctcatctgtgaaataaggattataatacttgcctcatagaaaagttgttgggtttaaagagacccaatgtagtatggaacacctggtatacagttagttctaagtaaatactagcctcttttctcatgagtgcaggggagcgtgcatgtatgcatgtttgctcctccagtgtatcaggggcactatctatatcacccttctcagactttggtgattttacttgcttatttgtcttccttttcatagagccaaggtatttcgtgtatttggtaaaggtccagaaataaaaagaaaaattctcagtgatggaactctgcattatcagataaagatctgttttagtaatgcaaagttgcgttttaaaatgtgaatggattttcaaaaaaattgtgaaagcatataattgaagttttaagaaaaaattttgtttaaatcttttaaaacctttttcttctccttttacaggtcatcctcatagaatttttaccaaagacaccgatttttcgaccagattagcatttactttatttatagagactttccaagtatgttgtctttccaatggtgccttgcttggtgctctcctggtggtgacataacattggttctacagaatcgtgtggtgttttttttgtttttgtttttgttttttttttaaataaccgcatgttctaagtgtgcatttttgtcaatctttgcaacagttatttcatacagatgtttaatacttaagttattgtgctcttttctgttatgtattctgattttcaaggattacttttttgtattatcaaaaaaatacatttgaacttagcataaaaagtggccagccttttttattttgtcaccaaggtacacacagtcctttatttataaattccttaacagagaaaaacacctttgtaaggctcaacttacctattccagcaagcacactttttctgtcattttttctttcttttcaaatttgatattgtcattattttaaaatagtaagttttctttaatagtcttttgggacctaacataccctttctcatacaattcctaatgctctgtttatggcagataatctgtaatgttatgaagacctatcaaaaagttttaaaagtatttctgtcttcaaaggtagtaagacaggattaaatttttattagaatagacaaatcagtgaatggtatgcatgtatctagtggttactagaactcaggatcacacaatatagtagcatcacgatctgtgtatatttttgatcaagatgataataatggccttacttgggtttttatcgtttatcaaatcttacatacaaaagagtggaagtattcctttacaaaatttctaaggaaaatatttcttccaatctatcacaattatagaatggatatatgtttctgaaaagtttttgaaagaaagcaaaagttctagaactaaaagtaagctggtatttaatatcccgttgatatttagaaaagattgttaataagaaatggaggatgcatttagtactatttttatccactagttcactttcagtacagttatgtatacttgttttgattgagagtgtgacatacatgttaaatcagattagcttgtttcttttaaatatacatatacacaaatacatataattttttctcctttttgttgtgcatatctctatgcatttttaaacttttagatttgtgaatgacctatgtgtaaatttttgtttttataaaccagaaattatacaagttttaatgtgtgtcaagaacttgttccatacaactgtggtatcgagcaataatgttaataacttttggaattatataaactatgcttaataatttgtattgagaattggtaccactatacaatacttttttcctgtattaaatcttttaaataccagtttcattaatttatatacctgtatttttaaaagtatttctttgtacttgccaaagtactgtaatcctatataaatttgaatagtcaaatgccagtatctcatgtcctatatcctgtcttggatattaggagctatcttaaaaactaggatttaagatttttttttgcttgagaattatatgttttccttgccccccaagtaacaacttgaatttgtagaacacttttcctgtgaagagttcaaagtacaaagaactcaaatacttattttatttaacttgtatctagggtgtgtcctaccaccttaaagtagtgcaattaaaa

SEQ ID NO: 111498 - DNA, 1466 bp, Homo sapiens
tgatgtgaaaattaatttgattttataactcattgatttttttaatattccaattttttgttttggaacttactgaaaggccatttgcattttgttaactaatatttacttttgttttaaaatatgtattaaggaacttccgttactatttaagtattggaaacatttttgaaagaagtgggaatttaattttatttggcagatgacattagctttttaaaccttgatagttttaaatcagaggctagtaaaaaaagattcgtatgataaaaataaaggcatatcttttttaagaaagagtactcttttgtgttcaggttaccatttagtgcttagaacatcgatagtgatgcacaccacactatactcagtcactgtcttatacctctccccttttcacagaaaaagcagctgcaaaacaaagttttctaaaaccagtcaagagtaaacttttttctcatttgtcttccagacacgaagatcgattgagaagttattagaatgggaaaacaataggttataccacaaggtgagtaccacagggagcagcttcgtactgttggggtctgaattgcacagtatggaaacagatgcttttgttgaactaaaaatatgaaaggtggacaaatgggttagtctgtgtgctgcaataaaatagagctcatttttcttcttttactttcctacttgtctagctgtgcttgcattggagactgagcaaaaggaaatgtgaaacgaataacatgatggaatatgtaagttaaagggctgttttgtgagtttctctattaaatgatcatttattttgcttctgatcttattctttccatgattattaatcagcaaaggtgtcaggagcttaatctcctgagtgcaaggattttctacggttcacagatgcatggtttcatgtgcaagactgatttataaagttatgaatgacttgaaaacaaggcttcactgtgttctgaaaaataataaattaattgccaagataaaatagcctgaacatgtgttgatggagtgtgaaattttagatgctgtataaagaataaccacaactttggttacgcagcaagtcagatatggcttttttatataatgctaatcaagtttccaagtatggaagaaaacctttcagccaagccattggagcttaagaaacctttaccctttatagattttaactgcccgtacctcagtgccctttaaagaatctcttttaaagtgttattagaatactgctttgtaaaaattaaaagtaagcaggagatgagatgttgatcatcttgtgtttacttgttaaaaaatatctaatttggcatatatatacaatgaattttagaacttactcagcatgggatttaatttactgactccatgatttacttgaacagtttttctccttttgaaaatttcagaatactctagaaaattaagaattttaattctcttttgagcttgga

SEQ ID NO: 111499 - DNA, 1600 bp, Homo sapiens
aaaattacatttcttgttgatcatcttttgcagaaagacggagaattacattggtaaagaaccgctaacctgtcccctcacccccagggtgtgagcagtgaaaaggattaaggcccactgtagggaagcttacactaaagcctgcactgccccttcccctgttctttcagctaaatagatttttagttcccatgactatcaatctggtgcttttcacaagcactaaattctcttaaagaaaattaaagatgacttatttttttagaaactggcctggaatactgaaagatggtgttttttggtactttgtttcatgttgacagatcccatacatatttttttctgatgcatgttaatttgcttcagcttgttttgaatttggagttgaaataaacatttaaaaaccaaggacaggttgttatatgattagatttgcttgtccacagttagcaagtgtagagttcgacactgttgaatcttacatttcattagaaatagctacctgacagccttgtggacataaactctttaacttttatctagatgactacaattataaagtgctttcttttaaaagcttttaagtagcttttataaatgctgaagtgtcattttttttagtatctgccaaattggtattgtatttaatcttgaaaatatattttgattttcttaactaacaataattgcatagtattaaacattctcagtagctcaaccttttttttttctatttaatttgagcttttgttgttactaacaaataatttgtggcacagtttctttccttttttttttaaatgactgctagaatctatatacttgtcaccttagtgtgctagaaatgttccactcaaatcaagggttcctttctggttttgtatgttctcacctgctcctcactgtaaatcattgagatgtcaagtgcaatgattaattaagctgcacgtgcaagtgctttttttttcacctgtcaagcaggaaagaagtcttatagcaaaattagatggtgctaattcacagcttttacttcagactgtgaagtgtgtagaaatattttatatttatatgcttattcagaatgtggcatatcagggcttgtttgttttataattcttaaatattgtaagatacaattattataccaagccctatcattaaactcctaattataaacagagaagaaattcagaattcctacttaaatattttggaattcaagatttatactttgtaattatcttttattcaaatactagtagttgatttaagttaaagtaaatatttttaagttttaaaattgtgtgtatgtatgtgtctatatatcataatgagatctattcttattatagcatgggtttaaacttctgatgaaatgatggtggtaactacatttttttctttaagtaataagtatttgcagaatgtagtattaagcttttgggtactattttatacattaatataaaacagtgggcttggaaaacttgttctgctctagttctttcatcatccacccacccccaaaatcatcagtaaaagtaaaacctcaaattgtatagtaatcttaatctattattaaaaggccctagaaagaaag

SEQ ID NO: 111500 - DNA, 1043 bp, Homo sapiens
attttaagcagattttatacaaagttatagttggacaaccaagagttgatatattgcctttgcttctgttttgcttttataaaaacaaatgaaaatcaacatcctgtctttgaaaagttatttattaggttcctactccctagcaaataagtttacatgacttctggtaaagttatttttcttctagtattagatcctttcttgaaacttgtgtatttacttttagagagattgagaatgacatgtaatgagtgcatgtcccatgcagtaaagatgggacaggaactctgaatgaaagaactgggttttctttatctagccctaggcatttaatttgtggtttcttgccccttcttcactatcttccccattataagatacagaataatgaaataggtttgacctttttgaaatcttatttcagtccctttacaaaaggggtcctgcataaaagatttctcataactagatgaatacatttactgcagttccattttaaagaatgctttggccttgaaacttaaacagattcttatgtaaattactgccattattatgaacactagtgacaatttgtttttaattaaaattaaaccgcattactaagttttcatcataaaagaggatactcataaaaatgtaaactttgagccttaaaaatgcagaggtagcactgtaaagatatgctagaatgcttagaaaatgtgttttgtcaacagctggctgacattcatttctctgtaaatatttagaacatagtattggtgtggtggtttatagaaggatttgcacctatcttctgtgacctgagtttttaatatgagatactgtatttttcaattctagggtgtccatttgctgttttttaaaatagattccagttttcttttgaaattcttcgttttttcatccagctttctactttcttttcttgaacacattaatcatagttttagagtaagttgattattcaaggccgatagccttgttagtggctaagaaaacttgcatgtcatacatatgttatttgtctcaggataata

SEQ ID NO: 111501 - DNA, 1616 bp, Homo sapiens
gtgttgcatggaatgtgctcagtagttgtgatttgaatgaattctctgttctccaagtactggtagacttctgatagataaaagcaagataggttgtttttattatgtcttttatcttcttgttatatttaccattctttgaaaatagtttaaatcttttatcaattctaaagccatggaatattttaaccatgattcaagaaaaggtcttttaggtaataggaatagatataggtatagtacacgtctacattttctttcataccatctaatgcactgacaaataggtgttcaatggaacctaagacggttcttggtagcactttgtccattcctacttttttattttttctctccctttttccttattcttcccctcctcactctttttcctgcatttttccttctcatcttattgcttgtgtaggacacctgctaaaattcacaggtattgtttgtttccaccaataacattaaaagctggaaaaaatcgctatcccacccattaaaataatatgctttgtagttactttttaagatataaagttggtagctcaaattaaatgaaccatttatatttttgtttacatactgctggttaattaacattcagccccttatcattatgcaaaagtttccatttaactgctaaaataattgttacatttcataaattgcttgttacagttattttatctcaaacttccattttatgtctaaaacttcctccatatgtgaaaatgctttctattgacttgacctttaaattaaatggtctacatttttggcaacaataacatgtaataacatattcttcttattttttaaaatagatttggactgagcaacaaatttgaatctgaattcccttcttcattaactggaaaagtgagtgtctcatttatgtactatttgtatgcctcaaaatgaaagtttttttctgagaaaattagaaaaaagtatgctcatcagtcatgttttttgacattaatattgcattgttattatttcttaaaatttttctttaggtagctcctgaagaatttaaagccagcatcaacagagttaacagttgtcttaagaagaaccttcctgttaatgtacgttggctactttgtggctgcctttgttgctgctgcacattaggttgcagtatgtggccagttatttgcctcagtaaaagagtaagttgaattatatattttaatttaaatttagaagtggacaagcaagtcttgcatttatctagtttttattttttgtattgaatgaatcacactatcctgaataaaatatgaaaataatctgatccaggagaggagtgagtcagtaaagttactatatatccaagtgctgttattaaatagccatctaaaaattatatttataattttagaagcaaggagtagtgtatggcattgtctgtatctgtacattgacagtggtgtggtatagtgatcaaggatgctggcttcagctctaccacttttctctgtgaccttaggcacgtttcctaacctctttaaaccctacttgacacaactgtaaaatgttcacctactacttgaatataaaggtaaaatgaaaatgtttggaaaactcttagctgaatatct

SEQ ID NO: 111502 - DNA, 1034 bp, Homo sapiens
tctgagcatagctcagaattatctaattgactagaggaatcatttaatcaaaagcggctatcagattgatacacagtgatgccttagtggccctgaggtatgttggagtttgagaaccttctctaaatggcactttcatttaaatttcatatgtgggctgttctttttggtttgctttcttctgtctttgtaattggtcagctgttcttggaagcaaaacaaccaaccagccttattagaactgcatataaagtaagagaagttcatcctgattgttgaatgtagatgcttgggttttgatgcttgggttttacaatatttattttgttttctcagagtattttttgcttaatctttgattatcagctgtcttgttgaggtttcctgataagtaatttaatgagtatttgttaaatgcccatttttctgccaggtattgcacaaagctctgggtatataatgaaacccaaaatgaaacacacatagtttctgccctcatggagtttacagctaatagacaaattttatctgataaagttgcactgaaggaaatggatgagatcctgtgattgaaaataatgtgattaggaagaacctctctgaggaagctaacatttaggaaggatgagagtcctgtcaggagcccctggatctggagaacagcaggtgccaagactccaagccaaaacaagcttgacttgcctgaggaactgaaaggatacctctatattatggctagaatatagtgaacaaaggggataatgtcttgaaatgaggttggagggttcagtaggggccagaaaggattgtaaaggaattagaatgaaatttagaaggttatagaagcagcttccataagacatgatagtggccccagctagggtgttgatctctagattaaaggagttattacagttctgtgtgtaaaccatcaaatttcacagcttttcctatgaggtatggaaatacatagcagtggccacttttgctgtctaattcctcagttcttatgtttgttttggtctgtttatttt

SEQ ID NO: 111503 - DNA, 1049 bp, Homo sapiens
gcttatgtaatgctttaatttctttagtacctgttagtttatgttcaggtgacttaacagggtaaaaacactgcataattgccatcacagcaccatgacaagacagtggaatttaattcaccacaataatactttctaagtgttgtcaccagcttaagaagtataaccaaatatcatggatattaaacttttaacatatatcacagaattcataacctgccatttgattttattttgacttttaggacctttttgcactgttttaagcctaaggagtatgtggatgcttaaagaagtgatttccaaactttgtcatgccatctatccctccttctacattcctcatgtcaaagaaaagctagagaattttgtcatttaaaaaggcgacgctgtagttgtaatgtttcctctgttaaggagaagaaaagctaagcactttgttgggcaagtggaaaatgcaatagtgggcaaagtgctcagaacctaggtaatcagtaaacttgattgtagttggctacgtggagaggttaatagggtagaaaataattattagtggttttcaaacttagctgtccattagaatcctgggtgtctttaaaaaaagaccattgtctttgctccaccccaggccagttgaaggccaaatactaagtgagggtcctaggagtggacagttaaaataataaataaataaataaataaataaataaaatctcacaggtgattctaatgtgtagccaagattgaaaactattccaggttatagggagggactatctatcatcaataaacagtatgcctttctacattgtgagttaaatctctgattttcctcagcaacttccttcttctcccatttatcttggttctaggctctgggttaaaatctatctcagctacttcctggataaattgtttattcatgacctttagttgagatggggatagttatagtcgataccttttaagattattaaggattaaatgagatagtacatgaaaagaatttattgcactgtgtggtactatgttcaatagatactagtttt

SEQ ID NO: 111504 - DNA, 1023 bp, Homo sapiens
gctgccgatggcctggcctcgcgtcttggtcgggaaggacttgctggcctggcaggctgtgcgttgtgcatccctcccgcagccagagcgccggtcccgcacttcgctccccgaattgtgctaagacctcaggatgtgcgcaaggagtgcctggaagaacttgccactcactccatcttcctgggtgggaggcaagcatggatggggcccatatcaggtccctaccgccccgcgtccgaaaagccgcgggctgggcggtgtgggaaatggctttttggctccgaggccaaattgctcaatgttttggaccgactcgcctcgccgcggtcgctcctgacaagaactagacagatttttggagcagggagcatccagggcaaacgcacgacagtcctccgcagtgcatctcaccggacaaacatccccggagccacaggaggggaggaaggggctctccgggcgtgcgcacctccccagccgccgcgctgtcccatccccgacccctaatctggtcaacctggaccccggcactgctgaattgcatcccctcttctccctttctcctcggcctcctcctttccacaaccctcaagatgaggaggccctgcctcgactccccgacaggcgcaaggccgaccaggctcgctttgacgccctggtcaggccctgcttcggagcttgcagttttgggttgacccaagtgcagctggacctcgttcacaagagtgaggggaagccaagaatgaacccgtcgttagcccccggtgccctggctcttgtttaaatccttagatcgagaaggacttgaaggagatcccaggctcccagctctgcgcccctgggccagtttcctctcgggacgcggactgaggagggatgcagggggaggggcattgggccgggctttccagctgcaaacacgtctggcgccgaggcgggcccattttgtgcctcctggggacggaccgtgggcggcgcgcagcggcgggacgcgttttggggacgtggtggccagcgccttcc

SEQ ID NO: 111505 - DNA, 2348 bp, Homo sapiens
gagtacaaggaggcatctgcatcatgaaggatcctttgggtccagaattctcctccaatgttctgagtgtagactcagcactctttttaactattcccctggcccctgtctgcctctttgaaattcctctgcctctcctgctcacagggaagtcatagagtatgggtgcatctgaccggtctgcccctgactgaagcaaggagctgtggcttatgcttactgcccttcaattcccatatattcctctgcattgccctttgagggcccccgccccccaagtattacagctcctgtgcctaacaggatgaacctgctaggaatagtgaatcataccttccccgtttcgttcctgcaggtgtgaggctggagtcattctcagcagctggacacaaggcactctaaattattatcctgctggaaataagagaccccagataattcatttatccctattctgttttttcccccactcattcccattttttttctcatgactctgtaaatcatgtaatgctatgcatttatagcatgctttctaatgggccttaagtttcgtatgacatgtgtggtgtacatagttgttgctcttcagttggaaactgtgtgccaggccttttgcttggggctttacctatttctagtagtctcaatgagcctaggaagtagtactattattacccctaacattttacagctggagaaactggctaaggataagccctaaatcatcagtggtgaagcctgatgagattggctgcatgtgcccagctctatagccattcacatgattcaccagaatctgttgtaagactcattcaaaaatatttaatgagtttttactatgtgccagggattgttggaagttctgggaatacaggatggccaatgtcactaccttcccaattttggtgaaaaatatttagaattgcgtgtcttatgaaagcggattatttgtggagggaggattaattaaattttagcttggaggaagggctgtaggcatttgaccctgtggtatgttggcttagttgttagctatctcattccagttagcgtccctcagaaatgaaggtaagctgtttctaaaaggatgatgcaagccagttaaaaatccatctcccactccaaaacataaaaatggtcttgtgcataggtgtgaaagagaacacccccaataatggctgatgtcattggctatttaccctggatagcatggtgagaaataatgacaatctaccatccaaagccattttttctcccaaaagaaattctcatcagaaatgtgccaagtattctgcgggcttcccttggagaacatttatgtacagatgttgtggtggtgatgaattttgctgctgttgttgacagcccttcgaagttacccttagggttttgactcatttcctcaagtctcttccagctgattaaagaaggacacgaggaaatgaacctcggtgtctctagcggaattctcagagctggcctgcagtgtggggaccccttcaaggtagtggtcaaggctgtggcagctttttcttcagaatgaatgtagtttaagagttggcaggctaggatgtgggaaatgctttcttttgctgcattaatgtgcggtaacttttaaaagttgagattgaatgacatttgcaggaatccaaatatgcaaatttcatgtgcagttttggtaacttgaatagatattgccacagctataagtccggattgaagaaggcctggggaagagttagaggaggtaaaagtttgcctggagggcaaatccagtgtaaatctttgttgtacttagagaggaattgagttgagtcatagagaggaattgagttgagtcggcttggcccagcagctctgatttctgacattttttggatgtgatcatacagctcatcttttgacctaagactcttaataagtaaagagcagttgtaatctgatagcccgaggagacatgttttctttggcctacatgatgctttttagaaaacattgaggcgatattaaacaatctagagattttttttaaatcaagatctctatttctgtctcctctttaagaattgaaggtcatggcccctgtagatgaggcctgtgctcttcaggttgcattaggctctagggctttatcctgccatcccttaggcattccccactgggccctggtgagtgcaggaatccaaatatgcccctgggaccaggcagatgacaagtgggaggagacaggccggcctaccttgtgttggtctgatggcttcatgactgacagcttgatggccttagagcaaattgtttaacctttttgagctttcattgtccatcctagttttgccacttattag

SEQ ID NO: 111506 - DNA, 1202 bp, Homo sapiens
cttctctcattcggcgtatttatgggcaccttctgtgtgtcaggcactgatgagattgaggggaaggagaactggaattatcatgggtgtaggtaactgggagtattgttgatactatggaattagtggaaataaagccaagaggaggggtggcctatttgagggagagaatatgatgttggactctgctgggtttattcattgattatttgtgagctgcattttcttgaaactcaatttcacagacatggagggaagacgtcaatgaaatcttagggtcaggtccctgtaagaaataaaactaaaccccaaagtcacaaaacatggctctataatattacggtagcattggggattataaagaatggtatgttaactgtgaaccagtcttatggtgaaaagtaagttttcatgaaaaggagtgtatactaggaagagaatcctgtattcttctctgcattaggccatgtttaaggtatgttttttgtttttctcagaataaaatggccatactgggtatagaggaggacatagaattgacgaaagctttgggaaataggtcctttgaaagcaacttaaagaaattggatttattaagcctggagaagataaggtgagggaaggtttagtgaatgacagtcttcaaatatttttagtgtgtgagtgaaaagtagaacaaaatgagagtcatttaaattgccccagaaggaaattgaaaatttttttgtttttgttttttgttttttttgttttgttttgttttgagacagagtctcactctgtcgccaggctggagtgcagtggtgtgatctccgctcactgcagcctccacctcccgggttcaagtgattctcctgcctcagcctcccgagtagctgggactacaggcgcacgccaccatgcccagctaatttttgtatttttagtagagacggggtttcaccatgttggccaggatggtcttgatctcttgacctcgtgatccacacacctcggcctcccaaagtgctgggattacaggcgtgagccactgcacccggcaatttttttttttaagggaaaattctttcattagaagggttggcagagactttattcagttatagggcctttgctggagctgtgaagaaaaccaagtaattgtcattttgaaatggttcttaggtcctccccaactcagttggtttgatggccctttaagg

SEQ ID NO: 111507 - DNA, 1953 bp, Homo sapiens
caaagtccttttctcttgattactcaggggtggattggttacccaccactctgactaccctttccatctgtcctttccctctggtcattttgtggtcatggctcagtggcacgtttgagatcagcccatggtccagtggggaaggtggtagaaatgacattgcaattcagcagctactgcttgataacattttattaatacctgtcactttgaaattgatgagtcttaagatgggatccttgcctttaaggatcctaggacctataggaagatggtcctgggtaggcgccaatgttacaggatttgtaataagatttaagttaacaattccagtcctattcattaccattggtttggaggacataggcatcacttcttgaatggccaattgaaaggaagataggggcctgaattaaatcttaaaagagtggggtggaatttggtcaagatgtgaagaggaaaagcaaaggttagagttagccggaaggctctgctcccgccgacagaacgtctgtagagagtagcggaagatgagatgggataatttttagggcacctggatttttattcttcaataattgaagtctttcctgcagtgctatatgtgatgagatttttgtaaatgtaatctggctaagtagttgcctattcagagaaataacttttaaaaatggaaaagtatggatatcacttttgcatgtattacctgtgttgtatgttcgatgcacatccagtatggatatgtattttgagttgtttttaagtccaaggctaattctgctcccttctccctaccgaccttccccactcctagccaagattagagattttgtgggctcaacttctgattgtggcagtagatgacctttcatttgcttattaacatattttaaatatttagcaaaataatacaccttgtttatgtcagtttattcattgaagcaaagatagcaacaaacaagcctgcaaaccttgataaggagcctgtgtggtttggaacatcttgagattcttccctggatccccccgagtcctgttttagaaacctattaggggcacactggtggctgccctccccaacccagggagtcttcggagggaggaggaggtggctgtttgtggtgggcagaactctgtcacttaaggaagaggcgtgtctgatagcacttgccagtagtgaatgcctcattcttgaccaagtagaaaaaagataagagggaaaatgaaaaaggtgaaacggttctcctttaccttgtattttaaattgcttagtgaggcaaaatatccaccttcatttgggtttaccccaggtaactcatttcacagggtgttagaacatttcagagggtgttagaaaattccaaacaatggccgggactcccagtaatttaaatataatggcctatgcgggttcttaagcagaggaattagttaacagagttagaacaaaggagagcattatcacaaagagctctggaagttaatgtgtctctttttattggaaaagaagtatttctagaacaggattcaattggcttctggggaaaatatttactggagattttagaagtgtgaaaggtggcaggagacgttggctgtctgttattctacttggctagtgcacacttaaaaataaaacaagactatgttaaaaagatcttgagaattctacttggaaagactgaagtaaagatagtacaggtacttttcaaaggatataaattttggcttataaagtattttaaatgcaattccatcccaactttcacaatgcagacttcctttttagtggctgatgttgaaagaaggtaccttagaaagattttccatttaagaaatggttgatattgatatttatttggctgataaaacaccacaaggactggtttttagaattttttgtcattgttaaatcaagccaggattcttaacctaaaatatgttaggatagct

SEQ ID NO: 111508 - DNA, 1043 bp, Homo sapiens
cttcttcctggaagaccctcattcccgaggggtcctgccccatccccaggggaaggggaattgtacagagcgggcttgctgggtttcaccactctgtccatcactgttaggccagatcctttgtgtccaatcacttttctgcatggctgttcattcatcaaacctaaatataaaaataaaggttttccctggggaaaaaaatatgacagacttcagttttaataataactgttgtaataactgtcggtctgtttgacacggtaccatttagccaccatcagccctactgcatgtcaagtttcaatgctcctgttactgtagctggcctgggtgaggtgccagcagagaggtgacagggtgacttcatccggctttttgcgttttcactttagagtggcctttcacagttccatgaaatgataagctctccagtttcaaatgaaggacgcctcaaattgagaactgacaccattgcattcctcaggatgggaaagttccttctccatcaattcttgggcactggagtaggactcttgctgcagatggtattgttctggttctcgagaaggaatccaagataaaggctgtctggggataaaagtggtaccctcttggaatatgggcaggaaggcatccctagtgaccatagccttggttgaaggtattaaggaggaatcttgaggtgcttgtctgggtgtcagttgacaatttcaatgaaattagcagcattaggtctataggtggctgcttaactaattatgaactcagctgcttaaatatatttgctccaggtttcacaattccttttatttacagtaattatcactggttagcacctattgttttgggtgagaatttcagggtctacatttaagtaaaccctatttaaatttattagttgactagggaagggttaaaaaagcagtaaggagtctatgccttctagagtattccctggcttgtttgaaaatgtgttagcagccatttttcaatatgaaagaactgaactttaaaaaaaagtatatttttatttatggcaacat

SEQ ID NO: 111509 - DNA, 1054 bp, Homo sapiens
taaccatctagcttcaacacttaccaatacggcctctacccactttatcttcccattattgggaagcatgtctcaagcatcatagaatttcatctataaatattttcagtatgtagtcctaaactacaaagaccttcttttctgaacataatgatgatgccaatgtcaaacccttccaaataaatataattacataatgtcattgaatagtattcacattttcctattgaagatacataaaaatataaacaaatgtatgcacatttaaaagaaagcaaacaagatctacacattgtaattggttgatatgtcctttaagtcatttcttctctgtaggtgttagccccgttttggttaaggaaactgcagttgtcctgtgcagcttttcattctgattgcattccttggtcttcacctgtaccattttgaatatttcctgtaaattggtgacttagacgtttgatcatactcagtttgattttttttttaatgagggtactgtgtaagtggtgtgttctcttgttctgctttctctttttggtgtacctttgggtatttgtgaagattcatattttttgctagatttgtatttttggttttaatggttgccttcagactgatacctttctataatacccttgtctgctgtttttgtgggggctattttccattgttgctaccataatatttaaattagccagcgtttgttctttgctctctctttactctcctgagctggggattggaagtaatattcttttacttccagttaatatctaaaaggcaatcagcaagcatattctacttttcggaacttcacctattccccatttttctgatggctatactcatttttcagagcatacagcaattatatactctgctgtctcccttgttaccatcatttagtcttagctctacaggtaaatatctgtttaatgctggcggccagtctttatatcatggctttcctggcattttggttttctgaaacgcaccctctaatagatgccttatgggaagtagttcctgaattatatgtccacaacggcga

SEQ ID NO: 111510 - DNA, 1109 bp, Homo sapiens
attcttcaattctcttaatgtcagaacgtcagaccagggtgcaattctcagttctccttgtgtcagactaagaaagatagatatgagtttcggttagtccagacaggaaaacagacaactggagtaccatgggacagtgctgcagtagaggcttcgagaaacctgcatgggtggagggagcaggggaagagtggtattttcagaggacaaatacgattgtgtcctaccctgattaaaacctgtcagagactgcccagtgctcttggaataaagtctgtctccgtagatccctttcaagcctccagtatctccttttgatctccattttgcacacagcacttgcctcattgttggctgtggagtgcacgctgcacccccaaaggtgtccagctcctatccacccatctgtggcctctgcaggagctgcccttctgtccactgccaggggcctcatgcttctccctggcctcctagtgcacttcacagcccagctcccacccgtcctttgcaatcttctctgacctcccagggtaggtcagatcagccctcattgtacagcgtgcttgttcgaacttatcacattgtaattacctaattgtataattattggtttattgctgatgtggagttaaatataaactctatgggtgaggggtggggaattcttgccctcttgactgtcccaagggcccagcacacagcaagctttattattggatgaatgaatggtggagcagtcctcatctttgttgttaggacacatgggctggttaatatattacattttgattgaggtgtcacctgagctttagacccctccatccctcccgcccccatccccactctcatccccaccctcgtcccaggagcatttgccaccaccatctcattctactatgggaaaggcaggtccctggcactgtggcagcgaaatttcataacttggttctaacttggggtctgccctgtgggacactagagagaagttcttgagtatcagtatttcagggatatggggaaggaagaactcctttgcttttgcagacattcataatacatgggtcagaagccagcagcctggagtaaaggtggccccggaaggttttcag

SEQ ID NO: 111511 - DNA, 1150 bp, Homo sapiens
cagataggcatatgtgtatgtataaatgttaatcagcctctcacttatctgtgtttcatttgatatcattcaaattagatgccataagttagaactagagtttagggttgtcacacttttttatgtcttgaagttttcattcgtccttttttttttttttttttttaatgagaaggagttttgctcttgttgcccaggctagaatgcagtggcatgatctctgctcactgcaacctccgcctccccagttcaagcgattctcctgcctcagcctgccgagtagctgggactacaggcgcccgccaccacgcccggctaattttttatattttaggtagagatgaggtttcacggtgttgggcaggctggtctcgaactcttgacctcaggtgatccacatgccccggcctcccaaagtgctgggattacaggtatgagccaccgtgccggccttatttgtcttcctcaaaactccatttcccctcctgagcctgcagggaattgacattttgcagaagcttgagtttcctgataggaggaaatttggtgattagtgaatattggagcgcctagctcacactcgcccacacccacacctgtccaggacagtgctaacatgaaggcagtttgcacttgtcaggtcctcctgcaggatcttgttgcaagaatctggtgatgcccatctgtttgtggagtgtgcagccaggaggatctgctcggaggtgagactgcaccagggctcccttttgtatgtcctaggtcttgggggggtgaagtctttgactagtgtggctgacctttgccatgctcttttgacctgtttctttttactttgttctgaattgttctttaagtgaaggaagaaaatgttcaaagaagggacgagctcgctaccccgaccccaaacttcacagatggtgagggccttgttctggtgtttattggattccaatccttagtgcttttctggttcatgtttcaatatgtgctttccagaaatcaaaacacagaaatctacatatttacggcagcggggatggggtggggggtgcggggaaacgggggactgtgctgggctgttgggaagaacccactggaaatgagaaagttcctcctttctgctcagggatggatcccagtatattttgct

SEQ ID NO: 111512 - DNA, 1210 bp, Homo sapiens
caagatagctgaggcaggttttaggtttagccgggccttaaagaattgttgagtttttaaaacattaattgcagtaaaatacatgtaacttaggatgtactatttttaagtgtcccaattctgtgtggcaccaagtatcttcacaatgttgtgtaaccatcactactaaccatttccagaacttcttcatatcccaaacagaaactctacttattaaataataactgtccatcccccactgtactccctccccacaccttaataacctgttctactttctgtctctgtgaattagcctatcctatgtacgtcatataactggtatcacacaatatgcctttctgtctggcacatttgacctagcatactgtttgcaaggttcattcatgtgtggcatgtatagaatgttactttttttttgtggggggggggggctgtgtaatgttccattgtatgtatataccacattttatccaagttattggaccacattgggttttataagttattggaccacatttgggttgtttacaccttttggctatggtgaataatactgctgggaacattggtgtacaagtatgggtttgagtttctgctttcaattatataggttgaattttatactgctagtgatgagggagacatagcaagtacctgaagaggttataagccagaggcatttcttttattttgagctatcactgaaatcttgcattgttgactcttcgtaagtgtccgcttcctcctctatgctgtttgagagcgaaggccattttctaggttcagcacttaccaagtagctgggataagtatttactgaataaatagttcccggagttcctagcttaaagccgtcattccttatagtgctagttggtctccagagtgttgggttttgccacctatcctttttttgggttaattaattaacatgtgttcagggaacagaaaacaactcttaatattagccttagccaaacataatttgggaagtacatttgctaatgcaaaaagtcctggtgtaaataaaacacaattcaacaaacatttgttaagaacttgctgtctaccacgcacatttcaaaatttggaatttcagagcaatttcaaagctaagttggaatacctttttgaaaggcgttctcttaatacgaacctctactcttttaaaaaaaactttgtttttcaaaaattgtgagactactat

SEQ ID NO: 111513 - DNA, 1010 bp, Homo sapiens
ttccaggtgtggaaacttggacacagagttagggtgatatgcctatgtcacacagctagacttagctgcattggcctggtgtgtctcaggaagtcaaggatgtttatttgactggattgtaattatctatatccatcagatcaacccatgagaaaatggaattgattgaaatagattgcagtataaattctttaagaaatattgggtcaaatttgctatcaatatcatgcacattcattgggaactgttcttttttaaaaggaataaataatataaataatagcatctctattgctgcctctgtttttattatttagtgctctgtacaactctgaaaataatcctggccactgcgtgcccatattcttgctgccacatttagatgctgcacctagcggactcaacgtctcactctgtagcctttatgacgttgttgctgcctaataatatttaatgcttataattggacttattgtcttttgatctggggtgtactttgcttgacataatggggctacagttgatgccaccacaggcaatatttggctaataaacaggaattgagactggtcatctatacacacacctgcaggaaacaatttccaccctcctgtaaagcaccttcagtctgtccctacccacaagtgctcttctttctatctcgcatgtgagggggtctcctgttttctttacctttaagcctggtttggctacagatctctatttctgtcttgtactgccagaactacccaagggagaggtctgcatttgcagcttgtagccctggagcaaacaacacttcccactcaattgaaattgtactttagaatttccagcagtctctttgtaaccagattaggggtcttttgttcattccctgccatcttactgtggcatctgcccttagagccaccaccctctctttgaaactttgtactgcattgccttctttgccacttagcctctctcccttttcttcctggtggttctttttcttaaatctctcatga

SEQ ID NO: 111514 - DNA, 1045 bp, Homo sapiens
ttctcttctcgttgatccaccttagtgtagtcaatcagggagctagctgttcatagttcccccagcttcaaaaaatgtcatctgcttttgaatttgtttatttcatggtcctgaccccgtgtggcagttccatgactgcctctcatagaggtgaatgtatctgccatagattggcatttagactggactgacttaagtcagcccaaagtttcataattgcatcaagtactcgttctaagggaaacccattgggtagcttgaattatgttggttgaaaagattagcatgcagatgattcattctttgatttactattgacatatgaattgactttcccttcagctgatcaattgcaatgcatcctcaaactgtttgagatctgagaaggaaaattccagttgactgtggaacttgttatggttgtgccgttatgtagaatatttcgttagctggaagataatctaggttttaaatctcagagatcatctaattcaacaccagttggcattcagctattgagtacagtttttattaaggcttttgaaaaagtatacttattgaaattagggaaaatttgattatttaaaacctgggatttccagaggtgagcagggtaggatttgcatgagaaagacgcctgtttgcttaaaagaatataagtagttgttggtcacatcctcctgacaccatcaaggttgtctgaaataaagattaaagcagcttctctatgctagggcttctacttggtttggaaaaagtgttttccagaagtattataatctcacagtgggcatttctgtctttttcactcaatttacttgaaggatgcttgatttaattgctggtaccttcagatatgcaagtagtacagataggttagcaccatgctttgtattttatttaaaagatgacaaagtaagctgtacacatttgaggagaaatggtaaatcaaaatttcatgctataatacaaattatttgaggggccacatttcttttcattctagccttcaaagctgtgcctgttgtgtctgtgtccaaagcaa

SEQ ID NO: 111515 - DNA, 2181 bp, Homo sapiens
ggggaagaattcacagtgacgtgcacaataaaagatgtgtctagttctgtgtactcaacgtggaaaagagaaaacagtcaggtgagtgaatcgcttcattcttctcatgttctgtctctgtgggagatgataagttttctctttcagaagagtctgtcctgaaactgcctcgactagtgcgtctgtcagaggtggattgtctgggagagtgttgggattgcatatttccccctttcatacctccacatggagatatatacatttattattagtaacaaataaatttcattttatacatttattttgagaaacttgagagaacttcagattcatgttattacttcatgctgtttctttgaaaaactgttagggacttaaaaaacatggttaactgcatgaatactttgatttaaagctattgttgataccgtttaggccagactatttaaaatattgaaaagagttgccacttccatacttaaaaagaatagagagtctcaattattcaccagaaaacccttccctcgcccacaaattggcctatccatttgaagatgggtttctttttgtaaggatctgatttcctcctttgaggctggttacctgagattaagttgctaatggttttctatttgttttagtcactattaataaaactgttatccttaatctgaaacatctgggcatgcttacgttcccattcatttaacaaatgcatattcaatgccattatacctcagatactgggttaggcatatcttaaataaattttagctagttactgaaattttatccctactaaaagagcagagtttttacactgtcttaatttccaaatactttgctttaaacttcccattgaccaagttttcagtaatttttgtttgaataatcttggccatctagttaattagctatcacagtggtttttattcattacccatgcaagcattatattggaaaaaagaaatattatattttctttctcctcctcttcctcctcctgccccatgttcaacattggcaattttatgcctgtttaaaaaactctttgctaaacaaataaccatggtgattgccataatgcaaagacagtgtgatgatattcatgtagacctgtgatggatgatatcttgctaaatgaagcctgccattgactggtagaatggattgtaccatagacttattctttcaaaccaatgactcagagaaacattttagtttttgtatcatataatgtaatacaaaaatagcttatgtatggatttttggctaaccttacagaatacaatctcatattaattggctttctataatccttgatttcagatgagagaacaatttagaccgggtgtgcatttgagcctctgtataacttgaacattatccttttttgagatgagaaattaaattgccccaggcagttttgttctgaaccatttttcccaggagccctgcatgccagtcccaattaatccactggtgctggtagataagccttcagtgttaggagctctttggggaaatcccagtgtgcacctccaagggttaaggaaaaccaaatcacgtgcaaacaatatgtaatgtgtgacttgcagatggggctcatggctgtctgccaaggttcatccatgaatcttttattgatatcttttggcttaatttagaatactattagcactatcaaattattaaaaaatccataatattttattctgaccctttggaataagtttaactcacaatgtaatttagggtaaaatgactttttagcattgttgccattgtttaagcgcaagggagtcttggagtttgttcaatactgttaatcttagttggttagctttcttaatgcctctaaaccctcacatttttacttgcttgtaatcagaatctttgacagtatcctaacttatgggctttgggtttggatgttcatgctgcatctcttatgactgcactattcctttcagcgctgacaagttcagagttcctgtttgagttctgttgtggactcttgggctcttgaaagaactagaaggaagataccttaaattgagactttgatatgttatctgtccattgtcactctgcctttgtggagaagtctgtgaaactatgaactgggaaaagccagtttgaaaatgttgcttcaccttgctcttacatcttcttgacaat

SEQ ID NO: 111516 - DNA, 1752 bp, Homo sapiens
cgtcatagatagcaatgctgtgtaatagaaatacatgaaccttatatgtaattttaaattttctagtaggtacattacaaaaaataaaaaaggtaaaattgattttaataatatattttatttgactcagtgtgtctaaaatattatttcataatgtaattaacataaaaattactaattaggtgttttacatttttttaaatataagtcttcaaaatccaggacatattttatatttacaacacaacttactttggactaccagatttcaaatgcttagtagtcccaagtgtctagtccttataaatgctatatagtctgcattttttcatattttttctcttttcccctatgcatatgtattatcagataattgcaattttaaggtacattcaatttgtgctttttaagtaggtaaacacctctcttatagtcataatgctatacttgatatacatttaggtcgtttctgagtttttaccacaaccaacatattgaagcttttattttctgttgagcaatttccttgagttaaatttgctgcagttgatcagagggtatgaacatcctggtaagctcctttccagaaggatttttctgatttataatactgtcagatgctttaactctattaggtttaccaaagcctcgccaaggaatcacccttgatctcattccatgtcactattagctccttttactttaattggttgtttttttccccattgtaataggagtgtgtgtacattacagaaaatttggaagatgcagaaagctatattagactttctttaatcttttcagaaagctgctgtagcttatgttatggtttccccatgactttttaaatacaagaaatctctccatgtcttgtctgcagacaaaaaatgagtgagatggtgatatcacaagggtaaattcacaaccttttcttttcagctcatgcttaaataatttgggccttgttcttagatgtctcttataccttggaactcccttcagtagtttacaagattctgctgggtgagaactgcaggatgagtttccaagctagttgttgacattgtgattctgttttcattcttgcaaataataaattttaataaaatagaacattattgttattagcaatgtgttcgctctcagtcattgggacatagaagagaaaaagacatgacaaaaatatgctgactcatattacaaaatatcagtatcccataatatttcagagatagcaacttttaaaatttagcgttgtatagaatttggaattatacatactagggttaagaaatgaattttcgtttttttcccaatcgttaataatgactgtctttcaacataatcctgtaatatgaagtgttccaatgacagacttgtcatgatgctttattattcttacttaagtagtgtataatgaaagttaatatggagaagttaattgctgctatttttaatttatctaggaaagattctgaatataaattatatggtaatcttcatttttttttctccttttctgaaaccagcagactaaactacaggagaaatataatagctggcatcacggtgacttcaattatgaacgtcaggcaacgttgactatcagttcagcgagagttaatgattctggagtgttcatgtgttatgccaataatacttttggatcagcaaatgtcacaacaaccttggaagtagtaggtaaatacctctatgggaatgtttaaattactggcagtagtgaaagaagaa

SEQ ID NO: 111517 - DNA, 1034 bp, Homo sapiens
ttactgagaataataataattttaaaattactttgtttacaatttttttgtcttttgagtattgtttgaatttaatccatttttctgtctttttagtacaaccatattcctagtgttagactttcattaaatacttctaaggtggcaaaattcttgatcaagaacaataataaagtgatgcggtatttgttttcatctctttccccgcctcaccaaatttcttcaataatttatgtagcagtattaaagctttgtgattatcccacaataatctcgtaaaattttggcgtttctgcccatgttataatggaaagtttctccccagactgaacatggaaaagatactttacttgcaattatagtcagcacacagaaagtgtactactttgttcctaaacatgattgtgaaccatttattaatttgaatagaaggctatgcttttaaaatattaaactccataagcactaatttgctaagttgattagggagcatgttgatatatcagcttcagctccagaaagcaattagtaaggatgttttgagaacattgttgtatgtaatcggatttttaaaatccattcatcaatttccaagaattatcactgtatgactggaaggacttgtggctgtgaaacctgaatctggttttgtattgttttgagaatgggttgaggtggaacaggaacaggaggagacaaacagaaaagtaattttttagtggctgggaggagggtttggatccatgatggagtgatgaagagaacagggctttggtatcactctttttttaagaaattacttttttattgtatatttttaagatatacaacatgatgttatggggtacatatagatagtaagaatattactatagtgaagcaaattaatgtattcatcatctcacaaagttaccctttctttgttttttgttttgtgataagagctgttaacattttacctggttttgaattggaggctctgcctgtaatcccagcactttgggaggctgaggcgggcagatctcttaagccca

SEQ ID NO: 111518 - DNA, 1017 bp, Homo sapiens
tactaaagaacattctttgaacatttttattaaacattagggctcccttgttttcccttaatttatgacaccttatcacatatataattatatattgggtctgtgtatgaactcactatttattccaaattcttttaacctaataaacatcaagactagtagatttagaagacttttaagatggtgatagatctttaagagaattgcttaagaggcagagatgggagaatcagtatttcaaatgtgtgtcctttctcacttgtgacagtgattctacaagagcaaaataaaatgaaaaacagctagttaaaattctcttattgccaattaatactggaaatcaaccaattgtttttgtaattccaagatgaggttctgtttttttgtccagtagttgtagataatggtttctttctgtcttatttcattctaattagataaaggattcattaatatcttccccatgataaacactacagtatttgtaaacgatggagaaaatgtagatttgattgttgaatatgaagcattccccaaacctgaacaccagcagtggatctatatgaacagaaccttcactgataaatgggaagattatcccaagtctgagaatgaaagtaatatcaggtaagaaatggaccttgccctgggggattacacattacccccttttccagtgggcttatcagatcttatttctgtaacccgtaaatccacgagaagatacctggtaaagaagaaagtctggggctgcctcctatgtcctcatcctagtattccattttgttgtgtgtttagagcatgcacactcttgcacacgcatgcacacacacacctgtgtgcctcagttttctcacttgtaaaatggaggacagttttctagagatctgagcttagctcaaagcagtaactttcatgtactcgggatacagcaagtctcttcagagaaaaagggaagttagtacctataattgtttcttaaagctgtaagaaaactaagagccaaataacttcgct

SEQ ID NO: 111519 - DNA, 1085 bp, Homo sapiens
cctgcaagaagtcagaagcttgagtggcaaatactgccaggagcactgagaagtctccggggtggaggaaaaccaggagatgggggtgttgcaagaaggaaggtgagcagtgtggacctcgctgagggcccagagtgtctgtgtgagggcagtgagcatgtgcatgcagggcaggtgagttcaggacactgtggagagcaggctcctgcagcaccatgggcaggggaggaagtggtatgcggacagcccagggtggtggggggagggcggaggcgggaggcggtgggccagtggagaggctgcagcctctgtcaggttgcctttgtgcttaacctttccccactctgtggtctctcacaacaggcgttggtcccagatggaatatgtgtgtgcgtgtttatgtatttgttaatgtggattttgctaatacttactgaattaaatgagttatatttttcctcaaacaggcatagatttccaggtagaaactgaaaaagacatgccttccaaggcatgctatccacaggtgattgactagttgtcttttctttgtagatacgtaagtgaacttcatctaacgagattaaaaggcaccgaaggaggcacttacacattcctagtgtccaattctgacgtcaatgctgccatagcatttaatgtttatgtgaatagtaagtaacatgaagggctccttttaattttttattcttttaaagttgtggctcgtgtttgtaacagctgcaaggactcaacttgtgtactatgtaaataacgtttcatgataatcttgaccttcacagagacttcgtggtttggtggttagagtgtgtcaaaaaaccagttccttgtcctacatttcactgatcacatgaccttgtagaagttgctcaaattctgcgtgctgcctttgaagtaaacagaggagccaaacaagttgaacatacagttgtttgagggaaaatgtattattattgattgttggaatggggggctagtggttgaataggagctgaattactgcgttaggtagggaagagatgctatcgagccctgacgtgatttctttgttcagtgctgtctctttt

SEQ ID NO: 111520 - DNA, 1050 bp, Homo sapiens
accaagtagctgggagtacaggcatgcaccaccacgcacagctaatttttaaatgttttttagagatgggggtcttgctttgttgcctagactggtcttgaattcctggactaaagcgatccttctgccttgtcctcccaaagcactgggattacaggagtgagccacaacactcaacctgtgtgaagtgattttacataattgtcttatttgatgctacagctcaggaaagatggtagggtgggtggtgtaagccaatgaaaagaaatagctggacagattttttattgctaatccagagtcttttgactatgaacatttcaaaaattgtgttttctgaataagacattcatatgagtttagatgaagaaggtcacattcgtgtaattaaacacatatctttattactggccttcccagaatcctaatatgctaatgtgactttgccagagggggccatgggataggatgtatatatcccaaactcgtttgatcacacagttctcccttttcaagggaaacattaattattatctgagttccagcaaacagttttgattacatagcatttctctggtcctcaattcaagtatctctagattaatttcaatgtgaatcagaaagtaatagtatatagaggctggacgcggtggctcacgcctgtaatcccagcactttgggaggccgaagcaggtggataacctgaggttgggagttcgagaccagcctggccaacatggtgaaaccccttctctactaaaaatagaaaaattcagctggttgcgatgatgagtgcgtgtaatcccagctagttgggaggctgaggcaggagaatcacttgaacctcaacctgggagacagaggttgcagtgagctgagatctcactgttgcactccagcctgggcgactgaacgagagtccgtctcaaaaaaaaaaaaaaaaaagataatagtatatagagcttagtgtattacccatggacaaaattacctgcttctgaaaagtcttaatgttcatctcatttaagagatgaccgtaggtaaatcggt

SEQ ID NO: 111521 - DNA, 1113 bp, Homo sapiens
tacttttactctgtgacactaatgcgtaattgcttaatagattcatctgcaagaaatgctattgaaaatccttgatttggcatggttaaatatttggcggttgaaaaatctatttgttttgaaaattccacatgtaaatttcagtatagtgaatgtggggaaggggcatgttttaattgcttatatggtagacttttaaaaaatattgtgctctgacaatttgtgttaagaaaacacgtatataacatgttaagcttgaaaatgttctaatactgtttctaacctctctaatcaagccatgatttacatgggcctattaaactgactcagtgacatttaaggtggtttataatggccaagagccattataacatggttgccatctttgagtagaacttctagtggaaactgataggaattttcattaaaaaacaaagcaaaaccaaaaattagtgattatatctgcattgaatttgcattactctaattaacttttggaattgcttatccaagatgtgtatggacatcaaattcttagatctgaaatgtttgatatccttcagcgaaaatggtgatttgtttttcttggaaatgaaaatcaggaaaaaagtagagttttgaaaccttacctcaaagtgctttcttaatagacattaacctttccaaaactcttggaaatattagaaaaaaatgacattgccaagatgctatgggtagcttatgctacttatttaggaactgatggcctctttggttatattaaatgtcacacaatgaggtttttttttgccagatccaggacaaataaaaggccaaatatgcactttaatcctaatatatccatttggcttttttccccactccatctagtatttcttgaataaataacaaactttatagtggacttaaaggataatcagtaaagtaaatattttgtaggtttattttggcttcaattttaaatacccatgtgaatcctgaaataatttacataattgtagaaataaattatggttgatatgataaaccagttgtttttcaaacctttggaataattttaagaagatcctgtaaccttaaagtggatagttcaaaacatgatctggtagcatt

SEQ ID NO: 111522 - DNA, 1359 bp, Homo sapiens
agcaaaaataaaaatcaagttttatttttactttttatgtttatttactttttataggttaccattactaatattctttattatacattcctccagaccattaatttttttttaaataaaaatgaagtcatattgctttataacctggatttttggtgctgcacaacaaaagcattgtgaatatctttctataacatcattttggcatctcagtgtatggatcttttataatttctctagcccatgcctgatgcaattttgagacatccaggagcgaggcgggactctgaaatgatgtgactgaattttaaaagaaacctgtcagatgattatttaaagtttataattatcgtgtttaatgtctaatgagtgaccttgcttaagtggctggaagttaataaggttatcatctgttgttatctttcatgctctgtgtcttcaacatacgatatggcagatatactgtgctggctttcaggacagttctaaattaaggaataattttcagatcttcttagtgtggtagctaatctatgtaaaaatcgttgcttgtcttttcacattaatctttttatagataatatgtgttcatttgagatatctgacagtgtttgaactctgtttgtattttctgttcctgaacttgaaatgagtttttgttctcaaattgcttgggaattatgaatgttgtttttgatgtgacactctaatatctctttctccttataaagagaatgtctgtggaggcaagaattgttatagatgtttaaattggaaaaaaaaagatataatggcaacctacttttaaagtagaacttgattctcttctgttctgaaaaaatttagcagatgtagctctgaactaagctaaacatctttccctcctcaaaggctggcatcattactcttcctccctatctcataagaaagttggtctggtggatgtgttgctaatttaggggccttgatgtaaacactgaacctgtaagagaaccaggtaaactctctggatccatagcccttggttgcccccgtttgtgtggtttggccatttttttatgttgatggtggaaaagcaggagaaacaggtttaggtatgtagccatgtaaacttctgctggaattgactctaaacttgggtacatagacttcgctaaaagcagtgagtggtcccttttatattgtggaacttccactctgtggagattttcttttcagttgagccacttgtttttacatcaaattagcttccttcatttacagatatatgcaaggtcacctgtaatgtagtgaaatttaaattaatccaagaatagggacataatgtttccatgggcattctgtcaatacccttctcct

SEQ ID NO: 111523 - DNA, 1045 bp, Homo sapiens
tctggatatctttaagaatgtataagacacagtatatgtccaaaatatctatcctgggaattttttaaaaagtataatattccttttataagtaaggttatttttctactccaattttagctgacttaaatttctttattataatggtattatggcacaagtgtaggttttacacagaccaaaaccgggatagtgaaaaattccggaaaagcattgcttcattgcctttaaacaccagcaaacctcgaattttaaaaacagaaattcattcttatgatccctcttcatttagtcttttattatttggagacttaagtgtttgcgttttttgtcctgctgattataaaatatgggcaaatgtgcatttatagcggaagttggttaaagtggctgggtgagagaactctaatcaaaaaatgcctccctgcatttagatgaagaaaggaagaccccttctaccattggcttgtgtattgcctttcagccaccagccctcagctttgttatctgtactatgttcttaaaattcattttgttcttgctttccacatggactggatggtgatgaaaaggaatattttccaagatcacaaatctgtggggtaaatcactggatgtgtaggatttttaattgcatgagcaataaattctcagcagagttacaagcatctgaaatctgcctacaagctgatcggtgttgttggcgatatcagaatgactcaggtccatgatgtttttaaaggcaaaaaggctatttttttttatctccacaggaaatgcataacttatacacctcttaggcttatctaaacctccaacttgggaggaattagagaatgtgtcatttgctatactgcttattgcagaatatctaagaagccacagctcagatttaacctggagaactgcagagttatgtatctttaaaggcaagatgtatatttaatgccaaacacggtgcattgaggcacttataaaatgcagatgagcccagattttcatttttaggaattagatttccacctggctcattctttatgcatta

SEQ ID NO: 111524 - DNA, 2992 bp, Homo sapiens
tggtgttatctttctggatttatcatgcaatttctagcctgcaggtagataaagcaattttgcaggacagagtaattagatttccattctatacacaggaggtaatgtgtgtgggaaatgtgactgtagttatcatgaaaaaattacctcagtagttaattgccaagttaccaaaaagtaatgatcgcacaattacaacatacatatggcatttgcaagcgaccgcttttaaaaagggtttcttcttgataatgtgcccagcccctgaacagagaacatctggcactgtgctgcttgcccctcaccatccacacttaagccttaaattgcccttttgcattacctgaagacgaaaatggggtcaccacagctgtttttatccatcaattgctattttatgctcaggctttaaaagcccaggttaacatcacaattgaatagttagtatggtcgcagaaattttatttttcatggaataagcctctttatcacaacaagttggaaggggttacatcggattgctgttttcagctggggtttaggagagtgttttcttttggggaatactaagtagggttcaaggcccctgggaggaatggccacagcagaagcaagccctgtagttacaggcattcattcagtagatacacagggagtggcaagtgtgtaccagacactattctaatggacagaacacacccaagtctttttgcctttatgagtttatgttctagtgcaggggtgttcagtcttttagcttccctgggctacactggaagaagacgactgtcttaggccacacataaaatatagtaacactaacgatagctgatgagctaaaaaaaaaaaaaattgcaaaaaaatctcataatgttttaagcttcatgaatttgtgttgggtcgcattcaaagccgtcctgggccacatgtgggctgcaggttggataagcttgttctagtgggtagaaacacataatagatggaataaacaatgaatgtatgtaggtgttaagaaaggaaacagggaatagctaggtgtttagaatagggaagtcggggtctggctcatgaaaaggatcccttgcagtggtggtctcagccacctgcagtataactaggccttcctgcttagaactcaaacttcagtcctcactttgactattttctggtctacatccttgattttgttgttgttgttgttgttgagaccgagtctcactctcttgcccaggctggagtgcaatggagtgatcttggctcactgcaacctctgcctccagggttcaagtgattctcctgcctcagcctcccgagtagctgggattacaggcgcctgccaccacgcccagctaatttttgtatttttagtagagacgaggtttcaccatgttggccagtctggtcttgaactcctgacctcaggtgatctgcccacctcggcctcctaaagtgctgagattacaggtgtgagctactgcgcccggccccttgaagattttttatgctttcctcctctatgctatttcttttcaaccattcgtgtacccttttgaagcttgtttattttagggatctactgtgtaccagcatatatgcctgccattttattgaattcctttccaatcctttcagtaaccctctgcaatgggtattactatccctgttttacagtcgtagaaactcagtgttggtgggggttaaaaactcatcaggattcaaacccgcatctgactccgaagcctcctctgccttctcttccccagtgcttttttcactcactaggtcaccaaagtgcttattcttagacacttgtaaaaggacattttctgttgattatgaacctctaactttgttttaaaagtatgccacatcccaagtgttttatgtatttatttattttcctagagtaagccagggcttttgttttcttccctttagatgctctgcttctgtactgccagtggatgtgcagacactaaactcatctgggccaccgtttggaaagctagtggttcagagttctatagattctagtgcattcaagcacaatggcacggttgaatgtaaggcttacaacgatgtgggcaagacttctgcctattttaactttgcatttaaaggtaacaacaaaggtatatttctttttaatccaatttaaggggatgtttaggctctgtctaccatatcagtcatgattttaagttcattccaacattgaccatgtcatttctggtaatacatgcatcacaccatactgtcatcaaactcactaagtttcattttgtactagcttgttaagtatatgcttttaccagagcaattttaaccatgctactttatatattttatatgtatgtgtgtctctattagttgtatatttacaattgtctccattaaaaagagctagagaaagcaaatgggggaatatatttaccttacacccaaacagaattagaacaatctaaaatttaaattcaattaaaaatttcagttatttaaaatgaattattttaacactttgccagacactgtatccaaaagttaacactgcctttatgaagtcatgttagcaagttatttctttaaaatatttaaaatttgattcatgtgtgactaactctcttaacaagttaaaagatcttttgggcaaactgatgaattggtacaaagtgggaagacaaagaaactgggcacttactttttaggccttcttggggttttgtttgtttgtttgttgttttcgttttttgagtcggcaaagactagtgccaaaaagtggcgtgttttctcaggttttgagtagtgaggggaagaatcttccatgtttttcagacagggcaacgaaaagaataccttaaaaatgttttttttttttttggttgtgaaagacattcatgctcagtgtagaaaatttggaaaatacaggaaagcttaaagaagaaaatataaaccgtccataaaggaagcttcttttttttaaagttgtacaagg

SEQ ID NO: 111525 - DNA, 1111 bp, Homo sapiens
acaacttccttatgatcacaaatgggagtttcccagaaacaggctgagttttggtcagtatgaaacaggggctttccatgtcacctttttgggtacacataacagtgactttaaggaactccagtggcttcctttgttttgttccacctgaaacaatgagttttctgtgaaattgcgccccttttgataggtttgccatagagaacatcgtaggaaaatgtctctggacaacattgtttttaattcctttattgattttgaaactgcacaaatggtccttcaattccaccaccagcaccatcaccacttaccttgttgtcttccttcctacagggaaaaccctgggtgctggagctttcgggaaggttgttgaggcaactgcttatggcttaattaagtcagatgcggccatgactgtcgctgtaaagatgctcaagcgtaagttcctgtatggtactgcatgcgcttgacatcagtttgccagttgtgctttttgctaaaatgcatgtttccaattttagcgagtgcccatttgacagaacgggaagccctcatgtctgaactcaaagtcctgagttaccttggtaatcacatgaatattgtgaatctacttggagcctgcaccattggaggtaaagccgtgtccaagctgccttttattgtctgtcaggttatcaaaacatgacattttaatatgattttggcaatgctagattataaactgcttggaagatttttttacccagactgttgttctctcttgctagattttgttttcctcattgttcttaagaatgcagattttaattttatcattatggggtagaacagcccaggacataccctagttattgtcgtatttgtaacatcaacgacatcagcctcttgaatatctcatcccgaccagaaggcttctgttatcttgtaagctttatacatttcttgatcatatgtagccactgaaagggttaatattaatttgcatactacaatttaaaacaggcgcctaagcctactggttctcaaatatacaccaaatgaggcaaacatttcacttctctaaaaataagtttccaatttgaagccttagttgaagttcccatcaaggatg

SEQ ID NO: 111526 - DNA, 1777 bp, Homo sapiens
actcactttccagtcttgtcccagctggctgctccttgtggctgattttcccactatgccacagtttgtgccttcattatttccataataacgttacagagagtgtgtgaagccctgctgtaaacagaagtgaaccagaggattcacgtaggaagcttgataatagtagaatctttgaaagcagtaacttctctctgtaaaaccagcagtcatgcttggctccaaatactaatgtcacttagaaattcaggttaaaagaggcttgcttgttttatgttactccacataaggctgcttttttgataagcagtgttaatatatgggattgtattgggactaagtagtctgatccactgaagctgaatattaatggccatgaccacccttgggtatttttatgggaggcagaattaatctatatatctcaccttctttctaaccttttcttatgtgcttttagggcccaccctggtcattacagaatattgttgctatggtgatcttttgaattttttgagaagaaaacgtgattcatttatttgttcaaagcaggaagatcatgcagaagctgcactttataagaatcttctgcattcaaaggagtcttcctggtaagactgatttacataaatagttagctgttgacaggcagttcatggggtcataagggtttgcaatcaaggctgattctttaaaaaatgaactgaggtactctgaggtatgaaatcaaaattattaaatcatttaaatgtgattaacagtttagaaagttaaattgtgtttttaaagattcaaacctagatttttgctgattttttaaaaatgtattttcagttttcttctacactttagttccatgcaactgaatgcattctatatctgtttctcttacggttctgtcctgcatgtatttccatttatactattgagcttggtactacatgcatgtttccagtgagatactgtttatagggaaaatgctaaagcctctcaagttgccacagtaaagtccctttaaaacctttagcagaatgacaaagagctctgaacatatctccacatgtaggcttcttgccatcgacctctggattattcctgtataccttgcctcttgccctttttatttcatcatgctattaaaagacataactactccagcacattttttaaaaattctggacattattctcatctctttcatcattgatgccattctgaatttgaatcatgtataaagagctttgagtttgacttacaaccagaaaagaattcttctcatatcttgcctattctttctttggaaatgctcttaagggccaccatttgagaagacttcctagatgtacccagtccaacagaagtcatggttattttgcccagtcccctatactgtatattgctgcagttgtgtggtagatttctcctatccttttcatgcactttatatccactgcatcttgcaatggcaagacattgcctcctgaactcttaacaccaggtcctcaaggagacctcagtaaatattattgatgggcaattaccccttaaagccattttctgtacctctggctaaagtttaaaaccccaggtgaaactttttatttttttttaatcctataaacttgagtagtttaaagtggtagtagaaactgtacaaaaccactttttgttagtttctcctgggcatgtgctcattatatgaagaaatgagccattttgcttctttccgaaaccttggccctatatatatcctttaactttctgatataatggccta

SEQ ID NO: 111527 - DNA, 1072 bp, Homo sapiens
ttattggtgtttatctgaaccaacttgatttttttttaaaccttcctccatcagtcactatatgttaacgatctctgcctcctgcataacacgtcttggaagctcttctttgtctttctttcatcttgtctcctggggctcatttagagagtttgaggtaatacgggataccatatttggctctctgtctcccattaaattcattgtgtcaagagacgggaaatttctaacctgagtcctctatatgattatacacaaaaaggacacctagtttctgggcatggaccccaatatcgattattaaaaactcatttcttacagaacaggattttcaaactctttattcaaactttacatgactttcctcaaattggtccagtctattatgtagcaaaggggatgaggaggtagagcatgacccatgagtgcccttctacatgtcccacttgattcagtcatgacttgtttcatctctcccagcagcgatagtactaatgagtacatggacatgaaacctggagtttcttatgttgtcccaaccaaggccgacaaaaggagatctgtgagaataggtgagtacctacctatcaagcaaccaagagtaactttacagagagtatgtatatcatgctaatgtggaatataacatcattcccagtagcaatgatgcagaccagttctgctttatggtagcagtgccaatggtcaatggcagttagggttgcaagtgggtgtttggggtcagagcatatgtttttgtgcctgagtatctttctatagatatgggatctttgctttaattcgccatccctctcctctatggattttgtaacccagcctaggattgttaaatattaactttgtgattcagcatctacctttcctggacaccagggaagtgatctgcctgcaagttcacattagttcattcattaccagcctttggtatgtcattgccactgtcttttcctttcctgacctttatggttgtaattgctaagaaaaatcctctcttcctcacaggctcatacatagaaagagatgtgactcccgccatcatggaggatgacga

SEQ ID NO: 111528 - DNA, 1870 bp, Homo sapiens
taagaaaggatataagatggctgaaataaagaccttcttccgtgtgtccttgggagatgtcagattgaatttgcaaaggcatattaggaactctgtgaaaggacattcaaagagatgcatgcaaaatgaattttcagtttaaacaatatgatatgactatttcttatgtatttccctatgaatgaaagcagtcctgagaagaaaacagcatttattagaattgcttttaaaagagattataataattagactcttgattatgtgaacatcattcaaggcgtacttttgatttttatttttggtgtactgaatactttaaaacaaaagtattggattttttataatataagcaacactatagtattaaaaagttagttttcactctttacaagttaaaatgaatttaaatggttttcttttctcctccaacctaatagtgtattcacagagacttggcagccagaaatatcctccttactcatggtcggatcacaaagatttgtgattttggtctagccagagacatcaagaatgattctaattatgtggttaaaggaaacgtgagtacccattctctgcttgacagtcctgcaaaggatttttagtttcaactttcgataaaaattgtttcctgtgattttcataatgtaaatcctgtctagggatatcacacattttagcagtcaaattaagtatacttcagcaaaatttgcatggtatgctgaacattactacaactaacattcaataatagaagtcctaattctaattgtgtaattttggggcatgtgaaggaaacagaaatagccttaattttcattatagcctgagaatagcaatgaacttgattttgctcaagtgtaacaaatgtaggtcattgaaggtcacagcaggagaaattttggggggattggcatgccgtgtgaaaaatattaaaatctaagatcatattcagagttagccatatagaatgttggatcctagaatacacggagagctattaaataggttcataagtaataatgggtttgtagaacatagcaaatgtttttcaaagtgctgtatttccttgccaatttttattgaatcctcagaacaaacccttgtcctataattgcagcaccttcctattttaaaagttggagaaactaaggcatggcatattttagtgctttttatctgaggtgacacaggacaatagaggctgaaactagagcctgtgatttccagagtggcatcccatcgccatggaaaaccatattgccctttataatattctctgcctgtcttcctgggcccatttctgcagtccagatttattcctggaggtggatttttgtgccccttatgataatgtaatgttttccccccatcactgtggcgtctctattggtagcctgtactcgatttggttttgtaagagtgtttctgtgtttatctcctggccaaagcatgaatttctgaaaaggctgccctgaagctagatattatcatcaggagtgataataaaaacaacttctcttcatcctggtgcaattttggaaggaagaatgataagtcgttaattatccagtcctctgaatattgaccaaagggaggaggaagaaggtggccgcctccaggcccagtcttgatgaattctgcaatctgtctccattatttcatgcctgtgtaattttgtcaagagttgtccaatacctctgaatctttgtttttctccccttgggaataatagtgattcctgactcagaaagttatgagttaatatatgtaaagtgcttatgacagtgccagacatattgttactattctttatagatgtcttatttacgatctaaataatcgtgacggtggttacatactgtcttgt

SEQ ID NO: 111529 - DNA, 2438 bp, Homo sapiens
ataggaactttagcacaacatctaggaagggaagggatattggaagttttttgttttgtttttgtaagctgactaaaataactttaacaccaaaaaaaaaaaagaaaaaaaaaaaaagctttcccagttttcaatcctaaatggattaagagaaggattgatttagctttttatggcagattaagattgggaatccagaatgcatctaaaaggactagttacagaaagtttagctcaactttaatggagagagttctccaaagagtcaggatcacaagccactactgtttatcaagtacttgcctttcttctaggcaatttttcagatagcactgagtcaggcggtgctaagcatttttacccattttatcttatttaacccacaagacaattcataaaattaaaagtattcattttgttttacagaagaagatactgaggcttaattacaaatattttagtgactttcccagtgtattagagaaagttttgggttttgacagaaaacccaaaataaaagaagtctaggagtagactttataccaggattggtataaaggttccatggagtacccgggcaagtctttcctttccatgcttagccattcctgagtgtaacccccatgtccatggtccaagatgaccaccaggtggatagccagccatcatatccagaaggcagggggcccttgcactagagaagagagggcagagggcacgtgccagctatattgtaaggaggttttcctgaagctgctatacagcacttacaacttagtggccaaaaccgagtcacctaactacagctagctagctgcaaaggaggctgggaaatgtagtcctaattgtgagaggccgtgtttctgtttttaaggaaggagagggacatattcagtggaaactaacaaatctctgcattacctaaggcccatggtggagccagggctaaaatgtctggctgtctctgacgtttgtgctcttaatctccatgccgtactgacatagtgctcacatcttaaaatggggataatgcacttgtgagccatgtatttcagaggtgattgggatcatctgagttcatataggtaaaaggtttttgtgagatggtactcaagttatcactccacatttcagcaacagcagcatctataagaatatcttctgttcaattttgttgagcttctgaattaacattattgactctgttgtgcttctattacaggctcgactacctgtgaagtggatggcacctgaaagcattttcaactgtgtatacacgtttgaaagtgacgtctggtcctatgggatttttctttgggagctgttctctttaggtaaaatgatccttgccaaagacaacttcattagactcagagcatcttcttgaagtttcattggtgtcctgcttccttgtgattaacactgctttgcaaactgtgtctcaggaagcagcccctatcctggaatgccggtcgattctaagttctacaagatgatcaaggaaggcttccggatgctcagccctgaacacgcacctgctgaaatgtaagagccaaaaaatttttcctttaggtcacgttttcccttttatttttctttttagagacagaaacccagatgttgagggttttcataacacagtttgaaatgtcacttggattctttatgacacactggtcaaatgtcatttctgtagtttattttcataatctcttgtcaccaaaaatacagaaagtttcagtaatatttcatacatgcagtgttttatgttatctatatgtcagtccatatgtccagttgcatagccctggaattattactgaagttgctggatgcccatacatttgaaaacaagctgagggcattgaggagggatagtaaatggcccttgtcttgcaggtatgacataatgaagacttgctgggatgcagatcccctaaaaagaccaacattcaagcaaattgttcagctaattgagaagcagatttcagagagcaccaatcatgtgagtataccctggccaggcatagaatcccccttctcccagttccaggtgtgtcctcctcctcaggctttcagggtgaggactaacctcccaaccccttctctcctaatcttaggttgcaaattgggcttcaggtaggggaagtaaagcaatggaaactagttctttctgcccagccctcctgttctgagccaaagaaggatgtgagattgagggggaagggtggagagttttgtactcactggaagtagaagtttccataaggatttgccatgtttcctccctcatctcaaatgctggtcacggggtcagtattttctccctctcacatgtcagggccatgcatcctttggagggttggggtgatgtgaactagaataaaagcatagaaaagacagcttgttactgcagtgaaataagccttctgatcaaa

SEQ ID NO: 111530 - DNA, 3900 bp, Homo sapiens
tctttcctaatagcacaccactgataatttttgggttaaagcttgttcttctgggtgtcaaaacatgtttcaaattgaacagcattttccacccagttgctttgattcttgacaagagacccctggaagggccgtgggtttcccagcaaattacattggttattgggttgtagttgctggagagatttacaagccttttaaataggtaagatagtgcttggtgcctggtgtgcccttttagaagagctaagcttgtgcatgttttgtccccacttcttgtataaagttatttccttggaaaaatgaagggggaaaacaaagcttatatttgttttgtcagtatgacttgggttttggccacaaagttcttggaaaccacttctctcttaagagtttccatcagttagttgtgatcttgacactgtaagtatgccttttgttgctatgttcgttgtagggactgctgtattgactatgggcttgttttctccagatttactccaacttagcaaactgcagccccaaccgacagaagcccgtggtagaccattctgtgcggatcaattctgtcggcagcaccgcttcctcctcccagcctctgcttgtgcacgacgatgtctgagcagaatcagtgtttgggtcacccctccaggaatgatctcttcttttggcttccatgatggttattttcttttctttcaacttgcatccaactccaggatagtgggcaccccactgcaatcctgtctttctgagcacactttagtggccgatgatttttgtcatcagccaccatcctattgcaaaggttccaactgtatatattcccaatagcaacgtagcttctaccatgaacagaaaacattctgatttggaaaaagagagggaggtatggactgggggccagagtcctttccaaggcttctccaattctgcccaaaaatatggttgatagtttacctgaataaatggtagtaatcacagttggccttcagaaccatccatagtagtatgatgatacaagattagaagctgaaaacctaagtcctttatgtggaaaacagaacatcattagaacaaaggacagagtatgaacacctgggcttaagaaatctagtatttcatgctgggaatgagacataggccatgaaaaaaatgatccccaagtgtgaacaaaagatgctcttctgtggaccactgcatgagcttttatactaccgacctggtttttaaatagagtttgctattagagcattgaattggagagaaggcctccctagccagcacttgtatatacgcatctataaattgtccgtgttcatacatttgaggggaaaacaccataaggtttcgtttctgtatacaaccctggcattatgtccactgtgtatagaagtagattaagagccatataagtttgaaggaaacagttaataccattttttaaggaaacaatataaccacaaagcacagtttgaacaaaatctcctcttttagctgatgaacttattctgtagattctgtggaacaagcctatcagcttcagaatggcattgtactcaatggatttgatgctgtttgacaaagttactgattcactgcatggctcccacaggagtgggaaaacactgccatcttagtttggattcttatgtagcaggaaataaagtataggtttagcctccttcgcaggcatgtcctggacaccgggccagtatctatatatgtgtatgtacgtttgtatgtgtgtagacaaatatttggaggggtatttttgccctgagtccaagagggtcctttagtacctgaaaagtaacttggctttcattattagtactgctcttgtttcttttcacatagctgtctagagtagcttaccagaagcttccatagtggtgcagaggaagtggaaggcatcagtccctatgtatttgcagttcacctgcacttaaggcactctgttatttagactcatcttactgtacctgttccttagaccttccataatgctactgtctcactgaaacatttaaattttaccctttagactgtagcctggatattattcttgtagtttacctctttaaaaacaaaacaaaacaaaacaaaaaactccccttcctcactgcccaatataaaaggcaaatgtgtacatggcagagtttgtgtgttgtcttgaaagattcaggtatgttgcctttatggtttcccccttctacatttcttagactacatttagagaactgtggccgttatctggaagtaaccatttgcactggagttctatgctctcgcacctttccaaagttaacagattttggggttgtgttgtcacccaagagattgttgtttgccatactttgtctgaaaaattcctttgtgtttctattgacttcaatgatagtaagaaaagtggttgttagttatagatgtctaggtacttcaggggcacttcattgagagttttgtcttggatattcttgaaagtttatatttttataattttttcttacatcagatgtttctttgcagtggcttaatgtttgaaattattttgtggctttttttgtaaatattgaaatgtagcaataatgtcttttgaatattcccaagcccatgagtccttgaaaatattttttatatatacagtaactttatgtgtaaatacataagcggcgtaagtttaaaggatgttggtgttccacgtgttttattcctgtatgttgtccaattgttgacagttctgaagaattctaataaaatgtacatatataaatcaagtggagtcatttgattgttgagattcgttgagattaaactttaaagcattaaagtgcaatcatcctgacaaagttttgtacgcagttttcataaaatatgtgcagggctatcagatcacgctaggatttacatgcttcgagattcaacagatattaagaattttcatacgtgtgatattttctcattttagtcttacaacctgaggtctctatttaaattgaaaaatagatacagagaaggtgcttagtatgtatgagctgggtgctgtcatgtgggtgaaacattatgcatgcccaattggtaccgtccagaccactggaacccaaacagaggctgagagttcttcagcttgaaacaaaaggaagcaccctgaatcacataatcttattaagaatgaggcacccacacaccctcagtcatgactgtctttattgacgtgacatctacacctgcagaaatgtctcctgaaaggaaagggaaggggtgaaaagtgacctgtaatgaaaaggaatccttttaaaatccagagggaattgtgtggcaaggaatgcgtcaataatcagtgaaaaacagacccacatttcagtcaggcaattcccattattttattgcagacaggaatgaatgctaattgaccacaaaacaaagaagtcttttctttccaaatgttttcactgtcatttagcctttgtcatgtgtgagaaatttgcgttagaagcagttgacagtcccctgtgttaagagtctagctaattttcctcaccagcctagcttttcattggaaaggaataccaggtcttggtgcccaggctcaaacttggttcgaatctcagtgccacccctgtgtctaccacttaaccactgtgtgacattaggcagattagctcttgaaatctcagctcatgggagtagtgtctaccttgatgtattaatgtgaggctgtcaagaccagctcgttcatatgcctaataagtttttccacggccaattcaccttattaagcagggagggcggtgttcctgtactgacataacccatgtaaaattatacagtcaaaagcttgattctaattttctttctcttaggtgcaaacagtattgtacaagtgtgttgcacaac

SEQ ID NO: 111531 - DNA, 1611 bp, Homo sapiens
ctggtcttgaactcctgacctcagatgatccacccacctcggcctcccaaagcgccaggaccacaggcatgagccaccgtgtctggcctggcctaacatttttatgagacaaaatatcaatttcaaaacagcatcaaaaagtgagcagggcaagcacagtggctcacacctgcaatcccagcaccgtgggaggctgaggcatatttttctgtactaaaaatacgtaaaatacaaaaaatacaaaaaaaaaaattagctggccactcgggaggctgaggcaggacaatcgccagaacctgtgaggcagaggctgcagtgagccgagactgtgccactgcactccagcctgggcaacaacagcgaaacttcatctcaaaaaaaaaaaggggtgagcatatttaaccatcctcagctcataatagagcaaataggtcaacagaataataattcatgctcttgcatgtgtaatgaactggcagcaagagaaagctggttgaagaaaggcagaggaactgtgtcttatgagaattagaatcaaggggctccataatcatctggcattcattcaatgttgtatctatggttagaaatgtacatgacaggaactccaggaatcttagggattcttcttttaaggtcctggtcaactgtggccacaatataaaacttatgctgaattactctctgtactaagagtcatctgcttaggttcctttgtgtgtacatggtaatccttcaaatcttggatccttggtgatccttagagccactccatacttctgctccaatttctcaatttcaggcattacacaatcagttatacaaggaatacacttggtatacagacagtccatcattgactgcactaagtctggtttggcttttatggaaaagttgataaaggttggtatcaatgaggatgtggtaaggtgggcccagctgtgtattatattggaaaaataagcaggtagggtgttggggaatttctctttcctttaacacgctgggatccttcttttctttctttttaggttttaatttatccttttctgtaagcctctgatccctgagactaagcattcacttcatggtcgcatacttccttgttttcttttgcttccccatggtcacaccacactcctgtgcttgtataatattttcagaagggctgtagccttcacgaaactgccgaaggggtccatgatggagaaatggtgagaacccctgctctagactgtaaacatttcatgagtttatatttgtcttgtttgctaccatatccctagcttaacacctgactggtaataaggacctcggtcagtgtgttttgaatgaatgagaaaaagtggtttgaggtttaatttgtttgttgattaactggatgcctactctgagagtaactttggaagagatgcttaccttctctcattcatttatttaaccagtgtttatagatacctactgtgtgccaggaatcattctaggctccttagagcttatcttctaggaaggcagacagtaacatgtcaataaatattgtaaaaccagccagataatttcagatgactgtaagtgctttagaggaaatccagcagggttatttgatcatga

SEQ ID NO: 111532 - DNA, 1567 bp, Homo sapiens
gtcactcacgcccacttcagtcttgctcatgatcaaataaccctgctggatttcctctaaagcacttacagtcatctgaaattatctggctggttttacaatatttattgacatgttactgtctgccttcctagaagataagctctaaggagcctagaatgattcctggcacacagtaggtatctataaacactggttaaataaatgaatgagagaaggtaagcatctcttccaaagttactctcagagtaggcatccagttaatcaacaaacaaattaaacctcaaaccactttttctcattcattcaaaacacactgaccgaggtccttattaccagtcaggtgttaagctagggatatggtagcaaacaagacaaatataaactcatgaaatgtttacagtctagagcaggggttctcaccatttctccatcatggaccccttcggcagtttcgtgaaggctacagcccttctgaaaatattatacaagcacaggagtgtggtgtgaccatggggaagcaaaagaaaacaaggaagtatgcgaccatgaagtgaatgcttagtctcagggatcagaggcttacagaaaaggataaattaaaacctaaaaagaaagaaaagaaggatcccagcgtgttaaaggaaagagaaattccccaacaccctacctgcttatttttccaatataatacacagctgggcccaccttaccacatcctcattgataccaacctttatcaacttttccataaaagccaaaccagacttagtgcagtcaatgatggactgtctgtataccaagtgtattccttgtataactgattgtgtaatgcctgaaattgagaaattggagcagaagtatggagtggctctaaggatcaccaaggatccaagatttgaaggattaccatgtacacacaaaggaacctaagcagatgactcttagtacagagagtaattcagcataagttttatattgtggccacagttgaccaggaccttaaaagaagaatccctaagattcctggagttcctgtcatgtacatttctaaccatagatacaacattgaatgaatgccagatgattatggagccccttgattctaattctcataagacacagttcctctgcctttcttcaaccagctttctcttgctgccagttcattacacatgcaagagcatgaattattattctgttgacctatttgctctattatgagctgaggatggttaaatatgctcacccctttttttttttgagatgaagtttcgctgttgttgcccaggctggagtgcagtggcacagtctcggctcactgcagcctctgcctcacaggttctggcgattgtcctgcctcagcctcccgagtggccagctaatttttttttttgtattttttgtattttacgtatttttagtacagaaaaatatgcctcagcctcccacggtgctgggattgcaggtgtgagccactgtgcttgccctgctcactttttgatgctgttttgaaattgatattttgtctcataaaaatgttaggccaggccagacacggtggctc

SEQ ID NO: 111533 - DNA, 1026 bp, Homo sapiens
gccgggtgcggtggctcacgcctgtaatcccagcactttgggaggccgaggcgggtggatcatgaggttaggagatcgagaccatcctggctaacacggtgaaaccccgtctctactaaaaatacaaaaaattagctgggcgtggtggcgggcgcctatagttccagctactcggggggctgaggcaggagaatggcgtgaacccaggaggaagagtttgcaatgaaccaagatcgtgccactgcactccagcctgggcaacagagcgagactccgtctgaaaaaaaaaaaaaagaatagaaaatgtatagagggaaatcaggcaagcaaaacaaaatgtgggaatgaaaagcaacacaatgtgcctgtgaatgaaagacaccatgacacaagtagagcgcagcacggtgtagcttagcaacttacacaaaacccacttgagtgatatgcttgactttaggcttgatataaattggtacgtgtaacataaggctggaaaagcaagttcaggcacgcctaggttgcatgaaagcacaatagtatgattttaacttcacagtcagcagggctgtcacttactgtgtgacattgaataagtaacttaacctctctgagtcttgggtttctcatctgccacacaaagataaccacataagcttcataagattgttatgaagatgaactaaataatcttaacttttgccatgctctacctggcaccccttacccgcacaactagactgttctctacctcgttaccagagggatattttttcacttaaataataatgaaatatatgaccaatgctttcttttgcctccattttttttttttttttttttttttttgatgcaaagtcttgctcagtcttcgaggctggagtgcagtggtgcaatcttggctcactacaacctctgcctcctgggtttaagctattctcctatctcagcctcccaagtagctaggattacaggcgtgtgccagcatgcctggctaatttttgtatttttagtagaaacagggtt

SEQ ID NO: 111534 - DNA, 1053 bp, Homo sapiens
ggctcagaccataacctggggtcagttgtgggaagtgtgtcttaaggaagaccctgtggtataaccaaagatcagtagccacaggtggcgattggccttgatgcatgaacttctgtgaaaagtaggctcttgaagcctggagaagatcccaattgggaatcacaggatggctctcttcaaatagtttaagagatgttgtgtggaattaaaattcttgttctgtgtggccagagatggcaaatccagtgatagaattttatttatttatttatttgttaagacacagggtcttgctctattgcccaggctggagttgcagaggcagaatcatagctcactataacctcaaactcctggcctcaagggatcctctcaccttggcctcccaaagccctgggattacaggcatgcatcaccatgcctggccagtgatagaatttgctaacagtaattggcagagtggagtgggttgccatggaatgatcaggttggatcagagtttatcagactgagtttgtaggcatgatctcaggggctgtgcattctcttacaagcacattctggatcatctggaggagcccctgcgattatgtttaatcctcttttggctctaggttgtcttttattgtcacagactaatgagaaaaagaaaagaaggagtgggatttaatatatgcacgatgcattgaagaccagggaaagccagatgaccgccaggcactcaatagagtcagaaaggtttcagactgaatagaaaaaaatagaaaagtatacataaacagacctcaaaagaacctatgaggggctggacatggtggctcacacctgtaatctcagcactttgggaagccaaggtgggagggatctcttgagcccaggagtttgagaccagcctgggcagcatagggagatcacatctctataaaaagtttaagaattagccaggcatggtggactactacaagcctgtggtcccagctacttggaaagctgcggtgcgaggatcacttgagcctgggaggtcaatgttgcagtgagtggtgatcacaacac

SEQ ID NO: 111535 - DNA, 1108 bp, Homo sapiens
ttcctttttcctttcctttctcccttcctttcctttttcctttttctttgttgagacagggtctcgctctgtcgcccaggctggagtgcagtggccccgtcttggctcactgcaacctctaattgatcctcccacctcagcctcctgagtggctgggactgcatgcgtgtgctgacacgcccggctaatttttgtttattttttttttttttgagagaggaggtctcactatgttgccgagtctagtctcaaactcctgggctcaagcgcttctccggccttggcctcccaagtgctggtgagctctcacaccggtgcattgttttcgtgtttcatgttttcgttacatgttactttcttaggcttttccaattttctgttgtttttctgtgtaagaccgtaggatagaactttctgagagactgatcttggtttcactaagcaagaacatttgtaagaatcagtgctgtcccagatgtagtaatcgctattgagaaataatgaagttccccttactggaagtactcaggaagaagttgaataactaactgcctatgaggagattctgatatgggagggaatctgggagataaagttactgggaagtgaagattctgggagccgatttaatcctcacaacagcacgttaaacaggtagaggaggtttgtaaggaatagtggtttaatatcacagagctagaagctagtttcagcagaaccagaattagaatctggacttctgtgccttactaagttttattagcattcattgtgtcttactcttttgacttatttaattcactaatggattttaatggtttattggattgtatgctggtgcagttctttgatcttgagcctagctttctctttctccttttttgggaactttattgtgtatgttgtggcatgtttacacacacatcttgctgccttgggttcttgcaagttgtgtgcgtgttttatctgcccctactagcttttaggtgtcttgagagcatgactctggcttactcatctgtctattccagaagaccttgtctgttcttggcatttattaactaattttctaagactgggttgaagtagttgcatgtcaagtttatat

SEQ ID NO: 111536 - DNA, 1144 bp, Homo sapiens
gagtatgtgcttttctctataattaggctaaaaaaaggttggtaagtaatatgaacttaaaatcaagattaacccccaatttacaaacccatgataaaaagtgttgttgattacttggatcctatcttttctgcagtttatgtttctagtgacttactcaatagttttttcttactctttccctggacagaatatgtaatataagaaacataagtcctttgagttgagggagatcagatagatttaataaaagtcatttagactttattgcatattctggaagtccaaagaagaatgactctggttgcatagcacttctaataaagccacaaaatcattacctgactcagtgcctgttcttgttatcatatttttactttatgttttggtatttcatttatttattacgtttcagctgtgagagtaccttctacaaaacattttaaacttttttctattttcattaagttgcagtcccactccacccagtccagcctcctaattctagcctttatacagctaagattgaggcaatcagttataaggacgcctgctcataattaccttctcagaaggtaattatattaatactgaatttatttagtggtatgctgtcatcaaaaaaattcattaaaaataaaatcaatgaaggccgggcgcagtggctcacgcttgtaatccctccactttgggaggccgaggtgggtggatcacctgaggtcaagagttctagaccagcctggccaacatgatgaaaccccatctctactgaaaatacaaaaaattagctgggcgtggtggcacacacctgtaatcccagctactcaggaggctgaggcaggagaatcgcttgagcccgggaggtggaggttgcagtgaaccaagatcgtgccactgccctccagcctgggcaacaagagcaaaactctgtctccaaaaaaaaaaaagaaactaaacacatttaataaatttcaagtgcataaatacattacaaaacaacattcataaaaataaacattcattaaaacaaaaaataattttattacaaaatattacatataaattctaatataaattaacaagtaacaataaagtatttaaaaatagtgaaaccattcacaaaaatacgtaatgaaaattaaaa

SEQ ID NO: 111537 - DNA, 1036 bp, Homo sapiens
tcagtttttttcttggtagcaagctgtagattttgtttcaaggaaagcatcttcatcttctctagtttcatcatgtatagatggagattccgatgcaggtatctgtatcaatttcaatacagtcacatttgtgtttatttgaactctagaactagaaaaggaattacttttttctttgattttctttttcttccttctcttgaggatcatgaaagtataaaagaatactttctaaatgagggtgcctttttctttttcttttttttttttttacaatttttacatttggaattaaaattttaactagaaaagagtttttattaagcaagtttttttaaaaaaatcttaagttgttaatcctgctctcaagatgtaagtaaggtgtgtttcagacattattaaaatactgaaatagtggtatttgtaccaaaacactagtatctcattacttaccatgatatataacactgtataactgaatagtggaataccaaaattgaaattgcacactgcatctaatcctgtatgcatccaagtatattcttctgtgcctgtactgtctgcctttttcatgttttggacaaaactgtcatcctttgtgtacctcctctctgtgtccacgttcctattctcctccctcagtgcctttattctctcccttcccattgcttcctttgtatctgcttacacatgttcatatgtttctcttattttggaaaagaaagaaaaaggtcattcatttaatcttaacttgactattagtttcgttttctttccttccttccttccttccttctttctttcctttttttttttttttttgacagtgtcttgctctgttgcccagcctggagtgcagtgggcacaatcttggcacactgcaacctcagccttccgagtggctaggactacaggtgtgcgccaccacgcctggctattttttttttttgtacttttagtagagatggggtttcatcatgtttgccaggcagctcttgaattcctgacctcagatctgtccacctcggcctcccaa

SEQ ID NO: 111538 - DNA, 1680 bp, Homo sapiens
gcccaggctggagtgcagtgatgtcatctctgctcactgcaacttgtacctcctgggctcaagcgatcctctcacctcacagcctcccaaatagctggaaactacaggtgtgtgccaccacacccagctacttttgtattttttgtagagacagggtctcactttgttgcccaggctggtcttgaactcctgggctcaagggctccacccatctcccaaagtgctgggattacaggcatgagccactgagcccagccgacatttagttattttgtctctttattacaaatgatagcattacatttatacatatttgtaatccgaaaaggtcaattccttgagtgtttctgtcttgaacttttttctgtaataggcctcccatactcattgcccacagtttgcattcagttttattgtagtgggtcaggatcattaagagctggagttgctgggataggcctttctcaagaggttctacttgagttggaccttgaggaatctggatgaagagggggataacgaaaaggaggtgggaagggaaaaaggactgtgtggctgaaggcttgtggttagcaaaagcctgtcatgctttcgagctgcactgcccagcactgtaaccatgagccatgagtatgtgtggctgtgagcacttgatatgtggctaatccagagttgaggtgtgcggtgagtaaatacctaccagggtctgaagatttaatatgaaaaaaagaatgttaaaatatctcagtagttttaaaaatattgcttataatttaaatagtagcattttggatatattgggttaagtaaaatgttattaaaatttttacctggttttacttttaaatatatggctaccagaaaatgtaaaattgtattatgtggcctacctttgtggctgcatgattttttgttagactctgctctggctcatccttcaggatggagaagcaggttcatttggggaacctggtatgtgcttcagtgagaactgttggatagttaccagaatcaagtatttggtatgaaaagaccattacgtttcttaaaacagtgaagtaacatgaaattagtttcaggaagattcaactgttcatattttgtggcactacaaaaactaattgagcacttactgtgtactgagcactgtcctaaagggctttattcatttaatcctcacagcaaccctttgagacataggtagcccttatgttacagatgaacttgagtcacaggggggtgtacctattggcccaaggtcacgccgtaactgataatgccttggctatgaactggcagtctgattccagagcctatacacttaaccactacactgtgtccctgtgaaggtgaattagacaaagaagatgatccttgcacatagcagtgaaggaatggtaatggatcactttttaatcctgttaatattttaattaaaaaagatcttctatcttcacggtaccccgatacttttcgttttaagttcttgtcaccatgattggttgtatgattttggccacccaggaccagcttagtatgtaacaagctttatgtttatttttcttgtgttttgtgtgtaggaaggttttaagaatatgtagcatcgcttaatgatggggatgtgttctgagaaactcattatcaggcaatttcattgtgcagacgtcctagagtgtactc

SEQ ID NO: 111539 - DNA, 1089 bp, Homo sapiens
ggagaattatatgtaaatctgcattatacatgtttagtatcctcaatctaaaatccacagtgctccaaaatctgaaacttgagcactgacatacatgaaatgctcaatggaacattttggatttctggattaggggtactcagctatgatataaatattccaaaatctaaaaaaatccaaaattccaactacttctggtcccatacatttcaggtaagggatactcaaattgtagcaaccatcgtcagaggttaccgtcgttactgatggctttcagagtgattagacagtaaataagtgtaatgaccatgacaagaaaattttcaaaaaaactaaatcttatttacgtgcaaaataaaataattttgaataatgattttaagaagtaactgattttttttttccagaaaatatttacaccagcagctccagttcataccaataaagaagatcctgctacccaaactaatttgggatttatccatgcatttgtcgctgccatatcagttattattgtatctgaattgggtgataagacattttttatagcagccatcatggcaatgcgctataaccgcctgaccgtgctggctggtgcaatgcttgccttgggactaatgacatgcttgtcaggtgagtgtgcttttccctctcatgagttcgctgaattaaagggaaagcgtgttgtgtgacatggagtcactgagtcattaacctagtcttatgggaatttggcttacaccttatttgtggtcttccaaccttttccttgtgtatcctttccttgtgtatcctctaaaataattttgtaccccctctcgcatagttgtctgaaatttttcatcttcaatttaaggaattgcaaagatctaatttctgttatattgtgtaaagtaagacagttagggctgggcacagtcactcacgcctgtaatcccagcactttgggaggccgaagtggacagatcacgaggtcaggagttccgagatcagcctgaccaatgtggtgaaaccgcatctctactgaaaatacaaaaattagctgggcatggtaatgtgcacctgtaatcccagcaactcaggaggctg

SEQ ID NO: 111540 - DNA, 1113 bp, Homo sapiens
gggaggtttgggggtcacataaatgtagtttttttggagcatatttcatagaatttaaacacttagaaaagtcaagtgatttgtgtgctattttgatttgcttcctgtgcttactttcatttgtttattatttattttagtttcaacgaaccaaacttttaaatggaccgggagatgttgaaacgggtacaagcataacagtacctcagaaaaagtggttgcattttatttcacccatttttgttcaagctcttacattaacattcttagcagaatggggtgatcgctctcaactaactacaattgtattggcagctagagaggtgagtgatatttgagaggagactgtttaaaatgaaacgtaattattattactttgttccagaaaacactggacacactgaagtgggccacagcattccttcatatgcaagactgttttacatctgataattcagctgctctctaaaattggccttctcccagttcctgctacctgcaggtgaaattcttgtaaccaagctcagttgggctctttttactcatccttttccctttggttttgccaaaatgatgccgtggtacttgtcatcttagcttggttttcttatcatagaactttcttttttatagttgttgagaatataaatcagtataatattattgaaggccattttggtgtttaatacctaaagccttaaaaatgtgtagctagccgggcttggtggtatgcacctgtagtcccagctactcaggagggttgaggtgggaggattgcttgagcctgggaggttgaggctccagtgagctgtgttcgcgccactgcactccagccttggtgacagggagacccagtctgaaaaaaaaaaaaaagtgtatagcttttcgttcatgtgttacactaaagaaattgactgttgcacagactacttataattattgtaacttagtaaaaatttagaaacagcctaataatccagcagaaaattggttcagctgtttacaaatctctgtgtagctcttagaatattcactcttcaacatcatttcagtgacatggaaaaattttaaaaggaggtttacttttaaaatataaaaagaaggccgggtgcc

SEQ ID NO: 111541 - DNA, 2429 bp, Homo sapiens
ctggcactgaggcagggtttctgttcccaggaagcagaggcatactattctgtgaaggattgactgagtttctcctaataccaagcagtatctgagggaacagatgtctagcttaaaatcctccctagcacttgtcatagcagtgctacgtattgcctgtgaaggaagtttaataactgctgaaaggttcgattagctttatttcatcaggatttgtttgactttacaaattgatttgggttatttcaacttttaggtctagtcttaagtataactggtacatattccttcaagcagccattacacctctcataaatttattatacacctgcatttttataactattatgctttttaattgttggccaccatttttagtgcttctgaattgttatggttctcaagcagcagttgtcaccttggttttgaattaatgctgtgacgcttgcttccaggacccctatggtgtagccgtgggtggaactgtggggcactgcctgtgcacgggattggcagtaattggaggaagaatgatagcacagaaaatctctgtcagaactggtaagtcttgaaaattacaaatcagataacattttagaatcactgagagattaaagggtgttagctttgattatttaaatttctgctgctgaagtatacttggtttttctaattacctaccatctcttatagaggtattaatcctggtattgcaaatacggacttttttcacctgtgtagaagttagcaaaatacaaagtcatttttatcgaattcatagtagcttcttgttaacatattatcttagtaaaacaattgtcatttggaagtatgagaagtttttggctctaaaaatgtgtcttacaagactggaatcatgtggagaccatatgtactgattctgctgaatatgtcctgtgaagccacagttaggtctagagatggaagaatcgtctctttgctagtcagaagacctgaacattttcttttataactggattttaagatgagttatagttctactgttgcttgccagcactgtctggatttaatacaatcctgtcatttctcaaaacagtgctggagaaaacctgattcttagtgttcacagtcaagcatgttaagtattgttccttgttatgtaaaaggggttgaagtgattctaatttgttttcaaggttagtttaatagattggaagaataattggccgcctcatcggctcccttttcattttgtacagtatcaaggtataggaattttactgtatttgactttttttctctctcttccagtgacaatcataggaggcatcgtttttttggcgtttgcattttctgcactatttataagccctgattctggtttttaacaagctgtttgttcatctatatttagtttaaaataggtagtattatctttctgtacatagtgtacattacaactaaaagtgatggaaaaatactgtattttgtagcactgattttgtgagtttgacccattattatgtctgagatataatcattgattctatttgtaacaaggagttttaaaagaaacctgacttctaagtgtgggtttttcttctctccaacataattatgttaatatggtcctcatttttcttttggtgcagaaccgttgtgcagtggggtctaccatgcaattttctttcagcactgacccctttttaaggaatacaaattttctccttcatcacttaggtgttttaagatgtttaccttaaagtttttcttggggaaagaatgaattaatttctatttcttaaaacatttccctgagccagtaaacagtagtttaatcattggtcttttcaaaactaggtgtttaaaaaaagagacatatatgatattgctgttatatcaataacatggcacaacaagaactgtctgccaggtcattcttcctcttttttttttaattgggtaggacacccaatataaaaacagtcaatatttgacaatgtggaattaccaaattaaaagagaatactatgaatgtattcatattttttctatattgaataaacaatgtaacatagataacaatataaataaaagtggtatgaccagtgcttgtttttccttgtgtgtcatataaaattatcagtattgataggccaatttctaaagctgatgtaaaaacactaacatattaaatatttgagatatgcctaaagtagctaaacaggagccaggcattgttcgaaagcattgtcacccttacagttctgtgaggtagtaggtactaatataaggttaaaaaagaaaaaaactaactcacccaaggttacatggtagagtcacaccaggcggtttaattccagagcctaatgtcattcattatgctaagactacctcattttttcatggcaacttcagtcgtcaccctcgtttgagtatattttgat

SEQ ID NO: 111542 - DNA, 1048 bp, Homo sapiens
ggaatgtagtgttatgacatagggggaaaaaactatgcaaaacagtcacatggaaagaaagtattttaatttttaaaatccaagtttgcttaatttcttgtgaactgttcaacactgttttaaatatcctgaataactgtgccaacaaaattcatccccagtgtttccacaggagacattaaaattaaagaccaaattatactatttttttcctttaaccaaagtattctttttctcagtcctttttgtgcaaaaatattacaagagcaattcaaatggaaatgctgaaatgacatgccaacatttcagggcacatttaaaacactcagaataattcttgaaattattatattctaaaatgttactagcaatcacttttagattagttctgtacatctactcacacggatgcaattttcctagacctctgaaaaataaacaggctcattggtctcttttggtgtccacacaataggcaagataggtttacaatagtgtttaaatcaaactaggcatctacaatctcttgactccaccacattcaaaacaaaaatcaaagttcatttggctatcttgaaatcactcccataaaccaactacggttcactggacctaaacatttctcagaaatgtgtcattttatataatttcacctaagtaagtgatgatttggggatcctttagaaatggttaacgcctaagaataaactttatcaaaatgagtaattgcaataaagtgcttgttacatttcaaaatgatgcttttagactgtggtatgttgttttaaaagtgtgtgctattccttccgtaaaggatccccaggcatgagagttgggtcttctcacctgtctcataaagcagcagcactatcttttggtaggctgacaataggcacattacccatgcggatgaggctatactagtgctatggcaaaaggggaagtaaattagaaaagtgggaggcatgtagagggttcctattatagttatatacaaatatattaaatatactataaaaatagtcgattctattcctttgcaattact

SEQ ID NO: 111543 - DNA, 1085 bp, Homo sapiens
atagccaaagctgttagttaaaatcccaaatctatagcatttaaagataccaaatagaaacaccttccagctttaaaaaaaaaaaaaaaaaagtcttccctctgctttattctcactttcttaaaaacacttattctgggtggtactttttaggtaagaaactactgagtttcaggaaaaatgctagctactctgcagttaccgtgctttggacttgcagttatcatagttttgggagagtcagtattgtttaacaaatgcaagtgagaactagaagggttaataaagttgctccttagagtggtgtcaaaccagaaccgagacacttaaaaagtacttcattttttgaatggaaaatattggagaaaagtatgggagatgcaggtagcatgtgagtaaatactacggtctagccttcgagcatcccaaattccgggggtaacttgacagtgctgtgctctcctttgtcatttatatctggcttaggaatggaatagtaataacaagatgccagtgatttggaatagtttgttatagaacattcagtgcaaaatagtgaaaatgtttggtcttcagaagtgctgtagttgttggtcattgccttaaagcagtctgcttgacgctaggagcactgaagcagtccagctccatcaagagcactgttgaagggagaagaacccttgttcaggaagccttagaaagggatccttaaaatagtactctacgcagacaagtgaaaattcttttaaactggatattactcaacatgttttcagatgtttccactacattgaggcaaactttttaaaagtggaatgcaaatagcattttactttagtatttctgcttttttctttctgtttctttggtaattgaaagtttgttgatgaatatttgtgtaaaacgcattcaagtctataacctttccaattacctgtggcccttagtcccacaggagtccctgttggaagggggtaaacactggatattaatgttgctgagtgagtctttctagccaggacaagctgattggaatttttgaatggtagagaagaaacagcacaaaggcacttgccattttaagt

SEQ ID NO: 111544 - DNA, 1172 bp, Homo sapiens
ccggtttccgtagcagttttgaaaccttagtacctttttaacagcatgtgggtgtcagtgtcattattagtctcctaataagttcctctgaagactgctatcagtctcttggactggaggtacaaataatttagaaataaaagatgataacctaacactatcatagttattaatgtgatcctaaaattgtttcctaaatcagcatttttctttagtcatttaagaatttaccagaaatatttgctcaatatgatcttgatattcctacaaagaaaaaagaaggggtagggatttggctatgccttcactacaacattagaatattgtaactcacatgccttctaaacgtgaactaagatttcctttggcaatatcatattctaaaagtaataaattccaatacaagttacatacatttaaaaaacattttacagattttatggtactaatgaaatttacagtgatagaacaaaagaggattagtagaaaatacattattagaatataaaaaatgttattactgaggaaagggaggagaggacaagtgtaataaatcaaaattgacctcaaaagaaaatgtgtaacagagttgaggttgttaaaacagaaaaggttctgaataatgaagattaacctaatgcagaattgctaggtaaagaggtcaggggaatgctaagccagttcttaagacttctctgtcctctgctttgctgttatccttaaggcatatactttgtctttctgcagaaaattctacctggctacaattactttgaacattaatgttgaaaaagaaaacaaccaaagaaaattggtacttacccttctacaaaagaagtgtgactagatatcaatcagtaattaacatatcaaggagctcttctagctaaatgaccatccagtagagatttcccacattcccatgaatatcaagaatagttgtcagaatatgtatgtacctgagcatatgtacacagacaagggggatgttgtggaatatggcaatagcattgttcttctcccctttcaaattgcctttcttgaccttatgccattccatatatatctgagttgtgcctcatttatttattggcaatacctagtgatacggatttagctaacaaaagatatgaagaactattatattgaggcctgtcctctacataccacac

SEQ ID NO: 111545 - DNA, 1849 bp, Homo sapiens
cttcatatttatgatgcttttaaataatattaatatttaatctttattaagaacccaatgtggtaggcactgttattcctattttctaaagaaagaaactgaggcccagagaagtaaacagcttgaccaagtcacacatgtggtaagtagggcagcccaagtttgaaccattcagtctacctcagggcccaccacgctcctggccacttaactgtgccgctctaaccagctgagcgaacctgtgtgcagaaggcattgtctgtctggcctcagagtatttgtttttcatatagtcataactatgctcaaattttgtaatttaaaatatgggtctttaggacataaagtgaaagaacgtgtgtgatttggctcaagatatagattgctttctataccataaaatctgtagctcagattcctttaaaaaatgaaactctctcatactttcagaaagagggaaggcctcataagcattttccaaattagaatttttaaaccagagagtgaaagtgatatgcattatgtagaattttaaggattttgtccctatggacaggggagagtgtgagtaactattatgtgggtgccataaagggagtaaagcaatgctgcataatccatttgttttttagacttctaggttgctccatgggaatccctcaactcaactcattctctctgctgcatttcctctacaacagagcaccttccctcagtcacatcaccagcaacatcagtctcagcaacagcagcaactcagccggcacaggactgacagcttgcccgacccttccaaggttcaaccacagtagcacacgtgcttcctctcttgacatcaagggaggaaggggatggcccattaagagttactcagatgacctgaggaaaggagggaaagttccagcagtttcatgagatgcagtattgagtgttctagttcctggaattagttggcagagaaaatgctgcctagtgctacagatgtacattaaataccagccagcaggaggtgatcataggggcatagccagttctgacagtgttttaggtgcctggatattttttgatggaaaaagaatatattgccaaatattaagaagctcagctatgaaatgacctccagggaatcagaaaggcactaatgatgttagtaacttttagtggttctgtgcctcttatcaagtgttacagaggacataccactgccatgtcaggggtttgcttacagtgatgccatgaagacagtccagtagacttggtagcgaccccctcccccaacccctctcccttttcagataatgatggaacagtaattactttcagaatgttgtgtgggttcaaattctctatgtacagatgatgtaaaaatatgtatatgtctagataaaaggagagaaagcaaaacattttgtatgctgcatgaaagcgttatctcttccttacaggtgtgagcacctttcctgaaattctgacaccatgtgcaaactgatccatcctgtttttccttttgtttacaacacagtagtgttctgttcacttttccggggcacaagtttttttgttcatactttggctgtgatgtcacagtttgttcagtgaggtatgatgtgctgctgggaatggattttttttttcaggttaaattattgatacaacaggattttcaagttattcagaaatatccctcatttcattatttttcaattatgtttgaaaataggatttgcactgctttattttaggtggctgggagttttgattgcatattttgttatagttcatagttggaaatatttgcgtaaatggttttcaacaagcctgaaagtaatttcaagaatgtttcagttat

SEQ ID NO: 111546 - DNA, 1108 bp, Homo sapiens
agttcccttcctcatcaccttaactagctatagatcccttggctaattactgaaaactcacttttttcttatctgggaaataaaaggaggccctcacatacattttcttttaataaatgactatttgagataatatattttgagcatttaacaaacttaaaaaaggtaagctaccctaaccactgttactacatggaaattctctagcatctatattgaaaagacaaaagcttcacagtgacacagagcctgtcataaaccttttctaacagtgtgctgcagaatttgtattctataatattttgtagcatatttttggacaagaaaaaaaatttgttgttaccctttaattatgaagtctttaaacaatgaatacattcagtgtttttatttcaaatttaagaacattggctgcagtgagcatctcattaaaatcacattaaaaaatttgattaagaaatcaaattattgttttctaatcaatcggtttacaattttaaaaataacaaatgaaatatgacaactaccttatctgcctgtcctgagtgaatgtagttactgcagcactctgggtgctgttttgtggcatactagatggaatctggaccatgcttccggctgcaggctgagaaatcaccatagtgttatacagtggggctgtaagagtgctctgtgtctgactgggtagagatgtttgctgactgtgcccactcagtacattttgttgactctgttaaaaataaagagattttatagacagattaactgaaaataattatttgggaagtatgctagaattcatcattctaacaatatgacaatatgacagagaaagaagtggcaggatatattactctgggggaaatataaccacaaaggaatgactcgtggtaactgagaatgaattagtcttgaatatcttgctggaaggcaagctatgactttagaaaggagtgtgattgtaatagagatgatataaaatatactcaaagaatttctgttaaatgcccaaagtgaatgactaattagtgggcatttttctatttttcatttaaatccttgggatttacagtcacagatctacagtaattaccaacattttctggaa

SEQ ID NO: 111547 - DNA, 1040 bp, Homo sapiens
ctttgcctcttaggtctgtggttttacttcctgttatcctaccttctgtgtttgttactattttcttttgtacttgatagaaatcctttaagtgctatattgctatcaatataatgcttgtccaaaggtacaaataactttagttataataaaataacatttgtatgacataaatgtaactttttaatttttttttgagacgacgcctcaccctgtcacccaggctggagtgcagtggcgcaatctcggcttactgcaacctctgcttcctgagctcaggcgatcccgcctcagtctcccgagtagctgggactacaggcacatgccaccacacccggctagtttttatatttttagtagagacagggttttgccatgttgcccaggctggtctcaaactcctggactcaagcattctgcccacctcggcctcccaaagtcctgggattacagctgtgagccaccatgcccggccataattataacattttgactaatatttaaaaaaaaacaaaaaaaaaaacttgagggagttgaggtactaaatttttaatattttctcaaccacgtttaacatatgatatggtctggttattgttaatttctgaaatcaaagttgtgtgccctgaaatgtaatttagtatcccaaatacaaactattgaagatagagttaaaaagctttggatggggaggacatttctcacttttacatacagttcactgtaagaggctactttaagacagatttccttccaataaagtgaaactctttctgctcttatactgtatcatatactgaaaattcatgggaataattaaagagcctgtatagacttaagagatgaatcaccaaatgtgggtaaattataagcagaagaaaataggagctgctcatgactcaagtaaaacagagaaataagattgaaaatataattttattttcattcatgtatgcgtttattcattcatacttgcctagtctttaaaagcccatgttctatacttatctgaggatagtttccattgaagataaaagtga

SEQ ID NO: 111548 - DNA, 1680 bp, Homo sapiens
tgtttaatatctgttaaaacgcttcagaacttaaaatccacagcacatgttttggcagttactgcactcagttacttcagactcagttactttgattttggttagttaaggtttaaaattaaatgcttcaaagattctgtgcctgccagagtagttaggagaaaaaactcaggggtgattatttattgttattaccctctgtatatctaggcaggaggaagtcagcagtgtgaattcttaagtattaattgtgtatggaaagattgtaagatcagcagtgactagctgtgaattgggcactgtagatctgataattgcttgggaccttaaactagctctaaagaataacattttcatattgacatatatgttatcaaaaggccagaaaaataatagtatgtgtaaacttaaatgtaaatgatagcttttggttaaaaaacaatctttatataatatgaattaaagaaaaaatatttctctattttccttttagtaatgcaatatgggaaaggcaaatcatgttattataggttcctgactaaggggcaacagtggatttggcttcagactcattattatatcacttaccatcagtggaattcaaggccagagtttattgtttgtactcacactgtagtaaggtaataattcttttagagaatttctgaattactgtaacatcctatgatgattttggcattgtaacttttatgcgtaagttgttaaagagctacaaagtgctcttttctcaattgctgatagatcctttcaatatattattaaatttacttataggcattatatataaatataggaatgatatagatatataagtcttgatataaattttgtgctttacagcagaagttgttactgtcatttatgtagtaatgtcagtcatgtaaaaggaaaactgtaggtagataagcatacacttcctttatttatttttcttaatttaagtattgtgtggttatggatcgtttacagcagtgtatgaaactttaagatacctagaaaaatgcaagttaaattaagacattataggtatattttaggtttgtgtagcacatagcaaatagtctagatgaacagatgagacacgtaacaacactgaatagttacagctgtgcagtattttaaacgaatgaccagacactaaaatttgattattttttccatttgtagttatgcagaagttagggctgaaagacgacgagaacttggcattgaagagtctcttcctgagacagctgctgacaaagtatgtttcttataattaaaaaaaattatttttaatttctccccaataaaagatgaaactcaataattaataggaaaactatttttcaaaaatactttatttcctcacttataacggggatgtgattatactttactacttatttttaatttaatattttagagtctcacctgcctctaaaaagaaaattggatgagagatgtgtctgatctcaaaactaccatttattcccagtgatgtactagtctctggctaggttatttatatgaattatgaaatataatttacacatcagatatttttatcgggtaggtaatatccccactttgaaaatactgaaattggggtttcaagaggggaaaaaaaaatcttccctaaagacactggctgggaaattatagtcagaattggaactc

SEQ ID NO: 111549 - DNA, 1973 bp, Homo sapiens
atagatttttactgattaggttagatgataaagccatctatgatgataataaccgaagaatataagcttgaagtagtgagcaaagaaaggtgttactagtccttgagtgcggaaataataccatgaaagtaattacaagtctaagagtaatagacaagactgaatcagagtggcagaatgtggaggcataatgaatacatatttcggttacctagatgcaaggtaatttgcaactgcactaaattggcaggcttccttggtgaaataagtagcaggtcttcatgacagattaggtttgggacttgtgatgggaagagaagagaccaaattgttaacggtttctaacttgggaaataagcatacatagacgaagggagcttgaaagaaagataaattcactttcaagtattttgaatttaagttactaatgggacaatcaagttcgaatgtcctgaaagcaaatgataggtaactttgtctcacgtaaaatgctagagttggagagagagatttaggatcagaagaacctttgtgaaaacccctagtatgaaaatggattagcagaagagataggaatagtcagtaaggtgggaaggtaagtttatgctgtgggaatgacaaaggatgacttttaagaagtggaaatgaaaaatcattgaagttaacgatacaaatgttagtaatcttgagaagaataattgctgtagaggtgtaagtcacagtgtgtgaagttaagggaaatgaatatatggaagatggagcccataatgaaaaggaaggagatctataataccaaataattagtgaaactcctttatttcagatggaagacgtgagcaaatttaaaagtagatagtaaggacccttggccaggtgcagtggctctcgcctataatccctccactttgaggcaggaggattgcttgagcctagaagcttgcaaccagcctgggcaacatagtgagaccccatttctataaaaaattaaaaattagccaggcatggtggctcacacctgtagtcttgcgtacttgggaggctgaggcagggggctcacttgagcccaggagttcaatgccacagtgagcagtgatcatgccactgcactccagcctgggtgacaaatcaagaccctgtctcaaaaaaaagaagaaagtaaggacccaaaggtgtagatgctaaaggaataaggaacagtgatgtggcccgggtcctagagaaaataggaaagactataaatggtagagatggaaggattagctttagaatgtgaagcaaaactttcctttgaaagtgagtaaagaatgaaaaggatgagtagctaaaaatagggaaacattaagttgtttgcaccagaaaatctattttttctattaaagacaaagtgagatcctctcctgaaggtgctctacttttatgaactaaatgtcattgacgacttctgttggggaaaataatggttgtaaacttacacaacttttatgatcttactttatgtggtatatcaatcattgttttatatcagaaatatgtgatttttaaaatctcttttatttcagcaaaaaatcagttagaattctgttgtcacatgctgcgaggaacaatagacccaaaggagccatctacctatgaatatgtaaaatttataggaaatttcaaatctttaaacagtggtgagttaaaatgcttctctcacaatgtgttttaacttgttatttttctgtgctcttaaagacatagatgtttgaatatcagtgacaattaggttttgctggcataactgatgatacatatttccctattgttttagtatcctcttcagcacacaatggttttgaaggaactatacaacgcacacataggccatcttatgaagatagagtttgttttgtagctactgtcaggttagctacacctcagttcatcaaggtatgtttttaattttatttcccaaaggggatttcagttcatat

SEQ ID NO: 111550 - DNA, 1073 bp, Homo sapiens
agttttcagtttttaatatgtaatgatgttattgaagatggagctcatggtataaatattctaaagttacttataaactactcttataatgcctctctctgggtgcagtggctcacacctttaatgctaatgctttcagaggctgtggtgggaggattgcttgaggccaggaattcaagaccagcctgggcagcacagtgaagcatcctgtctctacaaaaaaattaaaaaaatagcttatctctataacagggtaaagtaattctgcttgtaagtgtctctttcaagagatactgaaaagtggtatttctctccctctgattactctgatacttcataccttataaagagaatcaatggattttagcacttaaaagtccaggctctcaagggggcattttttaaagttgaaagccatgcagtacataatttgctaatttctttggttcatacagaaaataactttgactttactgctcttctggggctttattttctagtaagctcaaatagtaggataagcccaacatttaaaaacatgtttgagagtaaaacatgagatattagcaatgcataagtaaactagcataggcagaaaaaaggacagactgattaactgagttttctggacaacttaaaaaaatttgttttcatagcaagaaaacccagggaaagaatcccattataggattaagataatgtctaagtaatttaaaataagtataattgtatgcttttaaaccatatataactgtattaggttttgtcatgtttacagaaactatataatctagtcatagagcatcatttgcaatgtgttcacactttctcaaagcctgcttcttggcacttgcttgaattccattcaaaattcgatgcccttcatctctgttctactgttaccttgtatgtactactgtcatgatacagagaattataattttctgtttatttggatagttatggtagttgtagcttcttaaaggcaggaactttatctctgcatccagaggagctagctagttccttggagcgtcactcagtgattatttgttgaatgtatgaaaatgagt

SEQ ID NO: 111551 - DNA, 1082 bp, Homo sapiens
tataccgcatcttcttctgcatctgtacagcactggaaatttttatccctcctcccttggcttcccttatattgtactttctcctccccttttctaactgaaactaacttctttcctctctttctaccctctaaatgtgacattcctaagtcttatccttgttctcttgctttctgtacactctttctcttgcttatctcattccatagcttcagctattgtgtctctattaacctaccagatttctatttttagatgcaaacattttagccatgtatttccagataacttctagatctttcttttgcatgtcctcaaactcagtgcatctaaaattgaatttattttcattttgtcaagttacctctttctcttaacttgccttttttcatttttataccaccatccttttagtcacctaagacttaaacctgaaaaaattttaggattttttttcagcttccttagcaccatatcacagttgccaaattctgttgattctttcgtaaatgtgtcaatatttattgccaccactattattacattttacctctacagatagtatctcactaacctcagtgcctattgttaaatggcacactcattgaaaccagtccaaagatactaggagttcaataaatggttgttgaatgaaatgaaatgcatatatttccccgtcaatagaggatgaattgtggcattaggtaattttttttttcaaaatcagatacataattctcacaaaaatagtatttctgttaaggtaaaaggattttatatatgtatcatcctaaaataggcctatgtttaatgaaacttgattggatttgtttgtggatttaaatccttttcccaaatgtatataattgatgtgaatttgaaaaacacaactgtattccgcacatttagtagctctacttcttagttactcttcatattccactacaggcatttctaatatgctaacttttgatgagggacagtatgctgtatttctctatctgatgataaaatcagaatttagtttatacttcttactacaaattagagtatattttgtagaatatagtctatgacataga

SEQ ID NO: 111552 - DNA, 1042 bp, Homo sapiens
ttaacatttttatagttacagttttttaatacttttatcttttaacttctgtaccagaattaagtgattgttttagtttattcatgttttaagttattttgttttcttttagaaacaatttatagaatttaaaattggttatatacatttttgtgacagttctaaattttatttttaaaaattattttaaaacccttttaatgataaacttctatgtaagttgaataaatctaacattttttcttgtttaaacagaattctgagacttatggttggtcatatagaagagtaccttgaacctatagtttcctgaagaatcagtttaaaagatccaaggagtacaaaaggtaaagaaaggtgcatcttagaatgcatcgtaaaatgatatttttccagaaaaataaaagaattcatcaactattttgacacactaatttaaggaaagtttaatttaaaaaaatttttgtgtgttaatttaccaccaaacgtagtaccagctatgttccgataattactttagatactggggattcagtgatgaacaagacagaagctgtccctgctgtcatgagaaccgccttctagaagaagaataatacacaagtgagaaacacaaataatacacaagtgagaaatttgtggtttgtactgtgcagagaattaaaatggataaatggatagtgtaaggctgggcactgtaaggcttgtgcctgtaatcctagcagtttgggaggctgaggtgggaggattgtgtaagcctagaagtttgataccagcctgggcaacatagtgagaccccatctccaccaaaaatttagaaattagctgggcatgatgacgtatgcctgtgatcccagctacttgggaggctgaggcaggaggacttgagcctaggaggttgacgctacagtgagctgtgattgtgtcactgcattccagcctgggagacagagtgagaccttgtcttacgtgtacaaaaaaaaggataatgtggtagagactggtgactgctttcattaggcagtcagagatagcctaattg

SEQ ID NO: 111553 - DNA, 1135 bp, Homo sapiens
cccaattaaaaaatagcacatccctaatgtgggaaacagtaagaaagcatagattacattttaggcagggcacagtggctcacacctgtaatcccagcactttcggaggctgaggtgggtggatcacttgaggtcaggagtttgagaccagcctggccaacatggtgaaaccctgtctctactaaaagtacaaaaattagccgggcatggtggcgggtgcctgtaatcccagctacttgggaggctaaggcaggagaattgcttgaacccaggaggcagaggttgcagtgagcagagatcacgccattgcactccagcctgtgcgacagatcaagactcagtctcaaaaaaaaaaaaaaaaaattaatatcattggagatcataccaccgaaagtgctgttgttaatcttcttgattatctatctgcttcctgcattttgttgagccattacataagtatatgtatacttatatgatgttatgggctcctaatgtagtccactgcagtgcaagctgttcagttaacagtgaatcatcaacatattttcatgtcagtatttttctgctatgtgattatttttagtaggtatgtaacattctcatctctgtgtaataatttacttatcaatcttctgttggacattgaagttgttttcaatttttaggataataatactgtcacttccctatatcatgcattttgatactggcctacctagtatcagtgattttttctatttttgtttctctgaaaatatctcaatttcaccttttttttttttttttttttttttttttgagacaaggtctcactctggcacccaggctggagtgtagtggtgtgaacatggctcactgtagcctcaaccttttgggctcaggcaatccttcacctcagcctcctcagtagctggaaccacaggcacatgccaccatgcccagctaatttttaaattttttgtataggcggggtcttgtcatgttgccccggctgttcttgaactcctgggcttaagagatccccccaccttggcctcccaaagtgctgggtataggtgtgagccaccatgcacggcagtttcaccttttttgaagtggtttttggtgttttttttgttgttgttgttgttgtttt

SEQ ID NO: 111554 - DNA, 1086 bp, Homo sapiens
aggattgctagaaaaattaggaaattaaatcctatcagttaactgttgtctaccatcaaatatgtcagccagtgttaatattaaaagaaaattgtttcctcttatctcaatcttgaagcatatatattatgtcacctcttccacacatttttacttctagtgctgtgtcaaataaagcatttatttactgtgactattttaataaaacaatattgtgggggaaaagtcaaagttctgcactgtagctaaaccttttgatgtttatctgtttccttatagttttttacagatgcataaagtaaaatattttttaagttccttgtaggcattacaccaatggctgttgcattttctccttttctggatcaaaaattctagatggagttgtatgaattatttatagaacactcaagtgtcagagcaatataattgttactaattgactataattacataatggcatttatatttacaggttgctttacaaccatttattaaaagccctattaggtgtaacttctgtgaaacaggtggataccgagattcctgtttttttccatttttttgattatgcaaatgttgaattatttaaacttactcttatagcctcaactctgagttattactttagttggatatttcacagagatgtaattctgttaattttaagtcttagaagtctacagaaatcacttgtgaaaaatgaaattttatgaattactttgtcttttaaagtatgctgtttcggatataatttgcttttcatttttcagaaacattttcattttttacattaataatgacgacgattaagtttctttttcaaagaggtcacattcaggtacttaacatttttaattctcatcccaaatagtggaaaattgaatgtgagggctatctggctgtgacatgttaccccattgatccccagggttgattcagctcatctggctggctcggcaggtgtccccttcctccctctccactccacgtgcgtccctcctgaagctgaagctgcgtgcttggttgaagaggacaaccatcccaaatagaggaggactggtcttgggtcaagggtatacgagc

SEQ ID NO: 111555 - DNA, 1211 bp, Homo sapiens
tggcgctctggcccctggagtgtaatttcctacacgcagcgccgcagagtttatattctttgaaagtgtttgtagctttgtagaggtcctcttgttgatggtaggtgagcctaattctgcaagataaaagcctagtctctgacctggcagatgaaagatcaaatcagattgtggtttcctgctattagaatgccgtgctattagactttaaggctttttagccttctttaaaaaataaaaaaatttttacagtggaagaaaagcacaagaagtaaacttttacagtcgttgatttgactataacgctgatccccccaaatcaaaggtaatttcactttgaagattgcgttctgatttgtagctttaagcgattagagaaaattgtgcaatattcccctctacctgtttgaaaataaacattcttaaaaggatgtaatttagataatgaattgctttctctgaaacttatcccttgggacacctcaaatctgattggttttcaaagcttgggggaaggaaattaattcctgtgataagtggttggctgaacagaatgtcttgaaaggttagcctgtagcattaggagaaatacctaatgtaaacgacgagttaatgggtgcagcacaccagcgtggcacatttatacatatgtgacaaacctgcacgttgtgcacatgtaccctagaacttaaagtataataataaaaaaagtaaaaaaaaaaaaagttagcctgaagaaagcagactgaaaatgttctaaagctaggcgtaatcagttatgaaaaaagaataaggaagctttctacgtactaacatgcaaagattgcaaaaatttgctatgaagtgaaaaaagcaaggtgtagcggtactttgtgaatagtgtgttacatcttaagggcgaggtgtaataatacaagtttatgtttgctctttatataaagaaattatgggaggatttagaaaactaacaatagaggagagggagaaatagtctgagggaatggtgggaaatgagatgtattatgtgtatgtcttcatgttttcaaatttttgtgtgtattatggactcataaactggattaaacaaaaatcctcctcccccaaataatttgtgtgatttttgttgcctaatttatggtgatttgagtcattttcaatatgattgcttttcatattttttaggaaaatcaactaaaaaggaagtttgggat

SEQ ID NO: 111556 - DNA, 1061 bp, Homo sapiens
gaaccttcctttggagggcaaagttttcccttggcccctaaaaccttgcattttttagtagagacagggtttcaccatgttggccaggctggtctcgaactcctgacctcaaatgatctgtctatcttggcctcccaaagtgccgggattataggcttgagccactgcacccggctcaaattgaatatgtttatgtaaaatggagaaagagtctttggagaaggaaagatgagaaaacaggaaaagagggaagcagaataaccaacaaagatcccaagggaggtggaaggaatgtggaataaagtagaggtgaagggattcacttgaaagttggataaactgggagaaaagggactaatcgatcaaggagtgtgatgagaattaagtgataaagcaggaagagctgaggttgtggtcacacttccaatcaatattaaatttctggtaaggaatagttctggataatgggccaccaggatgtggcatggagtgggattccaaagactggaagaagtttgttggagtcaggaaagacagttctggatatggtaaactcattacatggaaagaagctcatgatggcagcaagggttgggatccttttgtttcaactcagaactgcaaaggatttcctagaagtgtcctgttttttttttttttttctacaaactgggtacctgcttgaaccaaactgatgctcagttgaatgtagtttccctaagttaagcatcagcttgccatggtagctagcttcattcccgggttataatggtgcttgcaataaaaaccagaggactctacatacagttcttcattgctaaaggtaacaatagaggatgataataatgtgcttttatattaatctaagatatatttttgccatggcgatattttacttatttcattagactgagatgagtagcccatttattaaagattgtgtgtactgtttctctttttagcatcccaatgtgtttgttggttaaccagcatcttagtcttctagcaagaaagtttccagaaactaaatttgttaaagccatcgtgaatagctgtattca

SEQ ID NO: 111557 - DNA, 1013 bp, Homo sapiens
aagtaacaaaagtaacaaaagaaaaatttcacctgggaaaaaaaggaaagcaaattgtttttgtgtgtactgaattcatagtcattgttttgttagagcaacagccacatcaggtacgaaaaaatgtttaggtttgttcccacctgtttttgtattttgtttttacattttagcttaattgtattttgggaaactgtggtgaaagcctgttttaacatttgtaagttagtgcattagactgcatgctttttatttattttttagaactttatttcattaacatattaaattatttataaaaataaagtttgattttttcatatcatttgaatcattctatcctctttttcagctgctaaatgtgacctgtgcttataactatacctacctatatgtattatgttatagtcttttctacttttttgactattttactttgaatttttacctctttaagaatctgttccaagtggagaaaatcagagtgtgacaggaggtgatgaagaagtagtagatgaataccaagagttaaatgcaagagaagaacaggatatcgaaataatgatggaaggctgtgaatatgcaatctcgaatgcggaagcctttgcagaaaaattgtccagagagctgcaggtgctagatggggtaagactttcctgaattctatgaataagtgatgtatagtggattgagaaggctaatgatgttcatattatactacctcagcacttaagcctttatagtgtgttattgccatctttatctataagcacattaccagctgccatcagtcttttactgttcttgttcaaaagatgaactattcctgttaagccaatgaagacagttggctgagattctggatttggggaggttcttgatatgaagtgactggagtaaaaactaggccagagaacatcttgggagttgattcgctcagcctctgaaacatgtctgaatagttcagtgccaaagaatagcatttgtgtgtatgtgtgtggtttgaaaaaaat

SEQ ID NO: 111558 - DNA, 1066 bp, Homo sapiens
gatatcacataggtgattatgcttttatttagggtttcacataggtgttaagaaaatttctagctggtagaattggaggaaatgttagagataacatggcctaatgcctcctaaatgtatagaaatgagaatgtgccattaccagtgatactttctggcaccttacttgtgcattctggaaccttacttgtgcagtctgtggaaatataaaatcctaaggcatggtccctaacattgatttagaggcaagtgtacctgcatgaaatactgtgtaaaacatggaagaacataaagtgataaactgaagtagatgtgtaggtatatatcaatttttgttatgctactttcaaggaaatttagcaacatttcacctttattcttttacacatctaaataacaagtatgttttttgtttgtttgtttgtttgtttgtttgttttggtctttaactttgtaggctaacatccagtcaatcatggcatctgaaaaacaagtcaacatcctgatgaaattgctagatgaggctctaaaggaggtagatcagattgaattgaaactgagcagttatgaggaaatgctccaaagtgtaaaagaacaaatggatcagatctctgaaagcaaccacctaattcatcttagtaacactaataatgtaaaactcctatctgagatagagttccttgtggtaagtatgatcataaattaccaacaaaaaaaaactagtgatgatatataaaacccatttgtaaacattttttaatttccttgtgagaacaggatttaaaataattccaaagacctaatgataggactgaatagcatcttgcctgtaaatttcccaaaattacacatgcaaatggtgtgtttgcatatattctagaaccacatggacttggccaaaggtcatataaaggcccttcaggaaggagatcttgcttcttccagaggcattgaggcctgcaccaatgctgctgatgcccttctgcagtgcatgaatgtagctcttcgaccaggtatgttcattagaaatgacaaaaatgtgaccaagaatgtgagactaagcctg

SEQ ID NO: 111559 - DNA, 1046 bp, Homo sapiens
tccacatttctaacagttcccaggcgatggtgaggcaagaccacactttgagaactactgtgaaatcccatttttctcctgcttaacttttatcatgtaaatgaatacacccataaaacttttgggttcttcaaaacgttagatacgtttaatgttccattaaacatcaaggaaatctttttacccattaaactggtcacaaaatgtcgttctgtgtcaggccatgacttgcttctggcagtcaaacagcaacagcagcgattcagtgatttgcgagagctttttgcccggagactggccagtcacctcaacaatgtttttgttcaacaggtaattttattttattattaaaacgagcatgttcctatagcttatttatgtattaaccttacatttccacaaaaatgttaatatgtttaattggggttgcagtcaattccttcacatatttgattttaagattttgaaataggagcctctttgctcatagatgtactttgggcctcagctgcctcttttggtagacagtctagttcctttcagctgatgctctctgattctagaaatcaaataactatgcatatgaattgcatatactacttagatatttttatttataaagtaagtccaaacttgttagatatttactattggacctgttttatttttcagtattttgaggtgagactcaggacttgattcagtgttttaaatgttttgtaagttctatgtacttagtacatagtataattgttaagaaaatgactagctcaactgcaaatttcagttgatctaatcttcatataaatgctttacctatatttttatatggaaaaggatgttataattaagagtgtggtaataatattgttattaataatattaagagtacctttgagggatttgaataaaagccattttaatatctaatacaataaattaggtttcttattttttcatctcttttaaaagtcccttttattttattagagttatagaatgaaaaaaaattgggggaatatctcgttcatcaagaaatactgcct

SEQ ID NO: 111560 - DNA, 1021 bp, Homo sapiens
ctctatttgtgtttcttaattcaagctatatcaagaaggtcatttgcttggtaaattgtgaaatatggtatgagagagacaagcttcattaaaacgttccatcttcattcctttaaaagacggaatgggtagttgatttatcagagtgccattcttgcgtatttatgattatcttatggtggtaatgttcatttgatatacacaggatataaaagttgtgtaagtatttggtttttatttttctgtgttctattcttaattatttttctatgtcttattggtttggcttggccacattttggtcattgtttagactttttattgtaacgtttctttgtactgttgattacatttatttacttattttactcactttagggtcatgatcagagttcgactcttgcccaacactctgttgaactgactttacccaatcatcatccatttcatagagatttgctccgatatgccaagctgatggagtggctaaagagtacagattatggaaaatatgaaggactaacaaaggtatggatttgacgtcatttactcactgagaatagagcattatcttttagaattaagaggtcatgtgttcagttccccaagtttaaaatactgtagtacattcttagcaaagcagaaaatgagtcagtgctctttaccagtgataacattcattttattaacttggataaaggagagctaaattttaaacttcagtatggaaaaatattaagccatactgtagcctaaagcatcaatttagttaaatgctatgcttatttcctgagtttctttatgtacagtatagaaacaaggaagtatgagcattgcaagtgaggtatttgccctctgtggatttataatctgttctgttaaggaaatataaagtgcctctttattaagcaagcattccactattccaggcacctggggcctacctaataagcatctactctaatgcgctttagatctgactgggaagaatcatacataaaacaatcagcaaaaaattaaa

SEQ ID NO: 111561 - DNA, 1435 bp, Homo sapiens
tgatatgttttgtctctgtggaatgagaatattggaattgctaatataaaagcaacttctatctggtatcttagagtcatgcttcagaagaaagcagaagggttaggtagagatttatgaaaagtgtgatagtaagaaggaggcaaattatgtattcctatccatgcatttgtgtttacgtatttgacagtaggacatttttatgtatcagttttcatgtattttctctttgaagtgcctttgcccatttaaagtaaaatctggctcttggacttctaaactgagataataagaaaagggatataaaccttagtaaaataaataatatttttaaattataattttaaaaatgcttttcaaaaaaaaaaatctcctgaggtgcttatatacttcttgtctggctagctattttaggtgagattattttagttcctcagaattagtatattaagcattatacacctccactgttgtgttatattttcttttgtcttgttttcattcaacagaattcagatttggagatatcttaaggaaaaaatttacattactggaattctttgccttttgaagttttaggaggattaatattctgaataattaaacataaattatatttccttaagagttttgtgccaacaagtgctttgtcccctagtgaatattcaaataagtaatcaataagctttttgcctaattgtgttcccagtgagtattattgccctatctttatatataatgcagtattcatgaatgtaatttaaagtgaagaaacaagattagagccaacctagtaatgatttatggaatcattctctgctcagagtatatttttgattgacaatattaatgagctttttaaatgaaattgactttttcccaggaatgttgcgtcatcctgtgatttgagcttttcacagattatgtatttttacctcatcatctaatttggttgctgaagagttgtcaaaaacaggaattttaaggaagaagaaaggaatgaagaaaaaagaaggaaacagaccaatcagtgtttctttagtaagaaatcataattcagaaagctatttgcacttggttaggtttacacagctcacactttttggcaggaacaggaaaaacttgttcaaaattctttgggaataagaatcactagccactgcctctagctgtactgaggctgaatctaagcaaagccccattttttggtatacagaaaatagttgtagcttggactgcccagattccctcctcccgggactgctaccttcgtctgcaactctgggtcatacatgtagggtagttagtagagatggtccatccatgcttgggtaggaaaggagttttcctctcctaatagcctcctgagattggcagtctgacttgaagatgactcacatgtcttctctccacctcagttttacatttgtagaat

SEQ ID NO: 111562 - DNA, 5032 bp, Homo sapiens
gaaattgaagcttagattttatgataaacttaaaagaataggtacaacttttctgctttatttaaattttattttctggtttatttaaatttagtcaaattctgtttgtggcatttaacttcatacttggaaaaatatacagtctcccactgttgaggaactcttctggagagtatatttttatgtgataataagtagagatgatgaagaaatgatttttgtatgccaaaggatacaaaaatgtttttatttaagcgagaattaatcaaatctgttttaagaaaattaattacttgattttgaaaactgtaagatatactaatgaagttcttatggaaaataacctattttggagtaatatcccaagctggcagaggctcagtgaaactaaatattcttaagtgccattgacactatttattattggtctgtttttaaagcaacatgacaatatagaggaagagcaattaagattcccatacactttgaccctgttattccatccttaagaaattatttcaaagaaatagttcattagagatgaaaagcttattgtaacattgtctatcatagcaaaacatggaaaccacttcattgtcctgtgttaggggattggtttacttaatggtgctacaccaacaaaactgaatactgtgctgtcattaaaatgtgagactggagaaatgtatttgttctgatttagatattctgtatagtgtgattacagtgatatttaaaatatgcaaaaggtaatatagaaaaatgaaaatataaatatggttatgtttgacttcatatttttgtaaattgttaatgttatgatgcctattcaattgttttttaagacagaaagtaacctatttttatatcctgtgaaatacatcaaagttttggactatgaaatttaaaacaagcatgaaggacttggggaattgaaaaattgaaattgttatatgtgttttattaataagaagtacatgttacttttattttaagaattacatggattatttatcccgactatatgaaagagaaatcaaagatttctttgaagttgcaaagatcaagatgactggcacaactaaagaaagcaagaagtttggtaagcttaggcatgtcagttcattatcttcctattaaaaatggctttatttataacaaataattctaagacttcttaagcaaggtggaggtagatccagcagaatttatgaaaaaagaggtctaaaacgttggcttgatttatagccgtttcatagaacaaatatgtatatctgtaaattttctttaattaaaattctgcagtatgtgactgtgacagcgattgtgtattcatgctgtaatcaaatatatatattcataagaacagcagttggtgagaaaatgaagtgcagtcaagtagagaaagtactagactgagagacagatgttgggagttcagtttaactgattccctaaaagactttttataacagttgggggcaagtcactaatctcttaagtcattgctctccacatagaaatgaaactggttcctggcttcttacttctcactggctattttgaatcaaaaagaaagtttaaatattttctcccctgccaaagggctataaaactgtcaccaaacattctcatgttattttaccttatttttctaaagagatgctttgatgcatgttaatttttgttgtttataagtattttaaatggacaaaaacattatttgaaagaatagccagtgacagtatcaagttatgaggaaggtgatttgccgaggccacattctgctcttgcatgtatccatctctggagttccttttggatggagttttgtgcctattcaagtcaaaacctggccttaaatggccacattgtgtactcctcagtgtgtctgcatagctcccctttagaataatgagtttagcatttgcctgttgaaaggagcctatgccctaagcaacttcagtaatcaagaaacatgattcaaaactgatagtacatgtttccattcttttctgtaggacagagaagactgtcattaatgggtaattattctgtaactcactgtttttaaaaaaatgcaacactaatatattgattatactagtccagacatttgaaatggtttgaatttgtctgtaaatatgctacactttacagatactgataagaatcttgggacagtaggctttcggaaacagaaatgctaactcatcctaaaggttaattgttcttaaacagcagtgtgtttatatccctgttaatgtttcactgtggatatgttatgcttttttttttgagtaaacagcatattattaatgcagttacatgtttaatgttttcattaagtatatttgtcaccacttgttagtgaaccattttattttgagagaactccttcagtatatgaaaactggaggtaagagagaaatatttctaaaattatctcctgagtaggtcattaatcccagtatcataatagtttatcgagtctaagattcacattaagataaatgaaataataagaatataactgaagtacaatagtatcttaatgttatcattgcattaacctgaaacctaaattttttcctccttgagaaattcttaaattatcttgttaaaaacatttttaactaacataatacaggttaaaaggtagttttgtagttttataagtgttaagatcacatatcttctattaaatgtgtctattaaatagcaaggaataggagagttatttgtgacaattgagtgcatagaaaattgtgctcactttagcagcacatatactaaaattggaacaatacagagaagatgagcattgtccctgtgcaaggatgacacactaatttgtgaaatgttctataaaacaaatgaaaattacagtatcaattattttgatatcagctacaggagaagaaaaactaaacaatttggagaataaaaattggttcatgtttgaaaatccaacttttagctagtattttaaaattaatttcaagttaaatgcaaatgacttgagaagttctaaataagatatagtgtacatttttttcaaagatatcttttcagtgattcaaattgtgtttgaatgaatttttcatactgtagactgtcctggcttataattgttcaacttaggatttttttattttacagtagtttgaaagcagtctgcagtcagtacgaaccatacttcaagtacccatagccattctgttttttactttcagtatggtattcagtaaattacatgaaatattcaatactttattataaaacaggctttgtgttaaatgattttgcccaactctaggctaatgtgttttcaccatgtttaaggtaggctaggcctctggtgttcagtaagttgagtgtgttcaatgcattttctctttataatattttcaacgtgtaatgggtttatcaaaatgtaactccagcctggcgcagtggctcacacctataaacccagcactttgggaggctgagccgggaggatgacttgagccctggaggtcgagacaagccttggtaacatggcaaaaccccatatatacaaaaaaatcaaaaattagccaggcatggtgacatgcacctgtggtcccatctactcaggaggctgaggggcacggatcacttgagcctgagaggtcaaggctgcagtgagccatgattgtgccactacactccagcctggacaacagagcaagaccctgtctcaaaaaacaaaaaaacaaaaaaacaaaaaaaaaaaaaacaagaaatgtaaccccatcgtaagtcaaggagcatctgtaattataattaaaatagaaatctcattttagaatgatgacttttcaatgaatgaaaattaagtaattataaatgaaatttaaattaattttgctttttgcttgcttgtttgctctgaaaattctgggtcacaaatgctagtaagaataaatgctggtaagaatagtcagaatgaatgcatcttacaaaaagaaactatatagtcaatatagtgatagagaatcaggggaatagagaatcctttctttttcagccactcttgagtcaagtctttaacatctacttagctgaaataattcaaaattatgctaacgtaccagggaagtagcttttctttgtgataagacctttgtgtaggttactgcctttttaaatagatttattttgatattttcaaaggcatggaattttttcccacaggattgatgtttcagtgtatttttttcctttgtattctacaaatttaatgaaatgacagggaaaggaaatttagtaatttttttttagtcaccatttttactttctactgttgagatatatatatcacctctcattagtcccttaatacatacatttacataatcattgccctccttccaatttaatattccaaatctttaaaatagccaagattattctattattgtttctccgctaaactaggaaaccttgttgattccaaagagtcgtgaatacaatgctgaattcagggatggctggaagattaactcaataaatatttataaattacctattatctaataactcactgttataagtactgggaatgcagcagtaaacaaagaccctacctttatgaagtttacattctagtggggattatataaagatatttaacattttacctgagtgttatcacttgctgataagggatataggctgttttatgaacctcaaattataattaataggcactactactaagtctgtattccttattgactactaaagaaagaaaactagtcaggcatggtgatccacatctataatctcagctatatgggaggctgaggtaggaggatcacttgagcccaggagttcaggtccagccttgtcaacctaatgagatcctgcctcaaaaaaaaaaaaaaaaggaaaccatataaagaattagattttgctctggcactgctgaacatagcatagtgacaccttaaggcaccagaaagtactgttcagattggctagctagtagctccagcgtgatccc

SEQ ID NO: 111563 - DNA, 1711 bp, Homo sapiens
tgtctttgtctttgatgcttgcaacctaatccatcacagctacactgcctcgaaaagaaagtgctgtcaaacaggaaacagagagtgagtatgcttagtgtattagtaggtattctcaatgcatgtttgtttaatgtctagaaattagttgtcttgaaaaaaggtaacaccaaaaattttgattgctctgaattgccaggtattggtgaaagaaagccaacatgatggtagtgatatggctgtatccaagaaatatatgatatagttaaaattacttgacgagtagtagaacattgtgtcagaaatttgtgaaaagacttaaccattatacttctattttcaggctgtttagaaactataaaaaatcttatatagatatggtcggattttacataatgaagccaaagtttatctttaattgtacctgttctgtcttcatttgtcttttctgaccattagcaaatagtacaagttaactgagagatattcaggaaggatgtttttaaaatatattagttattgtttatgtttaattctgaataaaaatatcacattttcttctaaaaatcaaatcctttaattccttggtgtatgtgagctattgccagctatatgttctcatttttcctcatggctatgacggataccaaaattttacctaaacacagatgtcccatattaatatgattagtgatgtatgtattacatttcggctgtattttaaatataacgagttttcagggtgttttttctgttcattttatttagtttttaaaggactataatcagttcacttactggaaaagcagtttcagagtttggaacatactaagttgaatcatatgtaattgactttttttggtagggcaaaatgatcaagtatgggcagtttcatgtggttcaacctaatatattgatttattgtggaggtaacattgagatgcagcagttttcttctgaagtataacaaagtcatgctggctaatatgctaacgtggtcctcattgaccttcatccatattcctgtccttttgaatggaaaagaaaccctcatctactttagtctagcgatatcaccaggcgactttatgaaatgggcaggttatagacaatatgctccttaaggtccctttcagtcccgttctatggatctgtgtagtttcgcttcttttttcaatatgctcagaattaggacaccaatgttaatggaagataaggaaactataccacctatcccttatagaagatttgtgcactaactaatatgagccctggaagatcaagccagtagaagatagaagatctatccctgctttatactttggatcatttatttgtgaagatcacaactttcaaagttttattatttcttaggtcttcatggaagttcggggaaattaactggatctacttctagtctaaataagctcagtgttcagagttcagggaatcgcagatctcagtcatcttccctgttggatatgggaaacatgtctgcctctgatctcgatgttgctgacaggaccaaatttgataaggtaaactaaaataacaagtacttcttaaacattaacattagttttctaacagcagtttgtggttgctctaagtgtgttcaaagatttgggttcttctggctctcttaagcattaaccatgtctttccaactgaatcgaatctgggaaaaaaaaaaaaaaaaactagtcaaagg

SEQ ID NO: 111564 - DNA, 1030 bp, Homo sapiens
ttatcaatgaaatggcataaaagctttattaaaatttgttataaatcataaaatgcttatatctcaaatctaagttgtttgggcacctaaaaagtaagaggaaataaaagcttttgtgatgctggcctttctctgtactaaattaaataagtttttttgtttgtttgtttttgaaatggagtcttgctctgtcacccaggctggaatgcagtggcacagtctcagctcactgcaacctccaccttctgggttcaagcagttcttctgcctccctcccaggtagctgggattacaggtgcctgccaccacacccagctaatttttgtatttttagtggagatggggtttcaccatgctggccaggctggtttcgaactcctgagctcaagtgatctgcccgctttggcctcccaaagtgctgggattacaggcatgagacatcatgcctggccataaataagttttaaaagttgatctttgtgctcctctttccagatgtgaagtgaataactgtgagttttattttaggtttattttgtggccttgttataccttgctaataccattgtcctgtagatcttggaagagtttgtttttgggattccattgagattataaattcatagattagtgagattatggatccatggtctgtgcagaaaagaaaattaaatgtggagtgttattttaagcatttggtgcagttctttcgttataggatcactttggttttcttcagatctttgaacaggtactaagtgaactggagcccctatgtctggcagaacaggacttcataagtaaatttttcaaactacagcaacatcaaagtatgcctggaactatggtatggctcacagtgtattttggatagtatttatgatctgtaatataattagcttaattaatatgtggtcacaattttatgatcagaagagaaaaggaaagaatttatcatgtaaggatttttttatgatgtaaggatttaggatgtaaggaatttttgtaataccacaagatgataaaaaca

SEQ ID NO: 111565 - DNA, 1820 bp, Homo sapiens
atttagacatttttatttgttttttgttgttgttgttttctgagatggagtctccctctgctgcccaggctggaatgcaatggcgccatctcagctcactgcaactgcacttcacctcccgggttcaagcgattctcctgactcagcctcccaagtagctgggattacagacatgcaccaccacgtctggctaatttttgtacttttggtagagacagggttttaccatgttggccaagctggtcttgaactcctgacctcaggtgacctgcacaccttggcctctcaaagtgctgggattacaggcgtgagccaccacgcctggctatttagacatttttaattgaaatttaattatggtatttttgtccttttgtatatacccagtggattaaagttaacggtgaattcacctgaagcttgttataactttatacttcttgtctgttttctgaacaggaaagatatgatccgccaaatgatgattaaaatatttcgctgcattgagccagagctgaacaacctaattgcattaggagacaaaattgatagctttaactctctttatatgttagtcaaaatgagtcatcatgtgtggactgcacaaaatgtggaccctgcttctttcctaagtactacattgggaaatgttttggtgactgtcaaaaggaactttgacaaatgcattgtaagttttcttttttaaaaaaataccttagcatcctagtcattgcaaaatataggtaaatgtatttaaaatcgagggatttccagctttctgttggggaatctgttgtttatgtccctcgaagcagggcatggcaacaatctacatgaacagagttagttgggtggcactatgccagctagtttccattccacactgtgaatcttggcaagttctggaggaagtggcacagtggcaccagttgcttaagagatccactggaggccagacgcagtgactcacacctgtaatgccagcactttttaaggccgaggtgggcagatcacctgaggtcaggagttcgagaccagcctggagaacatggcgaaaccccatctctaccaaaaatacaaaaattagccgggcgtggtagcacatgcctataattccaactactcgggaggctgaggcaggagaattgcttgaacctgtgaagtggaggttgcagtgagccaagattgcaccagtgctctccagcctgggtgacaagagtgaagactgtgtcaaaaaaaaaaaaaaaaaaatctaccgaatcactgacatctcagtttattagtcaatgaccattgatttaatgaaacaattgaaacaatcatttgggtttattgttattgttcttcttttaatacattctagtaagaaaactaatttgattattttaattatttaatttattttaatagtttagtagctttaataattgtattttattttaggaataaattgttataactgagcaattatcattttcctcctaatagaaaaaaatttgacaactttcttactatctgttactttttttttttttttttttttttttgagatggagtctcgttcttgttgcccaggctggagtgcaacagtgcaatctcggctcaccgcaacctccgcctcctgggttcaagtgattctcctgcctcagcctcccgagtagctgggattgcaggcatgcgccaccacgccctgctagttttgtatttttagtagagatggggtttctccatgttggtcatgctggtctcaaactcccaacctcaggtgatctgcccacctcagcctcccaaagtgctgagattacaagcaagagacaccg

SEQ ID NO: 111566 - DNA, 1110 bp, Homo sapiens
attttttgtagagacgaaaatggccaggctggtcttgaactcttggcctcaagcgatccacccaccttggcctcccaaagtgctgggattacaggcatgagccaccgtccccagcttatagatggttttaaataatctgtattattttgattttcttaaacttactgtaaaatggttttattatctatagaattagtttttcttagttatccttgttttgattcatcttcaattagtaagcatccaaagtgttctaggtaccacataatatcctgcctctatgatatctatgtatatatctatatctccatctatatattttgttatgattatatgtagttttaaagttgcttggttatttatctcccttgctctctgcctaactttagagtaaccaaataaggcaaatggaagaagtaaagatctcaaaaaagagtaaagttggaattcttccatttgttgctgaatttgaagaatttgctggacttgcagaatcaatcttcaaaaatgctgagcgtcgtggagacctggataaagcatacaccaaacttatcagaggagtatttgttaatggtaagcttttgttatgttctaaagaattgttatagctattgtttttatttctggtaactaagaaatcgggagcagataggttcattattttgtatatcttataatcttttttaggttttctaacattaaagatttcttgaatttggaaaataaaacctatttgtattcattatgaaccacttacattttagggtttatgtgggcttatgactatgcaaaattgaaaatcttttttttttttttttaagatgggcctcactctgtcgcccaggctggagtgcggtggcatgatcttggctcactgcaacctccacctcccaggctcaaaagatcctcctacctcaccctcccaagtagctgggactacaggtgcaccctaccatgccctgctaattttttgtagaaaatcattttttaaacacaaaaacatgaccttccagattacatttgcattttaacaagtggtcttctagagatgatgggctgtgatgtgtgtgtaaccttaagcaaatcaattcacttatttaggactcagtt

SEQ ID NO: 111567 - DNA, 2591 bp, Homo sapiens
agaccctgtcttaaaaataaataataaatgaatgaatgaattcattattcgttctttataaatctttataaactaaaacttataaaacttaagaacagacagatattcctttaattggataaaaaatctatctcaggcctaaaggttacatgatacttaactgcaacagtagagatattccctctgaaatgaatttaaagcagaagtattgttagatcctttattatttagcattgttattgaagtgctagccagtacaagacctgaaacataaataactatttatccccaaaaatcagcgaatagaattttcaaatcaagaagaaagtaaagatcatttttaatcttgttgtacagagataatgttaaatttttattcttccaaacttttaaattccctgtccctctcttctatatatgggcatattgtatgtgtgctttctttaatataaaagtgttgtcatacctgacacactatttttgaagctgctggactctatataatcttagtatctttcttagttagttaatatagataaacataatcatttttaatgattgcatagtcatccatatgtcattatccatttaccaaatcttctattaataaacatttaggatttttttagtttatctatctttgtatacttgtcaaataatttctttagggtaaattactagaaatggaattactgggtcaaaggatttatgtatctcaagtcttttcccaaattgtgatacagaaagcttatgtcagtttagtgctatgagcagttgcattacagctgtaccaatgctgggttttactaggtattaccaatctttttattctttgtcaacctgataggctataaattatctcactattttattttgcatttcattgattttgtatatggtgtctttactttacatgaattttcaaattttatctccaatttatttatctttccccttaacagtcttctaaattttgggccattcttagcaaggtcacactattgcaaaattattatttttctattagttatattttctttagtacttatgattgtattatttgtttgctttttacattttaaataatttagcaatttagaatttgactgcaagatgtaaagtaggaacttaaatttcatatattaaaatggtccagccggttgtcctaacacattttgaataattcatcatttctccattgatctgaaaagctacttttattatatactgaatttccatatacacatgggactgttttaggatgactttttattatgattaggtagatctgaagactcccattacaatatattgtattaagtccagaaatgtgcttaattcttaaacttacaaatgaaaaaaaattaatagtataaatgtttatagctaaatatggtcatactcagagatgttattttattttttctgttttggttttagtggagaaagtagcaaatgaaagccagaagacccccagggatgtggttatgatggaaaactttcaccatatttttgcaactctttctcgattgaaaatctcatgtctagaagcagaaaaaaaagaagccaaacaaaaatacacagatcaccttcagtcttatgtcatttactctttaggacaacctcttgaaaaactaaatgtaaatatattttcattcagtatttttcctacttttgaacctatacacataagtttgcatatgaataacctgcagacatttatcttaaattttctcatgtgttggtgcacaggggactcagttattgaagctgccagtgtgccagacactgctagatgctatatattttatttcttctttctgtacattatttttatacattatttatctactatattttaatgataattgtactagtattctattatgcattatttcttttaattcttataaacaatgatgtgtaagctaagataatattatccccatttcacaaatgaagaaactgaaagtaaaaaaacttgcccgacatcataatagcttataaattacaaagctgggggatgaacctagattaggctttgccgttactctttcccatttcttactttataaatgaccaagtttacaatgtctaggtggaaatttcaaaaatattattaagataaaagaaaaaccaaaaattgctttctacattgccttttacttttctttcccttctttttttttccttacttgagtcatttcccagagtaagtctgttaattaaagttaagaaatgatgattttagggaactttacaagatagtgaaagcttaaatgaaccttttaaactaactttgtctgcaatatagttatcttttataagctcttaacttgaagttagagtaaaatagcgcggtgactcacacctgtaatcccagcactttgggaggccaaggcaggcggatcacgaggtcagaagatcgagaccatcctagctaacaaggtgaaaccccgtctttactaaaaatgtaaaaaaaaattaactgggcgtggtggcacgctcctgtagtcctagctacttgggaggctgaggcaggagaatcacttgatcctaggaggtggtggttgcaatgagtggagatcaca

SEQ ID NO: 111568 - DNA, 1002 bp, Homo sapiens
gtaaacaaatctggtataaccttttattataataagttacttaaagcccatacatatggaatgcatatcatacatacacttaaaattatggaatggcaagcacatgcaggcgcactgagagagaaaaccaacaagaaaactgatatgtcaattataggcaacctcctccctaaaagttaagtaagagtagtaaggtggtataaaagaacaaaggctatgttaacccagggctgataccactcgcggatcagcccattcttctctctggaacattctttgcttaatacatcttgtggggtcattatttgtgtgtctcctccaattctttgtttgcaacaccaagaacctggaaatccaacttccaatctggtaacacttctactctaaaaatgtgcttactctttgtatagcatgtaactgctctattggttgtacccattcatatattaatgtttccactttttatgcctcctctgtttttctcatgccttaatgagctgttttatggaatttctaggaggcaatgagttgagttctatagatgacttttgtacatcttgcacatgtacaatttaacacttttttgtgaacaacagatatcttttttgaaaagaggtagtcatagattaatatcatagcaaaatggctgtgcaacggccatccagtcaagattactctttagcttccctttgccccaagcacataccaattagaaaatgtaaaaataaaacccaaaaaagaaatgcaaaaaggtgagtaggatgaaagccattagtgagctttgttccaagtgacatggaagaccagagtcaaggtcactgctgaacttcaaggcctgaggtcagggtccctggatgttttaggcagttctcacattgctataaagaaatacctgagactgggtaatttaaaaagaaaagaggttcaactgacttactagcaaactgaattcaacaacacatttaaaagatcattacgaccaaatgggatttaccccaggga

SEQ ID NO: 111569 - DNA, 1294 bp, Homo sapiens
ttacttattgtgttttagaaattccccaaaattttcactctgccagtggtttccttcctgtttcattgctgttatagatatattcttttctcttcgtgctttttatattttgtttgtatctttaatggtagtgaggagaaagaaattttacacccattctgactcttagaacctaaactgtacacatgacttataaagtttttttaaaaataaatctattttcttagttttcttccggaaatattattaaagagtgcctaagaaaaatatcattaacgtattaagatatatacctactgtttttttatttaaattatagcttgaaagcgaaaaatatgaattaaagtctaaagtgttaataatgaaagaaacaatagagtcgttagagaacaaattaaaagtccaagctcaaaaatttagccatgtggctggtgactcatctcatcagaaaacagaggtgaactcacttaggtaagtttattcaaaattttctaatttcatttctgggaatgtgtttgtggttatgtaaagtttataatcatggcattttggactgggcctttgtgcagtagttttagaagttggctttgcagtagactcacctgggagcttttgaaaagtatgaatttaaggggctgattttgggaggttctaattcactgagaatctactggggtaggttttgggtatctgtgttttttaaaagaaatttcacagattaatatgattgcaggcaaagtttttcaaccttcttttgaaatcctcttaaatacttcagatcatttgtatttcatagtgtaagatactgaaaattacagaattgtttactacctatgccattttctttctctttcttgcctctttcagtgaaacgtaaagtcaaagaatttacctccaatttttaaccctttctgacttagaaacagaagtttttaagtagggaggtaagacatatcaatagtgttccttttaggaagctaactttggtggaaatatggaacatggatttcaagtcttagagattgatggcaaaaaaaggagaccgaggatctggactgaagcagtggtaatgaacttagagaacagagaccaaatttaagaaacactttttatataaaatcaaaaggtttagatgactaatatggggctgagaaatacgataagtagaacatttaccttagcatattgggttgttggttagtcattaattaatttagaatacagaagactcaaggaaacaaaaggcaaacaaagctttttttctgatcagagtagctgcaataagtaacaagat

SEQ ID NO: 111570 - DNA, 1062 bp, Homo sapiens
tccctatattgcccaggctggtctcgaactcctgggctcaagctattcaactgtttttgttgttgttgttgttttttgttgttgagacggagtctcgctctgttgcccaggctggagtgcagtggggcgatctcggctcattgcaagctctgcctcccgggttcacgccattttcctgcctcagcctcccaagtagctggactacacgtgcccgccaccacacccggctatttttttttgtatttttagtagagacggggtttcaccgtgttagccaggatggtctctatctcctgacctcatgatctgcccgcctcggcctcccaaagttctgggattacaggcgtgagccaccgcgcccagcccccaagctattcaacttttaacacttgaaagttttctgtgtttacttgactgttggaataacatttttttttaacttcatttgcatgtaattattggtagagctctaaaatacctgttctacctaattaataggtctcttaatgcagcagttataatttcttataatcacagtatatttgtattctaagtatacttagactataagttttcttttaaatgaactacagtttttaaaagttttctttattagtttcacatcactcatttaacagccagctgaaagaaacattggttaatcgagatcgtgagataaacagcctccggcgccagcttgatgcagctcacaaagaactcgatgaagtaggaagatctagagaaatcgcttttaaggaaaacagaagactgcaagatgacctggctacaatggcaagagaaaatcaagtatgaacacaaggcataaattttgatagttttatactttccattgtttgctaaatattaaagctctaaatattttttctaaaatctgatgatataaaaataagtgacataaataattcattaaggacaatggtgtttatcagggtattaaaaaatggagcttaggccgggcgcagtggctcacacctgtaatcttagcactttcagaggctgaggtgggtggatcacttgaggtcaggagttcgagaccagcct

SEQ ID NO: 111571 - DNA, 1086 bp, Homo sapiens
aggctgaagcgtgagaatcacttgaacccaggaggtggaggttgcagtgagccgagattgcaccactgcactccatcctgggcgacagagcgagacgctgtcccaaaaccaaaatatttggcttatacatctgctgcttttggaaatttaggagactgactcgggagaaacatcgtgttgggaggtgcagacctgtatatcttcactacagaggttgtaccgtgggagtaatgagaagagaaaacgttaggaaagcgcctacagttgaggaatggacagaggagtcagtgaaggagaaagtgttctcgggagaagaagaggtggctgtgtcttatgctgtagattaggaaaaaggactctaaaaaggctatgagatttgacccacatacatgtattgattactttgggagagactgattatgtcatatttttagaatagaaggatttagacatatttgtaggaagagggaaagaaacccagagtagagtacacatggaagaatgagcttttgaaaggtattaaaaatattaatatttctctttccaaggcaagagtcaagaaagagccaatgaagacactttacatcttggtgttaccatttatgtctcgttcaaatttgtatccctagcattgctttagtgcttagcacataatagatgttcagtacatgtttcataaataaactaaatgaatgaaaaagaaaatgtgataaaagctctagaagtttagagaattcttgttgaaaggtcttgatcttctctttattaatttaaaaaacccacagcacctgactctacaaaacggaacgtttatttcttgattttttaatttgtttttaagaactagtcaaagccgggaaaacaccatgcttcgagctaaagtggcacagttacaaacagattatgatgctctgaaaaggcagatctcaactgaaagatacgaacggtaagacaaattttttttacatttgacaatgtttttatgtgttctctattgtacttcagaaagtatttaatatggctttacaaataacaaactttttaaaaagctaatacataaagtacatttctttggtaattcttcct

SEQ ID NO: 111572 - DNA, 1066 bp, Homo sapiens
ggtggcacacacctgtagtcccaggtaccagctgctggggaggtgggggaggatactgaggcagggggatggcttgagcccggaaggttgaggctgcagtgaactgtgattgcactattacagtccagtatgcatgacaaagcaagcagctatctccaaaaaaacaaagagttctcactatcttgcctgggctggcctcaaactcctgggctcaagcagtcctcccacctcagcctcttgagtagctgggactacaggctggtccatgcattttatcgtatataaattatacctgaatttaaaaagagaagacatctacagcataacgttaaatgacaatatgagctatcacaggatattatttgatgaagggctaaattcaggctacaaataataggtagtaaaaatgtagacaaagcatagaaacagtagtacacatggtacagtagtaacctggcaggaagggcaggctgtgggggaataatgagggagagaggtttggaaggtagagtgggatatatagagtattatattgaatgtgaagctaaattagagattgtggactttattctgtaagtcaaaaggaacgtgaacgtcagtcctcctgtgtataggatgggtacaagggaagggtcaagatgaaataactgtttctggtagattaatttcacaactgtgtttgaaccatattggaaaggataggaactagaggtagagagaccagtaagtggtatgaaatgagcagtataatagttcaggattagtataataacattgaaagctaggacataatttttaaagtaaaccatgaaatatatacagaaaggtaccatatcatagatacatagttcaatgaattttttcaatgaacaaattgaacacatccaggtaacctgcatgaaaatcaaaaaaaaaaaaaaataggccaggcacggtggctcacacctctgtaatcccagcactttgggaggccgaggcgggtggatcacttgaggtcaggagttcaagaccagcctggccaacatggtgaaaccccgtctctactaaaaacagaaaaattagctgg

SEQ ID NO: 111573 - DNA, 1427 bp, Homo sapiens
tttcttgttataatgcagtatcacacagactcactgaggaaacataaaatacagagatatataaataaggaaacaaaaatcacttttttaaacaaaagtataagccaggcagggtagctcacacctgtaatcccagcattttgggaggccaaagtgagaggatcacttgagttcaggagtctgagactagcctaaacaacatcgtaagacctcatctatactaaataccaaaaaaaatgagccaggcatggtgatgtgcacctgcctggaggctgaggcagaaggatcacttgagtatgggagatcaagactgcagtgagctatgatcacgccactgcactccagcctgggcaacacggcaagaccctatctctaaataaataaataaataaataaataaaataaagtacaatgaataaaacagtacttgaactttcagaagtagaacagtacttcttaaatataactggatgtggggcacagagttttattagattctataatttcatttataacattattgaatttcagttttttatgaatatgttgaataactttatcatttttctcttaacccacctttcaatttcctccctttcagaataatggctttcaatgagttcctatgtggatttttaaaagaacagaacagtaatgaaatatttgaagtacttgttgctgaaaatcatgaacatggacacaaattctacctctgtcaacttttatttaaatcagtgaatatgttaaaaagtttggtttaaaagaactatatctatatgtatattttcatatatatgacagaacaagaatatgtattaatagtgcctaatgtatctatatttttattattcatgaattaaattactaaaagtatgtttatactgtgaattaatataatgtattcacattattctttaataatctgtttattaataagccatgatatgtgtatgtaaatattcttacagtacttgtttttagttgtcatgcctatgtttagaccatatcttaatgtattcacaaagaattatcaactttgatgctatgctgtcatgcttaactttttcttcttaaaattattcatagatctactgtctgttgtcaaggggaatatattcaggtctagtcttcttataatagcagaggtcttggtaaaataactaccatatataacgtgttattgccatctagaagaactatgatgagaaagatacatttatatattatgtaaaatgttaactatcatcatatggactctatgtaacacaaattcaaaagcaaactaaaagctatatgcagagttttgtataaaacaatagaacagaaatttgggacatttttctaggaaataaaattcctcggtgtattaatctaaggtttcaaagtataaaagtatatggggtaggccgggtgcagtggctcacgcc
